United States Patent Application Publication US 2014/0057251 A1 - sequence listing, part 80

SEQ ID NO: 126500 - DNA, 1628 bp, Cannabis sativa
atttttgaataatggcttgaattattttattcaccaaagagggactttttataaatttgactttcaacttatgcatccaccaaatgttgtgaatgcataccctgttatagacctttggtgtctatagttcctgcataatcagagtcaacataccctgcaatttaagtgtcaaacactgcattattcttgtacatcaatcctgcacttgcagttcctgttaggtacctaagtatccacataactgcattccaatgttctttgcctggatcaaagaggagccttcttaccatactcaatgcataagccaagtcttgtcttgtgcacaccatgcaatacatcaagcttcctacacatgaagcataaggcactgtgtccatattgatcttatcctcttcttttgttagtgcttgatcttgtgacaacttgaaatgtgaggctaattgtgtggaaaccatcttagcttcactcatacaaaatttattaataattttttgtatgtaccccttctttggtagaaacgctttctctagtctttctatcttgaattcaattcctagtatttttttagccactccagtttttttcatttcggattctgaactaagctaatctttcaacatgttaatggtctttctttccttcccaatgattgtcatctacatacagtagtagcccacatggtgtactattgtagtagacacgtgagtcatattcactcctgttataactagtttgcagcatgaattcatggaacctcaagttccattatctgggaatttatttaagtccatagagggacttttttcgaaagcgtacttagtctagtttcttgcttttgtgtccatctggttccgccatatagatcttttcttcaagttttccatgcaaaaaagcagtcttaacatccattttatccattccataccaaacattgacacttttgcaatcattatcctgattgaagtttgctttaccacttctgagaaatgtcattacaatcaatgcctttctcttgttgaaccccttttctaccaacctagctctgaacctcatctcttcttcttaaaaaccttctttgtgcatgaaaatctatttgcaacctattaccctctgtccttttggtaaagggacaacaatccatgttgtattctttctaagtgagcacatctcataatttatggctttgatccatttctttatgtgcttaccagtaataacttctctataattagtaggttactggcaatcattgtttataatgatgagtaggtcaccagtaataacttaaaataacataaaaaaattatgaagtttcaatcattgttataaactttcatgtggacaataataaattgttattagcaaaaaaatatcaaattgtatcacattaactttaaaagaaacacataactcattaacatggctgacaaaaaaagaaaaaaaaaattaaaaccagttttagaaaaacataactcatactctaatttaataagttgtctaagtgatttgatttgatttttagttagcacttagggcccgtttggcacaacttttggaaaagctaaaagctgctttttgaaaaagctgtgataaaaatgtatttcgtaaacagtcaaaaaacaactttt

SEQ ID NO: 126501 - DNA, 2419 bp, Cannabis sativa
cctgccatactgtctttggtgttcaaaaatacccttcttaggaccatatctcccataaagaatttccacgctctcacttgtttgttaaaatactgatctactttttgctagtgggctattagttttaagtttgatgcggttcgtttttcttcaagttcatcaagtgattctacgaggagtacatgattggcttcttggctatatgttaatcttctgtgggatggcggttcgagttctatgggcaacatagcttcatatctatatgtcatggaaaatggagtctgtccggtcgctgttttcttagttgtgcggtatgaccatagaacttcaagaagttcctccggccagtttcctttagcatcttcaagtttcttctttaggtgtccttgagtgtcttgttgactgctttaacatgatcatttgcttggggatgtgcaactgctgagaaacgttttatgatcccatggttcgtacagaaatcagtgaaggactgattgttaaattgtttgccattgtctgagactatctcgtatggtaatctgaacagaaaattatgtttttcacaatgaaatcttgcacttttttggacgtgatggttgctaatggcttgacgtccttccacttggtaaaataatccattgcaacaactgcgtacagtactctgcctttgcctctgggtaactgttcgatcaggtcaattccccaaatggcgaaaggccaaggactttgcatctgagttagttcgttgggcggtgcttgaggtatcttcgaaaatctctggcatttatcacatttcttgacgtaggccgtggaatcttcaaacatggttggcaagaaataacactgccttagaattttcttagataaactctgcctggctgcatggtggccacaaaattgatcgtgtacttctgaaaaaaatcgtccaacttcttcttatgtgacaaacttgagtaatggcgtcgagaatcatcttctatacataactccctctaaaatgatatactatgcagcctttctccttattttttgagctttgtttttgttatctggtagttctccagtattgaggtagcctgctattggcgtcatcaagtttggggatgtatccatcatatcaacctcttccgtgctggtgatactaggtttttcaagaaattggatggggattagattttctttatcattcatgttgctgctcgcaagtcgggctaatgcatcgatagttgtgttttcttcgcttggaatttgcttgagagcatagcttttgaattgtgctagcagatcatgtattttgctcggatatgatatcatcttttcccctcgagcctcgtactctctagatacatgatttaccaccaactgtgagtcactgcagatctcaatgtgtccggcttttgtttcctgagcaagtcttaggtcggcgataagagcgtcatattcagcttcattattagacgccttaaatcagaacttgaccgcagtgtacaggtgttggccctaggtgtgacaaggacgattcctacgccggacaactgatccgtagctgacccatccacatgtagcttccaagttggcttgttttcattattgctcggctgacgtacttgtattgggtctgggttacttttgaagttctctcttctttacccatgcattcaactacaaaatttgctaagacttgacctttaatcgttgttcggggctgaaagataacttcatactggcccaactccactgcccatttgagcaaccatccagaggtgtccagtttttgcaatacttggcgtagtggttggtcagtgtatacccgtacagggtgagcctgaaagtagggccttagctttctcgttgctaagattaggcaacaagtgagcttttctatcaatgggtaccggccttcagcttcgatgagtcttttgctgatgtagtagaccgggtgctaaatattgttgtcttctttgatcagtacggcacttacagcatgctccgttatagcctggtatattcctaattcttctccgtccaaaggttttgagaggacaagaggttttgcgaatttcatttttagctcttgaaaagctctttcacattcctccgtccattcaaattgcttatttcctcgcaagatgttgaagaatgggacacacttgtctgttgaccttgaaataaatttgctgagtgcggcaatccggcaagtcaaactttgatctgccttggtttttgttggaaatttcatatccaggagggcttgaattttctttggattgtcttcaattcttcgggcgttgacaataaagcccaaaaatttatctgagctgactccgaaggagcactttaggggattgagtttcatgttgtatttcttgaggattttgaagcattcgtcgaagtcatctatatgccccccagccttcct

SEQ ID NO: 126502 - DNA, 936 bp, Cannabis sativa
  modified_base (133)..(138): a, c, t, g, unknown or other
  modified_base (206)..(223): a, c, t, g, unknown or other
  modified_base (877)..(891): a, c, t, g, unknown or other
ctctaagtttgatgagacctcttccttcttcttcttcttcaattcaaaacaccatagcctctttttcacaaaccaaaattaagccattagtgattgagtacacgcccccataacaagttggtcctcaatcatnnnnnntaagactgtgaagaatctaaacacaaggaaggaatttcgggctcagatcttggtgatactctgttacnnnnnnnnnnnnnnnnnnagagatctgagcggaatgagtcatctaattttgctgcaaccactgtaaggtttctcaaactttatatgtgtttaaattacattgttttagaaattaatatttaggatgttaaataatatacatggtagtaaatctagatcctggtaaaatataatccaacacctcaatgcttggccgagtgaatttcctcactgcttggccaagtgacttttctcaatgcttagccgagtgactttcctcaaaccaaggctaagtggcctccctcatgccatggatgagtgaccatccccaagccatggctgagtgaccttcctcaagtcatggaccattgactttccttaagccaaggtcacgtgaccttcctcatgccatggtcgagtgaccttcctcaagccatggtcaagtgaccttcctcaagttgaggctgaatggccttcctcataccatggctgagtgaccttcctcaagccatggctgagtgtccttcctcatgccatggccgggtgaccttcctcaagccatggccgagtgaccttgctcaatccatgtccaagtgaccttcctcatgcaatggctgagtggccttgctcataccaaggtcgagtgactttctcccaggcatgttgggacacatattgttggaaattattttannnnnnnnnnnnnnntactcacaagtatgttgattaatatcctaaatatgaacttctaaa

SEQ ID NO: 126503 - DNA, 1114 bp, Cannabis sativa
aatttatatgtaattaccacctcatatccaaacacaccttgcattttaaaatatagtgtaattactaaactgtgtaattaccaccctaatatataataccttacctagtaattacacagttacttccaaacacatccttaatttcgaaaggggtcaaaatgttgaagaaaaaaaaagattgaggtggactaaacttctaatttctatataaaaaaaattgcactactattaaaataatattaaacatatatttttgtttttaaaattttaagtggggccaaagtctacttcgccctaattggaacgttgtaattttttgttagtctattgtttatctcactacaacaatttatatttttaatgaccctttctcgtgattaacacgattagcgtaagtcgtgaaattctttaggagatttttcatgtccaacaatgttggtcatgaaatttgtgcagagtcataataagtgaacacattaattgtttttgttattactttttaatttttgagtgaggataacgttcttctgtgttggacgtgacacgtgttctatttaatcaaaaggaaacattgagtatcaatgcatattttactctaattattactattattgttgctgttgaattattattattgaaaatgaaacaattaatatatatagtttctctctctaatcgtataccaaaaaccaattaaaaaccctaataaaggagttgttcttcatcatactccctttcttcccttcttcttcatgcacaaatcaagcatgtcccttgtgcttcttctcctttgacgatgatcctcgataattggcctcttatggtcgtctgtggttcgcttcaatggatttctttctaaatcttatttcgtggtttaggtgcctcctttctctcattgcttcagctgacctcaaatttgaccaaccgacaacaaagttgtatatatgatcgaaatcaccacgtgtaaacaattagagcaagcaaataaaaggacacagtaggtttatagactttcaaccccccttagttagcgggtaacgacctacttcccttttagttatattgatatgagagataataccactcaaatcacaagtgttgtgagttctagagt

SEQ ID NO: 126504 - DNA, 1419 bp, Cannabis sativa
  modified_base (440)..(440): a, c, t, g, unknown or other
tagttttttatataaaaaaaataatattatttaaataaaaaataatatattttaataattcacaatatattcaatattattctaaataaaaaatacaattgaaaataaataataaacatcaatattacgacttaatctttaaacaaatatgtaataataatagtctctaaacaaaaaatatgtaataataatttcaatacaacttaatatctaaacaaaaaatgtctccaacctcagcacagtgatgttcttcttcacagtaatggtcttcttcacaataaaaaaaaactcagctggtcttcaagttgctcatattagattttatctcattcttcttaaatctcaatgattttttgaaatagaccaacacaaaaaagaccaaccgaagcaagaatgcattcacatggataaataaaaatataaaatcttttaaaattaanacctaatatgaaatagactaaaagagaacagagtacacactgaaaatttaatgggtgggagaaatatttacacagtcaagaaaattgtcagtaaactaactatatatttatatagttagttgaaagtgagaatttcattctatgcttaaattttaccaatcttcttgtacatgaatccattagagattttggtaatccataaacggagatgacgactcaactggacccatcaaaatctatggattttgtttccggacacgacttgtccgagaacacaagagatggagtaaccccgacgatgaccctgatccaaccctcactgtgtaaagcccgtcaccatgtcatccaccaccccctgcgcaaagcccgtcgacgtctcctccaccgtgccctgtgcaaagctcatcatcgtctcctccattgctgtgtgcgactaagagaaagagatagaagctttgagatgtgcggctgtgagagatagtgttttaaattaggttttctcattatggttagaactttttctatatataccctaattaatgattttattaattatttatttaaaataaagtaaatttgatacaatatttaatttcatccaaattaatgattttattatttatttatttaaaataaaataaaatctgataaaatatttaatttcaccttaattaatgattttattatttatttatttaaaataaagtaaaatctgatacaatatttaattccaccccaataaataattttattatttaattatttaaaataaagtaaaatttgaaataatattaatttcactctaattaattattttattatttatttatttaaataaagttaaatctcataaaaaaattacatgttaaaaagtatttttcccaacagtttataactatagggaatactaagggccagtttggcacagctgtgctgtgagaaaaagcagttgtagttgtgctgtgagaaaaagtagctg

SEQ ID NO: 126505 - DNA, 805 bp, Cannabis sativa
aaatgtttaatgggccggcccaaattatttttgtaattattatttttgtaattttttttccttttttgtatttttttgtttttttccctaaaatttatgaaaccagatattaaaatatattaataacgatatgtcttttgtttttttggtgtttggcactaacgttaacattttttttatatataaactgtaaacattttgtttttcaatttttttatttttctcttatttatattatctacaatcaattatatttattagtaattttttttataaatttctttaattcgtttttattttacagtatacatgtaaaaggatatatataaatatctttgagatatgtgtattttataatttaattattttttattagtaaaatttgaattaaatatatcattttagataaacaattacatattaaaatttcttcaaaattataagtgattttatacagtaaaatttatgtggaatcttgtatgacaatacttgagtataataatattttttgtataaatttatgtttatttttaatattttttattttaaatgtaagaatagagaaaagaaaattgtgtgaaaagtagaagaatggagtagagagaaaacaggggagaaaatgtaaaatgactctgatttaatatcagagagccctgctgctatttatattgaattcaatattaagatgagttagttacagatgtaagccacagctgagaacaggaaaccaatacagttacaactggaaactgacagtgtaactaacataacagacaatagtaactaacttatcctaatacccccc

SEQ ID NO: 126506 - DNA, 593 bp, Cannabis sativa
tttaatgcatttaattaaatggaaaattaatatttaagttaattttattcaagacaattaaatattagatattttttaagaaatttaattagatagaaacttatatttaagttgaaattctatttcagaacaacttaaaattagaaaatttttaaaatatatattcttttattttattaatcattttttccattaaattttgaaatgaattatttaaaatgtagatattttcaaattttgaaaaataggttaaagtagaaaattaatttattttaattaattttggatcaacataaatcaagttaatttttcgttaatgatttattaaaagaaataaactaaaatatattatattttaaatagaaaatatgtaattagttagtaaaatatctagattgttattttttgagtagacttttggttttattgtagatatatttaattaaatagaaaatgaatttttaagttgattttattcaagaagcttaaatatttgatatttttcttaagaatttaattaaataggaaaattatatttgtgttgaaatttatttattaattaattttatattaacataaattagaataatttt

SEQ ID NO: 126507 - DNA, 652 bp, Cannabis sativa
atgtgaagaattagtgctgacgatgcagagagtttttacagtcagcatagtggtccctgccactgccacttgtcatcagctggtatcaaaccagatttgggaatttccatgaagatcctaccgttataattttctaatgattgcaatcattgtataaagcagattccttttttattttctgttaagatttgctgccagctgtaatagggtaaatacccttctctgtattttgcctaaaatggctccatctataaattcaatgaaaatctctcagcattgattgagctgagatttgcaatatcatattttcctaaaattcaacttaaatagttcaaaagaatttttaaggacaaaataatgttggagacaatatcatatagagtttggaataaaaatcttgattaatagccataataatatcaatgcatgcatggatgcaatataaacatttaggcaagcatttttcttttggaaaaaacatttaatgaattaggtaagcatttaatcatgagttcaccagttggatgggatccaacaagcccctcgtgcacacacacatatatctatactagaagaaagttacgtgcaatgcacgtatacttagttttatgttaagtgctctataatttaattgagaaagattcaataaata

SEQ ID NO: 126508 - DNA, 1770 bp, Cannabis sativa
tcagcataatggattaccataaataacgtcgtggcaataactagttagttgttgtttaaagtaggtgttgtgtccatataaaagaccataaatttgtttgttttttttttattctgaaaaaaaaaatcatattatttcattattgacacttttaaaaacaaggataatatcgctttcaattttgtaagagtttgtcaatatcagactactcatttatttctctaccggaatctcgcctaatttatttccactgtaaacattaaacaagctttatttatttcaaaaaaaaaaaacaagctttattattatttatttttattctctaacatcctcttcaaaattagatggtagttattttatttactcatcattttggataactccattataagcggttctttttactctactttttggattggtattttaggtggctctttttattttcttaactcactattttcgaataacatgtagttattttttatttactttggctcttggattaatttttttttttttggtggctctttttgtggttctatttagatacacttttttagtttacttatttatttatctatttttaggtcgaatactcgtcagagattttatttttgtttgattgctctgatactatgttagaatttgcgataagatgaatgagattctatcacaaaatcaattgacaatgggaggagtagctcattcatcttatatattctattatttttctacaatttagcaatatgtgactctctaataaaattttctatcctttctactctgtcagaattttttataataaagtaatctgaatcacaatataaataaacgtcgaatggatatacagccaaacaagttaattgtctaaccaaaagatatacaaggtcaaaatatgaatcgttttaaacaaaacaacttatataagaccaaataaccccgagaattcagacaaaacaattgaggccactcaagcaagcaaaccgaatgtaaaacagtgattgagaccccaaaataatcaaatatcatgaaattttatattataataaaatgtccaactatttttattttttttatcaagaaggaacaacttcattaatcacaagtgttatacccgaaattcggctaccatctcagtggaagacatgtgtcaagataaagagaatatggatcgatgtgatcacttttaatgtaataaatcattaattgcataagtatagcagagcatactggcaactcgctgagtataaggtcttatgcaagaaaaagatatgcaaactattgtttggtatattaacaagaagccatatgtcattgaatgcataaagcgaggcattcaactctgttataatctggggaaggatgaaagcgacgcatatcgactgtgaaaacacttagcaaataatgtacaaactaagtataacagtcgggtcggctcgaaacctaataggcgaggtgcttatctcgctataggaaagctcattcctataactttccccaattaacttcagacatcttctcagcgagatttaaatctcgacgagtcagaagctaacattcaaatgagcctcgagaaactctctgttaataaaaaatgcgattgtcacaaattaagcgttaagctttcaaataaagaagcaacaaggcgtacattgtcgacctcggaaggataagaaaaaaggctccagctcgctatcatagtcactggaaccaagctcctgtcgagacatccctgaacgatacaattaaagacgtgttttaaataca

SEQ ID NO: 126509 - DNA, 1201 bp, Cannabis sativa
  modified_base (26)..(34): a, c, t, g, unknown or other
ataaaatggattacattgaaatggannnnnnnnnagggcataaaacccaacagatcgtatactggccttcttctgttaggcctttgactttggtggcatcggccatgaacctttggatgtaatcctataaagttttatcttgtcattgtttgaccttgacaaggtcttccagttgttatggtattagcctcgaggatgaaaattgtgtctagaattctcgagaaaactcattccaagaattaaatcttcttggtgccaacttaaagtaccattgttgagttgtttccaacagggttgctgggaatatgacattgcacattgctagtaattttttggagatcaagttgcatctcgaaatacttgatgtgttccaatgggtcttctcgcctagatacatcttccataccggcatcttgaacttaggcaagggcaagacattaatatatgtcgagaatggtgatccccttgacatgtctaattcaagatctgaaggttttgggctagctaggcccttgatcatctcccttaacttgtctagttattgtaggttggtccttcttgaatgggttgcatcccgaaatgtgctagggtctggccaaccactccttgattgctagactggccttggccggccagctccattatgggcagctcttggtggctgaccagtcctataccaggtagggtctggctgcatattctccccgattggctagtgtagtctgtgcgttgacatggggtagatcacatcagttgctagagttagatggatcaagatacctgaagtgactagactcacttctcaagttgtttttttttatgtgcttccacgcattcatagatctagtagattgtagattggcctttgggttacttgctcccaaaggccccaggacggaagttcactaggctggccaaaggtgtaccgccaaggggctggccgaccagaggttaacctactaggggtgttgtagagcctgagatccttggctggccccccagacaactggttgtcgagatttggctgttctcgccactagaccttcgtggaaaggcttatccttctttgggtaagggaaagtctgtcccggttcctcaggaatccagttagacagtttgtcggtagtgttgggttttgtgccctaaataaaaatcatttcaatataatcagatttacttattaataaaagatcggaagagc

SEQ ID NO: 126510 - DNA, 2768 bp, Cannabis sativa
tctctctctcttctacatgccccaagcattgtagaagaaacgaagtctctctcatctctcttacttgagatttgcctactgattctcattattgtaatcttaagagagccacttcagaatccacagtacttgtgatctgagtggtattatttctggtatcaatacaactaaaagaggagtaggtcattacccgctaactaaaggggtttaacctctataaaaatattgtgtctctttatttacttgttcttattgtgtaaacgtggtgatattagtcataaatacgaatcttttatcggttggccaaatcttaggtcaacaatttggtactttcattgtgagtgttgttgattgatctgatatatcaccatggctgtaacaaggagaacttcggctacaagtattgcctcatcagatcttcctcaagaccccatgactactaatctcgatgttcgtgttctagccaccactggaatctccgtgaatctgacggatttggccaaccttgccaacccgacaggcacaacaaacttgaccaatacaactggtcaggtcgacattgccaactcggttggtcccaatgaccagcctctaccgcccagggtaaaccctccattggcaccttgtactgagggtttggccaacatggagcaacccccgggcaccacaactaactctggccctcggtattatacttgggaaataggaccaggaattggcgagcctcacgtggatttgggagaagatttcgaattggctagacgtagagaggttgtttaaaatccaagaaaaaaccatttaaatcgacctattgaacaccgttggaatcgaaactgacaaaatcaaaaactaaaaaaacgctaacggttaaaaccgacctaaaactgccattgaacggtcggttttttttggtaataaaccgaccgaaaaaaccgaaaccgaccgctatatatattaatttattaagtttttttttgcatgtattatagttaataatatttatataaaataaatatattattttttttcttaatattaaagttaaaagaatacgataattgtttttgaacaattaatttatatgtttgtagttgtaaaatgtaaaatgtaaaataatgcatttatagaataaattggttcatttttttttttttaaaagttcagtttgggcggtttaaactgaccaaaccgaggttcaaaatggtcggttttaagataggttctggattggtaggttggttttcggattgcaccaatccagaccaaaaattgaattttagatttctatatagagaaaaaccgaccaaactgaccgatgcttagccctagctgcactgaccaactgtccacggcatgcactgccctcattagacctgggggcaatagctacacggggcaattaaatttggcttcaaagcctctaacaatgaggttgaatatgaagccttaatcgttggccttaagctagcgcatgaagtacgggctgaccaactagaatatacaattactctcatctagttgtgaatcaagtcctaggtgaatacacaactcaagatgaaagaacgatagcctatttgagtaggatccaagacttgctaagtcagctcaaaggctatacaataaggtagatccccagtagatgttgttgcccgtctggcaagtagaaccattgctgacaaggcaaacttggagccaatacagttcttgaaagaacgtagcattaccatccctgaagaagtcgacatgttggacagtagtctaacctagatgacacctattgtagcttacctccaaactggagtcttgcccgaaaacaaaaagaggcaaaaaagatgagaagaaaagctgctaggtttctaatcctagacgaagtaatgtacaaacggggcttctcaatgccactgctaaggtgtgtcactatgacagaagctgagcatttgctgatagaagtgcatgaaggcttctatggaaatcatgttgagggcaaaacctgtctaaaaagatactccgacagagatactttggccaaccatgattaagtattcaatttactatgttaaaaaatgtgacaagtgccaaagattctcaaagatcccgagagctccacctaacgagctcacaatgatgtagtctccttggccctttgccatatggggaatagacttgattagtcaactctaaaagggaaaaggatgggtgcggtatgccgtagttactgtagactactttaccaagttggtagaagctgaacccctgacgataataacttccaagaaagtcctcaactttgttgttaaaaacatcatatgttggtttggactaccacataagattgtgtcagacaacggaaagcagtttgacagtgacatgttcactgatttttgcaactggcagtatcattaaaagcttctctgccatggcccatcctcaaacgaacgtgcaggtagaagctatgaacgaggccctcaaggacactttgaaaaagttccttgaagaggcaaaggccattgtctagaattgctcccagacgtcctttagtcgcacaggatcattgagaagaccaccaccgagcaaactccatttgctttagcttatggctatgaagcgatgttgctcgtagagctagtgccactgtctcacaagaggataacctatgaccaagaggtaaatatcaccttgctggtggagtcccttgacgaagtagaagaaaaaagagaccaagcctgttgggttttatgccctaaataaagctccatttcaatgtaatc

SEQ ID NO: 126511 - DNA, 1858 bp, Cannabis sativa
  modified_base (1804)..(1809): a, c, t, g, unknown or other
aactacaaaataaaactagaaaacaaacagcgcataaaagtaaaaacacacaagatttttgtacgtggtatcaacaatctttgcagattgttactagtccaatgggtcacgcctagagataaaattcattagataatctcaaaaatataaattaattgacttacgcataaatagactctctcttattgtatgccacaagtttgacgtattctaccttctaattgaatcttgttgaaacttcaagtgctcgaactcctttcgatctccttgaagagtgcttatttcctcccgaggcaaaacttgaaaaactatcttccgatagcttgtagaaccttctcccaagagtagaactgttgttcttcttcttttgtagatttgattacagactcaagacaatacaaaatacataaacatagagagagacgaacactctcttctctacaaagcaaagactatcttttttaaagatatgagtgaaatacaaagatgtgaaagatgtacatgacctagctgctataaggtatatttatagtcaatatacaccttaatgtcagctcatacacggtctgaaacaagatcacatctcacttgaatactttcctaaaataattcttctattagcctagaaattttctattctatacctacagaatcgtgagcagtaagtgcgacttttattttataaaaaatgaaaaccttgcatgcttcggttttcttcacaacaaatctgatcaaacattttaggaaactcacaaaatatcagatatacacagttggatagatagatattggttatcatcaagcttaccttttatagctcactttccatatatagaaaagttagtcatatttatttctttatataattcaatcaatacaaaaatatagaaatcaaataacaattcagttgaaattaaagaataaaattataaaatatttttatcaaattaaagatgctctcctgtatcacctaaataaataccatgtcacctcgtgcataatttaggacaacatgcatctaggaaaactttttagtctattttttttatgattgcatacgttgtaactatttaagactacttttaaattttagaaaatttcagataatttatcgtgttgaaaataaaatttaaacaactatttaccacatgtataagaaaaatagtcacgtgtataataaaatatataaattttattttcagcatttaaactacttataaatttttaaaaaatatatatgcgatcgttaaagaaaaaaaaaataaattaaaaagttaacttgaatgccgaaacagataaaaaacataccgaaacacccccttataagaattgcactatagacttatcctataatttttacacataatgattattatcgtgcattttcttttaactaaagatagtttcaagtgagaaccatatcacttatttgcttatatataatcaagattaatagcgtaatttaagtatgtcacaattatcatttatataaaatgtttaaccactcgaaaactaattatcaagtaatatggatatatggaatgttgggacaaattgaaacagatcgatttgatgaggacaataactaattaggatttggatagaggggaaagtattgggttgattggttaaacactctaaattagttaatgactataaaacattcttattgtcaagttaacatacatataattagaaaaaatatgtataattagatttgaagtctatttaataaagtatttacacgtcaaaaaaaaagtattttttttttctcagtgctttactatggtggcgtttggtaacnnnnnnttaatcagttttctgtttttaaaaatagaaaagtgaaaatatttttcaa

SEQ ID NO: 126512 - DNA, 1546 bp, Cannabis sativa
taccgagattaaaagctgcccagtcagcctattgtctgaaaaataaaaaataattccaagtttaaagaccgcttggccggtcatgatgtcttagaaagggccttatggccgaataatatacataaaaataaaaagataaaaggagaagtgtttaaacagctggagccccaggctcttggttcgggtcttctgggccaatggaagctgcacgatctattgtttgaacgggaggtacatcagcattttggccggaggtagaagcagccacctcagtttcaccataggctacttgggaagcgcagaactcatggtacatgtccttagcatcacccaaatagtcaaagtttgcgtgaggattagccttccaaaagtcatagaagagctcaagaccggctgtctccagagcattaaccttctctttcagcttcgtcacctcggctgaaagctcctcctccttagacttcttctcctcctgtactcgacaaataactgctcgaagagaagtcctctcatcttgaagactattcacttcagcagataagttctcgatggtctcttcaagacggtcagaaacctcgagatccttagtcaactcagctatcttcttcttggcggtaaaaagcttcttgttggcttcacccagctccaagttttaccatggcatcgtcagcgtccttcttggccaagtccacctccgccctgatggtgttggatagagtcgtgttcctggaagcagcagacttagcccaggagtaggtgtaggccaaattcagatcagcctgcacaaaggagaaacttcagtatttgagccaagtaaaaaaggcttaaagaagatggtcaaggaaatcttaccctggtgaattccttcaagactcggcccatcagcagctccaaagaagagtcgttgtcagcgccggccagttgctcactaaccttaggaaccaaccggttcatgtagtggacaagcatctctttgcctttcttggcctctggaagcaccagcaaaggtggattaggggcccgcatttgtttgggtccactcttagtcagctcagacccattactcggttgttgaggcccgtccgaactccctcctcggaactccttggacttggcaagttttggagtagagggttttgcaaccgctagctccttagaaagatcaatgacctccccaacaggcgtcttttccttggaagaggacccctcaccgcctttagacttcttgggtggaggggatgcgttggagcttccgcaaattctcttcttcagagcgtcaagcatcttctgagaaatgtctgcacagaacaaaaacaacatggttagagaaaataaacatcagaaacataaggcataatagtcaagaagcttaaaaatgagatgaagtaatatgcaaggtgattgcgagaacaagcctcaaaagtccatcatcacctaacatgcctcagattttggacataatagctttcccttttccaagcacgggagaaggcggccgagcaggcgagatgggctccctaatgcgaattgcatgttcaataggcct

SEQ ID NO: 126513 - DNA, 508 bp, Cannabis sativa
tagagatgtcacgtagcaaagagtgccactctaggacatcctatctgtcttagacttgaaagggttgaactttggaaaaaatggggattcttaaaggtataataaaaattgattacacgccttaagttatgttaggttgtatcatttgactatatatgaagaacttgtaaaataacgcatttgaaaaataaagattatattgaactaatttagtgctaaatgttaattttataaaagttgtctaacctcagattattgtgagattactcctttgaattgttcaaatgcacatatcttattccccaatcctatggtattggtactatgtccatgcttggattattgtcgtatctagatcattgcatctttcgtcaaacacttatatattattccaagcaacaccctgcaataatcgaggtgcggtcgacgactccttcgatgcttaagtcagtattgggatcttattgtaaaattcaattgattgaaacttttttacctgacggtcaat

SEQ ID NO: 126514 - DNA, 821 bp, Cannabis sativa
agctatcactaacttcctcaacaatactaaaaacagatagtcttttcacagtccaagcggttcgtagtgaactcattatgaattctatttttgattttctagttcgtgattgccaagttctcctttcttctttaaattatgttgatttaaaatttattaaacggtctgccaattgtattgctcactttgttgttaggggctctcaattcttgcctaactggctctttttgtatttagattcatccatttaaatgaagatttttttatttaaaaaaaaaaattgatattttccaaatatatatcaactcaataatagttgaatacttgaaacaattaaaaacattattacattcagctagaaaaaaattaaaatattattattatttttaaattaatcaaatatgttacattttctatcaatttattcatagaaaattaagtatttaattgtaggtaaaaactattttggatactgtattttgtaaaagttacaaattagaccttttattttattaaatgataaaatgaaccttgtgttttctaaaattttataaataggacttgaactgattttttgttaaaataaaacttaataataataatatgatctagagatattatgataaaactggttacattttcagtatcttagaaattatcttaaatttaattatattaaaaaataaaattattgaaaattaaacttaaaattttattattatcattttaaaaaatataaaatctattttattatttaacaaaatagagattaaaattagggaaattttatttacactccaaaaaattctaaaggcacccca

SEQ ID NO: 126515 - DNA, 998 bp, Cannabis sativa
ttgtattgtattagtattttttaacacaatactatgtttggtattgacttgtattaatagattgtgtgcaattataatatattttcaataaacttgaccctaacactaacttcgggtctcgagtctaggtctggggtccgggtccaagtcccgatctcgtgtttgggtttggatttcggtccctgaatccagatcagagattgggtttgatcccgaatcctctataaatattataatacaaactaatacaaactatttattatgtattaaataatacaacttacattgtattaagattttttagtcttaataattaatataatatattgttttatctaaacatagtattttttattatttaatacaatccaactcttatacaacctaccaacccaactcataaaatctaatctaaatacatgataacctcgttttctgtctaaaatgtatatctatcattaactatcaccccactacatacatgatacaaacatacaccttaaaagataagtaactaggatttaaagttcctataaaaaaacaatcttattgaaaaacaactggaaacctaaaactatcaaaataaagaaaccaaattttaaatagaaattgcagaatgtgtactataagctccaagagaagtcaatgaacaaacttgaaagcatccttagaaccattcagcatgtttagtaacactgttaatatgtttgattttaccatttaagatagtcttattagtcaatcataaataccatgtgcaactacccaaaaagttcttctcttctatcttttacttattattgatgtgcatgaaaaataaaattactgatttatcatatgatctctgttattttttttcttttctattttttgatttcacactgaatggatgattcttttttttttttgaatggaaaatgtaaaacttcattaaccaacaaactccgtcaccaaacaaggtaacaaatcagtaggaacagactccatactgaaggtac

SEQ ID NO: 126516 - DNA, 978 bp, Cannabis sativa
gtcataggctaactcacccgatttaattaatttcatcatgttagattaggtcaattctattacatgtattttatgtaatatgtatattaatttagatttattaaatattttaaactcaataatttttagtaaatatttttattttaaaacttgtaaacaaatgatttttttactttatttattatttatattatcttttgttatattaaaaaaatcaatatttttttaaaattaaaagtaaattacttaaagattataatatatttatattagttttgttaaaatatttttttatttcaaaattatgtcgattttttttttttatttttcataagttgttgtggattattagtatatatattttattatacagtatatttctgttttgttgtatggtatattattattcttaaatgatattttttcttactatgtataatagtagtatattataaatcttttttctcaaaaaaaatagtggtatataattttgttcatataatacacatattttaatgtaggtatctaaattttagaataattaaaaattttgcccctaaactttcaacattacctgatcctgtctcctaaaatgtgcaacttattaaaaatctctctcaaaataaacagttacataattatgtcgcttctattcgattctattttttttaccgttaaaaataagtattcttatcccatgaactttgatcaatacaaaattttgcccccatttattaaaaacattacttttaaaaattataatgttctattaatttttaaaaaaattattaaaaaacctaataaaaatattaagtttacttaaaaaatctaaattattccttacaaaaaaatattttcaaactttattttatttataaatacgtttattaaaaaatcaaaccaaaattattgaaaagcttagtgcatttggaaagccacaatgtgattggatttatgtgtaattggaggtaattacac

SEQ ID NO: 126517 - DNA, 635 bp, Cannabis sativa
aacccaatttttctaggttgcttacgtactaagataatattattatatttttatatatcaatatcaccacttcaatttcatatctacattcccttattattaatttggaccaaacttattaagtcataaaaagcttaattttgaaatctaaaaagaaaagcaacccaacgcacaagtacaagtattcgtgtgtgataggaatagtgtaaaaatgagatgaaataaagtaatttaatttactatattagataaattttattagaagagaagtgttaattatataaccttatattagaactctttcttaatttttatgtttgaaaatatatgctgatttttttaataatagtgtttattataaaatatatgtttaatataattacaacatcaataattgttgtaaatttttaaaaaattataaataatttattttcgaaataaaatataatattattcgtgttcaaacttcaaatttatttttgaaacaataaattatttgattttttaaaatttacaagtatatcatcacattcatgtatatatatatactagtaaaaagctacgtgcaatgcacatatactaaattttatgctaatttttttctatgttagttaaaagtgatacaattaaaaatt

SEQ ID NO: 126518 - DNA, 701 bp, Cannabis sativa
  modified_base (673)..(675): a, c, t, g, unknown or other
ggggttcgccaataatgacccctagatgtcccgccattggcggtggcattagatctccgttctaggctcgttgcacctaagtttggttgtcttgaacataacaacgcaggtggggattgttcttccatatgaggaattcaatctccctcttcaaattttgacactcattggtatcatggacgaagtcgttgtggaatcgacagaactttgacatgtcctttttgctcaattcccttttgatgggaaagagttttttgtaaggaatttttccctgggtggacatatatattgccttgggtttctccgttaggacggtgaagcatttatacttctcctccttttccttctagttctgtggtatgggagaagtgttgaacttcccttttttgccactatttcttcgagggttgttgttttttcacttgctcctagtgcttttacaagtttaggcagagttgttggtacctgcgtgtgtgcttggcatgtcatggggttacaggatgccttgtgactacttcttatttacatgccctatatgggcatgtcggacaacttcttctagtgttatgaagcaataagctctctcaaggaaatccttcacatagttgattgagatcctcttgatgtctttctagaagttgctcaatgggaggattgttgggttttatgcccnnnataaaactctttacaatctgattagt

SEQ ID NO: 126519 - DNA, 1841 bp, Cannabis sativa
agccgccaatatcccttaatttaatagtgttatcacaaatttaatcaagatagataacaaaccttcatttttcttaaattaaatgtttgattaaatttatcataaagttcatccaattctattaaatttaaaattcaacttacatgtaattttagatttagtaaaattttcatctttagtatgtttataagtgtctactgaaccatataattttaaataattagggagtagccacaacattcttaattatataaaattgtatatattaaatgaatcaagatcacataatggatataaattataattaattatgtggatataataattttatcctacatagattttattttatttatacaattaattaggataatatgttaaaattaaatcctcttaattcaaccatcgggagtatggaaagttcaacatatgttacaaggatcgggacttattgcttgggattcagtatgtcaatccaaggctgatggatgggctgattttaagaggatagcagaataaaatgttgcaacaatatacaagtatgtttgggcagttactaacaaggaagataacctatgagttcgttgggtacatagtatgtatatcaaagatgaagattggtggtcttataaaccacctttgcatggaagttggtattggcagagattgatagctgttaaagatcaactcaaaaatgtggctaacttacaacaattctcagggattaaatatcaaatctctgaaggctataagttgttatgtccaaaccaaaataaagttcgatggagcaatgaagtatggggaagactcaatacaccaaagcatagttttgtgctgtggattgcaatacaaaacaggttgagaacgaaggaaaggttgctcaatttccacatggtggctgatgcaaactgtgttttctgcaatacatacaatgaatcggctaatcatattttctaccaatattttttacctcttagctatgtacaacatgtgaaaatatggctctcttggagggctgaatcgagtcatttgaacaagcttattcgatggattggaaaagcccatgtagcaagttccgcaaataagtatatacggctgcaatggcagctctagtgtaccaaatttggcgtgctagaaataaaatagtatggaatttgggtaaagccaaggaatctttgattataaacaagatcaaaactaaaggtagaattacttatttttggcctaagaaaactaatgttatagacacaaactgcttcttcaagttgtaaaaaaaaaaagagagaagaagagaaaatattacttgtatagtggttatagaaggtgctatttgtatgtaaagttgtttttggagtgatgaaaagcttgttgattcattaaaaaaaaattctcttaattcacaccacaaaaaattatgtggatataatttaatagttttatcataaagtataaaattttgaatcctttattaaacaattaaatatttcacacatttcattgagatagaaatattaaaccttaagtttttcataaattatttaataaaatctattgtaatctatatctaaatctaatcttattaaataataataaaaaaaagagttaattgcagcaaaactctcaaaactttcacttcactagcaataattaacctctaaaacttatttttctggcaaaaaaactcctaaaaacttattatcagttagtactttgtcatttccatcttttttaaatgttaagtgtcatgttggatcctccatgtgtacatgatatacacattgtaatgccataatgctaaggcacgttacagtgctttgtcaattatagtgctgtctttgcta

SEQ ID NO: 126520 - DNA, 2668 bp, Cannabis sativa
aaaaaaaaaaaaaaaagtgataaattagactctctttactgccattgttcttcccttcttcttcttcatcttcttttcattttttctctttgtatcttctatttttgtttcagttttttcttcttctttttcttccttttttttttgtctcttgtttttgttagtaaattagcaatgggtaagaaatatttcaaagaaaattctcgtagccctacattttctatagcttcaaaaaagaaatcagttgttcaatctctgaaaaagaaaaaatcaaaatgtttgaagccaatcattgaagatttagactctgatttcgaacttgatgatgaagattttgaaatacccaaagtgcgtaggtatttatgttgtttttcaattgtttttggttttttttctttttttttatttatgctttctgctcattttaatttatttattgttgttatgtatttcatattttttgtttcttattgtatgtatatttttaatattttttaacagttgttttgatgtaatctgacttgttcttttgagtttttaaaaaaaaaaaaaaacgagttgaatacatgttaccctaaacttattacttattgatcttctcatctctatcatcttcaaaattttcttcttcttcttaagctttatttttcagtttttattctttatttgtttgaaagattgatccacgttttttcaattgtgggtatcattactttttgctcttctcatctccatcatcttcaaaattttcttcagcttcttaagcttctttttcaattttttttttttttttttttttgtgtattgttcaatctcagatatcaatttaggattttgttcatcattctctgattttgttaaattttttgtgttttattgttttgtatgtgttattcagtgtttagcattatatacttgatttttatattttttaacgattattttttagttgttctgaattattttccaatgtatttagggtaatgagaaatttttcaaggtgaaaattcattctcgtgatgttatgaaagtctctactagcaaaagaattattgaggtatagtatttttcttttgtgattttatttggttattttattttatagttttactgttgttttacaactattttaggtaatatttttatattagttttaggattagaatcttaaatacttacattctgagtagaataatagttgttctagtatttcttttgtggttcagattataggtgttgaaaatagaggcttcgtatgtgttttgtggtatgtacagtataaaaaaaattaaggtatttttgtaaaaaaaattcgtgtggcaatataaatataaaactgtccccaaaatctagtatttttgtaagtgacccttacccaaaatcactatagatcacctttattaatgaattaaggtaggcttatgctatttgagttattttttttttaaatcaacaaatattttatttaaattaatgcttgtattaatatgtaatatgtttattcataaaattaattttaatattacatataatttgagtgataaaaaattccaccattccgatcctctttcctctttataattaagttgcagcattagctcactggattggggttaacatgtccctttatatatcccaaatactttggataaattaaaaaatacctcttttatttgtcaattaacaaaatctacctctaatttatatttaattaaaaatacctcttttcatatgttctgtacttaaaatattctgacataagagagtcacgtggaaagtatattaaagtgacaggagtaaaattggtaaaatattaaaaaaaaaataaataaataaagagaacaatataatttcctggaaatactttctatttcaaaataattcatggtacttgaagctatgtataactcttttttttaaatatcaaacaaaggattaacattttgaagtgaatacaaattacaagatgattacaaaactttgtcttaattattagaatttgcatgtatatagttatgtatattaaattctaactatccatttgaattgataaaaagaaaaggaggaatttatcatttttatgatttttttttcgtaaaatttatatattaaaaaattaaaaaatatgagaaaacaatttaagaataaccagttattttatttatactaagccctgtattaaactcgtaattttttcttttaaaaaaatcattataattttcagtcgagagaattccccaactatttttgtggcatttaacggctaagcccgtcttttattaatatctacaaacaattgcaaaaattgagtcagctatttccaacaataacctaccaaaattattttcctaatattaatataggtatagctagttaattaaattaattagtgtggggaggagatctaattatatcaccaacttactgacccaataaaatttgtttcgactcagactaaacttgtgataggtgaggtagttcagtaaatttgtagctatagttgtgtcctgaaattctttaatgtaataaatcgttagtttaggactataataagtctataattgaatgtctaaataaatagtgtccttcaactatccgcatgtgtgaggcagattgttcgttaggtcaaatttagtttgaggttcttctccaaaaaaaaaaaaaaaaa

SEQ ID NO: 126521 - DNA, 1803 bp, Cannabis sativa
catgtcatgattattaaaatactactatacatttaataagaaacatagattttcatatctagctgaataagttgtttattcatttgaagtgcatacgcaactaattgatgaataacatacatcatgggcactcttggaaatttacatgacaaacttataaaaatttctaacaatgatcttaaaatcattagagtagaaaaatttaatagaaaaagaaatcacgatcgtaaaatcttagtaatagattgcaatccaatgttatcagggttatgcaatatgttaaaaacttactatcttttttctaaaagcttgaagaaacaatagtgtttaactgcacataaacaaactatacatcagtgcaatgaaaaataaaaataataaataaataaatattattataaatttatacttttttttcaagcattataaatttatattttatttttactataaataaataaaataagcatcatcaattaatataaattatagaaaatactaacaatagtaactaatttactataaataactggaaaaaattaaaaaaaaaaaagtgaaataatttatcttgtcaaatgtaattagtgtctgtaatagattcacaagcattcatttaataatttaaataactattataactccaacaacattaataatttcataacttaaataattggataacttaaaattattcaactagaaaagtaataaaataataactatctcatataacaatatacaaaatatactttgattaagtattttaaaataaatattatgttatatattaaataaataacagattgaaatcattttaatatatattaattaaaattattttaatcaaattaaaaaattgaaattttaaatatatattagattgtaatatatattattaataaataattttttttttttgagagaaagactattatactaatttgaataaattacataagagttactagtggagatgaaaattccttcaatcaagaacaagcagtattcaacgtaagagtaaacttagccataacatgagcataagtattaacagatcttgatagatgatagatctgtgctcatggaaaataggacactagaaagttaatatcatttgaaataacatgaaaagcaaaattaaataaagaggtttttacatggtatactgtattttggtattttattacttttatactatcatacggtagaaattacaaaaatgttgtacaatttatactgcccaacacgccaagtgttattttgcatgcacttctctattttttttttcattaattaatttttttataaagtttttgatgtgatgttcatggtcaaatcatgacagttcacgtttttttaaaaaaagtaaaacaaataataaaaaaaaaaaaaaaagcttaatatattatacttgttttgtaatcacacgttaccctcttatttggcatttcatcatttcatattttttttcatcatcatctttattcttaaactattcatctctctcacatgttcatcttcttcttcatgttcttctttattttatttttgtttacaaatccatacagttgtttggactttagctctcaagatgtgcttgatgagagagagagagagagagagagagagagagaccagtagacagagagtctatctcgtaagaatatcttcaagatgaacaatacagaggaagaagaagaatagcagacaactcaaactttctaagtaaaaaaatctctttttttctttatttattttttctagaacaacataaattttactaaatttttgttgttttaatta

SEQ ID NO: 126522 - DNA, 1131 bp, Cannabis sativa
ggtaaaatatttccaacagatgcttctatagagatgaagagtatgggccagaatacagtgacatgcttgcactagtcactagacaagcatcaaactcgcaagcaaaagaagatgaggaagaggtacaacatgagaacatttttcatactcgttgtcatgtgaaagacgaggtatgtagtgtgattattaatgggggtagctgaaataacgttgctagtttatctatggttgagaagtcagggttccaacgcttaaacatccacgtccttacaagttacaatggttgaatgatagtggtgaagtgcaagttacaaaactagttttggtatctttttgaatttggcaaatatgaggataaggtattgtgcaatgtggttccagtgcaagctggacacctccttctaggaaggccttagaaatttgatcagcgagtccagcatgatagtttcaccaacaaataatcattcacattccgacaccgaacagtcactttagctcctttgacatcaaaacaagtctatgaagacaaagtgaggttgcaaaatttaagtgataaaaagaatttgagtgatcaaaagaatttgagtgatgaaaagaaactgagtgataaaaagaacttgagtgagtgaaagaaagagagtacaaagatgaatgagagtgagaaaaaagagagccaaagagagaaaacagttgaaacccgtgagagagaaaagaaatagaagagttcgattaatgagaaaaaattagagggaaaaaaataatttttatgcaaaaaaagtgagattgcgcaagcatggcgtacaaaacaaccaatgattttttttcatttacaaggaggctctttaaacactaaccaacttgattcttccctgcctagtgttgttcattctacttttataggagatcgaggatgtgtttcgtgaggaggtaccacatggtgtgccacctatttgaggaatagaacatcaaattgattttattccaggtgcttcaatgccgcattgaccagcatatagaactaatcctaatgaaaccaaggaaatacaaaggcaagttgaaggattgatgaccaaagggcatgtgagagaaagcatgagcccttgtgctgttctagtaattctcgttcctaag

SEQ ID NO: 126523 - DNA, 681 bp, Cannabis sativa
tggcaattccttattagatataactaaatatgctatattaattattactttcagcaatgtacaaagagagctatacctagctacagtactacccaatactatgcaagtaatctactacagtaccatgaaattttttatcaagaaattcaataaataaataatacgcacacatggtgggtgaccagagatttgagagaacatacaaagataatattggtgctggaaatggcattcaacctatgaaaacctcatcagcacccaatttatctatgcagaaatcatgttcatcgttattcgacttaaatgaagatgcaaatgtattattagatgaagatgaaaaaacatctccaaaagcatatgaggaagaagaagaaggtgaagatgaagatgaagatgaagaagatgatgatggtgatgatttgagttgtaattataacaaggtaaatgttttggaagagaataataaggtaggaagtagtagtagtactactagtactagtactactagtacagttaggccatatgttcgatcaaaattgccaaggcttcgttggactcctgatcttcatcgagcttttgttcatgctgtcgaaagactcggtggactagaaagtaagtgtagctagctacctggctagatatatatattcctttcaaatacaattctcttgattaaaaaat

SEQ ID NO: 126524 - DNA, 2097 bp, Cannabis sativa
gctccggtgttagctttgccatcagatcaagaaaagtttgttgtttattgtgatgcatccaaacagggtatgaggtgtgttctgatgcaagccgacaaggttacgcctatgcctcccttcagctgaaggaatatgaacaggattatccaacacatgacttaaaacttgttgttgttgtgtttgctttaaaaatatggcaacattatttgtatggagagaagtgtgagatctacagagaccataagagcctcaagtattttttcacttagaaggatttaaatatgaggtagaggcgatggttggaattagtaaaatattatcactgtgagattttatataatctcaggaaagcgaatgtagtggcagatactttgagcaaaaaaggtcccaggcaggtctttaataccataatgattgcaccagctttagatatcattaaacctggaattgagttcatagttgggaaattacataacctgacacttcagtcaaatttgttgaaaataattagaaagaaagaattggaagacagtgaggtggtcaaaattgggtatgaggtagtggcaggtcagtctaaggacttttcgatctcgaataatggaatgctactttacaaggctcgggtttgtgttccaagcagtgatgagcttagaaaagagatacttgatgaggctcatactacaccttatttgttgcaccagggaaccaccaaaatgtatcaagatttgaaaccctatttttggtggtgtggaatgaagaaagatgtggtagaatacgtgtttaaatgcttagcatataagcaaataaaagccgaacatcaaaaactagcagggttattacaaccactagcacttcctatgtgaaagtgggaggatattacgatggagttcgtggttggtttgcccagaaccacgggaatgtacgactcagtatgggtcatagtggatcatctcatgaagtcagcacattttttgcaagtgaaaatgacttatatagtggatcaatatgcagagctatatgtgaaggagatattttgtcttcataaagctccaaaatccattgttttggatagggatcaaaagtttacattaaaattctgggtatgtcttcaaagaactataggtacaaagctgaagttcagtacaacttttcaccctcaaactgatgggcagttagaaagaacgatatagacactaggagacttattgcgagactatgtcatggactttgagggttcatggaacaaatacatgcctttgatagaattttcctacaataacaactatcagagtacaatatggatggctccatatgaagtgttgtagggtaggaaatgtcgttccccgattcactaggataagactagggaaaggaagtagttagatccttagttagttcagtagaccaatgaagcaataggaaaaatcaaggcttgaatgcttgctccgcaaagcaggtagaaaagttactcaaatcgtaagcgcaaagacattgaatattaggtaggagataatgttttcctattggtttcaccaatgaacggtataaggcaccttgggaacaaggaaaagttgagcccaaggttcagagggccatttgagatactcgagaaggttgggcaggtagcgtatcagctagctcagcgttgttagctgctcataatgtattttataattcaatgctaatgaaatatttttcagactcgactcatatcttgagttatgaagccctagaactaaagtcggacttattataggaggaatggccagttcaaattctccgtaggaaagagaaagttcttcaaaacaagaccatatctttggtcaaggtactctggaagaacagtaaggtggaggaagccacctgggagatagagcccaccacgagggcttaatatgaagagttattcaggttagatttcgaagatgaaatccttttaatgatggaatagttgtaattaccgcatgattagattatacattagtaaaggcgattggctttaattattgatatttttattattatacatgattttatattattatgggccccatttttagaaatgggcatcagagttataatttctcaattctggag

SEQ ID NO: 126525 - DNA, 1011 bp, Cannabis sativa
tgtcatatttttttcttaaatgtaatagggcatcgtaccaatcataaataggatgagagcttaccaatatagatacaaagtcttatgcgaaattttgctttgaagggttttgtgacatttcatccttctatgattttacatgggttttgactatataggagtttgatgttatacaatgatctgatgactaatattatatgtttggtcaatgagaggaaaaaaaaaagggatatatgtgttgatgtgtacacaccgcatatgcatgcactttgaataattttaaacaacattgttacactctttcaaaaataataaatacataaacaacattgttgcacatcataatatgtggtgtgacttatataaatatgcccgaaatttgagtttataagtcgcataaattttgttgaagaaatttatcaactttatttaactgcaatcattcatgattacatgaagcaaatcagtagaaacattaatgctcctaatagtacgatcagcgacaaaattggatgcttgagccaaagagtgagcaactctatttgcagaccgtctaacaaaattaatagaaacatcacgcaattgttctaaaaatattttacaatcagaaataatactcccaaaatatgataacaaaggaagctcactccgaattgcttgtactacggatagacaatcattttcaactaccgttccacaccaatccatctgtttaagtacttaatgttagtaagtagcataaatttaataattttttttaacacttaatgttaataaaacaataattaattagtgttcagttttgttcttataaactccgttttaaatttattaaaaataaatttaaaaataattgatactacatatttcttttcagactcaaagatttagaatatggcccttacacgtcttttgtttaacacattaattggatctgtattaacaaaattggatgaaaaatatagttttactaacattaaatttatactgctaaaaaaattattaaattta

SEQ ID NO: 126526 - DNA, 1950 bp, Cannabis sativa
gggatcgcttttcaagtccagcattgttggactagaaatatttttctagtctaacaattgagtttcatgttgtaggaccattttttaagtccaataatgttagactagaaaaacactccatgtatgtcccaagctattatgttcaacacaaaagggactcaaaaatcttatctagtccaatattgaaggacttaaaaagggatttttctagtagtgtaggtttaggtgtaaaaaatagaagatttttttttaaaaagataaaaatgggctcaaatggtgaaaaaattgtaaagatatatggtttttggaaggtggttggtgagggttttattcgtggattatgatagatgctggctgctatgtttctatgttgagagagaagaagacgaagtgaagaagaaggctgaatagggttatactctatggtgtcggttgttttcaaataaccaatgccataaggtaaaaacaaacacgtgtctcgatgatatggcgtcagttattttcaaataagtgacaccatagagggctcttcatacactaaaaatccaattcgaaaaatttctctaaatagtatcaataaataatacatctatagtttttatcaaaaaattacctctaaatgataattttgaaccaagcgggcatttttacaccttttagcttttctttttataaaatagaaaaatagcctctaaaacccctttttatattaatggaggtatttgaagcatgtgctctgatacaatatttctatcacgacctgagacttaggccgtgacagatatgtaatatgcataacttgggtgattaaaggtcacagtttgacccttgtaagaaaataacacttataaatgatcttaatttttatatattacaaaatacatatttaaaaataatgggataacttctatacctataaagaaaatattagtaacaaaaacaggaccacatattaatataaaagaacaataataactctacaattatcgagcaacaaaatacaaaataatatctaacgtctattattccctattcctgaagccatcccatcaattgccattgtcttagaaaaggttttccaccaatctgttgcaacaccttctaacttggacaaaataatagtaacttggtactcttcaagtgttcctattgtgttaaagtttttctttatcagtcttaaccacatttcagctaccatgggatcttgtcaagtctcaatgtttgtcaagttaggcacttggattcagcttgtggatgttatcttgagcagagtcttctctaacagttctctttgttctttttccttttggagagctaaaagctaattaattaatgagaaatggatgctaccaatataaatatgcgttatacatatatataataaaatatttattattttaaaaaaaatctaaattatatagtgacacagtccaaggtatttgaacctattgctctaatactatttttacatcacgacctgacacttaggccgtgatagataagtaatgtccataacttggatggttaaatatattaaagaaaaataatacttataaatgatccattaatttatattacaaaatatatatttaaaaataggctaattagtaattttctccctcctgaacttaactttgacaaaagtaccaaatcatgcccctaaacttttttggcccttaaaaattcccactgaactattgagattgttaaatttaaggattttcatctaattttagtaaaaaaaattctaacatggatcactactacaatttgagcttttagtgacactatttagtgacacacataaaagtgtgggtcactaaagagttaggatgatttttagtgacatgcacaattatactctaaatattcggagtttatcactcggaatatgagtcactaaaaatatggagtctcactaaatactaaaatccaaaatttataatttta

SEQ ID NO: 126527 - DNA, 2362 bp, Cannabis sativa
  modified_base (30)..(38): a, c, t, g, unknown or other
  modified_base (473)..(487): a, c, t, g, unknown or other
  modified_base (675)..(675): a, c, t, g, unknown or other
atagtctcattttagaattataattgattnnnnnnnnncaattaattgagtctacaagcaatattatctcaactagtgaggggaccatgtgcctataaaagcgagcttctaataagaagatctattaccaagtaaatttcctaacttattaattcctccttgcgccactatagattcagaattgcactctcaattatattgaacgctctatatgtaccaagatatagatgcattatgattatccattgttacaatcctaatagccaaagatcctctatagatgatcttcactgaatagggacaaatttaccgttctacctttcaatgtgttttatccttaaaacacttagctacttataaatgaaatttcagtaaactaatataattacttaaatgagatctcaatcatatatctctatcaagccaagctcgaagaaaatcattcttttacttctaaatacttatagaagctnnnnnnnnnnnnnnnatgattagcgctcccactcaattaaactaccatgttcctaagatgaaagtgttcagtcgactagactttaacgaacaactataagaacataaataatacaattaagatcgaacgtaaccatatcaggattaagatctatagacctaagatcaaccagtgataatgacttagaaagatataacggtaantttatgatatcttatctaagttcaatatcgatccaatccaattcatactccatacatccgatactggtaaactttgccaatttcctagaaaggagataacacttgtccaaggtgtaactataacttatcactgattatcatgttagtctaaatccagtgtattgacaaatcacgtggcttaaacgtttctaacatataatcatgattatattctactgtgctgacaacactataatcatgaacaaatatatatgttctagacttaggagaatttatatattaaatatataatcatgaaataaatcattcaaaccatgcaacataggatatttttgatcttttattaattagtaaatctgatgatattgaaatgagttttatgtagggtagaaaaccgaacaaacttccacttacactaatattgtaatgatcgcattttagaatatggattagtaaaggcaattagcattgattatgggtatttatatagttatttgtgaatttatttaactatgggtcccatcattaaaagtggacattagagttataatttctcaattccgaaaatttgtttaaactctaggtgtattatttgagctacatttaaattatgttatttttgtaatttttgctcggcgacaagggaaaatacaatggatgactattttaatcacatgagtgagtctagaacctttttcttagtgtgatattttttgaaaacaagtacaatactgggtttgagcgtggttatggttttgaccattttaccccaaaactttaaattgcctaagttaagcaaaaggggtattttagtaattaggcaagtgagaaattaggtggctgcctagggtgttgaaacctagccattactattttcagtaaaagattaattcattaatcttcattcttatagagaaaaaaaatcaagaaattggaaaaactcatcctcctttctctctctccttgtttggccaacccaaactagagaaaaaccagcaactttaaccttttttctggaaaattcagaaaggattcaagtaggaatcaagctaaggtaaccctagaacccttaatcatgtgtttttaaagctttatttttggttagttatgcatataggatatttaggggttgttagggtttggtttatgtttggtttgaatttgaagcttaattagagttggtttggttgttttattacagtttggaggtttggtagcatggatgcacaagtttgagttggaaaactcaagcttggttcatccatggcatattctaagtttgtgtgcttttctgggttcttttgattggaaatgattgtgtaaggtcattataggtgttctggaaagtttggtggcaattggaaatgttttgagcaggttgtgaaatgtttaggaaaacctggtgcaaaccagttaactggtttgtcaggacctataaaatcggttaatcggttttggaaaattctccggacaacacatttcctcaattcgtgtccattttagtcccttggttgggtgatttcctctttcctagggtattggggttccatttagtaatatcaaaaccttaagttgtaggttcgggttttgaggtgtggtttacccagttttaatatgtgattagggcatctatccagcatgagactttctgttcaggtcggccaactcacttgaatttggaaaagag

SEQ ID NO: 126528 - DNA, 2488 bp, Cannabis sativa
ttgaaaaataacgaaaatataccaagataaacattttactatagtattaatgtaatttttttttttggattatacttgagttggattgtttggaaacttcaatttaactttctgagatctgcatttcatgaatctgaaaattaaagtcaggacattagttttatgcaaattaaattaaatttctggttgaattttagtttcgtagtatttttctatacttttttttttcatgaattcgaaatagcccttttttgattgattatggtcgtcttctcaagtgaagtcgtcagaattaatggtagttctctttctggttgaatttttgtttcggttgcgtttagttgatgcgtggttgcgatggttgcccatgaagcatgaatcctgggttgaaggtgtgtgtaagaagtattttgtataattttttttatttgggctatatatttatttatttagccagctgaaagtaattttgcaatattattaattttttttagttaaaattgaaaaaaaaattatttagcaaaaagtgtatttatctttcttttttcttaacagatgtgatagaactatgtttttaaattttatcgtattattcttgttaaaagaaaaaaaaaatattttaacactttaaaataatttttagtaacccaacctgtaagtttttctaaaaaatagtatatagggtgatttccaaaagaaatctttacaataattcgaacgctttataatattaaaataatacgttaattccattttaatatatatatgttgaataatattgaattaaatgggaaagatagaatttttatgtagttcgatagttaaaatatatctagtttatgagtcagttttactctttgtgtacaaattttgacaaaggttaggtatacaaaatttgtcatccctttattattaatttcactgctatttgtagaagtaggatagtggcgttaaggtttatgcctagaaaatttataaagatatttttgaatataaatagtagttgaacaatttgatatatgtttgaatgttaaattgtttattaataatttatgtttgtaaatcgagaaaatctttattcgtatatgaagttgtgactagtatcgtgatttcttaatgatgtacactcctttattaatcaaaagatttatggaaaaacatgaataatttaaaaaattcttgtttaacctctaaacttaaataaataaaaactttacataatctgggatcccgtctttaaattttacatctgtaatacaaaatatttaactacaaaagttgtcgcctgacgactaccaaaataaagcttgttgttccaaatatcgaatactctaggtctaactatcatgatatgtacaatcttcattagctggaactcactattgttcaactttttccttactcttacttacacatgtaaataataagggtgtacatcagttagtttggtcaggttatagtgtatttttaccaacccaatataaatgttaggttgtgaatatctaattgtaacccgtctaataaaaaataaaaaaagcataaccccctcaaggattttcgtcagtttggtcgggttaacctgtttaaaccaatctttattttttattttttttcattattgtaaaatatatgtatagtatacacctttcaagattaaaaggattatagtttaaattaatgttaaaaaataaatataaattgaataaatgttaaagtattaaacaacctttttttaaaaaaatagaataaaaaaatatacttatatgtaaattttaaatttcaatttcaatatttaaatacaatcaaaattatcaactataaattttaaattttaacttttaattaaacactataaaatacaaattttaaatgtaaaatagtttaactattaaacgcaatttatatattgtattataaatgattttagtaaaaatcatgtgaatcggtttattcagattatttgggcgggttagaataatattcaacccgcccaatatatttgttgggaggtttgaatttttttcgtaaaattattcggcttgtattttttgtcggtttattcgatttggtttggagaatttattcgggttgagcggtttataatttttttcaaacaaccctagtaaacaatatctggagtcgacagactcggtaaaaaaagtataattataacatacacatacactagattataactaggggcacatacacccaattataatcgtatcctgcgtgagtctagcagcctatactattgatcataatatcagcctatactcggtactttagttgtactgatgtgatagcatcaatctgtactatgccaaacatatatctgtcggtattcaatgtaactctatgtacactaataccgccattattgatatgctatctaacagacattcataaatatacatgctaaatatgtaatcacatatgatattattatactaatcttaccttaattttaaatgcaagtatgtcgata

SEQ ID NO: 126529 - DNA, 526 bp, Cannabis sativa
aaaaaatacatataagtttatgaataattatatttgtatttatgattaaatatatttgtagtataaacaaacacacatagtttatgattaattataaattgacaaaaatgaacatatagtgtgtatagaccttttcttagaggatcaaatatatttgtaagataacttctgtcctctaatttaaagttccatcccttttgattattaattcaacaatgtcatgctatatgtcgagttcttttcatattcttagaggaaaaaagttatcactttaaagattccaagtcacatcttaacaacctttgaactgattttatataagtttaatatctcaaaaaagatgtaatgataatgtgtacaaaagttatttattagatttaccaaatattaaccacatgcacgtatattgaagggtgttgggaccaacaaatttttattactaggataaattttaatttaataaaattatatttaagtctaaattaattaataagcaataaaatttaatattaatgaactaatattt

SEQ ID NO: 126530 - DNA, 519 bp, Cannabis sativa
  modified_base (492)..(492): a, c, t, g, unknown or other
tcccacttattacctgattaacacataatataaatataaaccctaattatttactacgagacttatcgggatattacacattgggtactggtgactttaatgtgtttgtagcttagttaggttgctcacctccccttatatcatccatgcaggtaccactgggtgttgaataggggaggtgacagccgcataggtccctcatttacaatgcatttatggccagaaagaaacaaaccctccgtaaggcgcccgcatatgaccctcatgtggctagggtggccacaagtggtcaagttaagattatggaggagactgctcagccccgtgcgaatgttgagccagagattgacctaggggttgagagttttgatagtgaatatgatccagaggaggtcgcaccaatgaggaggaggaggtacatgtaacaccctaactagcataggcgtattacgtgatttctaaacatgttttgcagctcgttgctaatcaacnaggtttatggaaaacgtgattaattaa

SEQ ID NO: 126531 - DNA, 1506 bp, Cannabis sativa
atgatctcattcctatttctttttcttttgatatttattttgttcctctctcattcctattctctttattcatttatgaaatgctctcattccataaaatgaaaatggatgctctcatcaaaggaatgtcctcattccaccaaaatattggatgctgtcaatgtcatccaaggaatgccctcattccaccaaaaaaaatagatactctcatccatggaatgccctcattccacaaaaaaattagatgctctcattctacaaaaaaattgaatgctctcatccatgcaatgtccacatttcacaaaaaaaaaaataaataaattgaatgctctcatccatagaatatcctcattctacaaaaaaaaatgaaaaataccctcattctctttagtttccttaatgttgtgatctcacttttaagtaacgatatatacataggacataaggatccttattttgtctctatgggtgaggacattttattatacctaaattaagaatctaagggtgataagagagtagggtatatgaaagtaaatgtagagcttagtgtatgttaacatatctcattctcaatttttttaataatattcttttattttaatatttagcaaaaaaaaaatatatattactttacgcaactttttcccctttatctttataaaaaaagactaaagaaaaaaaaaactattttcacttttgatttatattttctttttattttttacttttacttattaattttacttgaaaatttctcatgtcccttcataccattatttattgttcttctaacactgaaaaaaaatacttttcttttttatttaaataacaattaagcccaaatatacattaaaaaatattaaaataaaaactaaaaaaatatatttatgaattgtaataaaaatttattgtgaacatgaatacttacaaaatgggtatgataaaatattttgaaaatatatagttttaaagcagtaaataagaaatacatgattaaagattcttagaaataatttaaaaaaaaaacaaaaaagttaatatttaaaatagtatatatttttgcattcatataacctatttttctgtgatgatcagaggcatatcaaatttggagtttcttttatcactatttttttttttctatttttctttgaactttttaaaaatagcataaataaataaatggagtatacgttgggctagagttttatattatttttttagcaactcctttatgtttactaatttcaaataaagttttgacaatggtttaaataaattgtattttttgtgtattattttggactactaagttgttactttcttttgtctaagtcgtgaattggcaatatttacgtggtttgcttattattcatcaactatcttttcttctattttaataatgtacctttatccttccttattattattattttttttatctaaatatatttttttattattgattcttttaaaaataattcttattattgaattgggttg

SEQ ID NO: 126532 - DNA, 986 bp, Cannabis sativa
  modified_base (948)..(960): a, c, t, g, unknown or other
caatattaggttgttaaatcaacatacttgtgagtagatctaagaacctggataaatataataccaacactttcttggttgggctgtagccctgggttgattagactctagctggccataacttgggagagggtatgtccatggccggctaaccctaagttgggcatctaactttggccaacaagccctgggtcaggcaattagccatgatggccagccctaaaatgggtaattgttcatggtcggtcaactctatgctggggagtgtctggccacttgttctcccctaattggttggtgcagcctatgtgttgatagggggttgatcacaccaattggttgggtttagtggatcaaactttctaaagtgattgttcaatggtggaacaaaatcacatagattctcactccttgagttaatgttatcttaagtgtttctacccattcccgaacctagctggtcaaagataagccttagaactacttgcttccaaatgttttagagaagaattttgctctgtaggccagaaactggttggccaagcaggggtgttaatgtgctagagatacttggccaaccatccatgccactaggtgctagagtctggctgctcctgccactggatctgtttggcaagacttgttcgtgtttgggcaaggggaagttcgtcctcattctcgaaaaacttggttggactgtttgcttgtagaccctacccgatatgtcaatgagtcttccttggagaagatttataattagatcatgtcctctcttgacaattctcttattgaaccaccttatcaggtcattagcttacctattaaggcggtctagctcctcttgatgagctcaaaggatgtactcttggtcatccatctatcttaggaatttgtatctctattgggcgaacacatagctgttggaagtattttaccaggatctagatnnnnnnnnnnnnntgtttcattaacatcctaatatagat

SEQ ID NO: 126533 - DNA, 2014 bp, Cannabis sativa
  modified_base (392)..(393): a, c, t, g, unknown or other
  modified_base (1960)..(1987): a, c, t, g, unknown or other
ccattttcgacgaggtaattgaaggtatgaccatcacaattataagtaaacttattattcgaagcaggaagcttctgtagacattgagaagcgatgctggtaaaatttcccgtaaactccgtgtactcagcgagaaccaccgtacctcgagcaacgaagctgtaaatcaaagactgttgccccatctccaacaacaacaacaaaaaaacaaacaaaccctaaccctataaacaacgaaaataaatcaaaatcaggcgaattcaaaaaccagaattttgagatcgcagaaaaaaaaaaaacaaaaaagttgctggatttgcgtttgctgagccgtaccgcaattcaatatgtatatatataggagagagaaagtagagagagagagagagagnnagagagagagagagagagggattacctttgaggcttgaaatagatgtgaaaatgaaatttgaaagagagattgaatgaagtaaggaagaaatatgtttgtttgttcttagaatagttcgccttggctttctcccaccacgcgctttattttaaatttgttgggcgtaacgtctacactttctagacaacaatagactatatagagaatatagataaatttgatgagatatgattttattatattaaattaaaattattaaaaatttacgcataaatacttaaatttaattttcaattatattttaaaaaatttaagagtttttttatttttacattttaaaataatttttttcttacatttttatggaattcttcatagaatctcctattgcaacaagcgatgcaacctaaattgaaacaaaaagattcgtatagagtgctgcaaccactttagaaacccaaactgtaaattttaaaaaaaaaaagttaaaaaaatagtatataaggtaattctcaaacattttaatagtacttaataattaattaatgtgttatttttttattaatatatttaaataaatttttaaataaaaagactttcatgtgataattgacttgacacttaataaatgtgtatagaagttttaaaatataacttagatattattaacgtcaaaaattaaatttaagtatttttgtataacatgaagttaaatttaggtatttacgccgtaaattactctaaaattaacaacttaggggtgtttataaatttgtagtgaaaatatatggtaaaaattttataatatttattttttaggagaattacttcatatactattttttaattttttttttcttttaaatttacagttttggattgctctggtagtttatgtgtgggttgttatgtggaatttggttgcgatctaggttaatctgtgagttcctatgtgaatttttgtaatttttgtttttttaaaaaaaaactgttgtgaaatgtaaaaatgaaaaaaaaaatccatttttttattatgattattattatttattttttatttttttttctcaccaatgtatattttgtttatttgcagttaaaatattttatctcttcgagagagttatttttcgcaagcacaagtttctcactatcatgtaactatgacactcccctccttcccaagtaaaaaaataaattatatatatataacaaaatattttaatttatataaattttggcatggtaagctttttaaaattttcaaaaaatttacagttgcttcaaatatattagactgaaaatttatcatagatctaaaataaaggtggacgagaataaaattaccctataatagaatattagtttttttttgaaggaaatagaatattagttttaaaataaattaattattaattaacaaagagctttgtgcttaatgtttaattatttttattactgttcattagaattaacgtatacggtgttggatatgggcaggtccagttcatgttcagttgttcacaacttcacataataatccattaagggctcgtttggaacgcnnnnnnnnnnnnnnnnnnnnnnnnnnnnattatattgaattgtattttatgcaat

SEQ ID NO: 126534 - DNA, 1796 bp, Cannabis sativa
gtagatcttaagatgaagcaaaaatgagtgtggagaacttgctgccactatttgtgactaacgttaaaaggcatgtgaatttggggcctactccgccaactatccccccacgaagtgttgttgggagttttgtcccagaaacagatcttgtggttggtttgaatgaacatgcccttactaatatgggtgacaatgcatttgatcagtttgatgagtttaatgctctttttttaacaacaatgatcgtgtggttgatttgaacgaggatggtgatatggtgttgcaagttgatgaagctgtagaggaacccgctttgaggttagaacttcttctaaggaaacagagtgcagagtaagacgcagtgaaaatcgccaaacaccaggaaatattaacagttggtcagatctttctcgtagtactataccatcagattttgaagtttgtacaaaatttaaacctcttgtgtggacaagggaagacatggaggaaaataatatttatagaaggtacaccttcaggagaaatgtacatattagaaagttgtacacaaacaagactgaattaaaaaatatagtgggaaggtttgcattgaacataaattttgagttcatggtgaggaagtctagcactgatatattttgcataacttgcaaggttcaaattgcaaatgtagattgagggggaggaagaaggtacattgtgacatgtttgacgtcaatgtgttctacaacaaacacacatgtaacctagattctagacatgctgataatcgtcaagcagcactgtgggttgttgtaaaccttattaagggaaagtacacatcaagaagaactaactacaaggcaaaatacatatagaggaatatgtttgaatatgaaatcaaaattagttatgagaagacatgggaggtgtagggacaagacacttacatatgttaggggcacactagcacaatcttattttatgttacatggttacctatacatgctgcaatagaagaatccaagtactattaggggtgaaagatcggtcggttatggttgatttttacaaatttataactgagcggtcagttacggtttttattttacaaaaactataactgaccgtttagaaattataaccgtataaaactgactgtacggttttcagtagttttttagttcagcggttttggatgatttttggcagtttttgacggtttaatgcggttttgacagttttttatttcaaaaactaaaactaaccgctatatcaaaaaaactgtaaccgaaaatgattgccaaattcggtgatgacatagaaccaaaaatcggttacggtctggtcggtttcaatttttcagtttttatgaacaccccttggtactattataaacattgtcatagagaaagataatttcaagtactgtttctggtcactgaatgcttgtaggaggagattcaaattctatcgtcctgtgactagtatcgacagcacgttcttgaatagaaagtataaaggcacaatgttagttgttatagcatacaacgcaaacaaccaactatttctggttgcctttacaattattgatagtgagaatcacgactcttggaagtatttctttcaaaagttaataagggaagtggttggggaggttgaatacttagtgtttgtatcgatcggataggcatcaaaatattgaatatgttgtcgaggtcatattctccgaagcatgtcactgtgcatgctataaatatattactatgaatgtcgtctacaagtttaagactgatgtatgtcacatgcaaatatgg

SEQ ID NO: 126535 - DNA, 1519 bp, Cannabis sativa
gtagtcgtgaccaagtcccctacattcaacccatccttatcataattggcgaaaacttttgcatgttgaaggaagagttaggtaggggcaatacggtgcataggcggggccctaacccactcagtgaacaactctggacgctcgacggctttgaagcaagaggagaagaagaatcggtggtggtactcctttacgttcttctagaagttgtaaggcaccggaccctcgttggcagaatgggcctagagcttgaagaatccatctttaagcttgtcccccttcttggggatagataaaagttcgtaaaaatacaaaatttcagccggactgggcggggcccagttcctggcaacataaaaaatatacaggcctgaaagcaggcggtaagcttggggaataagttgatacgacgcgaggccaacaaaaactaaaaaatctataaagtagtcttgaagcggtagcatgactccggacatcaaatgggtttgactccatgccctaaaactgtcgtagctgcagttgggcgtttcttcgtccctcgggaggcaatgaaaaaccttggccgtggaaggcttgatcccagcaacggtaactatcttctccagttgatgggcacaggtcaaggtcgagtgtaactcgtttgcctcccagccaatggaccagcaggtgtattttgcatggacccccaggcctttcataactttctctaaggtggccaatttcttgggcaccttgtctgaagattttgctctggttgaagtaggggtagacatgatctgggtttgatgaagttctaaaatctcttggtcaaagctaaagaaactttgatggtgaaggtgtcggagaacctcactcatctgaaaaagaaatccagcagttagcccccaaaccaaacgctaaaacaaaataggggaatgggggtcccctaaccgttggaaggaggccccctccggatgtttgccaaagataagaaatccaaagattctcctaggaaaacatcgggtgcaaatatccaaaagtcaatataaaaaaaaaaagaagaaaagagaaaaggaagaaggaaggaaaagacaagagtatgaaagtcacttgacaccctcgatggtccctaagtaaggaaatcgttttctaaccctaagaggaaaacgacagtaaggcacacaaaaaactacggtatacgacggtcttcgccatgaccgtcttaccataaaaatcgagtacgattaaaatgaagatgatgttctaagttttaacctaacatgcagatgaatagtaaaataaagtgtacccagaaacttacacaatggtgatgggcgagaagttgatgtcgtctgacggtaaaacttgaactggcagcgacggaggaatagtagtaagaattcgatgatttctggaactttttcaaatatgttatctgagttgaaatgccaaagtggtgaaagtaacccatcaaagagaaagtgctggcttttataggccagagagggtgcaaggcatctgtgaccaggcaccatcgtac

SEQ ID NO: 126536 - DNA, 657 bp, Cannabis sativa
atctcaacttccttggtgtttgattggtgatatgaacaacttggggggtcaagacgagaagagagggggaagaagctaccccaattggcttgtggaaggattttgggctgctcttgatcagtgtgggttgattgattagagtttggaaggttatccgtttacttgggagaaaggtaaaggctctagcaattgggtggaggaaaggttagataaagctttagtttctcattcctggattcagttatttcctctggctaaattgtataatgtgaagatttctacttcggaccattgtccagttatcctaacacctgaagcttattctattaggtcgcataatcgaacgttccgctttgagaatgcttggttgcgcgagccaatgtgcaaagaggttgttcgaagtaattgggaagcgttaagtgggagttgtttagttgataaaattaaaggttgtggcgaggctttggaagtttgggggaaggattttactgggaattttaaagaaagaattaaccaatgtaaaattgccattcaaagtttgaagaagagaagggatgaagcttcggttaattcacaccgtgagaagcaagatgagttgtttgaaatattagcgcaaagagaaatctattggaagcaaagatcaaagcagttttggct

SEQ ID NO: 126537 - DNA, 1592 bp, Cannabis sativa
gttaagatgtgaaattgtgaatgggataatgaattatgacacagtattagtagagagatttgttactctgatttctggatataagtttaccaaccattctatgtgagtaaacattctgaaatttagtttgatggaataagctagatgaagaactgttaatggaggtgaaatttgagtgattaaatattgttggttttacaggtccccaagagaagagagttccttaggaagttcaaaatctgttgacgacattgcaatgagaaagattgcacaccatgtttgtggactttctactagctcaaatttgagctctagtattatgcataacaagggtgtctctgctccatatgctttgatgagtttcctttcttccatacattctggaagtacaaaagaaatcgagaacagagataatcccatgaactttgtaaggggtattatagaacaagatgaaagaaacccaagtggttttatgccgcaaaatgatagaaacccaaggggttttatgccgcaaaatgaaaggagctccttcccaaggagttccttcccaaggagtttcataccacaagacgatagaaaccaaaggggttttacacaacgagatgaaagaaaccccatgaactttgtaaggggtattttacaacaagatgaaagaaatttgttcgggggttctcgctttcctcgatacaatcttgagcatgatgctgattttgtccacataaagttgatgcgcaacaatacatttgttacagttacagattcaaagggaaacaaaaagatgggagcttcagctggatctttgcccgaaatgaaaggaggagcaaagcagtctcggtatgctgctgaagcaactgcagagcacgtaggaagaatgtcgaaaaatatgggactaaaatcagttgtgatgaaggtgaaagggtttactttctttaaaaagaaaaagcaagcaattataagctggagagaagggtttactaattcaagaggggatcagaatccaatagtataccttgaggatacaactcggcgtccccataatggctgccggctccccaaaaagcggcgtacttagtactaacaaagctggttggttattgaactttatttcacttgggaatcacagtccttttctcatatcattttatatttttgtaagagttcaaaccaaaaaactcagacaaaataaaaatagatgcaaagggtaatggctaccttctgttttggactactagctcggttgtgatctttatttagttctttcttaatacctttttgttttcattgaaactgatttgttgtagctgaaatttgtggaactttcattgttgggttacaatcaatgattttgaatgttatgaaaaaataatgaatagttgtctttctctattggattttcatgctttggtttattgtctatctttgttgttcttaaactcttcaagggcacccaccttgtttgaagatacataagtttaatttttttaagttatgtttttcataagtaattaaccgttaaatattaataactatttgtattattttttattagtatatttaaattaattattaaatataaaaaattaataatctaa

SEQ ID NO: 126538 - DNA, 626 bp, Cannabis sativa
taacttttatagacacttaaatatataatattttagtataaattaaaatttaatatagtattatataaaaatataatgtataatctaattcaatacaatacgatatgatctaatacggcttttcaaactagcccttaaggtcttattctcccgtatgtccactaataaatctgtctctttttttcttctttgttaacacaaataataagtttatacttttgttgttatccttatatctgttcttctttttcagaatacttttaaatatgtttgtaagagttggaactcatcagtagagctgatctctaatgtatcaaagggagataggccgaattatcaaagaaagagggagagttgaatcattgaccaatcaaccaaggacataatataatacactagaaactctattcaagaatacacttgagaccaaataaattatattctaattagaaggttataattaaatagaattacactaaaaaaaaattaaaaaaaaaaaatatcaataaaatatcaatatatatcaatataacaataataacaataaataattattaagaatatatcataataataatattttagagtaaatataattttatacatgtattataatttaaaataaa

SEQ ID NO: 126539 - DNA, 1319 bp, Cannabis sativa
atatgaacctcttaacggtggatttgggtttgtatataatatttggttcattaaatggtcagattccaaaccaaaaatttgaatttgccaaaatacaaaaagaaaaatgtacaatatatgtatttgtcaaaagaaaaaaaaaaatgtacaatctgtccttatcaacggtcagaatgggcagttcgtttggctaaatgatcttcccctgtatcgatatctttaggcccattcctaaatggcaatgactcatggtcatggttcgatcaaatatagattctgttcaaacttaaaatggtcaaatgtaattatattagataaatgctagtgtgattaaaagagaatttttatgaaaatctaagccagagtaaacatggtaaaagcaagaactaatggtcaattgttaatattaattaatgaagtcttcgctctttcttgtagtgtagttaaattcgttagggtctgattgaacacaggaagataccttcaattagctaactaaggctatctctaatcgaaatggaaaatatagctcaattttgggaaaaaaaagatagtttagtggcaattttccatcagcttttgtttttgtgccccaatacacaattatgaaatattgatgtaaaatttaatatactatttaataatttattgaaaataacgtcaataataatattaataattttattttttcaaaaaaatattaataattttattattatctgtaagaaaaaacaattcgtcattttcttcgacaaacacaagatggcaactacactaaaaattgtcgaattcatttcaaatccagaagaaaaataccaaacccagtaatttttgtgtaagtttattgtatgaatttaattatcttatatatatttattataacattggagaagaagactaaatatataggagggaaccacacttgaagtttacccaaagtaaaattctgctttttgcatagtattctttatatgaatttaattatcctttatatatttatctatcaaaaattgatgctctaaaatcttatttggtcatagttaattttatttttttagtctgatctttaatgaaatagctcttgagctaaattataatgatgatatatatatatatgttttttttatgtgcatgtggtcaattataaagttcaagtaccaactaaattgatatcgtgttaaaaaagatgatgagaggagattttgatgatttattgtttgatgaagatgcaaatgttggattaaaatccttaatatggactcatatgtatattagtgtattgctatttgaagcttggcccaaaataaagtgatcatttt

SEQ ID NO: 126540 - DNA, 676 bp, Cannabis sativa
ataatttgtatgaatacatgtaagatgaaattaggttccttaacacaagcaaaagtcaactttgtgtgttgttaaagtggataaacattagatgcatgggatggcttttctgcttccttattgagagtcaaaagtcacgaaaggtttttggaaatccagtagggactccaatatatatattctcaacaaatttattcaattatattaacctcccctctcatgcttaattcttatcatttcatccaatcacattattatttctttctcttttattaaattgattttgtcgggttttaagacagccgaggaggcaataatatatattaggatctttcaaaatcatcattattttttaaaattacagtgcatgaacaatattttagttccttttttaaaaaaaaaaaaaacaaatatttagttcctgattgggtgattattcactttggattaaatatttttattgatgttgaaaaaacttatgcatcattattagctattttggataagctagaaaaattacactgagccaactcattaaaaattaaaagaaatcaacactaaattaaaaactattagaccatctccgtaaaaattgtgttatatttggtacaaaaaataattttatgatacattaaaatttagcattgtgcttcaatacacaattgtaaaactttga

SEQ ID NO: 126541 - DNA, 716 bp, Cannabis sativa
gtccaccactaattatactcattagcccaataagcctaataaaaccccttagggttaggtgttggatataaaaatggttaatatgtgttagtataaggtgtgaaggtgtgtggtgatgagtataagggttttgctctcataggctcctcttctactatcttgggatacattgaagaatttggtgtcatagcaaaatggaaaatacaaacatgggaggtatgtggttttatattatttgtgatgctctaaataaagtattgatcttggttcataatctgtagtagttcaacataacgccctcaaatagcataccagaagagttgaagatttaacttgtgtaacactgaaaaactacttgaaaggtctcaaaacaacaaccagaaaataaattatattagaatgtctatttacaaaaaaaaaaaaaagatataaaaaaactaaatttttagactctaccacttgattaaatcaagtaaaatataaactaataaaaaatttcaaaatagcatgagcccaatttaacataaaattttgcacaaaatttagcacatcattgctattgaaaaacaaattttcttataagttctaaaatattatataacactacactactattttagcactcaattatacataaatataccatgcactaaatttacaccataataaatatcattgcttttatttatttattttgcttaatgtattggtcaatt

SEQ ID NO: 126542 - DNA, 1247 bp, Cannabis sativa
  modified_base (413)..(413): a, c, t, g, unknown or other
ttttttatggtattccttattatttatgataatttactctatattttttaaaaaaaagtatcatatttagtgtaattgaatttacatgacatatatattatatgtgggtaaactcttgatgggtattacctatgagtagataatattagaaaattttaagcttttatgattaatttttctatttaattagaaaattttctcatttttacattatataggttagggttgttccatcagttgaaaaaaaaaataataaaaaaaatattgaatttgacttaaatattttttatataaacatattttatatagtgtaaaaagaagtatttttttaatatttttttaattaagtatagaaattgaaaattttcttttattattcgatattaggccaaaatctaatagtttaatatttntaaaattaatatttatagttaaatctatttagtacccatcaataaataataatcatttagaagtgttctatatatatatcagaagatcttccatccaaattagctcaccatatctactctaatattggccgaataatttgcatgaataagggacgtcttagaaaaattagacagtaaattaaaaaaatacattaaatagagagcctaaattattacagaaagaaaatctcttaaataatgcaaagatcaaatctaaataactaggctcaaaagaaatgagaggaaatccaattccaacaaccaatcatatgcaactattattagagctagaatttctgcgcctgaataactgagagattttttattcaattatattaataacattataatcatctgctaccctcactatgtttttggttacttttaaaatgtattattatgagttttgattattttctagataatgatgtatgaagaacatgtaagcaaatgtagcataaaagatgtaaaaacgcaaaagaagtcaagtgaatttgattaaaagaaaaacgtgtaaaaagaatattttttgttataagctttgtggggtaaggggaggggtttgacaagtgggaatttaaaactcaccctttcaaaagtattcatattgcccactaaacatttcattagacccaccatatagggtacacttcaaatgcacactcactctaatatcatataacagtctccttctttggtttataatgttagtatttataaaattcaaaaaaatatatatcactgatctaaatatattcttaaaagtactttaacatacaaaaaaaaaaaaaaaaa

SEQ ID NO: 126543 - DNA, 806 bp, Cannabis sativa
  modified_base (47)..(53): a, c, t, g, unknown or other
ttctttattgatattgaataaaatggattacattgaaatagagtttnnnnnnnggcataaaacccaacaggtagaccttctggtgtcaacgtatgatgcccagtctgcatcggtatatgctttaagcctgatatcggattttgcagggtaaaataaaccctgcccaggtgttcccttcatgtattggaggaccttttgagctgcatttagatgagtagtttttggagaggcaagaaactaactaagcttgttgacagaataagctaagccaggccttgttataaccaagtattgtaatttcccaatgatttttctatagagagtagggtcggctagcttgtcatcattgtctaggctaagctttaagttaatctccataggggtattgacagatttgcaacccaaataccctaaatcctccaataattgcaaagcataatgtcattgagagacaaaaatgcctttattagaccttgcaatctcaagaccaagaatgtatccaagttctccacgatctttcaatttaaatctattattgagtctgagttttaatgcttcaagatccttgatgttattactagcaagaataacgtcatccacatacacaagtaacaagatcaagctagatccattttgcctaatgaataaagaatgatccgaggcagaatgtttgaacccttcttcaacaagagctaaggaaaacttttcgaaccactgccttgcagcttgcttgaggccatatattgacttttgaagcttgcaaacagcccttggtggaagctcccccttaggactatacccttgag

SEQ ID NO: 126544 - DNA, 1796 bp, Cannabis sativa
taaattgagtataaaaatagaataaatccatccaataaatttttatttgagagaagttgaggaatattttttttattaattaaccgaatctgcctctactttggatttaattgaaactgttagaatattttatatggacttacataaataagtgttgttcacagagtcaatattatcacaacaaaacattagggcaccctagattttcccctttttacgatatttagagtattgccatgttatccatcgataggaaaacttttagtttcgtttttaagtccctgaaaagtgatttagcatgccactcaccagtttacgaatattgcgatttaggagcctataaatcgtcgagcaactattccacccaggttgatcgacacacttgaattcgaaaataagataatattaatataataatatacatatgtgattacacatttagcgtgcatgattttgattgcttattagattacattagaatagcggtatcaatatatttagaattatattggatatcgatgataagtattaattgacgctatcacatcggtacgattagagtatgactagcgtactgagtataggctaatattggtcgatagtactgtcatttgaacgttcttgactcagtactgcctagggtgcggggaagggttatggttggggggtatgggcgcctaatcgtaatcctatttatatttatgttatgattatgcttttcttattgagtctgtcgactcacagttattgtttgcatgtgtaggtaagtgcaaggctaaagttgagcagccgtgagagtgagcgaatgaagattgtacatgttggggcggttaggcctggagcgtacgatctttgggacaacaggctgtattttggatggtcgctaggcgataattattatatcgaatgttttgtattacgattgtaaatattttaaatacgggatcctagttatgtaaaagataattattttcatttaaagagaaatttaataaaagttttaataaatcacgattttcaataaacccattgattagcaacgaactgcacaattaatataaaatcacgaaaacacgcctaaactagtagggtgttacaatagtgaactattctaaaatagatattattttaataactttttattcaatcaaaataagagtccaatgatatcttggtagacgagaatcaaagttattcgtattttatgagcttctaccattattttagtatttgtaaaccatgttctaagtagtcatcataagcatttaggaatattcttggtgtcgaaaatattaacattaagaggcttaactttcttaagcttgctcttgttcatcactttggaaatacaattagtatgatattcgggaaatatgttacccgaggcatgcatccaagagttgatgagtttcccgaggatttcacatcaaacattttagtgtctcgacaaccatatatcacaaaatacaaataccaagtaaacaagacaattatcttatttaaaatgaaagtatttgcatgctattccccacctattagataaaatataggaaacatagaaatatctacatttcataaccgttatgtagataagatcagaataacttttatcctactcctataaataacactgatcacattgtaaaaagggatgactaattttctaacttaaaggaacttctgccaaattgtatctgtaattgaagaatattagaaataagatagactcgtggagtatgtagatttcaactacaaaaccacgtaaaaagcccatttctcaaagagcattgctatta

SEQ ID NO: 126545 - DNA, 633 bp, Cannabis sativa
tgtatctcacacatgcaccaaagacttaaaccataaagtccatggtagcacaagaagaggcaaataagtgatacatgaccactaacactcccgtattgtcagtggttgcatgagaataccaaaagtatagtgacacataaccattgacacttcccaggttttattagtcgcccaaatgaaggaatgagggaatcaagcaatcaatgaatccttccaatgtcaatggtcacataacaagtatataactcacgtaaaaatgtcccctagtcgggtctggtctgcattggactgagatttctctcgtttgaatcttttctcgtttgtgcgtgcgagtcctagggtgtttttcaactattttttatagagtttaccatcaagttctgtgtaatcttgttgtagctactatggagaaagaggctcaagtttctctagatgtgcctcttgatgttgaggataaagctagtgagaaattacttgaaagagacagtgcaatggagatggaaatgttagagctgtttgaagatattacacttgatgtgacagtcagtagtcctgtgatccgtaagggaaaacaccgggtaagctgtgcaatcccacactgcctggggaaggtgtgatgattctgaggctgtg

SEQ ID NO: 126546 - DNA, 613 bp, Cannabis sativa
  modified_base (39)..(49): a, c, t, g, unknown or other
  modified_base (571)..(587): a, c, t, g, unknown or other
tataaataattttcctaattaaacataattaactgctannnnnnnnnnnaaactaagcggtctttacagtgcacttctttgggtttagtttcattccatacttctagatgatagagaaagcctcctctaaatcttcattgtggctcatgaagactttgaatttaccagtatattatcgacgtagacctccatattctttcccaaaacatctttgaacgtcttattgacaaggcattaatatgtgcctccagcattcttcaatctaaatggcatgaccatgtagcaatatatgcttttatcagtttggaagctagtgcgttcctagtcagccacgtgcattttgattttattatagtcggagtatgcatccataaagctcaagagctcgttccctgaagtagcgtcaaagtagaaatcagtcttttgggcaagtcttatttagatctgtgaagtctatacacattctctagtttccattagagtttgggaccaatactagattggctagccatactagatataacgtttcccagagaaactctatattagttagtgttggaaatattttacnnnnnnnnnnnnnnnnnaccaagtatgtttgattaacatccta

SEQ ID NO: 126547 - DNA, 950 bp, Cannabis sativa
aaatccaacatgagcatggagcgcatagagcctccaacattagcttgaaaggtttgaaaggatggccttttaactctagaggcacaagcaagacccttgcccttaacttgagggtcatgccgagggacatccatcctagagggtcggttatcagcattgctctgattcaaagctagatagggtagagcttctgcaagagagtgggcagcatacagcagtttaggattagttaaagttggactgtcactaacaataacgaaatcagtggaaatcgaggccaggtgcgaggagtgagacaaagaataatatctattgcaagtagtgccaaaagacacgcactccatggaatggttaaggttaacaagaaatggatgtcatatttgaatgaaccaaaggggtaaaacaaatggattaagtcaggaagggattcatcatttaaccccctgagagaaatcaaaaagatccacatcagctatggtaatggttggcggatggggatactggaaagggagaggcttctcagaggccttctctttgccacgaaggacaatatcataagggcaagcaggtgggataagttattcatcacatttctgaaggtaggcatggtaatatttcttgttgtgatctagtttgccacaataaaagcagaaatcaaagagtctttcatacttaaagtctaattatttattaaattctctccccattttaagaaaatgaatgtggatgcctctcctgattagtttgttaacatcaataaaaaaccgaaccctcaaataaggcccagttccttccctgacagtggtgctatccacttaaatcggttctcccacacccgtgtaataagtttagccaattcataggattaaaaataaagattttatttttatttttgtgattaaaaaattaaaaaataaaaatatttttgtatagggaaaaaaacaaaaaaa

SEQ ID NO: 126548 - DNA, 1900 bp, Cannabis sativa
attttatattattttataacagcatcactttttttttctaaatgttgctaaataagtgttgcaaaatgtattttttctagtagtgtatgagatgttatatcaatattagtgtaattaaatatagtgttctacttattttaatttaataattattatagaatatcgttaaacattcgtaaggttccacctcttgcaagtgcttagagaaattggtgcataagagcactctactctatcaatttaataattattatacaatcctctaccttctagtcaattgggtgaattgttggatcaggttagcagcttcttttgccctacggttggtctcttcttgctgagctcgcatctctcgggcagtgtgatccatccattcttagaactcccgctgttgctagtcgagcaattggttcaccgtggtgcgagttttctcttgattgtggtggagggtgttggtgtgcgtctaaacttgtcccaagacttctctgaggctctctaactcagagttatctcccaagtccacttgaggctctccttcggatggcagtcctgtcctggctacagtctctccaacgtactgtcgattggtggtcttgtctcttagacatttgggggtgagccttggcaactcggtagtaactccagtggtatttctatttcctgctgtactcctaacacccgtggaaacaaggtctctaaccctggttcccactaaagtattgtttctacgaggaagacagacactgtatttttaggtccaacgtcaataaggatctgaacattcggattagtggccatagggttgtggggttcggtagaggcggtccttctcgtctgtaccattattctcgaattaaagatgatttatggatctttgaaacacagatattaagtagataacaaagatggtttaagctctcaatgaaagcaccaaaatattgacttcgtttttaatcaatgacgtaaaataaaataaaacgaagaaaaaaaattatgtgtttgaatatgaaagataacgagaaccataaatgatacaaaaagataataaaggttcggcccctatatcagtaatgacctactctttttttagttgtattacttcgagaaataagaagatcacatgaacctggtcaagtgagtttcttcttatctctgaatattacagataatttggcagtgaagtagctctcttaagaatgcagaattcaatcactgaatagtaaatatgatccactatttacagggaaaaagatgtagaatatttacatttaattgcagaataaagtatttaatatttgaataagttaatcctacgaaatcctctcatttctcttgattctcccaatctttcaattataggtatgttaattgacctatttgtaagaaaataagttgttggaatgaatttggacatttttcccctatgaaatcgctggtcagacctttctgtgagatggctctttggttactcaaactactgatcgttataccccatccagcatatgctcgaggctagacgacttcatcttgtctatatagccgaccaaagtattttggagagtctcctcaaaggttcctcgtctgctaaacctcttttatgttcgccacgttattaaagcaattttcgggataacaatctcaaatacatatatacatatatattatacaaataaataaataaataaataaataaaagaagtatttcaaaatcttcttcttcaaaaaaatatatatatatattgtttagaatttttgcaatgttagtaattagttctctcattattgtttcatgaaaaagggaattgggatagtattgatatgtatagtttcgcgatgcgggtggtgcggtttttgaccattttttcaaaccaactatgcaatttttttaatattctaaact

SEQ ID NO: 126549 - DNA, 2113 bp, Cannabis sativa
  modified_base (2056)..(2056): a, c, t, g, unknown or other
actaatcagattgtaaagagttctatttagggcataaaacccaacaccctctctgatcgagaaggacgttgaggatgtcttggtggcagcccacttgttctaggttgaatcccaggatttctctcgttattatgagggatttccttttccctagatcgaggctctctcgtgtcctcattcctgcgagaagcctctggtacatcattatgttcattcccttggttcataaatccttgggatccttgaggaacttctcaacgttgttcttgattattttgtttgaaacatccctagtacccacaggtttctcctcctggtgttttggggatttccttgatttgctccctatcttctggtttcttgaacctcgaggtctgcctcgtggtctccttatcccaggattgggttgattctgagtattagttctgtgagttgcccaagccactccagccttcctttccaactcagtgttttgtcgattaaattcggctaagcattgtcaaagttgtctatttttcaattccattaatggtatatacctagttagatcatacgcatcctcacttctaggcatatatcctacagaagtatttttttttcgtttgtctcttcggggttttgattatcaccaccataatttctccgtgtacatcttgttccaaaagtatagggtctttgagaacccattgactctttcccaaggcgatgtgtagtttcctcaggacaatttctatcgttttggttgtgatcaaccatggatagattctatttgtaaggagggatttctttctgagttttctcactaaggctctcaatgaaagtaccaaactgttaacgcagattttcgttaactaaaaataataagcctttataataaatatatcacgaaaatagtaataaactattaaataactctagagcttttacgtggttttgcagttaaatctacatactccacgagtctatcttattataatattttttttgtataattgatacaatatacacttgatgatctttttctctaaaaaatattcatctattttattacggaatctggccctatttataggaataaaggttggcggttatttacacttgggatcaatttaaaatataaccgttcataaaacgtggacaattcccacgtttcatttaaatgcacgtgggataatacaggataactacttaactgttttttgttcttatccttatagatggttaatgctgatttggacaattgtatcttgcataactccgagttgttatctttgtctatcataatatggaaaaaatactaagtgttagcagatggttcgcctcgtcaagtttctttagttagaatcgcgaggtggctatctcgctatcataatctgaggttgcttttgtatgactgtattcactcctttgaataaatgaattatcttctttggctgtgtagtccgagacaggtgtgtgtctcgtcaatgtaagttttaatagctttttatccttatctcgcttaagactatgtagtcagcaagttatgaatattttctattaatcctttattaacgagttattcttttttgcattgaatgatataattttattatatcaaatggtttatattccactgcaagacacgtgtcactttttgaaatgaagccaaattttgtgtataacaaatatatataaaaatgatttaaattaaaatatttctttaaataaaaaatatttttagctacatattaatagaaaaacagttattgcaaatattgacacaactaaaataacaatattgctatatgttgacacctataataacaaaagaaaaacatttactatttttttctaaaagaaaaaagaaaaacagactgaagctatagtcttcatatattcaataaaatggaaaagctgatccattcaaagaaaaatgtctagtgatctaagtttgatgattttgggtagcatctctttggcccattcttctcgcatattctcatcaatttttgactgtgaatgtggtcttctgttgttgagctgcaatatttatatatatctattttatataaantgtgcctatataactgaaattcttaatttatgtgaaattcatgggtgactttttatt

SEQ ID NO: 126550 - DNA, 521 bp, Cannabis sativa
ggttgtctcctgggtttcgtgactgatgcctcctgaacttactctcgaactcgtttattcgcaaatggagtgaattcttttgtcttggactgagtcgttgacgaaggccaggcttcttcaagttcagatgctctcttgagtcactcgtgtcgtgattgcagtcggacctcgcttttcctcttatggtttgattcaccttattctccatctatgggtttgtgaaaatttctgtatgatgaacctaaagagagggttcactactacaaggaaaggccttttatcccagtttttaaggcttttatcccggttttcgctaatatgaaaactgggatgtatgctagtgcgataaaaggtatttaaaaaaccgggatcaaaagggtactttttatcccaatttcccttttatcctggttttaagacaaaagttgaataaaagggtactttttatcccacttttgatgaaaaaagtgggataaaatgtacccttttatcccactttttttttatgaaaaaagagggat

SEQ ID NO: 126551 - DNA, 1009 bp, Cannabis sativa
ctctctatcttttttctttctagtttgaagaattgtgttcaggtcaatatacagtcatgcatagttaaatgcatatgttgaatcgattattttcccaacaatctggtaacagagctggggcgttctttaagcttggtgatcaggtaaagaagtgttcttgagctttgaagatcgggggaaaagctcctgcagatagtgtgaagaacgcaaggtgggaatcatgagaaatgcaaagttcaatttggaaaagtttacagggaagaatgattttggtttgtggagggtgaagatgagagctttactcgtacaatagggcattcaagattcattgcttggagctgagaagatcaagaacaaaacagagaaagaaaaagtagagattcttgacaaagcacacaatgctatcattctcagcctcggagacaaagtcttgagagaagatttgaaggaatcttcagcttctggattgtggacaaagctggaaagtctgtacatgacaagatcactcgaaaacaggttattcttgaagcaaaagctgtatgcttataagatgctttggcaaatctattgaagatcatttggatgacttcaacaagataattattgttcttgagaatattgacataaagattgaggatgaggaccaggctataatagttctgaattctcttccaatggagtcctatgaacactttgtagacaccatgatatatggaagagaatctttgacattggaggaggttcaaagtgccttgatgtcaaaggagttaaaaagaaattcagaacttaaggaagaaaactctagtgaagggttaatgattgtacgaggaagaacagatagaagaaggaacaagacagtggggaactctcatggacaatcgagaggtaaatttaattctaggtctcaatataagaaaaaatgctatatatctgtcataaaactaaccatctcaaaaaggactgcactgaactaaagaaacaagatttcaagaagcatggcaatgttgac

SEQ ID NO: 126552 - DNA, 1154 bp, Cannabis sativa
  modified_base (51)..(73): a, c, t, g, unknown or other
  modified_base (1069)..(1110): a, c, t, g, unknown or other
tgtgaacaatgcaacataaaatgtagtttctgatctttattagtaaatctnnnnnnnnnnnnnnnnnnnnnnnttagggcacaaaacccaacatcttaaacttgtgcagaaggtcaagggcgttcatttaaggtgaaaatggcgaaccccatgtctggtcaagctttaagttggtgagttttgagttggtcaggctttttatagggctcttgagttgttttatttgggcttgcaccattggattaacttggcctacctatttattgacatgtgtcgcctatgaaccccctaaaacttcatcggacacgtagttgtccacattaattggttgactatttggagggatgaactatctatcttgtcttcttatacaatttagatcatctcttacatcgtgtatgggtcccaatctattaacgactgattcacctggaagcctccttgtttggatgttatcaatcattgattggttcgatatatctgtttgatgacggatgttatactgaccattcccctaagataatgggctagaaaaacatgtttgtttatcgtgtggcctacagtttgactttgtggccttgtattggacaacccattatcttaggtctgttgagtgttactgaccggacgttattctggcccatattgtggtccgttagggatatagacatatgtcctcctgtttggatcctgtataactagagtatctcccactgattattgtccaatcaactgataagcttgcctaatcagcacgattgccctgcctagagcgattgtcaattgtcgtttgttggactctcatgatctcaatttgttgatctgtccactcataaaattggcatttttgctactcgaaggctaaattcaccgttgcttaggtatcttattgatcatggtgaagagtgttggtgtgctcttgcatctgccccaaagcatctcacaaattttgtagctcggtattatcaccaatcaccactttaggatttccaatagatggatttttagtacttgggccagtctgcccggcatgagtacttgtggttccagctgttggaatttattttannnnnnnnnnnnnnnnnnnnnnnnnnnnnnnnnnnnnnnnnntaaatatgaactttctaaatcgataattaaacacatataaagtt

SEQ ID NO: 126553 - DNA, 1678 bp, Cannabis sativa
aaaaaaaaaaaaaaactcaaagatcctaacttatcccaccccaaccctcaaacctcaccactagactagctaaagtagcttggttagctattccctatttaggttaggcaagcaaagctaatcccgtcattttactaatctcattagcacaatgcatgtagaaagaagatcataccacaaatctaaaatgttgggtcacattttttaatgattcaccaaggtacaccagccataaggcagacctcaaagttttagacaaatattggtatgggaattataaaacaactaaacaagtactaaattttaaaactcctctattcttgtatatatcagttaaacatgttaaagagcgaaattccaggtgaaaatgtaattagttagtataacaaaggtatggtcttcaaacacatcaattcagaaataagaatcaaaagaaatcccacttacccagatgcgcttttgatcaattcaatcgtctttagaagccgcccttgcagctctggcattgtcatactcaaacttcaaaacattgggtatatgagaagtgtccttgatataaaagaaacgccccaatgagctctcttcaatggctgggaaatatacgtaaagcacataattgacaatccaataccaactagccccaattatgatcccaagagcagcaccagcaaagacctgagccactgtatggtaccccaaatagaccctggaatacatagtaagaagtgccattgaccagttgagaaaattcacaaacaccctcttcttagtctcccaaaccccggttgctttataggttaagagagtgaaatacattgcaaagaagaacatgtattgggaatggctcgaaggccagccgtgggagtcgcacatttcgagtataacacaggtctcgggccgatcttgctggaccgatttcttgatgagctcgtttatgaattgggaaatcaagaggcccagagcgaagaacataccttgaagctcacggcggaagatataatgagagacgaatccgccgaggcttatgaagactggtactagtgaaatccatgccagaaagtgacccagctgatcacctctctggtaccggacgtgggttagggtaactgcttttagtgaaggcgcagtcatggaaaactggagagagaattctgggtttgaactaaaaatggatctgggtcaataaattgcctcgaagaaggagaaagggatctaattctaatatggtgagatgagaaggaatatgtgttgaggaaggaaagttttggaattgttatatattacatatattatatatattagagaaatgttcgtatgtattaacacctccagataaaaaggaaaattttttatgtggtgtttgtttctcgagaaaatgttaacaggaaagtggtaaaggcaaaaactaagaagagaaaaattggtcttgggcagaaaaggacaagaatgtttggacccaaatacaacgttatactatttggtatttactatttaatcctactcgaacgacaatacaatcaaacgacaatttgatcacttcaggagaattttttttttgtttttaagaaatgatagtaaatgaccccaaatcataggtctatgttagtttatatcctcattcaaaaaaatatagcaaatgaccctaaatcataatattatgttagtaaatgtccttatt

SEQ ID NO: 126554 - DNA, 529 bp, Cannabis sativa
tatattaggggtgatataatttgtcacacaacaccaccatatatcattttaaaatgtacagaataaataattttgggtgaaagtactttatttttcatatcaaaattatgctgatctgcttaatacgtatttattataaagtacgtgttattcttcatatcaacaaacttaaccaaaaaataacactaccacaaaatgaaaatataagtacttttaatttttttatagtatatatatgaactaaaaaagcaaaaaaaaaaaaaaaagaaaaagaaaatccttaaaacttcatctcttctcattctatagatatatagagagagagaaattaaagctatgaaaatctatgagtaatgtttgtttatatagttatgttgattatggcaattttatgttgtgtcctaacataatacatttaatatttaaggagaattaatactttatatattattttttaacttgtttttaaaatgtacagtttaggttgtttcagtattttctcagatggtttctatatatgtaggttgct

SEQ ID NO: 126555 - DNA, 502 bp, Cannabis sativa
tccaagcttctatggcttctaggtgaccgaccccaagagagagagagaggaagaacttgagtttctattttgttctaaaacaattcataaatgatttcctatttcagcagatactaaactaaagaattacaaaattaatttcttttccacgaaagaaaaattgtggtaaattattattttaccccttaacttcaccaagaagcaaacttgccatcaaagggcatttcggtcaaacttgcaatcctaaatacggaaagtgactctatcggccaactgtggcgtgccactgctatcggacataaaatacggaacacaaaattttatatatatcatgaataacacactcagaatttaaatatatctccataaattcataaattataattaaaggtctaattttaaattaaaccttaattgtctactaattctcatactaaaattaagcggtctttacaaatatgtacacatatccccacacaaaaataattattaaaatctaaaa

SEQ ID NO: 126556 - DNA, 814 bp, Cannabis sativa
aaatactggcgatttttatgattattaccgacggagattccgaccagtaatagtgttaaatgttgttgtgataaaaatgaattttttttatataaaaaagtaattaaatagtttttattaacagtaactaaaaatttacttaaaaatataaaagataaataaaatcaaatcaaaaattaaaaaaagttaaatgagtcaaatttagccgacgtattattctattttttttttttttttgttgaaaagtaattattattgtaaattatattaaaaaaatgtattgtatgctttaatgtctaaacatagtacatagtcacatttggacagttatttttgatgatgtgatgagacgaccccgcgtgtcaatatgagtttggtcgattcatttaagtgactgataacaatttaattttcatgtttttgtatggagcattgctattacctagtacctttttgatatgtcgcgttgttattggctaatgatactctctaaaagctattatattaaattatatgggattcgatacttagttagaccaataatgatattgacacgtaagaaggtgctaggcactactagtaccttttaacatttctcttttgtatatatttttaggactcaaatccagatttagtacttccaaaccctgcagtctgcaaccagataacattaatgccacaccatttaaaatgttaagttcaaggatttttttagggtaaataccattttagaccctctgttttgcaaaagttacagattggaccctgtgttttattaaatgacaaaatggatcctgtattttctaaaatagta

SEQ ID NO: 126557 - DNA, 2000 bp, Cannabis sativa
  modified_base (1941)..(1945): a, c, t, g, unknown or other
tgtgagtagatctaagatcctggcaaaataaattccaacactctgttgaccccagttgaacggtgaacggcgaacgacgaacgacgaacgacgaataacgaatggcaaacggcgaacgatgaaaaccaaatatatagtcccgttctctactttccactctcgtgtagcgatataatctttgccggagctatagattcaaccacatcgcaatggtaagtttctttgtcgtcttcttttgcttcaggaaaatcttaatatctttcgttattctctagaaatttatgatttcatttttttttgttttatttttgatttgcaggcgccgaagaaggaaaaggctcctccaccgtcatcgaagcccactaagtcagggggaggcaagcaaagagaaggtattgttatggtttttgggtttgaagtttttcttagttgattattggtcttagtgcttctggctcgctaggatctagtgtttaagttgttgcatatattctgcttgaagtgtattattccaatagtcatgaggatcagctcatggattgggggtttgtagttgctgattgcaaagttttgaatttactttctggttgtgttgaggttaaatatactaatatgctttgtaatcttctgtgaataagtgaaccgtgtttaagaactgccttgcgcggtggctctcgagcccctgctcaacctaagcccaacttttcatcttctggtcatcacgacgatgcttgtaaatcctacttctttttcacactcaatagcatactttatatattagatatttctagttttaatataaaatgaattcgatcgtggtttattccaaatattagatcatactaccattatagataactttgttttcagttgtgatcttgttaggttttgttattctttgtaacatactatgagtttttttttttagatttgtatttgttatagagggaatttcgtaaaagaaaaacgatctatgattttgatttttggtacatggtttgaaacgcgagaagcaggggattgaatacttcaattggatgttagtttataatgttcacatgctttaagtttattgcaaattcctaattctctttgtatcgcctactgtcggcttagtttcgttatagtttgttatttgtatgaccattaccatttaggttttgaccataagttgggaagaccaacattgaatatctcttttgatttggtattgtttgcgttttcttctgctccatattgaaggttgttattatttgtttccttggaaatttgattgattctgtgcttctctttctcttgttcattacagatgagactacaaagtggaaaaagataacatacgtgggcattatggggtgccccatttttgcaatttacaacttatcaaagggtcaccctcactacgatgagcctcctgtgagtttacttctttcactttatgaaatttcttgttgttgtacttgagttattagacataattttgcattcagccttccaattaccaaaaaaagaaaattaatatccttaaaattaatatgtgattaattcatatgtttctttgcaagctgacagtgatggtggcgatttaaggtttctgatagttcgtggttctggccgagattgaagaggcaatgttttatttgctatttgttgtattgttcatactaatttttgaatatgtagtcatattttttttttactgttattgtattttgtttgaattatactttattttttttaatcacttattctggattactgccattaataatttttgtgtatttttttaagttattaatttagatgtatttatattacataaataaaatttaaatgtatttatataatttgtaatttaaattgataattatgtcgagttaaattcttaataaagatctgtattaaattaaattaaatattatttttttttagaaaaatatnnnnnatagtggcactttttgtgtgtcactatatctttaaaaatattaataaaaaagaaa

SEQ ID NO: 126558 - DNA, 881 bp, Cannabis sativa
gtttgaatatatttggttagatccgaaatatgaaatatgcaacttgtaattggaatggtctacaaacaaaataatatgattgaattagataaaaacacccataaattcaccaatgctacaccaacactttgattttattattaatatttttataaaaaaaaacataaagataatgaaggaaggtataatataactatgaagtgaaaaaatagttaacatttccaagtcaagccaacgttagtccatagatcccacctaacaccctcccaaccatgccagcgaccaatacttcaatttctctttctctctcctctcgtgttttctattttcatttaaaagaaaaaaaaaataatagtaatatactaagtaaattttgtagggtgtttctctaatatatactaaagaaagatgcatctttaaatatttagattctttgaaaaaaaaaaattagtctatgttttttatttattattatatatattataattatttaaaatatttttataaaaaatttaaaaaatttatactaatttacaatataaaaaacaacctttaaataatttatttcacacgaataaaataaaataattttttttgcaaaaattaataaattgtttgaactttatttttaataaacataaaaaaaaattatggaattccacgtagaaactcacatagcaaccatcgaaataatttaaatcgccactaaaatctacctaacaaattatataaaaattattggaacaacaacttgaacaactgaatctgtaaattttaaaaaatagttaaaatattgtagggtgattctataatgcaccccttagaatggatgtattgatggaccctctacttgtttcggcatctagaaaaaaaaatttagt

SEQ ID NO: 126559 - DNA, 541 bp, Cannabis sativa
atagtgttgagtactttaatgtgttaattaatgctctaactataatcctaacatttggttcgacattgagaatggacgagttagacttgtacctagagcctacttagcccaaaggtccaaaaaaatttatctatttttagaattacatatattttttttttactaattttaaaaaatactatattttattaaataaaggtctaaaatatttctttatttatgactcactatattttagagccggccctacctacgagtcatgtctttaattttcagttctctttttactctcgaacaacctatatgaaagaaaaagatgttttactattttctaaattatttatttttgttgagccatttaaaaaaattatatttgtatgatatatacattaagacactacgtatttactgcagatgctttaaaataaaataattctaatatttaaagaactaagctaaaaacacgctaaattagtacatgtttgacatcataactaaaaactattttttatttttaaaaacagaaaattattttttgaaa

SEQ ID NO: 126560 - DNA, 1263 bp, Cannabis sativa
  modified_base (1196)..(1238): a, c, t, g, unknown or other
tagaatttattttatacattaaatacataataataataaaataaatcatgtgaaccataaaatatgttttatattgaaataatttctaatcttttattaattagtaaatctgattatattataatgtgttttacttagggcataaaatctaacaaaagattgtaggtacattgaattgtaattttgttatgcaaaacattaacatttaataaggtaaatcattaaactttgtgtaaaaaaatttattggtatatttggtaaaatagataaaaataatatttgttgtattttcaaaatttattttatttgtgcatttattattttgatttttttttttcttttcttagtgtgaaaatgatatcaaatcagattctattctcttttgactttatttgtgaataaatatgaattttccttatttagattatttgatattatctttgtatatttaaagaatttcttaatcatattatttcttttttatctaattttttaaccaagaaatcgtgtacagttgtttttgtaaaggttgttaaaattttcttatttgtttatggaaactttactgaaaaactgtttaggttcgatggaactgtttgaacggagtgactatctgtttaaacagattctgactttcctgtttggaaatttttttcatttactaacctgattggttcttgtttgtttgaccacgacctagaaggtttctaaagtatataaatacacccttaggttgttgatattgattatctctcttggtgtattaattctaaaattactttcaaagttagagagattttctttgttgtgtgaagaacttgagtccaacaagttcttagtattttattattgtgttattatgtattgtttcttgttgaaattttacaggttgaacacattggatattgttcttcaagcttcaggagaagtcttgttcgtgagtcactttttgggatgaaaagcaagttagccacccaggagaaagattgcaagttaatcactcttcaggaaaaagattgcaagttaaaaactctccaggagaaagattgcaagtgagtcacacttcgagatgaagtgtgcaagtgctacgatttgaaaggagttcaaggtctcacaaaatttgattagaagaatagattacaaaagttgcggcaaattcaaagagatggtctttattgttggaaatattttaccannnnnnnnnnnnnnnnnnnnnnnnnnnnnnnnnnnnnnnnnnntatgaatatctctaaaacaatgaaa

SEQ ID NO: 126561 - DNA, 1385 bp, Cannabis sativa
tgtacctaccaacttctggaccgatcgataaagggggggtatattgctacctagtcatgccttttaggctaaaaaatacggagccacatatcaatgtattgtaaatcagatgttcaaaagtttattgggaagaaatatgaggtatatgtggatgacatgctgattaagtctaaaactagcaaagatcacttgaatgaccacaaagaatgttttgaagtagtaaggaaatacaagatgaagctcaatcccaaaaagtgcactttcgatgtcaaatttgggaaatttctaggatccatagtaagtcagggagggatagaagcgaatccagagaaaatacaggccttgctagacatgctctcccccaaaaagcataaggatgtgtagagcttaacgggaaaaatagctactttgagccgattcatctccaaatctaccgacaagtgtttcctgttcttcaacattctgaagaaaagtaagaagtttcaatggatggaagggtgcaaagaaacattcaaaaattgaaagaacacatggccaagccacatgtcttatccaaatcaatactcagggaagacttatacttatatttggttgtctatgagaacacagttagtgctgctctagtatgagaggaatgaaaaatccagtaccttgtatattacattagcaaatgaatgataagggctgaagttcaataccctttgattgagaaattagctttctgcctcctaattgcatcaaggaagttgcgaccatactttcaggtacacgcaattaaagtattcaccaaccacccgatccaacaattccttcagaaaccagaagcctctagaagactccttaagtgggtgatggaacttaatcagtttgacatacagtatgtcccccacattttgattaaagggaaagccctggaagacttcatggttgagtgcaatgaaatggaggcaaaagctgacttaccaaactcggttattcctacatggaaggtatatgtgggaggtgcatcaaatgagaatggatcaggagcagggatatcaatgatatctctagaagggttgaggcttcaagctgccttgagattcaaattaccagcctctaacaataaagttaagtatgaagccatgctggcagggttgtacttggctaaagttgtgggagctcacaggatagaagtcttaaatgactcataaatgcatttccaagttgatgtgcacccggttggcagttgttcttccttctcttgttcaacaaaatcaaggggcttttattcaaggaagatccatagcacacaatatcctcattttccaagatcttatagggaattatggacagaaaaatacttctctaaggtatgcaatcaagatagatttgagtaaagctta

SEQ ID NO: 126562 - DNA, 850 bp, Cannabis sativa
aaatatttaaaatttcgtgaaaactgtaattttataatattttattatttttatgtatttgtgaaataattctttttttttttaataaaattaacttactacattgatcatataaaagaaactttacctaagaagaacttttaaggccaacaagaatttgaattggttgtaattgtagctaattatacagatttgtgtatttgtttgttcacttaattagactattcaattatcatacctcatgaaatgtgtctaattatagaaaaaaaaaaactttctgttttaaatcttaagtaactaaattattattttcctatataattttatttattttgttatataatttgactaaaagaataagttaatatttattctctgtttatttatctctgaaattacttcctgaaatcatctctcttcttccctttatataggcattgagggcctaaaaagatagataaaacgcacatgtttaaatttctattcggatttgaatttggaaaacttccagaaccaagatatttttttgctgccgaaacagaggcgggccgtgacatgctaaagatgtgccgcggctcgtgtgaccttccttggatatttgtgttgatcttccacgtaggcgggccgcagcatgctaaagctgtgccgcggcccgtgtctcctctgctccatattccacgtgatttatcattttctgggcttaaatttgatattttttatgtgatattttatctttttcgattgatatttttcaaactattcatctattttaaatctgcaaaattaaaagataaaaagcgtaaaaatgctccaaacatgatttaaactaaataaaaaaatatgctaaaat

SEQ ID NO: 126563 - DNA, 1264 bp, Cannabis sativa
tataacagggatccccgaaacacttttttactgccgttataatgtctgtttttagccttttattttagtcaagtttttatattatcacagttttttttataactaattaatctattagtattaaattagtttataaaatagcatacgtggcgtccctaaggaatatagcattacaccatccattaataataagataaatattcaatctttaaatcaagagttaattaataatcaagataggattaagataatctcatcgttctccatcaacaattctctctcatccataaataccaaactgaaagggaaaatataagcttataagcccaataggaaaataactaatatcaaaggactagtagttttataaaaattcctgcatagttagcttttaaaacaaaacatatctcatcatcatcaagtacaaaaaatagagaaaccataaataatcacaagagacaagctacccatgcatatcacaccctctactaaacccctagctctcaataccaatcatagaaaatgatattcaaaatcaggtagtcgcgcctcataatcaccataacagtactggggctcagattcaattcacgcctatacagattctaggtctttcacctacaagtgagtatacacctgatctacctatgatgacacatagagactagatcgtgaaacaatagtatgcacaaatcatgatcacgtggctctcatcagtaatcattaaagccaaaagtaggcaaataagaataacaaaagaacatattccctttttattttagaacattcaacagcatgatggctgtaatttaaataaatctaaaaatcataacttgcataaataattgtacaaaaataaatttggcattaagtgtcccagaacaattcagaaaaatatgcagatttaagttttcaatttttcaacaattttataaatcataaaaattggtatatgtctattgttattcaacacatataaaatcaagtccaacaatcaagttaagtccctacctccttaggatcatcaaaatttctccaagggagacgctcctaagtccccaattcttaagctccaagtagcttagtcaactcaaaagtcactttgtcctacactcttcaattgagtaaataactatcatcattgtaatgtactctttaaactgactccaacgacacatagcatgagtatatttgaattttgaaataacctcacctaagcggtgtaaagagatgattgtggcggtaaaaattggtgtaccaaaaa

SEQ ID NO: 126564 - DNA, 756 bp, Cannabis sativa
gaaacatgcaacataaaatgatttttgatctttattaattagtaaacatgatatattgaaatgggttttatttagggcacaaaacccaccaaaaggttatcccaaattttgtccacctaacgtggcatgtccacgtggtcaaaagcagaagatacgtggagaacagctcaccattaacctaccaaggtggagtcgtgaaccttccaacctgccaggttagtgcatttagcattaacctgcgaggactagtgttgggcagctttccaacctgccaggttagtgcattcaacattactagtgttgggcagctttctagacctggaatgcatatgttgcacaacacatacaggccatcaggaatccatgtacctgccaataaggtcctggcagaatctatagctggtcagccaggagggacaacttccatgcactgggcagccttcaacaaggttggtcggccaaagctacaagaatgcatcaacacttgtgttttctcacaagccttccaactcgccttcaacatgcctacgactccggatcagttcaaactgtccacgaagataggattctccatcagtaaataacaacccaagtttataggagataatctctatgtgatttaaatatttgttgtaacctccctacttttctaggaaatctctatgcccagatttgtaacccctacaactatataaagtgcattagtcacatgtaaatgttggaaattattttacaggatcttagatctactcacaa

SEQ ID NO: 126565 - DNA, 1336 bp, Cannabis sativa
ttatttctaatcgctttaattgactcattgttgttggctaaaagtgatgtcgacacttgtctttccctttctatcttatttctgttacattttacattttatgatttatcaattgaactttttttaaattaattagtatatttttacttcatattgacctaacttaatcttttcaattggtagataatgctacttaatttttaattatcgttgagtcaaaggtgatttgaaggtcatcaaatggatagctaattttttactttcattaatgtttgctctatttttctgcaatcttattgaagttcataattatattaattctagcaacagagtaattcttaaagcttcatcatctttctcttttgacatatacatatgtgttgtttatattgacaaatctgttaagtaataaaaatatttgttatagttgccattaaccaacaatattatacaattaattaataatagaacttaattaacactattgtttaacaagtaataatttgtaatatataaataaaaaagtaatgttatgatataccaacatattatattatatattagatttattgttcttactcaattatttttattttttttcatcttataatattccattttgcaccaaaaattagaccattttattctgttattgcctatcaagattctatcgacaacccatcgataatcaatcaatattcaagcgataataaataaaaaaacaaaattacaatgcttcaactatcgagaacgtatcgatagtatatactttaacctctcaagaaccaaaagttaaatcttaatcgataatttgttaataattaatcgatattcaaacgataatcaataaagaaaaacaaaattacaatttttttagcaatgcttcaactatcgataatctatcaataacatatcaataacccattgataatagctaaatttaaggactatcatcaaaagctaaatcttatcgacaacccgtcaataatcaattgatattcaaatgagaaacaatagaaaaaacaaaattacaattttttaaaaattttcaactatagagaacatgtcgataacatattgataatatctaaacttaatgaccctcaccaaaacctgtcgataacgtatcgagaatttttcgataaataatcgacaacatacatcgttttcatttttttttttgaccaacaccaccagatcggaaaacaccataaccaccattcaaaacttaccaaaaatttagaaaaatccatcaaaactaagtgtaaatcaacacaaaaaactattgattgaatatgttgaacaccaatatgcattttcttgaagcgtataaaga

SEQ ID NO: 126566 - DNA, 1132 bp, Cannabis sativa
cgtagatggagcagggaatgaaaacaggtcaagagtgggaatagtgttaatatcacctgaaggactaacacatcaaagctccttacggttcaagtttaacacctctaacaatgaggttgattatgaactttacttgcaagattgaggctgtcaaaagctgtgggagcttccaatattgatatattcagtgatttccaattggttgttaatcaggtgttgggagaatatcataccagcagggaacgaatggcttcatatgtctcaacagtgcgagaaattactcaaggaaacaaaattgattagatcctgagagaaataaatgcccaggctgattgcctagaaaagttggcctaaaaataagaagtaaaagatttgagggtagtcccggccaactatctctcggagcctggcatcttggccaaggccaaggtcaaagctacccacgaggaacccacatggatggaccacatagtcaagtatcagacatctagagcactaactacagaaaaagccgcttccaaaaaatttcagtatcaagatccatgatacatcatgatggatgataagttataccgaagaggattatctatgtcatatcttaagtgcatagcaaggtccaagattggggtgattatgggtgaagttcatgaggagttctacggagaccacactagctaggagtgccaatttttctaaaaaaatcttgagacaaggatacttttagcctaccatgaaaaaaattgtatagaatatgtccaaaaatataatccatgcaaaagatttgtaaacattctcaggccccaccaaatgagattaccttaatgaccagcctatggccatttgcagtatggggaatcgatcttgtcggatccctctcgactgggaaaggagggttaaacacgcagtgattcagtagattacttcaccaaatgggtggaggttgaacctatgaattcaatcactgccaagaagatgttggacttcgttgttaagaatatcgtttgccgatatggactatcacataagatagtatcagatagcagaaaacagttcgatagagatcagagatgtttgcttgggatagctgtcgttaatcctgtacaccaacgataatctctctctctctctctct

SEQ ID NO: 126567 - DNA, 621 bp, Cannabis sativa
  modified_base (76)..(76): a, c, t, g, unknown or other
tttactgaatttagcattagcagttaagtacttaaattcatacataaattcaaattttattttggcatcataattntgagtattaccattctcttcagctcttctcctttaggcttttcactaaatgagatgactcttcctttattatctatcttcatcaggccaaagtccgaggctcggctacacgaaagacaagaaaatcaaaatgagtttgtaaaagaaaacaaactgtgcattgctctctgctaaatgatttacatatctaatatattatgacactaagttctaatttagaatatatgtgaaagctaccaagtatcctatttattcatattcctattagaaactgatcaactatgattagaaacctgaatgaaatgttagttcaatggtgatagaaaatctacctatcgtccattggaagacaaagtccatgtagtccattccgtatacatgatctcgagatagtattagaacatcctcaatatccttacttctagcatcctaaagcaaacagaatcaaatatcaaaatttggggatatagggtttgttagagagatatatggctgatttttttttttttatttaaaaaaagattgtttaatttgttgggtttaatt

SEQ ID NO: 126568 - DNA, 1183 bp, Cannabis sativa
tgctacaaaatcaataaatcattagtaacaaataataatcaaatatttgctaatcatcaaaacaaagagatcgaaaagtttgagttaacaaaaaacacatttattttctttgttaatttcaccaaatcaccctctttctatacattttaaaaatagaaaattatgtttattattttaatacaattgtttttttatttatttataatacacacatcaaaatattatattttagataacatcattcaatataagtataatataggttttttcattttttacacttcaacacagtttttttttttttttttgaatttttataaaaatttacatagcaacaaacggaccaacccaaatcacaaccaaaatttacataacaaccaacatagaaactaccagagcaaccactagagcaatttaaaatgtaaatttgaaaaaaaaaagattaaaaaattgtatatgaaataattttcctgtaatataatatacaaaaattgtaaaaattagacaatacggcgtgaagacttaattttcttgatggtatgcttttttttgggaagaaactgatgttcattaagaaaagagaaaattggggatcacagcgatgaggagtgttccatttgtaatcgaagggaggaatctgctctattatagtgagaacaaaaacatgctctactataaactccgccctactatataaacacttcgtttcatcgcataaacgatacaaattttgttggtctttatacttgataaaaaggaaaaagcagaagagaaaaaacaaacaatgtaaacatattctcttgtttttttaacaatgaaatttaaggtgttattgatgtgtgatctaagaaattatgtttctaaaaaagtgattttgaaacaaaaaatttgaattttaaatgtacttgtcaaaaaaattaataaatccaaattacaaagtaagtttataatataaaacactataatatatataactaggtaactaagctgcgcttcgcgcggtattgtttaacttttataatctttattaacatatgtattatacttatattgagcagggtcatctcaaacattgtggaagctctgtttttatatataattccaaaaaaatccaaaaaaaattattttaaagtgtaaaaatgaaaaaacccctaaaaaggagaattaccccatatattatttt

SEQ ID NO: 126569 - DNA, 692 bp, Cannabis sativa
ttaaacgtaaaaatgtaattattttacaaaaaatagtgtcttatgtaattattccataagaaaaatcatcttatattagttttgctataacaaatgggccacattttttttctgaaggaagtgttctttattaactcgagcaatcgctcgtaagaatagacatcaattccataggaagactattaatagaaaacatacgttcagctagagaaatagaatgtcgggcaacaaaatgcgcagcacaattcgcagaacgcttaacaaacaataacgaaacattaatcaaactatcaaggatctttttacagtcttccaccacagaaccgaaagacgaaacaaagacctctgcatttcgaatggcttcagcactaacgaggctatctgtctcaactgtggcctgggtgtaggtgtgatttttcagccaactcaaagcctcccttatgcccattatttcggtccgatcaggtgatactttgccatgtttaacccctacaaaagcagcacccaaaatgccatctgcatttcggacaacacacccgaaaccatgcttggaagagtgatcgaagatggctgcatcgacattgagtctgatacctgcactcggctttacccaaagctccgaaccatctccatctttgagaggagacaacaagggaatattaccctttccttgagctttcaaccattgatca

SEQ ID NO: 126570 - DNA, 1424 bp, Cannabis sativa
  modified_base (1392)..(1394): a, c, t, g, unknown or other
gtctactacttgaaacgatacgtacacttgcgtgtgctaaatatcgcaacaaggactccgagatagagaacaactctccatttgtggagcagtcatcactatcattcgcaattgcagtagaatccttctcgtggtgatgatgtcagtcgtccttcctatctctattgtgggatttgttgaagccttattgctccctgtacttcttacaaaatttttgcaagtgtccagaccttccacagaagtaacactttcttgtttccttctctctgaattttgatcttgattgagagtgatggtatttactctttgaacttactttcttggcaatcttcatcttgccaagtacacttcttctttcttggattctttttccaattgtaattcaaaaattttcgattttagtgcaacacgtacatcctccaatgcaatcatgtctctgccatacttgataacaacctttacttcttgatatgcaattggaagcgatcttagaaaaatgatggcctgactttcttcatcaaccttgtagtttatattaaccaatcctacaataatctcatttaatttattaatattatcatcaaagaaaataaaggaattattctaaaatcgtataaccattctagcaaaatgatcttgctagctattgatggttttaagttttcgtcatcttctctacgatgagttttcttcgaatattgtttgatagatacacgatgatcgtgtagtacaccatctcctctatttttgctttttcctcttgtttcttattgacaaagagtttctcatctccaagaatcttggatacattctggtgtaataagattcctttcaaactttctctccatagcgcaaagtctcctgttctatcgaatttctccaatttaaatttcggcattgatggcattcaaagtttcttcaagaattgcagtggaaagaatcttaattctgcgttcttaatcgattaccaactctgatttatgggaaaattacaaccaaaggtgtaaaatcaaatcaagtaaactctaaataatcaaataattagcaatgacaagattaatagataaaaataataatcggaaaaaatagggatgaacaaagtaagaaaaactagaaaacaattaaggcaaagaaaaaaaatacaaaaatcaacaccaagatatacactggttcaagtccaacagattaatgtgatctatgactctactccggtattgaaacaccacaaaatcttctttattgagtgggcaagaacaggtacaatacagtcgagatcaattctctgatgagttctctcaaaatgttttcattctcactttctcacccaagaattttcttcatctacataagattcttcttacaaaatccaaacccaatctctctctctctctnnntctctctatatatatatatttctctctctc

SEQ ID NO: 126571 - DNA, 1054 bp, Cannabis sativa
  modified_base (707)..(709): a, c, t, g, unknown or other
tgttctactattgttttttaattgttcccctattgtttcaattgttctgttttgttgttttacggttgttttataaaaagatagtattttgtaaaaaaattcgcgtcacaataaaattataaacttttaaccaaaatccatgtaaaaatcccaaaaataatatacaaattattttaagagaactcatccatatattttctctatttttattttttattcattcgttcatgtggcttgattataacctaataaaatgtaatgttaaaatagcagctaaatcgattactatccaaaaactttataataaagttatcatcaataattaataatgaattaaaaatttaacaaaatgtaaattgtattcattgtcttttattactattatttgtgatttgtttatgcttaataattatatcataatataataatagtttgtcattagaattaagctcaaaaggcatactttaatatttgtatatatatatatatatatatatatatgaataattatgttctatttttgggccataatcattttgaattagaaagtaaataaagtataaaattaggtttatcaaaaaatcttaaaattctacactcacgtaaaactattaggaattttttctataatagactaaaaatggaacaaatttacatttatgacctaaaaaagggaaataaacaaaaatagaaactaaaagttgttnnntacaaaaataccggccaaggaaaacggaggcatccatcttcttcgtgacccagccgacgaaccccaacaacccattctcaaccattttccttccaaaatcatatctaaaaaaaatgtagatctcaaggaaaaacatcttagatcccgaaaatcgaaatacaaaaatggaaagaaaaaaatcatccaacctccattgctgtacaaaaaaaactcaaaaacaacattcagtcaaaaagcaagtcgctttcagaggtgaagaatccaatagaaggagatctggaaatcattgaaactcacccatgattgaatcagagaaagaattgaaggtaataaaatatgaaaaaa

SEQ ID NO: 126572 - DNA, 575 bp, Cannabis sativa
tgatccattttttatggttcggtaggaatttttttcctaaatttcggtagggatatacgtatatatggtatttttgtttttttcggtaagtgtaagattaatatgttaatttagtatattagtaaaaattgcccattaaaataatagcacacaagcagcccatgcatgagttgaagtactgacataaaagaaaaaaaaaagaaaagaacaattaaaatgtataaccatgtcaaatttattttaaaaaacaagcagtatattatgcattaatataaatgaggttaaaactgcaaataaaattaaattagtattgtttggcgtaaatttctctaaaatttttatatacagtcgtatatataccaatatatttcatttttaaaattgtggggtacaaaaattttttgtttttaatatttaatgcactttactattatatcacattcatatcgtattgttaactcagaaactttcactataaatttttttacttttagtcacaaattttgtaactaattataaattattgttcttatattgtgactaaaaggtcagtggctaaacgtattagtcacaaa

SEQ ID NO: 126573 - DNA, 3491 bp, Cannabis sativa
  modified_base (38)..(49): a, c, t, g, unknown or other
cgctcttccgatcttgttaataaacatacttgtgagtnnnnnnnnnnnnctggtaaaataatttccatcaggtccaacctagaactttaaagtgatggctaaaattaacataatcaatgctagggagatcacatatttcacctttgagaatctttttagaggagaaatcattgacataacgttggtagtcctctttattatagaacaacagaggttcttaccttgctttcgctcttatctccgtttgttgcaaagctttagccaacctcttgctatctctttaggagggattggatgaggaagacattgatgtgaaaagcaagctttgtatgttgttggtagagatgaaggttagggtttgaacggtaataagaaaagagagtaaagtagaaggaggctattaaattagggtagataattagaatggggaataaaaactcgatggtggggtttttgagtggtgaaaaatcacatttgaaaggacaaaaaagccattagaatttggttcctgcgccatccgaaattctggatggtttgtgcacaaaccaccggaattccagttggtgcagaaactaactagcttttttttttttttcaaaaaatgcccaaaaagcttcattttttgacccaaatgaccccaaaccttttctaataccttaaatatgataaaaaaaaaattctcaaacaagaaaagtagaaaaatgttgaaaaacgaccatttacggtaagcttttcaaaaattgccaagaaaactagaaccttactgaaaatgagttttaagcaacgaaattaaaactttctttcaaagtagtttaatgatgtgaaatgtgaggtgtacaaacttatggaatcgaaaaatgttgaaaaatgagaaagtttggcaaaaaaaatactcttttaggccaaaaacatataaaatcaacaagtagcgcgctacaaatcgactatcaaccagaagctgaaacatgtactacaaaagggatatgaataagctcaatgattataatattaaattcattattaaatgtggcctaaataactcgtttcaataaattatagatgatagaagtattcaaactcgctgctacataagcatatgcaagataagaataataactattaataggtataactcatgagacaatatatatatgtccatctcgggatagacagagtttataatagaagtgttctagacaacataacaaagagcttgcagctcattgacccacatacttgggagtaagagcttgcaactcattaactcacatagctgtacatggagagaataactatgttcatccatctcgccctctgtatgatggaataactaccttgctaataccatcatggtaagagaagactggaaggagcaatatactaatacttagcattttttataaaaagatggtaaaaaaggacaactcacacttagcgacaaacaaccttcatagtcaatataatcgtttaaggataaagacaaaagagcagttgagtagttattaagtattatctcatgtgcataaaaatgaaacatggggaatgtccatgtttcatgaatagttataaataattagatccccattaatgaaaataactgctaccttatacacctataaataaagggcaaaattcaagaaaaaaaggaacgacaactttaagaaaaagaaattaatgatttaatatataaataaattttgattagcatataaatattttttttcttgtaagattttttcttttaatttagatatattaatgtactttcaaaaaaaaaaaaaaaaggaaattatctcatatactattttttaactttttttttttcaatttacggtttgagtttctaaagtggtttctccggtaatttctatgtgggttgctatacgtattttggttgcgatttagattggtccgttaattgcaataggagtttttatgtagaattccgtaaaatacaaaaaataaaatgttttgaagtatcaaaatgaaaaaaaatatattactaaaaaaatatatacaaaataaatcttaaaaaaaatgttatttttgtatagaaatattatttataaaaaaaattaattatagaaagctaatatgcttaaaaaacaatataagctacattagtcttccttttctaagtactatttgatttttatttgctaatgaggtgtattagttagttgaatggaacatgcttaatatatgcttcctaataaatatctcttacaatttttttttagaaaagacataattaataaaacactttttaatttatatcatctacatgttattctataataaatggtttaaattttcaaaagtcaacataatcaataattaataaaatatcactatcctatagagacaaataaaatgttcctattataaaaatttcctatatatatataaacatacaattaatttgatttgataattttggtttaaatattttagttatctacttcatagagattttaagagtatctacttaatgctgcaaggtctcaaactatatttccaaacttcaggtttaacgcctaatctttctaaatctgctttttattgtaataacatgaaagatgcagatgtccaaagggtgttaaatgcttcggggttccaagacatgagcttccattcaaatatcttggtgtgcccatttgtcttaagaaaatctcttcgaaagattgtagtgtgcttgtaaagaaaatggtgggtcgaattagaacttggagtactcggaatctctcatttcttggtcatgtggtgctcattaactctgttttgatggtgattcattcccactggtgtcaagttatggtgctgccaaaaaaatagtaagtgaaatcgaagttatttgtcgtggttttctgtggaaaggtcattatactttacctggtactactgcagtggcttgaaaaatattatgtcattctaattcttcaagtggaatgggatttagatgcatttcagaatggaatgttgcaataatgtttaaatatctgtggactattgctaaaaagagagatcatatttgtgggtaaaatgagtttataatgtgcatgtgagggatgaagattggtgaaattataaagctatagcccaaactagctggtattggaggaagctagtcacaataaaggaaaactgaagagtttaattgaaacaaatcaattaaatatggcagtagctacaagatagctcaaggctatcaagtgttatttgaaaatccacctagagtagattggaacaacattgtttggagccgattcaacattcccaaacatagcttcattttgtggttagctatgctttggagaatcaaaaccaaagatagattacagaaatttagtattattgacaatgcttctggtctcctatgtaatgatagaaatgaatggataaacacttagaggctgtttggctttacagtttaaaaactgttttctattttttaaaactgaaaacactttttaaaaactattaggagtcgt

SEQ ID NO: 126574 - DNA, 1125 bp, Cannabis sativa
tctctctctctctctcaactctgagttcttatatttgaactcagagcaattacaggagcgctctctctctctagtcttcagatctggccaaaatcgaaaccaggagcatcaatttataagagtgggaaacaatagagtatccttgataaggatcgatgagctagcaggtatacatttcagttggtctgtaattttctgttaatttcagttaggatcttgatttgtaactgtattctaggtaatttagttgtgcaagttgtcttctatgcaaccgacttatagttaggaatgttttagttggatttaattccaacaacattaaacttacagtatatggtcagaataaatacaagaaaatcagttagaaaaaaaaaatcataagatagtagattcttaaacataaagacacaatgtatattattcctttactattcaaatcaataaaacatatataaataatatatatatggccgaaaatgataaataaatttcaaatatttcttacataaaatatacaaaaatagaattaacaagtattttttttcaaatctaaattgctaatattttactcgattgtgtggtatagtgtagggatacctttgctagtatccctctaattaatttaggttaagggttgaataaggaagatatattgcttaccaatgatccaatcaatgtagatgagttacaagtcccttataagaggattatgcgtataagtttcctattgctaacaaaaaaactatttgtatttagtatgtttcgattagggtaattttgccaataaaaaaaattatggacttaattgttaaaattatatataagagcactcctaacaacttttttactttatcttttaaaataattcattaaaattttatttatattttatttcaaacttttacgttatatcatacgttagcttctctatgttttttctcaatatcattaaaatattattatttatatattttatttattttaaatattttatctcattaataatacttctatatattttttaaaatatttagaatacttattttttttttttggaaataaaatcatctttattaattgcaatccatagtgattacatgattaaaatctggagtaacatcacta

SEQ ID NO: 126575 - DNA, 1390 bp, Cannabis sativa
  modified_base (918)..(926): a, c, t, g, unknown or other
aaatgcaaatatgggaggtatgtttttcatattatttgtgatgctctaaataaagtattgatcttggttcataatctgtagtagattaacatatttagcattttgaatggcaaatgttccaatgttataatacagtataatactaaatgacatttatcatggttgttttcctcttaattgcatatactaattgctagaagtgaaattcatggggagaaaagagggagagaaagacctgtagtgactatttttctctgtccacctgatatccatcagagcatgtcactaccaacaagcgtattagcacatatgtctagacctagcactttcattatataacatggtggagctcagaaaagttaatttaaattgaagattattagaaaagggataataatgtaagcacttaatgttaaagattccaaaagagaaatcctagaaccatactcttaagattggaatggacaattcagacttattttgattgccaatttacagtaaaattcattctatcacaattaatagctaaaaaaagttcaaaaaaatcaaaatatcctacacgtatatatgtaaacgatgaagagattaataatatgaatagaaacccaataaaacttttgaaacattaatcaacacctttctgggtatagttctgagcagtaatacaggaaattgtgtacttagattcatcgagttaaagagtattcacctcataggcagcaagaatttgcacaaatagcttaaaagcctcggaatcgttcgtcgactcagtaaggtccgggtgagtatccttggccaatttgcgatttgaaataccattttatttttaataataaactattttatttttaataataaaccattttatttttaatataaataaaaagtcaccgatgaatttctcataaaccaagaatnnnnnnnnntaggcacactttatatagaatatacatctataaaatcattccaaatttttttttcttttctctccttaattttctcaattttaatattttattaaaacataaatctacaattaatattttactattattttaataattttttatataaaaagcacaaatttacaaattaatattttactattattctaataatttttctatataatattttaaaaaaaagttagaaaataaaaaatagtgacgactacaagtgaactacggtaataatatcacatttttctatatttttatattttttataattaagatatttcaaaaataataattaattttttaaaatatattaattaataaagaaaacaaagtaatgaattttctttaataaaatatttaaaattcgagatgaaatctaatattaagatatagatttgggaattacaatagtgacgagtacaagtgaacta

SEQ ID NO: 126576 - DNA, 885 bp, Cannabis sativa
aaggaaaaaaaaaaaaaaaaagctttcacacaaattataactagaaaaatttacataaataaactaaattttttttaaaaaaattactaaaataggttaatacgaaaaaaattacatttttttgtatatatacatgaaggatccaaaagctatatatatttgtatatttatttataagtttcatacatatgaaaataatgacatatgcatgttaagggaatgaataattttggattattcaaaataataataataataatggtggatgttatatatggaagaataataatattgagaaatatgcaaaatctaaatctaatgagttacatacatatatatataaacatacaaatataaatatatagggaaaatccagaaaataaataataacaatgaatatatttgtagtcacaaattgaagaacattatttctaaataataaacaacaattagggctatatatttttaacaaatccaactaaggtgtcggcacatttcattttcattattttaattaaatattttttttatggataattaaatggtttcttgttaaagagggtacatttatacattgaattaattatatatttaattttaattattttctgtaagagaataaaaacggatggatatccattacccagggacatgtgcattgagtctgagactgaacaaatacatgtcaactacagagcatatatatattttagttggtttttttttaaaaaaaaaaaattaattattttttagttatatttgtttgtggtaataatttaaaaaataattattttttattctattcatttacttagttgcattttaaattattaggttgtttttttattattattttagtgaaataattattttatttttttaaat

SEQ ID NO: 126577 - DNA, 860 bp, Cannabis sativa
tttttttttttttttacatattcttataattttgataactcattttagtattggtatttttgaacttttaaagtagcctaatatatagttattcaaatgtaatctacagttataaactcttatttttacacttctaacttttctaactattataatataggacgatatttttaggttataatctataataaaaacatcatgtgcataacataaaaaaaataaaattactaaaatttgattataaatattttttccttttatgcagataatttttgtagcatacaagatattgatgttatgcatgtgtattttggaagtctagttttaatctaaaaatttaatagttggccccctctgttatttgaacctggctctgcccctggacacactcatcatcgcatacaatgacaacatcaccttcattggaaattgtattagtctctttctcattttcttcccttgattctgctctctttttaatattctgcaatctcttattaagcgacctgacttgctacaatgataacacttgatatcttttcaagacttggatcttcttctagaacaatgctttctagaaccatgctgatttctagtctgacttcatccccgcctatcatgcttttcaattacaagagccccagatgaagaagaagattcaccttgtactttccttctggcctcttaattaagcaaacgatctttgactaaatccatagtcaaagtccctttttgagtagaattagaaattgtcatcaccaatatttcccaactgtcaagtaaagaactgaggagtaatgatgcttgcatctcatcatccatattcatcttcatggcaactaactagtttgcaagactct

SEQ ID NO: 126578 - DNA, 1282 bp, Cannabis sativa
  modified_base (1235)..(1241): a, c, t, g, unknown or other
acttgaaaagcaatgcgggaataagtcgtgcacatatgaagaaaaaaatttcgattggtacatcaaatcttcttattatttgggaagttattgatcaagaagttggggttattttttaaaataaagaggaagaagatgacaaagaaaactcgaattaaaagaagctagctgagagacttaattaaactttgtttgcatgtaattaaatttccggatgatagattgaaattatttgaatataataactttaaattaattattacttcaaagaaaaattttaattcataatatttgaaaatgttattgtatgtcatataaagtaattattaattttatagtaaggtttggcaataattatacaattaaaaaaaatgttaaagtaaattataactatcaaaatgttaaagtaaattaaagacaagaacttccctctttctggtaaggaagcaaacgaaatttaaaattacatttacaagaaaaaaaaattagcaatagggctattagagaagcagcttcgtttctcgtcttctttgctcaagcaagataccgatattttggtgtcttaggcgtagagaaaccacactaatccatctcgaacttagtggttaaactttaatgcgatgacaaatactgtaggagcctcgaggtcatgtagaaaagttgaaaaaataacttacacaagaatgataaaaatgttaaacaaatttattcttggttcacgcttaaaaattgtagttatttttttttctttctctcaaaagttaatggtttccaaaatagttaattgttttatagataggaagagatgaagttttctcaatattatttattaagctatttaggatttttattccccgaactatgatgtatgtgttattgtacccctcaattttttagcccgttacaaatgatccttgactattcacaatattataaattggtcaatctgtcgagttttatcacacgtggcaaactaaatgataacatgactgtttagcaaattgttacatcagtgccacgtgtataattcaacataaaaaaagtaaaaatcatgtattttaaaaaaaattattaaacattattaaaaaccttagatttcgtaaaatgttttgactaataatccatatattttgttagtgattataatcattcttcactataaaaaactgatacttttagtgataaaattttaatcacaacataatttgtttttactaaatgtgacttttagtcannnnnnnatgttacttgtgactaaaatatatgttagataaattaacaa

SEQ ID NO: 126579 - DNA, 1448 bp, Cannabis sativa
  modified_base (1403)..(1414): a, c, t, g, unknown or other
gagcaagttgattttttagcacccgcagccccaagcactcaccgcccaagttgagaatctgtcaatctgggcaccttccaagtattagattagagattcaacctttgcatcttctttgtgatcatcaaaaataaggaaataggtcattttagaggaaaaacatcaattcttgggtacaaaaattagggcccagcgcccaggttgacattttatcaacctgagccatttcaaatggaatttttcaagaatctgtttcgagcattttcttcattttaagaaaatattgagattcaattatttttggggaccaaacggaattttttggggggcaaaaggggaacccatcgccgaggttaacgcttaaggctaggcctagcgcccaattgacatattgtcaacttgggctatttctgatcaacttgaacaaaaagtgtcctaggtatttttatctgtcatcagaaataatgatgattcaagaaaacttggggagaaaataacaatctcaagctcctggaaaaagggccccacgcccaattgataattaacctaggacgctgccttcaattactcaaatgccaaatctgatgcgaccattaaatctagaatagtcaaaaacaagataaaagagctcgtcctcaagttcagaagccttgaaagttcaaaaacaaaatcttgggagctcgggattaagtacccagtgcataggttgacaaaaggcttggtgtgttgggttctgcttatccaaatctgatgttgtttcgatcgtctgtctagtttttcacaatgacaaagacctatgaagtcagagaagtcgaattcacaactttgcattgctcattattaaaaatgaagcgtttcgagtctctcatttttgtaaaataacatctctaagaaccggtgaccagctttgccaaaacatataaatagattaaatgatgtcaaaatatcacttaggcatctcaaagtacattcattagacatttttacacttacccaacatcaaagttaacatcatatgtcaacagacgtcaacttgggcattgggatgtcatcctgggcgctagatgtcaactcggcattgggtcatgaactgtcttcagtaaaatagccatacctcattcaattttgatctgattgatgcgactcaacttgtgtttcgtagctaattcaattttctatcaaatcatgtatcacacggtagacataattctgaagctattgtcgtcaaaattcactcccaaaagagttacgaaaatagttctaggttacccgcaacgaggcccgccgagctctgaaaaatggccatcactaccaagagctaattttcaagttagatcatcatcaaaggtcaaaaacatcttatttgttttttttttcatatttttgtgggcctccttcacctnnnnnnnnnnnnctcccttagctcatttttcacattcagaaaacta

SEQ ID NO: 126580 - DNA, 859 bp, Cannabis sativa
ttaatatttatatattatttgatttattaatgaaattaaaattttaattttgaaaaattctaagtgcacatttctaaaaataacgatgtattcttatttgttgcacttaataatttttttttagtcctgcatattataattatttaaaatattttataaaataattttgagaaattcaaaaaaaaaaaaattaacacgtattcttacctgtttcagtattcaagagacttttttagtttaatttttttatggtcgtgtacattataattttttaagacattctgcaaattttcaaaatataaaaaaatttaataagccgaaattaaaattcaatgcatgactcttttatttataagggtacattgtggtgattttaattaattaatatgatatttttttttattttattaaaaaataatataatagagagtatttttagtgtaatttttgatgttgtggatagaatgataatactttttaacactaaatttaatgataatgtgacacgctaaatttagtgtgctccttaaaatgctcttaaacatactctagtaattaatattgctggtgtagtagtataaaagtgtcattatttaattatgtattattttaaattttattataattaattcaataatttttattgaatttttaaagttatctgtatatagcattactcattttcatagagtgtaaaattagataattaccttattaacataatatattctttgacataacactactagtactgagctaaattactaagatatttatatatttatattctatataaagtgtgcctatataatagaattcttgttttatgagaaatttatgagtgactttttatttatat

SEQ ID NO: 126581 - DNA, 1930 bp, Cannabis sativa
gattagattgaaatgggttttatttagggcataaaatcccaataaacatccaccgcgaaagaaccagggtggtgcaatgcttaatccgcagtaataccagaaacaaccgaagcaggaatgtgatcagccaaggttgatgagaaagactgatcattgttttgagaacgacagcgtttaaggaatttgcgaacagattcagattcactttttcgtttcagagtgttatggtgtccgagaaagtctctatcaattgatggagatgcattgtttgtatttatattaccaaagttatgggatacactattggtaatatcatggaagtgaattgtagtagaagttgactctgttatgacagccttatttttagaagagatagtgttgtgagaagtatgatgaggataatgaaggttagtgttgggagggtaagtggcaaagggaagtgatgtatttgtaatggaggaaggaagagagactggtaaataggatggaaaagggataacagaggcatcattggaaatactttgtggtgaattatcattggttgagtgagatggttgatgggctgatttgtagtggacggggatgaggcttcagtcacagtgagagggtatggatgagggttcggcctatccacaatgttaggtaaggctgcagcaaagatttttttgctaatctactcatgagtggccatgcgttacccttgaaaaaatgaacccgaagaaggcaaaggtgatcccatcatttctggaccatatgacagtgaaggttccaagccattataaatttggtctaaaaaagtaggacaatattcaaaggatggacaatgataccacattcaaagaaaaattccagtaggcgttcataacgaaactcgacccaaaattactctctagaatcacgaattcttgccattttgcctcataaaagaggtttagtatcatctaacaagccctggaaatgaagaaagggtcctcatccctcgtgaatagagtcttcatccacctctaaataagttccaactatgttgccagcccacacagccatcgctttggacttgcttagaaacggaaggcggtgcaattgaatccaaaatggtgactgatgcagagattccacagtgacttcttgaagagcagagggtgcacgtaggacaatatgatggttttgaaagtgccaatgttccataataagggccattttcttgtcacatgtgcatccaaatgtaaccataaagagaccagaacggtgatcagagatagtaacagggtatctacccttctaatgtccacttatcttgatgcgaaaagtcttccgataaatctccttggaagataaaacacgagcaaacagagtatgatcatcatgagttaaatttcgtaactgaactgaggcaggtaagtcattcacttctctctctatatcagtaagagagatgttattactgagattgggaggtcgaaaaaccatgaaagaggagatttgagactttggaaaaaactaaaaggatgaaaaagatgataaaaaaagtgcaggaggaaaccagtaaccgtcgagactcaaagaattctggaaaaaactgattcataagcagttaaaaccagttaaaagtaaagaaatttaaaataagaaaaaactgccacagagctttttaagggcatacatgctcaacacaaactcatccaaataatattcgctaaaatccctacatcctctaattttgaatatatcaaaaggctcgatttcaaaatcccaggtcgcatctatgtgacctgccctatcttccatagtatcatattgctcggctataggtatacttacaccttggataaagatcagatatcacattctatgttgcatggttcacatgatttatttcatgattgcatttaatgtataaattctattaagtccagaccatatatatttgttc

SEQ ID NO: 126582 - DNA, 1400 bp, Cannabis sativa
tttgagaacttcgatatatccaacaaagaaaatcccactttaattgctcaagaaagaaataaatataaatgtatacatacagtgatcattcaagatctgacatacacagttctcttttcttgaatttttccaattccaaccttatcatatattctttagatttcttaatttaaacattatcttaaagtttactccttaattgggtgtcggtaaatcaccattcaaaatactacgcctataccaatatgaatatcatcattatttttttcaaattcattacatgtcgtatatgctctagtcatgtaaattgtaatcaccacttttattttaaattttaaatttctaactccccacaccccactcaagaaatattatccgggcttgcatatatttttttttagagtaaataaaactcagctagagtcggacaggccaaaatttttattttgtgggagcttatttatcattaaaaaatatttatatttatattataagcactcttactagatttatttaattttgtggggacttttttattattttggtctataattatcatattaaaaaaattacatttaatttttaaaaggcaatatttttattagtggggctatagccccacattgatactagtaggtccgttgctggctagagtacgaagaagatatcatttataaacaactattaaacttaattagtgaattgattagttagttagaaagttagttaggacattggctcacgggttagttagttggttagtgtttttgtttctcttgtaatctcagccagtataaataagttgatgaacacttcgtatcagttcagtttttgatgaatgaaattatgttaatttaattctatcttcctctctttctctctttctttcttactctatttcaagctcattcgagctaatatagtatcagagctagcaagctcttcttcttgattctggttctgatttgttgttggtaaatcatggcgcgggatggaggaactcaagcacgaggaagagttcatacttgtgctaatcgtgaatctgaaaataattctaatgactcgtacgtgttctctattcttggagagaattctcgatccactaatgctaataatttttcgaatccatactttctctccaatggcgataatccatgtattgttcttgttccaaaaattctcaaagacagtgggaattacagtaccaagagaagagcaatgctgattgctctggttcctcgaaacaagattaaatttgtaaatggaaagcttcctcaacctgataaggatcatgaagactatgatcaggggcggagccactcattatgttagagtggccatggccccccctcaaattctcaagaaataaatgtacatatttaagtgtatataaaataaat

SEQ ID NO: 126583 - DNA, 987 bp, Cannabis sativa
  modified_base (63)..(65): a, c, t, g, unknown or other
gcaacataaaatattatttctgatctttattagtaaatatgattatattgaaatgggttttannnagggcacaaaacccaacatttaacctccctaactgcctccggtctcgaccatgttatcctaactctttgtattatgttgggcgtccatttaataggactagcctgcgaactcataagttaagtaggtcagatagcgatcacataaactctatgtactgcacttatggattttaagacaatgcacttaaataaattatttaaaactagcatgcttcctaacattgttttctaatacataaattgctaaacaagtaaaggcttactgaaccatgagtcaagcttttctctgatgatgattgtacatgtcttgacgatcctcggtagacacgttggtggctttgataccgaaattgtgatgccctgatacttagactcgttataataattttttaatcaatgtaccacctcttctaatcaaaaggttttcctcaaaaatatgcaaatttatataaactttatagacatatatattttttttacataaaccgagatctcgtgtataaatttttacaatctttgcaaaaatacttttacaaacttgtcgcacagtgactacaaaatacaacccaagtggtcccgagactaaatagtccaggtcgcgtcgtctcggcatgtacaatcatcccccgagctcaaaattcactcatgttcagtcttcgcatttcctttacctacacacaaaaataatatttgtgagtcaacaaactcagtaagaaaatcacataacacataatatatcaccgacttgtatttaggcgcccatacacctatccacaaggcttaacagatgagtaagaacattctttacatttggtattatcgaccatgatatcagtcagtcactaccagtgctgtgatcgcactacaggcccagtactatgttcgtactgttgggttttgtgccctaaataaaacccattac

SEQ ID NO: 126584 - DNA, 1186 bp, Cannabis sativa
agactgaattgagattttattcgtaactaaaaattaatttctttaatgtaaaattttaaaaaaattattaaaaccgcgcgaagcgcggatctattccctagtgtatcataagagaaaatttaaattatagaatttcgtttggtattcttgactcaactcatgttcttgaggagtgtaccaacattttttttttcctttgtccatcacacattcacactgatatattttatttgtttctaaatagctatgcaaggttgccttttttctccaaccaagcatgtcggttttttctgggcttaggtatgacttggtcgatattgtttttcactagtgccatttgatttttgctagtacgattagcctagtatttgtgacatgattttgagtggtttagctctgtgacatggttttgatcgtgttttagtcctgtctatgtatcatagttttaagtgttttagtcttgtttatgtaacatggttttgttttgttttgtttcgttgttgattcttctttattcttcaatctcactattacatcactgttagtggttagcaataaaaaaatttttccaactgaaagggttgttaattagtagtacaattgcataccttacacaatagttgagtgctcatgctacgaggttgaacatgctacaacagtttctactgttgtattatctgagcagtggatgaaacaaaatataggtgttcttaaggttaattgtgatgttgcaatcattttcatctgatttattttaatgtttttgtcaaacaatctggaaattagacactgattattcagttcatttttctaattttagtcttgttcgtgtccccaacatgagagatgtcccaattcaattgcagactattattttaaccaattgttagtgataaaatttcatgatttattgaatacatatatctgttcaatataaattgtggctatgtaacataattctttgtttaacgttattttttaattttttacgttaattttaataaaatatactattatttaacagaacattttttttttattaattttataatattattacatttaaaataaaattatgtagagatatactctatataaagaaattttaattttattatatatataaaaataaaaattatgcagatattttatttaaagactttttaatttaaattaaaaatactta

SEQ ID NO: 126585 - DNA, 688 bp, Cannabis sativa
caatggcgaaatctactgaaaacttatcagatttctttgtctttgccattgccataactaaccctgccaattatttataattattataaaaatcttttcgtctataaacgcaaacacattgtaaatcatggaacacagaatgcgcccagacaataaaattccattgaaacgaattaaatttaaaaattaacatgaccaatgccaatcaaagaaagaactgtaacgaatgatagagtgttcaattacctgatatttaatttattgaatagccgagaatggaaccgagtgtctaatttagccagaagaatatttggtaatcactcttccaccacctcaattggtgacgacacttcgacaagcattaattgattatggttccacgaagaaaataataataataatcatacataaatagaataaatgaataaataaaatggagcgaggagcgaaaaaccacgcctgatgatttagagtaaaaaggtaagtcttcaatggcgaagattgttaagggaagcaaagattgggaccttcaagagagctcatccatgtcttccagacagttgaggacacccaaaagagacgtcttaaaacgccgccacaaacatgatgaataaatagattcagatttcataaaaaggatttcatggctttctcccaatttaaataaatagagttacacttaaaaaaa

SEQ ID NO: 126586 - DNA, 1471 bp, Cannabis sativa
tatttataatcaatggcaaagggttaccgaccccttaggttatagtccctatatagtcgtcgattttcaacagtcgggaagttaatactcgactatttttaaccagtgcatattccaccagttttgtatcagttataggagctggcgactataatcgacgaaaaaagtgtacttgactgtttaagactatcggaaacacttttttttttgttagtagtacctatatgttttttaatagaaataactcaacaaaaacaagaatattataaaataataaaatatttaaagtcaatcaacaataatatattaaagtaacatcaaaagatgccaaactagatgagaaagtcatgggaatttaaaattatgtcaaccagcacaataaatactctacatattaaatattgttgtttttgaggcatcgtacatgttcggaatcaatataacatatatcctaattaggttacacatttaattattctaacaaaaaaccttatcgtttcctaattaattattgacatgaaatgataaacaattgtaaaagaaaattaaactcaattagaaacatatgattgatctctaggtagaaaaataaaacaggagggaaaaggaaaagatatatataggaatatatttttaaagggatttggaaaagaccccgaatgatcaagtgatatgtggaaaaagttttgcctttgagaagtatatgattattacattattaattattttattatctttttcaaaaaaaaaataatgtacttttaatatctctgagtatttaagatccttgattcatgtaatagcatagattaatcacttgtcttagtttactgacaaaaagaaaccaatattttagatagagaaaggacaaaaatccaatattttaatttttagagagagaaaaataaaggaaacccaaaacgttcaacacatatatacgaaatgacctctttagcctcatcttcttaagatcttcaaatctccatttctctagatctctcttccaaacacacttattaaaatctaaatcgacaaacaacgaatacaaatcaaaatacactcgccattagtggaagattgttggagaaaactaaattggcaaaatatggtacaacactatagagtaattctggaaaataaaatacccaaataaatttcaacaaaacaagactttttataaactccttgtaaataaaaattcttttaatctctgccattgtcggcaacaaaagctgatttcagcttcaaaggctttcaatgtgagcctccaacatttatggagagatgagagaagttgaaccgtttcttttgttgaattatatttttagatgatttgcaagaattttagtatattttctaacttatttgtgcttgcagtgattctactttgctaatccagtgttcagggccggccctgacttttagtgggccatagaaaaaaaaaatattttggactcttatttagaaaaaa

SEQ ID NO: 126587 - DNA, 1257 bp, Cannabis sativa
  modified_base (886)..(896): a, c, t, g, unknown or other
tcgagtgtatggagtatacattggattggaccgatattaacttggataagatatcttaaacttaccgttatatcattctaagtcaataatactagttgatcttaggtctatgaatctttaatcctgatatggttagtttcagcttagttgtattatttatgttattagaggttttcgtggaagctaacaaataattctggtggatatttacatcttgggcctgaacacggtagttcaattgagtgggagcgctgatcatagatataaaatctatagcttctataagtatttagaactgaaacgataattttttttcgagctgttttgagatattgaaactggaaattgtccatctcaatgagctttcatttgtatttacagtgttgataagtaaacgggtttcttggtaaggacacgatagctagtaaggtgtgttcatttgagggatggcttcttgtgtatcgtcatcaatgaaggaaatcacagacttctcttcatcattaagggagactatgcctttcatcttgtttgttaatggatccatagatgaaattagtgaacgaaaattcaaaacagatgcttaacatagcaggccagttacatgatcaaaacagtaaaatcggagagaatggaattttaaattgcaaaaaattgaaagaaaaatcataaaagaacaaaaaactgcctcagagcaaaaaacggcatacgctctttcttaataattccatgctcttaggagtgctcatagacatttattctaggggtaagttgaaaaatccctctttttttgtatccactaatcaaaaataccctcatattattttttttattaaaatatacccacttttttttagtagattatctaatataccctcactctctactnnnnnnnnnnntataatttacataacctaaggggtcttatggaaatatcatctataaaagcgggtatatctaaaaaattatgaaaatagaggtaaaaattaaaacaaataaattaaagtaggtatacaatataatttcttctttactctaaataatctagctttaattttgttttaactgctataaaaaacataaattaattttttaacaataaattcagttttaatttgatttcgtacacatatatgttcaggtaaagtctagtgcaataaatataggaggaaattacactttataccttttttatattgtcctcttttatttttaccttttttttttaaagtctatcattttacctctttttttaaacat

SEQ ID NO: 126588 - DNA, 696 bp, Cannabis sativa
tggaggaaagctcaagataaaagtgctctattatcactatcgtttggaaataatgatgatggggttgagctatggacaccacccgaaactaataatctcaagattaatgtagatgcggcactcttcccaaatgataactcatatggatacgtcttagttgtaagagatcatgttggcaagttcattgaggctaaaactagccaattttctggtagctatccggctgaagtggttgaagccttggggataaaagaagctctaagttggataaaaggaaaatctagggacaatgtggagctcgaatcggacagtcttttatctgtgcaagcaataagaagtaaccaaaagatgtcctctacttttggaatagtcatagaagattgtcgtttgttgttattgtcttttaataatattaagatacgatttattaaacgatcagcaaatcgagctgctcatgctatcgcaaggcagtctcgattgatctttggtggttgcattttagatcaagatatctggcccaatttgagggatatcttgttttttgaatgcttttgatttaatgaagttgatatttcattcaaaaagaaaattattcttttagttaatgttttaagaattattttatttattattgagttatgaagtattgtttaattaattgtttatttttttatttttttatcaataaatgtttta

SEQ ID NO: 126589 - DNA, 786 bp, Cannabis sativa
gccttccaccccgttgatttcaaatgtggcccacttgctgaagcaatagaaaccgttatgaaggcccacgttctttatttcgtaaaagcagctaaaatcctccatcgtaggctccctatgcgcgtactccatgtacatcgcataaaaccctaaagctatacgatagttgttcggggttagttgaaagggggacacatcgtaccgcttgagtatagcagagatgaatggatggaagggaatcgacactccacatcacagaatgggaatggacactacgacatcctctgaaggtatgatcgcggggttagtaaaaggaagctgcggtctttgggtagggcgaggatgcatggtgtcgagtcgcaataaatttaatcttgaaaaggcggtcaaatcggatttggtgactcgtgagaccaagtcctcgcaagagaaaggctcattcagttgcgtgttgtccactgaatcactcctgcttccttcgacatctccttcctcatctgactcgcgatcaggagcctcccaatcctcgtccatctcctcaactttggtataaggagcatgcctggaatgaacaagttgttcgcgagctgacactgtagactcgctatcacgaatctcgatagttcctggttcaacgagctcctgaaccattttttcgatatctgcggagtataacggacccagctccacatcttcggcaattggggtctcctcttttgaaatcgaggttgggatgaagctatcctcctggtcctggtcgcggtcgaaagcattgcctccagagcc

SEQ ID NO: 126590 - DNA, 807 bp, Cannabis sativa
gctgacttattattggagaatgggaagtgaaatcttctgaaactaaattggttgtatggtcgggacactgtttaagcccttttaaaagggggaaagcattcaggacaagggagggatcacttaattggaccatggaaccgaatggtaaatttttccaccaaatctacctaccttttgcaggctcttgagagaaacccacactgtcatgttgttccttctttgtggaacaaactttagaatagtaaaatgtatgagcgacataaagtactctggtagagcatcatttccaatgctcttccgattggagccatccttaaagatcatatgaacaccaaagaccatcctgtccgatttgtgggagagatgaggaaattatggaacatcttttttttccattgtaatggcatctcatctgtagagaacttctccttggggtcccattcctattcgagaatcagggactataatgtaatattattaacttgagctttttatatacccaatttaatttgtttagtctttagatattcccactttaatttctttgtatcatttcatacatataaatacccataaaatatataataaatgtgtttttcatctccacatataggtagtagtaaaggaaattctcacttattttattggagtcattttgatttgtacaataatgcgtaaattgagatatatacatatactagtcggaggcaagtgtattcaacatgactttttattttaaagggactcatttattataaaaatatgaaaaattttatttatattccacaaattaactacaaaaaatgt

SEQ ID NO: 126591 - DNA, 512 bp, Cannabis sativa
  modified_base (58)..(59): a, c, t, g, unknown or other
tagtaaaatattaatttgtaaatttatgctttaataaaatattaaaaaattgagaganntaaggagaaaaaagaaaaataactctagtcaacacatctgcccttcgtgcggttgttataaatattaaattaatgtaaaatgtaattttttgttttcattttctttgaataagaggtatgaatgattaaaaaactacaatctgatttcgaaaaataataaatatgagtgtatcatcgtcttctcttcatacttttttttataaatacacaatacaatccaacatataacttacatatttgttcaacaattacaaataacaatatataataataagaaaaaaaaattagcattacacaataaccaatgtttgaattgtatttttgtatgaaagatagcaacatattacatatacagtagaacctctattcaagaatatacttgggaccaagaaaataatattttaattgagaggttataactaaatagagttacacttgaaaaaaaaatcaaaa

SEQ ID NO: 126592 - DNA, 1749 bp, Cannabis sativa
ctctctctctctctctctctctctctctctctctctctctctctcacacacacacacacacacacaccaacctatcataattgagttttgaaatgttcagttacaatgtccacttaatagttttgaattaaggataattgataggcttcatgaagtaagaatctaaattttttatttgttatttgcatgcattaggataatataagttgtatagattatatatgcatctttgtgtttgtgtatatacgtgtatggatgcatatatacgatgccaaattatcatggtaatacattaatgagatttgtaatcttacatgaaaataagtcgtttattttttgagtagaacttttttgatatatgtaactatatcgatttactcactaattacgtattttcactgcgtaaaactatgtctaataggattacatttccaataatagcctccttaagtactacacatatccttttatattcgactttcatggttcagtatgaaatttttgtttgtttagtacttcgccaaacaacaatacctcatcaacatcttctcctcaatacatagggcaccacctcaatacacatgcatgtaatctctagtatttctaacatacttaagaatactttttactgctattcaatgactcaatccatggttgggtggataacgactatccctactgtatagtaaatgtcagtacacaacaagacacgcataagactgcctaatgtagaactataaggatgttgtctcatatccttttcttaaggtgttttaggacactgctcttttaaaaggataactccactatggattagcatgtcactttttttggagttttgcatgttaaaatgttctaacactttattaatataagttgcttgagacattacttagactttgttatttcaattcctaagtatttgaataagaaatatcattaagagtctttcatttagaattgttcatctaaccatcatttctttacttttaataatgtttctacgtcattttcaatcaataaatatcattaacataaagaataagaaatactatcttatctttaatttatttatagacacaaggttcattaacattttgttcaaaaataaatggttttattattttacccaatttaagattttaagatcttgatgcttatttgagtccataaatgcacgtatgaagcttacaaactttttgctcttgacctttttctccgaccccttgagacatccatttgttaaatctcacaatccatacatattgcaatggacaagagtatccgaattgattttaccatggctatctataggagaagctgtttcttcaactaattttaccatgtctataggagaaaatggttcttcatgtcaatttcttcctttcgagtatagtcttaccttgaaaggctctactctcccatccactcatctttttcttctccatttgcaaccaataagtttgacattctcatgtggatcttcaagaatccatatgaaataggaatacatcaattccatttccaagttcatgatgttttccatttcaatttatcaaaattattcgttatatctctatatgtcaatggatcatctttggcacaagtatttgaatttcgtgttcataataaattgggagaaatttcatttttttgaccctcataaaataccccatatcaaaaattataccctccattaatttgtacaaatttattccattgattacatgaacttcccattttaccctt

SEQ ID NO: 126593 - DNA, 951 bp, Cannabis sativa
tattataacatatatttaatcaatctcttttattatccttgtactatttttacaattgtgttgtatatgtcttgatttatcttccattgtaataaaatctctaacaactatagaggtgacagccacgcttttgttgatacgacgccaggttttgtccccgtcatcaggccacagtacagggcatgtgggccattgtacctgcccaaatgatccaacaaccatttataagagcaattcaaaaatgggaggcccttgagcgacatgtatggaaagtccggatagtacgagctgacacctctatacaccatgtgatggagatgccacctaccaaatgaacggtcggatctcttctagtaagatcaacctagaatgcacaagaaagaaaaaatcgcatataaatacccctgcatttcacaagatagggggcgactcttaggagtctgaaaaaccattgtttacttactaaaactctgctcaaattcctattgagcttcttcttcttcaagacgaatgagaggcatataaagtttaagtctgtaatgtaactacttttaatattcattatttgtcaataaggccaataaaatagactcgtggagtaagggtagttaacgtctaaagctctaattaattaatttttaaaaatctcggtaaatattttggtgatttcattgagagctaaggaaagacttaaacatgcactgtgtttgtcatcctgaatctcatgttgcaacaaggggaacccgtccaagaaaaggaaaaaagtcacatcttgactatccacaaagatctggccagaagtcgaaggctcgctgaccaagggcattgtcaagaatgaaggcctacatccctgccctattggaatatgttttacaaggatctagatttactaccatgtatgttatttgacatcctaatatgaatttctaaaacaatgtaaattaaacacat

SEQ ID NO: 126594 - DNA, 600 bp, Cannabis sativa
gatagcttgccctctagtgaccttcgtaaatcccttaggtaaaaaattgtagtcccccctttttcatctgcctttctaataattgtaactctttattttgttttggagacatgggtggttttgaagttatcatggaccgaaatgggaagaagaaggtatccaacacaggggtccctacaactgccaaggtggtaccccctaaaaggcacaggaaaaccactgcccacaaaaagaagtccttgtcttaacctattgatctcgaggtctttgataccgagactcaagaacaagtccctcctccagttgtccctaacaccaatgctccccctcctgagacagctcgtgcttctgcctcctcgagccgggtcattgagtccttatcggccgcagtggaggaggcttaatctgaattcgctcaagcgtacggggttgcttactagcataaccttcaggctcttctccctcctgattgggatttaatcaatcttgggagtctagaagagatgctttcaaagagctttgactagaacttcatgttggaaattattttaccaggatcttagatctaagatcggaagagcgtcgtgtagggaaagagtg

SEQ ID NO: 126595 - DNA, 800 bp, Cannabis sativa
gtaaaataaattccaacactaagggcatgtgtaatggatttttttttttatgaataaggatactttgtattgctcaaaaccatcaattacatcccttgttctctgtacaaaaccgactgctttacactttaaaactagaactttacaaaaattacaagttcatcacccattgcttttccacttcctttgtcttgcatggaaatacccctactattcttcttttactctcctgttgtgctctgtttacaattaccttagacttgccattgtttttggttccacagtacatcatttcgtgccccccagatctgatacaccaaggcagccagcatagtaatcatcatgcttctccttgttgctgagactttcttgaatttgatgatatattgcagcaatttctgcaattctactgcctttgttccccactgcagcctcttcttcaattgtgataggcattcgctgctatattaacattttaaaaaaataaattctctatagattcatttccctgcatgtcatacttgcttattctgtcattagtattcaatctaccccacataactagctatatgatgaatttatgcttaggaataacaagtctatcccacacatgtttgcaccatgccttcttctctggcttgctgtataataactgatagctatttgatattataaatttctgcataacaaaagcaaccagatcagtctttaactttattctgtgtaatggattttgaaggttcttggaacaagtacctacctctgattgagttttcttataacaatagttatcagagtac

SEQ ID NO: 126596 - DNA, 688 bp, Cannabis sativa
  modified_base (644)..(645): a, c, t, g, unknown or other
gtaatcataattcacttcaaaattctaaattgataactaatcagattgtggtgggttttatttagggcacaaaacccaatatacctcacctcccaatggacggctcccatcattgcatgcatcgtaaagaacactcagcaaatgagaagactgcctaagtctaatcactgccattttgagcttcccaaagaacacgcgctcggcacatgcgtagaaacccaaaagtcagcatttaagatcccgataagaaaacagaagatattacgccttcctaataatgacacttcggtttgacgactaatgatgcaatgcattaaaagacttatcataaattccctgggcgtgaaagatctctcaagagaagatactgcaagttcccggaccatggtatgtcccgaaagcttgggggtaaatattatttgcatttttgccatgacgacacgtggatactaattaaagaaggtcaatgagtcgttaaatttttgaagtgcctcactttgcactctgagaagataacaacattaacctcgaagaacaagtctccgcgagagaagacttcccgagtgcgggccatgcgagaaagatccacgagctaatgtctctctccattgcaaaagacggaactgttgggttttgtgccctanntaaaacccatttcaatataatcatatttacttattaataaaga

SEQ ID NO: 126597 - DNA, 1123 bp, Cannabis sativa
tctaagttggaattggtcatttccaatcaagaatccttggccgaagattttatatctttgcggtgttttgttgatcttaatttcaagtctgtcatgactgtgatttaggatactcaagaaaaagttaatgtcatttatgatcgaccttctattgaggtattcattttcacagtttttgtttcatattttttctactgttattgttagttgttttcttgatttatttcagttgcaatactgtttttgaaccaggttaagtcatctgatgaatttgtcacccaaaattctgatgatgatgatgttgatgatgatgatgaggatgatgacacaggattacttgatccaaagaatattgatactgattccgatgatggcgatgagttgggtaaagatggtggtgatgcttctggagtcgataaggttgttggtaatgttcctgttgttgatgtgatacaaattgaggttgttgcaggcagtgaagaaaggatcaaggatgttgaaaatgttaagaccaaagagtctggtgtaaagggagatgattttttcaatggtttaagccagcttgaaattgataatgagcaagttgtgttggctagtttagaggttgttgctaaaatcaatgtaagtgtactttttattctttgttaggttgtgttagcatgtcagtttttttagttcttagacagttttatgttagttttgcaacttttactttttttttttattttttaattttctatttcaggttccaaattctgatccaaatattgttgttgaaaaggaagatgctattgcttctgatgaagaagcagatgacactgttacttatactccgctgttagataatagaaagcgtgccccgtcattgaaatcaccttttgttgattttgggtcgggtgatgtgagcagcactccaatggaggtaatgtcctcaggttctcaatctggaggagaggagagagattttaagatggctatgtatgtgaagggcctttacgctcttaatgattcattttccgatctcatatctcctgaaatcgaggctaagttggatgcttggattagaaaaggattgctaaaatatcctaggtgattattttctttatcctgtttttattttttt

SEQ ID NO: 126598 - DNA, 1669 bp, Cannabis sativa
  modified_base (44)..(82): a, c, t, g, unknown or other
tgtgtttaattttctatcattttagaagttcatatttaggttgnnnnnnnnnnnnnnnnnnnnnnnnnnnnnnnnnnnnnnnaaaataatttccaacataatgtacattatacaaactaagataacagttgaatgaatcagaacaacgaatagcgaagcatccatctcgctataggaaggcatactcatggtaccttcactaatcagctttagacatctttcaatgagatctactactctgtcgagtcagctccatcaaataaaagctgacattcaaatgatgttgactgctgaaattcaccttgtcatcaagaattgcgattgtcagctggagagttatgccttcaatagtaaaaatgacagtatttacattattaacctcagaaagacatgggaaaagctccagctcgctgacagagttattgttgtcatccaagcgaggtgacccagtgagatatacttaacagcgtatcaagacccacattagcattgacttggtaaaagcggataaatcacagctgtgtgattttcaaataataaccacatttattttacgtgggacataatcaaatcccacaatttgaggagattattgttgtgggatatcaatctgattataattaactgccctcctatgtaactataaataggggcagaatacattgaaagagcgacaaaaaatcctttagagaaagaaccatagttttgtatcagagaaatctaataagatagactcatagactatgcagaattttaactgcaaaaccacgtaaaaagctttgtgttatttttgcttcttttactactattatttctgtgtcgatcaatcacgaaataggcttgaatatcgttaacaaaaaatctgcaataacagtttggtactttcattgagagcctacgtgaaaaaagctcaaaaagaaccctcatgaccaaaagagaaacctttctccatggttgataacggagaaaatgttgaggctcatcctgaagagactactcaccgtcttagaaaagagtcaatgggctcacggaggcctcccaactcacgatctacgcggaccactcgttccagaagaacctaacctgaaggtggccaaaatacacggtccacacgttcaaggaggattgagcatgaaaatggccagaacctagaagtaggggatggagtacccaaccttgggggtgctcaacctttggaatatgataatgatggtgcctatgatcccacaagatacatgccaattgtcgagttggaaaattaccgtcttaggcgtcgcctagaggaggcaaactaacaaaacactgagttggaacgtgaggcagccgcggctagggcggcacaagagaacaacacacaacaccaacctgatcctagagtgcaaagacaacgaggcagacctcgtggctcacgaactaggaggcaggagacggctcaagaggatccacagaacgctcaggaagaacaacttggggaaactgagggtccccctgagaatgaacaagcaaatgatcaaccggagccttctcacagaaatgagaatagaaggtgactagggacaagggaactggaaatcccccgtgagaacgagggaaatcctgggactcaacctaggacaagtgggtcgccaccgagacatcgccaacatccttctcgaaccaacagggaagg

SEQ ID NO: 126599 - DNA, 1103 bp, Cannabis sativa
  modified_base (229)..(235): a, c, t, g, unknown or other
  modified_base (1048)..(1058): a, c, t, g, unknown or other
tttaggaatcttttaaaattagaggaatcaatttgtacaaattataaaagggtataaattttgatatgggttatattattaagggcaaataatgaaatttcccttatatgatcaacgtcaactattagatagattggagacacattttttttgagtgtagcgtaatggtattttacaatcatatattagcttaatagcttaaaagtcctaggttcgaacccatgacctnnnnnnntttcccatccctccctcaccactatgctagccttagtggcttctagatagattggagacacaaattggtaaaaataattaccaatatatgcaaagtgtggtattaagtgaaaaaataaaaaaataaaaaataaaaaataaaaaataaaaaatcagttaaaccatctcaactatcatttcacttgtatttaattttttaagcttaaattttggtagtaaaatcttctaaattattgaattgttagcaaatattcaaggtattatctattttttcacaggtaattgctaatatgaactacttgtacactcttgaatacgtgacacgtttataattgatacaaatattattatttaaaaattataaaaaattattttaacatttttaatattttttattttttactattataatttattagttttaaaatgaatttcgaaataacaatattatatatgtttatcaatataaatgtgctacgtgtacaagaatgtatacataaactgttcatagagacagtgacaccttaaatttgctaatggttcagtaacttagaagattttataccgctaaaatttgagcttagagaattaaatataagtaaaacgatattaaaaggattatatccgctcaaaaaaaagttaattttatatgcataattaaccacaaatcacactgcactaattcaaaatagtacggtttcactgttaatttatatattacaaaaatatataataaagtggtaccttaaacattacaactagttgaggtagtttttggtaatacttttcttttctaattttttaatcacaaaannnnnnnnnnntttttgtttttaaaaattttatttttgaaaaataaaaatgcgttc

SEQ ID NO: 126600 - DNA, 1257 bp, Cannabis sativa
gttaatcaacatacttgtgaatagatctaagatcctggtaaaataatttccaacaaaatatttatttattgtaacaagtttttgaatttaatttttgttatatttgttgtcccaaccattcttgttagtcctgatcttaagttaattaggtaacgagtttatgtgagttaatttttaatttagttattttacgtaattgatttttttgtcagattttcactaagttgtttgatgtaattagttttagtttttgtgatttaatttataagtcattgttaaaaattcttctattctatgtctatggtatatatatatatatatttattttaagtaattaattttcgtatttgattatcttttcattatttatgtgtcatataattagttaattgtaaactagtttctgtatgtaattattgcttttattatattttacgtaattagttctaagatttagtactatgacaacttcaatgtctaactgtgaagactttttagtaacaacaataattttgatgaatttttcgatgattgttctgatgatgataataactctagcaaatatttttattctatttttttatcttatcgaatagtgactgttttggtagtggtttgattgtcgagatagaagtttgtaactggtttaaatttggttactgtgttattggttttaactttaatagtgggttgatggtcgagtcttagagttctgagaagcatgtaaaatttatatatgagttttggaatgccttaagaaaccaattttgaatatatagatttcttaacttattgcatgaacaaaattatatcaagtattgttttaacttttgtagtttggttttactaaaaaaaactagcttctgtagttgctattaaaaatcacgattttaattttttttatggtattttttatccttaataattgatttattttatattttcaaggtttttctttaaaaaaatatcatctttagtgttttttttttcttcatatttttgtaaatatcctttattaatctcttttagttattgtaactttagagttgtaatttgtcttatttttattatttttgtttatcgcattttaatatcctagcactctttgtagtcgctctctcgagttaatcgctagtgctcaaatgacaaccaccaccacttattcgtttctcccatatcgtggcagatactacaaaaaactgctacttttagtgataaatttttactctcaatataatttttttgtgactaaacgtg

SEQ ID NO: 126601 - DNA, 658 bp, Cannabis sativa
gttataatggtctgttgaggcttttaaaagatcttagttttattttccttgtaacttttatatgagacagatagtatgggaatttatccaataattatgttgtctcttctagttattattattgataagtatattaagttatttatgttgaagttttaaactagtattatgagagttaaaatactatttaggaaataattagatttattccttattttgttgcttccactgttaatattgatgatctacagttgactagaatatagtaaaaaaattccatatgtagacaaataaagataaaagattgtacagtctaatgaatctatgattctatatatgagataattttaattacatatgtctctaaacatctaatcgatagccattagtagctcttaatctttatttggagaatcgatatgattatatcacattttcaagctataataaaacgtgaaagtttaggcttaatcccataataattgagagattttttttaagaataagttgtttgatggtcaaaataattaaggtgaataaatgcctatagagagtctccactctagcaatggattgttgtggacattgttccacatagaataaatagtagagaattgagccatatataatatcatggactactccactcattaccaat

SEQ ID NO: 126602 - DNA, 1020 bp, Cannabis sativa
  modified_base (30)..(34): a, c, t, g, unknown or other
  modified_base (983)..(991): a, c, t, g, unknown or other
ccaaataacacattaaataagtaaagaaannnnntctatttctttattgataattgaatagaaaattacattgaaatagcattttatttacggcacaaagcctaacacaaacttcctaactcacttaggggtagtatacctagctatgttccttaaaaaatatacaagttgcccaattattgcttcttgtttatccacatttaattttgtcattgcactttcgtttgaaaattttcaaactaatagttgaaaatattggttggatttcgatacatcttcaaccctcattcttgaatggtggaatcgcttgaagtctattacaagtccaacttagttttcacctttagtctttggagtgaagccacttgaagactatgcatgtccaactaaattctcacaaagggcacatccaataagttttagcattgtccttgaaaagggaacattgtttggatactactggagttgccttggtctactgaccatgctgacgaatttcttacaacgagtgaggaaaagaagtacgcctagaaaccaaccgtggtccagcaactctcttatcacaaatttaggaaaagtctgtgtaatgttgtgccatctttgttgcattgaatcgagagaggatggtctaagtgctagcacaaacctatcttcatctccctaaaaggaacctttctaggattttgtgcacgcttagttcccttccctaattagtctaaataacacaaatttgttgtagtattctgcctagggcaattaaatgagaaacatgtagacgggaggtaagctccacaaatcctataacggtctgagaacttaagtttacaatccctccgtgtaagattaatttgctagaagtgtgtgaaatgtcgggatgaagattttgacaaaatttgacgcctaaagaatgtgaagttttgcatactttgaaaaagttcaaccgcaaagttacaaagtcattctttcagtggatataggcatannnnnnnnntgcagagtttgatcttgtcaaaaccacta

SEQ ID NO: 126603 - DNA, 906 bp, Cannabis sativa
  modified_base (35)..(53): a, c, t, g, unknown or other
tttgttgtgattaaaagtcatatttagtcacaaannnnnnnnnnnnnnnnnnnaaaattgtcactaaaagtagctattttttgtagtgacgcgtgtaaattggatatgaactccacatgctccaaatgtgtaggttgattatgaggctgtcaaataagtgattatgatagcattagtatgtaagttggattagatttgttttataattatcatattttgattattttgattatgcgatggtgcaaattaagtttgactttatattatttagtatatatgttagatttgtgttttatcaataatgagaaatagattttaaattgtgtttattttatttttttcactaagttatattttattttattttttaaataaaatttactcttaataatagctaaaagtattggaaagatttgagatccaatagacaaccaattaatacattaaatttagaaccgattcaatttattcattggatcagatcaattgagttaattcgattggatggatcagttcataaaatccaacattatttaggattaatttcataaatcacaaaaataataataaaaaaattacacaaatacaattgtacaaaattttaaatatttttacgattttaatttatataaaaaatataatcttttaatgaatgttggtgtaaagttttgaagttatacaaattatctcatttaccaaaaaaaaaaaaaatacggttttttgttattttttgttgtgattttgatgttatttttctgatattttaatgcagtttccatgttattttcgtgttttttaaatgttatttttctattatttttatgtagtttttccgttttcgtgtaattttgttagaacaccgtaaaaatattaaaaaaaatctttaaatataaaaatgtatttttt

SEQ ID NO: 126604 - DNA, 1207 bp, Cannabis sativa
cttgcttaagtccataaatggacctattgagtttgcaaaccttctcttcatgccctggaagcttataaccttctggttgctccatatagatagtttcttagacattctgggtagattcgccaattctcgtttccaccacgacaaaaaccttgattactctaaaacattttatttgatcctttagctgctaaatcattaggtcttttcttacgatcacctaggtcacttcctctacccgaatcatcaccagattgattccacgagtctctccttgcaatatttctttttcgtatctagtcttcagcaccctcagcaacaagagccaactcgactatctgtgcataagtctaagcaagcccaggttctttagcagcgacaatcacgtctcgtgcaatgtgctcatccaacccccaaataaatttagcctttctaatggccttagtagccacttcttctgaagtaaattttgccaatcgatcgaacttggtggcatcctttatcaccgtcatactgccctaagtcagtcatataaactctcccgtttttgctgctcgaatggactcattataatatttcttgtaaaacattgcccgaaaagcttcctcttaggctatatttagcctaagtttcgggtcacatttcttcaggtttcgatacttggaatgcagaaattggacaaatttcggaaaacagtgatctataaaatagagaaaattttgaaagagaataaaactgaaacttcaagcctaaattcgactatgttctgatccgattttggaaaaagtcaaaacttaatagttttatatcttatctttatctttccaaagcatcttgaatcagctcatttgaagtttgtatgagaaagttatgcccattttactgaaagaggtcgaagcacaaaagaatgggtccagtggccgcggcggggcttttggccgtcgcgccagtggaccacagaaagcccgttttttcacttttctacatccgctgcagtgaggatattccccgccgcagtgccgacttcgtacaagtcaaggataattttgtcttttctcatttttgggctgaaaaactctattttaatgaaagggaatcacgaattttagatagaagaccatatggaaccctaaaaacacaagaagaaggctcttggagtgagcatgggcgatccgcaacaatccttcatctagtttctttctcttctctt

SEQ ID NO: 126605 - DNA, 676 bp, Cannabis sativa
ttttttttttttttttgttcaaagttcattcaaatgggggacacattccttgtttgtgtcttcccactaataatataaataagcataacataaagtttaaatttcttgaaaaaagaaaaagaaatacactaaatttaaaaataacttttaatataacaaaattataattaaaaaatctaacttgaaatttatgttaaaccaaatttaaaaatatctcataaattaacataattatgtaagcattaagacataatttaaaaatattaattaaaataattaaaaaaattaatgcttccaacgttcagaaaataaaattaattttacatagatattaaagttactatttaaattctaccataaaaaaacaaaataaaacgttcgatgtaaactatttacattatatataaactaaaatagtaagggaaatttcagcataataaaacaccccatatcaaatttcacttctcttattaatttttaccaatagttcatttgattacatgaacttctcattttacccttttttaaaattaaaaaagaatataaaaaattaaaaaccaccatccttctctctctcttccctttcatgtttttctatctctctctactttgagggctctctctctcacagcgctcatctctctctctcacagcgctcatctctctctctctctct

SEQ ID NO: 126606 - DNA, 689 bp, Cannabis sativa
  modified_base (630)..(651): a, c, t, g, unknown or other
aatgagttttatttatggcataaaacccaacaacacaaacgtcggagagaatgatcttagctccaatgaccagtgttatcttcgtcgttcgtgattctaactggatttggcacgaatctggtagaactcactgttcgcaacgtcaaaatagctataatggtcacgatcgaaggatatgggagcaaagaaagctggcgttcaccggtgccataagcgacgtcgatggacggtacaggctggtcactagtggaaggagggaggcttggtcgcggcagatagctaaagaccaatggagcaacggacgtcgacttcaactttgtgactaccggttgcagcaaatatatatatatatatatacatatattaataatatggttcctacatccaagacactgaggagaagagaattcaaagtttatgattatgggagagagtttgatggagttcattaccaagaactcataaaaaaaaaaaaagaagaaaaaagaaaactgctataaaaaaaatcagcagcttcaaaagttgaagaagatacaatcatttaccctaaagtttagtttatttggattgggccaacaaacaaatgggcttctgaaattggctttgtattgggaaatttacaaaaatacnnnnnnnnnnnnnnnnnnnnnnaaaaatactgtcacatggaaattttttcaaaaatactg

SEQ ID NO: 126607 - DNA, 1091 bp, Cannabis sativa
ttcaagatccaagagattacaatgttattattacgataccaagcattataaagactttgttcagaaatagaagctttaggaattgaaccgtcgaggaatttgattttgtttttgactaaaatcgcgagctgcattgccctgccccacgagacataattgtcctttccagtaaggggttgagacatcaatgcatttcctggattgtccccatggtgcagaaagaatggactggctggatcctccaatggattcttgatgaaagtaatttgaagaccttgattagtttgagtggaaggattgccaagatcggtaacaggaccaggaatactggtttgatcttcatctatagccattttgcggaatcaatgaacagaaagaaggaagctcggagaagatgatcgagaaacacacagcaacaccggagaaaggagacacgatagctgaaaggatcagacgggaaagcctatctttcccgctctgataccatgatgagaaagaggaattgaatattgaagcaggaaagaatgaaattcaattagaacaaacaggggagaggcaagccttttatagcttggacctcagtacatatcagacccaagaaaataggacgacattgttttaacagataaaacaaaataaaccgactcctatgctgacatttgtaacaacaactaactgaattaacagaataaacataaaatgactaaagactcataaacaccaattaacactgaagaatgtatacagaaccagtaaacttaatatttattggtgaacttcttaatttaattgttaatattataataaaaacattaaatgcaataaataatttatttatttttttcatgcaaaaaattgtagatgttattcaataaacaacattaatttttatgaaaaaaaatatttaattgaaatgctatttgtaaaaaataaaaaaaaataaaaaacttaatagtatttaaaaaataaaataaataaaaaaatatagtgttctaagataatttaaaggaattattacataaaaaatataaattgacactttatttacaaaaatatacattcgtaaggtgtggacaatatttatacttttt

SEQ ID NO: 126608 - DNA, 1429 bp, Cannabis sativa
tgcacttgcgtagtaattaataattttcgcaacacccataaggggtaaaagggtataaagtgtggagcatcgaagatggtaatcaccagaaaaattgtatcagtaaagatgtggtgtttgatgagagaaccatgtacaaagatttgattagtccacaagatggtgatgctgcagcaagaattgggaatgctgcagcaaaggagaatgaagagaaatctcagtttgaggtggagatggaaccagatcaggagattgtagagagaaatgagattgcagcagaagattcaggccatgaagaagatctggaagaggtgtcagatcatgaacaagaaactcttgattatcagttagtaagagacaggaaaagaagagcagtaaaaccccttgaaaggtttggctatgctgatgttgtgcattttgctcttagcatagatggcattgaaggtgaagaacctgcttcctatgaagaagctatgcaatttgaagattaggaagagtgggataatgctatggataaggaaatggattccttgagaaaaaataagacatggattgtgattagaagacttgctggacatagagtcataggctgcaaatgggtttacaaggttaaggatggcattccaggtgttgaaagggcaaggttcaaggcaagactagttgccaaaggtttctcacaaagggaaggaatagactacaatgaaattttctcccctattgtgaaacacacttcaatcagattacttttgagcattgtggcaattgaagatcttgaattggaacagcgggatgtgaagacagccttcttacatggagaattggatgaaaaattctcgtgaagcagcctagaggatatgaaatcaagggaaatgatgaccatgtctgtttgctcaagagattcctatatggacttaaacaaagcccgatgcaatggtataagaggtttaatgactttgtactgatcgaacatggtttaagagaagtgcatatgacagtggtgtacaaaaggaattgtttatcttctcctatatgtggatgaaatgctcatagccaacaagagcattggaaaaataaaaaaagttaagaagatgttgaaccaagaattcgaaatgaaagaccttagtccagcaaaaaagattctaggaatggaaatcaccagggacagatcagcaaggaagctaatgcttactcaatgtggttacatttctatgatcctaagtagatttggttttcaagatgtcaaaccagtctgcaacccctatacacaacaatttaagttgttattgtaacaaaattattagttattttattttaatttaggtaaaattataaaaataatacaggaaaaaaatggaggaaaatatagatttttctgccattaatggcagaaaaaactgtattttttctcttttttattttttttattttt

SEQ ID NO: 126609 - DNA, 1720 bp, Cannabis sativa
atttaaggtcatttgctatatttttttgaaatgaggacataaactaacatagtcttatgatttggagccatttactataatttacctgtaaggctctagatgtaaatttccccactatatatgtatcaaattatacttcttcaactttaacatgtaataattatgttccttcaactttcattcatgttagatttttttttattaaaattgaacaaaattttttaaatccaataataatttaaggaattcttaatggccttaaaaatttataaagtattactgaatatatatcaaaatttggtgagcaaaaattctaattagagtttaaaaaaaaaattgataaaagtagtccaatttttatgttatttgacaaaaatcacactttgatagtctcttcaaaatactcgttctgacaggttgtgcctttcacaattctctaatatatttatcaaaagctctatataagatttacataatgacactaacctccgaaaaagaactttcccaattctagtgattatagttggagtcattttttcatggttctgatcagatgcctccatttttctcttaaactcttcaaaccaaggatgcaagtcttttagaacattttctgctatgtactcccatggccttcttgtaaagctctttgttactgctttgtgaagcaaaatcatcatggaaggtaattaagtgacaaataattaagaaatttcaaatatcccaccattaaaaacaaaacaaaaaactaacgttcttcagctgaatcaattttgttgaataaagctagacgctgtacaatatctccattgatggattccacagaaacaggttgaagatcaaccgaaggtggaaagagattatgatcatccaaaccagcagcaaaccatctgtggatatcctcataggcataagcacccatgtcctggtagtgggcagtagtactagcagtagttccagctgcagcagatgatttgtgtttgggatatttgtagttggtgacaaaaggaggcaactctggttttggtatgggactctttgaagaaccttcacaatcattattgttcttagaaactcgtttatggggtggaacataagccattctaattgctcttagtcttctcttcaaatctcttcttttctttgttggtttttggtttcatataaataaattatatatattataagcaagacagagaattgttctggttcattagatttaatttatcccctcctatgtagtagtacatttgctttagctttatatattcccttctctcctctgaaaagtgattaaatcaattgataatgtttttcatctacggttcacaaagaaccatcgaatttactttttattagtacagtacggctggtacattatcagcttaaaatattaaaaagaaccacttcttgaagaagcaaagcaatatagcaatatgaggggaaagtagaggtagctttctaaatagttgactcattgacttgacaattcactattccactgcattctttttctttgccttactccataagtctttggagcctggatcctctgcccacaagcaattaatatggtgatgtaatatacaacaaatttagtgactctgttacactatcgtttaatctggcattaaaaagtatttttactctaactacaaatattccttattattatattaaaaaattaatatcatattaattagggatattggcggctaaa

SEQ ID NO: 126610 - DNA, 1302 bp, Cannabis sativa
cttagagtcatggtaataatttattttcttgaaatatagattgaaaacaattttgattgatttatatgtgttgaggatagtttatgtgatttttatgagtttatgtaaaaatttgaaaatttctatgataaataattttgatttggttcaaaaattattttagaattaattcttgtgaaattttaagcaagtttattttccatagaactttattttgataaaaaacgagaaagctttggtgttttgaattttgagttccatggctgccatgcgtgcaacacattgtgtgtcgcacatctcgaagacaagccgtgttcccacgcgcattttgtctaatgaccgtccgtgcacccgttttttctgaacacagaggatgcaagcatcttcctatgcagatggatgaggttgctaacagcctcttgcggacgcggagaagactggacgcaccttggtgctcgaacaatggtacttttgcacccaaaaattttatttggggatttttttttttttgccaaattttgattttttaaatttcaaaaccttaaaaattcttagtttcaatataagctattatttctaattatatgaacataaatattaagtttcgaaaataataatatttaattcttttaatagtttattatgaatttttgattgtttgaagattgaatttgttgacctcgttttggccaatgacaccgagtcttgaaagtgacttaaaattaattgaattcaatgagaatatatcaaatttaaagtatgaactaagaatacaagattttatagaggttcaggcccatttatttggtaatcgcctactcctctttctgattgtatttcacttgtgagaagaaaagaaaaaacaacttgatctctctcgaaagtttttgcaaatatttgagtagtgcaatagctctctttaaagtataattttggatccctcaataatagaatgactcaattatttttaggaaataattataatggaaaatagtgttgggattttatgtcctaaataaagatcatttcaatataatcagatttactaattattaaaaaataagaatcatttaatgttgcatggttcacataatttctttcatgattataagtttaatgtgtaaattttaaatctaaaacgtatagttattaatgattatagtattgtcaacgcagtggaatataatcatgattatatgtttcaaagtttttgtcctatgatttgtcagtacatcggatttacactgacatgatgatcagcgataaagtatacttacaccttggataagtgttatgtcattt

SEQ ID NO: 126611 - DNA, 506 bp, Cannabis sativa
aatttatagaactaacttgtatatatagagagagagcaatatatgcatacaataagtaataatttatattcagaaattaatttgtgtatatatggagcaatatatgcgtacaataagtaataatttctacctgaacattttaagggatagaaaggaatgaatataattcaagtatcattagctacctgttttatgctttaactatggattcctagctcattcttacgcaaaatgcgaaaggccgatagaattttttattacgtacaaacatgtcatgataaagtagagtttactcatagtgagtactacgacgctaacaccacttctaagtttggaagtgtaatacccaatttatatatattggtaacaatatattacgtgtattatttaattattattgtcctttttatttgattatatataatttatgtgtatgggataattgttttgttagtattatatctattctatataaagtgtgcctatataactgaattcttagttta

SEQ ID NO: 126612 - DNA, 2499 bp, Cannabis sativa
  modified_base (2458)..(2473): a, c, t, g, unknown or other
taaggtttctcatactttttatgtgtttattttcatcgttttagaaattcatatttaggttctaaaatcatatttgttagtaaatctagatcctggtaaaacatattctaatacataacccattaaaacttggtagctatatgtttttaattatgctataaatcaagaattactttgaatattacttctaagtgactgtgaataggtgcacattcatatcgagaaggataaaacaaaatagaaagattttttggcataaaacagtcttgatttgatctcttcaaaatcaaaaccactataataattttccctaaattcttacttttcactccatgaaaattcgttcattctcagtgttacaacaaaaatgatggaagtggttccgtacatatatatatatacacatattaagaaatgcatcaaacctagaaaaaaaaaatctattagaaaacccaaaaatgaaaatctatcaggaaacccaaaggtgaaatgcttgagaataacttcatagctatcagaaaatctacctcaaccttagccacttgagaaaaaaaaaagttgttaataactaatgagaagagaaaaataccagtcacagttccgatcacctacgctggcttctgtccggtagtcgtctgctcaaccgcaatgacgaaggggcttttgtgagactttgttatttttataatcagtacaaaagacaataaatcaatcacataaatgagtataaatttagcacccaaaccaccatcagtgaatattctccaaaatcattcagtatccaccactattattcaacaataactcaacaagaaaattgattttctatcatcaaaattcacatgtattccaagaaaatctccaaataaattccaaagtaactccgcgaatgaaatctcaattcaagaataacaataaaatattcatgcatggaaaaaaaaaaaaaaaaactgatctaggaattatgaacaacagatacttaagacagtgagtggaactatatttatatagacatgtacatgaaaattgattgctaaatttagagacaaagcttggctgtcatggtctttgacttggagcaatcgacgactaggcgctcgacacacttggagacgacgaagctgctacagtgctgatagaaaatgcacctcccgactaagattatcttgacaaataatgggtgctacgacatctaatggccacatctcgacaaaggaaataaaatatggcaccagattggaacatcaacagcttgtgatctatcgtgggtcagtagcatattgacggtgtaaaaaaaattcgaagcctccatacttttctagtttatatatgcacaaaggaactaggatgaagagaatcctaggtgattggtatgtgggttctatttcttgttcttgggaacaataaacggacctgcggaataagtgagtgagtaagtcgagatgtgataattaatctttttagccctatatccaacggttttgaaccgtcgggcaaagtatgggccactgtttaaaactgtggctaatactttgccgatggttcaaaatcattgggtatagtgcattattttaaaaaaaaaaaatcctgcacttttaaatcgtcgcctaatttatacaagtgttaaaaattgtcgcctatagtatagtataggcgacagttttcaacactcagttaatttttttagcgatgatccacaaaaaaagtatttttaggaccgtcacaaattctgcctttgtagtagtgtattgtaacaacatattttgagggtgaggattcaccacaaatggtatcagagctcaaggtttagagtaagaatcacacacaaccaatcaagactcatcttcaacatttcaagaatcaaactcgaactttcaagaaccagattcaagaaatcaagaacttgttttaatggcttcaacaaggtttgaggtggacaagttcaatggttcgaatgattttaacctatggagaatcaaaatgaaggcctttctagttcaccgagggatctataaggcacttgatggtgaaaccatgaaattaattgaagacgataagaagaaacttgagattgaagccaaagcacataatgccatcctcctcattcttggtgatgaggttttgagagaagtttcagatgaagacaagacttttggtctttggaacaagttggcatcgatctacatgaagaaatctcttgcaaacaagttgtatcttaagaagttgttgtacacacttcgaatggatgaatcaaaggaatgaagaaagcatctagatgattttaacagaatcattcttgatctgaataatcttggggtgaaaattgatgatgaagaccaagctataatcctgttgagttcaattcccaagatatatgagaactttgttgatacgatcttgttgatataggtagtaccaatcaatctaagccatcttcaactgtgtagtctcatacctnnnnnnnnnnnnnnnnatcccacttgaccttccccaggcggt

SEQ ID NO: 126613 - DNA, 624 bp, Cannabis sativa
catcttcttcttctttcttctcatgtactttatattatattatattattttataacaactacatatttatttgacaaatataatacaatgtgattttgaaaaaaaaatcacacccaatatgccaactacatatttagttttgttatttttacaaaatatgtcaattaaagattttataataattttattagaatgacataattataataaaataataatattatgcccttgtacagaaattattctcaaagatgacacttgccactaaattataaagctagtgcaaaatttgtcattaaattataaaaatagtgtaaaagagtctctttaacactcatctacctataatttatattaattcatttttttagaaaaaaaaaaaaaaaccttaaaattaatattaaaggacaaaataacaacattgcatttcttattaaaatcactttcagggtcagccctgacaatttaggaccttccaaaatatatataaagaaaatattgaaaagagtattatggattcgaattaaggctcaaaagaagaatgtgcatatatttgcacatagaaaatatttaaattatatttctttaacaatcttgagccattattagatttttattgcatag

SEQ ID NO: 126614 - DNA, 594 bp, Cannabis sativa
aatttggttggagtatatttccttcctcaattctgttatgtataatgattttatatcaatacaacagtttttatctcaaaaaaaaaaaaaaaatttagagttagtttttaagaaatgttgcatgacactaataatattattagattgcaatatattattaagattttattattataattttttttctattaaattttcttagtttaatgattttaagattattgtgagaaagttttatacaagtttactatctagatttttatggtccttaatttgtgttatatatttaacattttaactagatatgaaaactcatatttttgttaaatgtataataatattttgataatcattatatttatatatataatatatatttgatgaaaataataataattaacatgtataatcttattatatttttaataaatttattcattgctttattaaaaaaaaacaagaattttgaataaattgttataaaaatgatctattaataaattttagtacactttttttaaaaaataatatagacataaaatatgtgttaaatctatatatatgagtattattattagatattattaatgctat

SEQ ID NO: 126615 - DNA, 1255 bp, Cannabis sativa
  modified_base (1226)..(1229): a, c, t, g, unknown or other
taattgatagtaaaaatcacaatacctattgtattagtttgtatatataacagataaaaaatagtgatcaagaatgcttacttttaatataagattagcgtgtattattctctatttatatacataatactttgtatgattaaaagttaaaaaatattttttttaattatcaattaattagaaaataaataattgggagaaaacaaaattgtaggaattcaatggacaaaaaatacaaatagtgcaataaatttctcattgatttcggtagaagtggaatatgtatggatgatattgatttagttaattgtataaatgaagaagttattaaagttagttagttagttttgattagtttgttagactgttatgacaattagtgtaactaattaatttcgttgtatacccgagctataatgctttgttcttgtaccattttttctctaatgaaaacactttatttctcattcaattttctctatttctccttcttctctctcactctttcgcaactaatatggtatcagagcaggtctctgagtaagatccattgctttcctcacctccatggctcgtggaggagctcaaactcgaagctcatctgaaaattccaactgatactctactctagacactaatgtcagatcctattcagatgaagcttgaaacgcttactatctgtctaacagtgatcatcctagagctagcttagttccaaaaattctcactggttgtgagaactatagttcatggcgtagagctatgacattcgcatttattgcaagaagaactcaagtttgtcaatggaaaacttcctcctccggatgaagatgatgaagattttgagctttggaatcgttgcaatagcactgttatttcatggattcttcatgcaatctctaatgaaatagcgggaagtgtcatgtacatggatgatgctacacagatctggttgaatcttgaggaaggattcaatcaaaagaatactcctcgagtttttaaagctattcgaacaaaacagtctcttgcacaaggatccaatagtgttaccagcaactgcactagactcaaatctctttgggatctaatccaagagtattgatcacaaccaatatgtacttctggatctatgaaaacaattcaaggatatcaggaagaatatagagttcttgaattcttggttggtttaaaccaatcctacactagttgtaaagaccgcttagttnnnnttggaaattagcagttaatcacgttt

SEQ ID NO: 126616 - DNA, 2610 bp, Cannabis sativa
aaatactgctctgaatcgcttggacacacaccaagctatctgtttccaacatgactctattccacgaatgagttgcaatccaactcaaaacttctttaacgcttattatctcagcaatttcgggttgaacacaaccaatcttccccttcttgaatgcttctaccacaacaccatgataatttcgagctacaccacccatgccaaagcgccccacataaacaaagaaactaacaagaatcaacaagaatcgaaccagaaaaactaaaagaaaagactaaaaaaccatgtcaaaagacaaaactaatggaaaacttaattagtttcaacacataaacacgattgcagcatataaaatcaaataaagaaagtactccttatagttctaactccataaaaacaataatggaattaaactaatcaaaggggaattaagtgaaacaaaaaactaacaaaaacaaacagaaatgttccaacacataagaggagactcgtacgttcaagatggcggaaacaaacggaaacgaaccaatcttagacggtggccgtcgttgattggcggcgccgatcgacgtgaaacgaatagaagggtctcgactcgcctgtgggttgtcgttgttggtcgtagaagcttctgggttatcgcagcaggttcttcgacgtactggagagagaaaaaaattgcacgaggaaagagaaaatattgcactagttcaccaggaaaaaatatcgcaccaattcatataaatatctcctctcaatccattcacacaaattattattatagttaagttgaacttatattaagtcaacttaaccatctataaaaaaaaactatttgtagaagctatttttagaattatggggtgtcacaatttctctctggtaaatggagtgtgaatggaaggaaattacattgtatatttactttattttatttgctttaatttattttaatttttatgtaaattatgtgttagagttgagtagaaggtgagagtacattgagtaactcaactagtactttttaataaatataatataagagtattttttattaataaaaaaaaatattgcttgaacttatgacaaattggtttgctataataagtagtggtgtggcagttttccttattaggccttgtattgagacaccccactttataggtggaaattgcaccttataccctttttttttgttgaccaatttcatttttaccctttcttttctatatatttaatttataccctttattatttgttatatcccgattatacccgtatgtaatgaaaaaaacccttcctcacctccctgaacagtacccttatgtaagggtataatcggtaatggacttataaaagagggtacatttcaattgaatttaaaatagggctatttttggttaattgatgaaaaaaatgggtatatttcaacttaccccactttatagttccattggttgtgggcttgagcactacatgaagtttcaatttttcttgaggaaattatagtttttaatttagttgttttaatttttacttttattttcatattcttaaagatataccatttttataaataatgtccctattagatcccttaggttaatgtaaattatatgttatacttaagtagatagtgagggtatattggacaacccactcataaaagtggatgtattttaataaaatataatataagggtatttttgattaatagatataaaaagagatatataataactttttccacttttttttttgggacaaaagtagggctgagatgcaaaatgaccataaatttgaaaataaagttagtaaatgttccctatttaaaaaaattaagaaaataaccaaatataataaattagctaattaaaattataaaaatacatttattacatattatttttttttagtactacatattattatattgtaacaaaaacaaataaatagatcaataaatatatacaatactatttgatatatcgtatcactaaaaaataacgctccgcagtaataaaattatataccacaaagaaattataacaatactaaattaatactcaaaaatatatattatgctaacaaaattatatataccactattaaaatatgtataataaaatcaaataaatatcatcttaaataaatgatatactataaacaaaaaaaaattatataccatacaataaaatatatatatatacataaacaataaaacaaaaataatgtaatattattaaaaaaaaattgtatatactatattaacaaaattatatataaccataaaataattataccatacttacaatataatatatcaactttatatataataaaatagatcggaaaattagacctcacggtcattacaaatgataaatgatgtactatacaataaaacttatatatcatataacaaaaaacatataccttacaatcgaaatatatataataacaacaaataaaaatatataggatactaataaaattatatatcatgtcaacgaaaatacaagttaaatattatttaaaaaaatgatatactatataacaaaaaatacatatattattcaccaaaatatataactaataataataataata

SEQ ID NO: 126617 - DNA, 2092 bp, Cannabis sativa
  modified_base (155)..(170): a, c, t, g, unknown or other
  modified_base (252)..(253): a, c, t, g, unknown or other
  modified_base (1717)..(1719): a, c, t, g, unknown or other
ctctctctctctctcgaatccttctctctctatttctcttcatattttcgagccttatagttaaagagtatatgtctacccatagtagatcaattactcaatcatagtgtgtaagactgtgaagaatctaacacctgaaggagaatcgggctcannnnnnnnnnnnnnnntgcgacagaaaggaacaagggtaagagatttgagtggaaagaggcatattattctacagcaatcaatgtaaggtttcttaannttatatgtgtttaaattctattattttagaagattcatatttaagatgttaaacaacatacatggttataaatctacatccttgtacaataatccccaacacacagccttactagtagaagaacagggtctccatgcaagatatagcaaaactgtcaagcaatgaccaaatggagtgaagtgagcccttaaggagttgtgcaaacatccttggccagccaagagaagcctgcaatttggtcagggtgagcctataggccagacaagatctgtgcacaagctggacggacaagaagtgacttttcgaccaaggaagcttccgttcaaccaagggaacctggtctctacaaggaaatggtgtacaaagctatcctcaacttgcaaaaggctggcctcctcttggtacagctatagtgacctgccaagtcctacaggccttgggtggccaggattaacctggtcggactctatgtacagtccaaaacatggacaacaagtcatgtgctgtgaattgggccctaaaagtccaacagaatggctgaataatatctagattcaagggcactttagtcttttgcagttatctaagagactatgcaaatatctagggtttaaattgtaatctggggtttaggcctcctatataaaggccttaaccctagcatagaaacctaagtcactaagcctccaaatcattctaagttagaacccctagcctctctttctgtctctctgctacatgcccccaagggcttctcttctcttcatctctctcacacgcctacactagcatcatctcaaaacttgagttttgccattattgatttataccttgtaatcctaagggttctataaaagatcccatctatagtgatctggatagtatttccctcggtattaatacaactaagacgggagtaggtcattacccgctatcacaagggggtcgaatctctataacaaatttgtgttgtttactacttttcgttcttatttgtgaaaacaggtggcaagcatcagatccatacgaccccgccatcagttgattactttttaaggtcaacaggtggcaatgctttcaaactagagtatgagcaagttcacattgaacttaggatcgaaaccagtataaatctcgttgttcttgtgtctgaaagctatctagattcacatgtgttatttttctggtataatgtgtttgctggtttttgttcctaatttgtttattttgatttaacttttgtttgtttaagtgtgatcttgaaaatgaaattatagaagttaattcttatgtatcagagctaaatttcttacagtattgaaatacctaaattgttttaattcaaaaatataatgtgccataagtgtacatacacaaaaaattgaggggttaattgctcccgcccttcataggtttgcctatgtatatatgttatatattattactagggaactaagccgcgcnnngcgcggtgttgcccaacttttgtaaattatataaatatatattatacttattgagttatataatctaaaatataacatttagatgtgtgtattataaacaaagtaataacattgaaattaaaaacatgaccatgaatagcacttttattattttattttatttatacattaatttttgattcgtatttatatatatatatatattgcattagattgtgcggattgtgagagtcactaatctgcgcttctcgcggttttttcacaatagttataatctttgtactgaatgagcgatgtaatataaaatatagtattgtattgtaagattaataagagatgaattttttaaatgatgtattgcaatagcaaagtt

SEQ ID NO: 126618 - DNA, 768 bp, Cannabis sativa
ttttgcctccaaaaacaaaaataaagatagaatattttatttaaattaaatgtataaaatctgaaacattaggtatttatgccgcaattttctttactattttaagaatacaaacttctctgctcaccacttcttaccatattacctattcttatcaaaatctacaatttcatattctagcaaactttatatatttgctctgcatttcataaaatggaaataattgtttgaataagtaagatttttcccttgaactataactcttgttgatgcaatttttttattcttgaattataattttttatttttttgcaaataacccttcaaattatattatgcttaataatttattgatatagtattaatgtaatattaatttaatctaatttaagagtagataataaataaattcataaataacaaatcgatgataaagtgtgagaatatgtatttgtatttttaaaattaatatttatatatttaatgtcaataaattaaatttttaatagaaattgatacacaaacttttgtatctttatatattaaaagtgcctatctaatgacaattcttggtttaacggtgttttattatttttctccgttaactttaacactacacgttagtaatcgttagtgatcgtgcgtattgaagactaggtttcgactcccctaaacccttcttcttcccaaagggaccacgacaaaggctttgagaccgccaacgatggcgagtttgggcgtagcgacagaggagcagaacaaccattc

SEQ ID NO: 126619 - DNA, 1769 bp, Cannabis sativa
cttttattattcgttattagatcaaaatttgataatttaatatttttaaaattaatatttgtagttaaatttgtttaataaatacccattaaaaatgatccagtatgggagctaaaaaataatgatatgtgcccacaaaaattacatacaaatataacacacacttatatagttagtcacttttgataagtaaaactcattttaaattaaaataattagttcaagtggcttgccacatatgtatgtgtcaccttaatgtgtcctttaacattttcataattaatatatacatatctttattaatttcaattagaattttaatttttttattattatatttaatttgtaagaacatctctaatgtgatatataaaaattgtataatatttggccaaaaaaaaaaaaaaactttgtgatggatttacattaacttttagtattatgttctaatacacaattgtaaaacttgatgtaaacattttttttttgtttttttatgagtgattgttaattatttttgtacaatttttttatagttcttttttgtatatttttttacaaaaatttgtgcatgttttttttatgtataatgttatgtataatatttttttttgatgaattctttttttattattaatagaatattattatttggtattttaagatgtccaatactatatagatctgacacttataattagttaatagtttcttatattattcactaaattaaaatttgtgagacccgatattgaaatacactaataatgatatgccactatttatggtgtttaacacctcccttgacatttttcttatcatctctaatgaatggtgtataatatttgagctaaaaaaataaaccaatattatatttggccaaaattttataataatgcttcaatgtatttaggatagaattaatcatttttttgataaataagtgtaaaaaaaatcaactaaattattaaatttttattaaaagtatataaaattctattatatatataaaatgtaaaaaataattaattatattaataagtaaaaaaagaataaataaaaatgtaatatttattgtgtgtaaaattaatggaataaaatatatgcatatacatcacttttttaactctacaataaagatgttcttaaaatgtacatatttttattcactttaattataattttaatttttttttttccaattatacatgacttatttgtaacctttttttattattattattattacttattgcgcatcatttaggtaagattttcctataatttgctcttttccgtttgctcaaactaaataattcttgtttatttgtttattagtaaatatataatagtatagaagactatacaagtatacatatgatgttaatttttttgtattgttatttttactttttttttataaatttttattaattattattttattttttttataaactttgcttattaataaataatagtaaaacgaatcatatgagcatacatttaggcaggacaactgatgatcttagctttaataagtaaacttatactacactatgtatttgtttaaacataattttttttgtatttgtttaaatataagtaaacttaggtttacgtatctgtggcacgtcctctatgtctatagtgtatatatatataaatcgaacataatcataccatatgtataggatatttatatggggatatattattttagactctgtgttttgcaaaagttactaattggaccttctattttgtta

SEQ ID NO: 126620 - DNA, 2805 bp, Cannabis sativa
  modified_base (1102)..(1103): a, c, t, g, unknown or other
  modified_base (1359)..(1367): a, c, t, g, unknown or other
  modified_base (2512)..(2528): a, c, t, g, unknown or other
aatttacaggtgtccaataacaagctcttttttctttcatcacattctctctgcttatttttctcttgttacttgctctctccttattttctcacacattcattttctttctcctcattcattgtttatcgtataatatttttaggtcaaggttcgaggataggttggggttgacatcagggtttgaggttcgagtttcagtccaaggttcggggctcgagctttggattcggggtctgaggtcggggtcgagtagaggtttataggtttaggcctgggtttgggtctggatctgggtccaactagccttgggtctgaggtttgagtttgggtcaagatgctttaggtctgggtagtggtccgaggtctaaatctgggtccgggtccaaatccgattctaagtaagtacggctccaagtttgaaaaaaaaaatgatttgcaataaaatttttttttttttagctccagaggggaaaatgataagattggtcaaagagtattaggctttacattctgtcatcaaaacttacagaatatagactagctacctttctagtatctctcacaattcaaactttggaacattatttcaaaccttttctattggaactttgttgatttgtttctctcaaactaacgttgccttaaagggtgggcaatattaatgcatgcaccgtaaaatatgaaaattactgcatacaattttaaaacttgtaacatcatttcaaattttaatgatgtttacagtaatattctatgaaaatatttaatataaacatggttagacataagaatcatgaaaattgatacttcagtatagcatagtttaaacttagctacatatagtttttctactaaaatagtaatttttaatttaaatgctccagttttgatccattaaaataaataactaatatatagtacatatgattttatagtaataaatcttacttgtttaggtttagaagtaagtctataattattaggtagtataattattaaagtagtaattatattatattatatttaaaatataaaatatatataattatgagatgacaattagatatgcattcataatatcactacaaaaaattttacnnttagtcacaacaaaatttgtgaccaaaagtaaaaaaattatgactaattataaattatcatttttatgttgtgactaaaaaatctgtgataaaaagtattagtcacaaaaattacaatttgttgtggccaaatgtatttttagtcacaataattgttgtgactaaaactaaattaatgacaacttgtaactaaagttatattttagtcacaagtaacattttgttgtgacggtaaaagtcacatttagtcacaaannnnnnnnnttgtgactaaaaaattgtcacttaaataagcaattttttgtagtgtattatgtttgacaaaataattagtaattacacataaaaaaaataatattttttaataattatatttaaaatgaatttttttttataattacgtagtgtaattactcaattttcactgggtctagaagaattgaaaggtgtaattagaatttctcaatagcctcaaattacaccgttacagtttatatagtcaaacaaacatattaaattatataattacattcaattacacctgaattcaattataccatcgctttccaaacacactattaatatccaattttaagttacttgttgtttttctcaatgctctattttcatcatgatcataaagtatcatattattattagtacaatttaatattaaattttacttattttactttaataataattataaataaaaattgccacctatttatagggtactaccttatggtagttttagacaacctaaaagcaatacttaattttgtcattttttaagcaaatattgcccccattatcttaacttatttatttatttattttaaaaaaaaaactacttttgagagtatttcaaaaaagaagatatattttctattttttccctggaaatttatgggaaaaattcttatgtaatttattttgttacacttaaatttcaatgtgatttttctggtatgacaaaaattctattgttgtttattttaaattttttggtatcaaattttttttttgtagtttatttgcaaattttttaatcattaggagtttttttcataaatttaagaagatgtaatagaatttacttttatatgacatagatatggaattaaaaaataattaaagttaaaaatatgagaaaaacaatacataaatttgataaaacttgtaataattaagtttcgtcgaaaaagttaccggtgctagaaaaattactggaaaagttattgttaccagaaaattcatagtccccaaaaaagtcaccggaaaagtcaccatcgccgaaaaagttactagaaaagttaccaaaagtaaatgtctcaaatatatataaaaaaaatatatagaactggtttcataacataatgaataaaaagaagggtaaataccatttnnnnnnnnnnnnnnnnnaaaagttattaattggaccctctattttgttaaatgataaactggaccctttgttttgttaaatggtaaaaataggactctaagctcaattttcaataattttatttattttttaatatataattaactttaagacaatttataacacgagcatatacaaaaaatgtaactgattttgtcataacatctctagatcggattattattaagtttttattttgacaaaaaatcaattcagggtcctatttttactatttaacaaaacaaagggtccatt

SEQ ID NO: 126621 - DNA, 537 bp, Cannabis sativa
tgtggactgtataaatgtttaatgggccagcccagagtatttttgtaatttttttcctttttttgtatttttctgtttttttcccaagaaaaaaactattttataagtttattacaatatatatgtaataacttactttcataaaattatacattattttatctattataaaaaaaaaatcattttcaattaatcatacaatatatataataaatatttgacaagtcaaaaaatataagtatttaatttttttatttattataacacattattttaactaatgaaggatgatatattcataattattttatatctttataatattttagttaattttaaaagctaactattattacaaatattaaagatttgtatttattagtatttgtcattaaatcattattagctattccccaagaaaatcaatacccatatacatactataccatatacgtactgttgaccgaggttttcggcaaccaataaaataataatagtttagagagctgtaagaaattaagagagagatttttacgt

SEQ ID NO: 126622 - DNA, 2011 bp, Cannabis sativa
ttttatgacacccacatagccaacggttttaggaaccgttgggaaatagtataaaagacagttataaaccgttgggaaaactcacttttgtagtagtgggatagagacttaccagttaggttggtgcgattggaactaatgtagcctttgctgaatagaagttactgcatttttagccttttgaactgctttgccttgactgtctgatctcatttgttgtagtaaactaactgctttatatgtctctttgttgtgtatgtgaaggaagtgaaggaagggtcccacatgtactatataagtgcttttggggggaaaccctcttcacttcttactttttactccctcactagaaattaacatttgaagaagatccttcttctctctagagggccgaacccacaaagcatcattctctcaggatttttgcacagtttctacaattaaagcttcccaccttcttcctcaattgtttcttgcaatgggtaagctttctattcctgctatttcacttgatttagttgattttgccatgaatgcatgaacattgttcttcgctttgaatatcttttgattcctatgttagattgttgtcctttcaggattttgatccacatgatagccttaggatacataatgtgtaatttctagacaaaaaagatctgaatctaacctttgttgtgattacatggctctttgagtcacgaagaacacgaagaacgtgtttgagttcttgaagaaacacatgttcagatcagtacaagtcctggctggctaaggaggtcttgtttaagacttggttgatcaaggatggaaaccatggggtgtggccggccaagggggtataccccataggttggccagcctatgcctagaaattgtgttcctggccagccctaagctgggtcatggggtctgaccagcctctaaggcttgggaacctggctggccaaggctagggctccaagtgcgcagcgagttttttaccctctgttgacctcggctagggtctcatgacgaccttggaggcatatagaactgtagtgttatgcgtggtttccctttggaactctgtataagactcgatagtgagtctattatagttaagtgtatgacttaggactcattatatgtctaagtgagtatacttaagacggtacttggtcgataatcgaccttgtacactgtgatttaccttgaaggtaccgttgaatactgttgactagaatgcattttgtagctttgtcaggttgctcacctccccttatcttttctctgcaggtggttctgagtgttggatagggaaggtgacagctgtataggtcccctagtcatcttgtgatcatggcctggatgaaatagacatgtcgtaaagcaccaccatgcaatcaacatgttgccagggtggcaacaagaggccgagtcagagttgtagaggctactcaacctcgtgttgatgttgatctagaggttgaccacgcagaggtgcatgaggtcgaccaattggctgagagtcttaatactgagtctaaacttgaaaaggccgcaccagtcaagagaaggagatatgtttgggtcattacgatgccaatggggagcctctaaacaggctgggtgagccttcagtggtaggcttggatcatgtcttgattcaatcttctgagcctgggattctggatgcgagatcacagggagacagctaggtctctcctacttctacccttttgttgatgattttagcaaggtactcgctagtggtttagtgaggggtgtctattgtaagatacctcctacagatcaaaggttgcaccgacttcccttatgttggatggctttattagagcgtcatgttgagcaaagggtaatgttgctgctccatattttcatggtttctaggtttagctatattaaaaagttagttattattatcaatctctttccttttatagtttctaggtttagctatattgaaaagtttgttattaagcgcaattggtatatccggtcttaaaac

SEQ ID NO: 126623 - DNA, 1088 bp, Cannabis sativa
atttatgatttagggttttctattaaagcacttttaggaatatgtttagatctgtgatttatatatttcttgagtattttataaattctaacaagtggtctcagagccaccttgtgctaaattaattaaagatttgatgattttgctcataaaatttggagattttgaaaaataaggtttttatttttgagataatttagccgatatctttttttttctatcgatgatttggcttctgttagtttaatattcttaatacatctaatatatatactgtaatttggttattattattgttactgtatgtatattattacagttaatatatatttatagaaggcttcactttattttatcgtgacttaagatatcacactgtatatatgtttggtaaagatatataatcgatttatgatttaatggcttttgccattaatttttgttttcgtttcatttttccttttcaatcgtattgattggcttcagagctgttcctctacagtcattgattcatttttagtaaacatatatatgttgatttgtggtttcatggattgtttaaatttttatagtagcatatatggaatttttgaggatgaataaatatatatatatatttggaattgaatagtgttattaaattgattcatataacgaattggattgattcatataacaaattcataatatataatatgtctggagattgattcgttgttgttatatatatatatatatatatcgattatattaaattaattcgttgtaattttattacagttttatatatatttatatatataaagaagtatataattgtactcattgtttatgagtgtctgccctccttttgtgctctgcggcagttatagtcaattatctggttttttacagttttttcttttcacctttcagttatgttgctcttgtttttctacttttcattgattttcttctgcaatctcccttctgtttcatccatggatccttttattcacaaaatgaaatcaaccatgactttgtctgacaatgagaaatcggtttttgccattgctgatgatggctcttttgaggaacaaccccctgaa

SEQ ID NO: 126624 - DNA, 1077 bp, Cannabis sativa
tttaaaaaataaggccaaacaaacaaaattgtttttaaaaaataattttctgtttttaaaaataaaaaacagttttttagttattatgtaaacatggacttggattctttgaaattgatggttatgttagtgaaagactgatcaacatatttagatcatgccgctgaaaacttctttcggccctgtggtcaaatgaagctcccaagtgggctgatacaaacttgaggcccatgaagtggacatgtattgggccaagtgaattttagtataatttcatcatacattttgagagaaaaggtttaagtttaacactttcagagccaaaaacctcactaagggagtgagacttaaacaaatattattggggacttataaaaatattgtaaagtgagagaaagtttacaaaaatactgtgatacagtgttttttatatttttagtgttttaattatacaaaaatattgtgtttaaaattttaagattataaaaatattgtgttttagtaaaataaaaaaacaactcaaaaacaactaaaaaccaatctttgaataacttaacaaacaacatgaaaataattataaaataacaaaaatataactacaaagtaaaagaaaaataacaaaaatttgacttaattgaaacaagaaaaacaatatcaatatctcaatatgtttttgtattaccatttttttaacttaattttgacaacttgatttatctttttgtattattacattatttttttttcataaaatttattgttacaactttattctttcaattttttttctctttttctttttgagttagtgataattaaaaaacaactataaactgaaaaaacaacaaaaatacaatataaaaataacaaaataaatgcacatatatataacaaaaatattgtctggaataaaatggaaatatatatgataaaaaatacacataaactaaacaataaatgtacaaaaaaaacacataaaaataactattgaacacctaaacaacaacataaaaagaactataaaataactacaaaataacaaaaaaaaaaaaaaaaacaactataatacaactataa

SEQ ID NO: 126625 - DNA, 1456 bp, Cannabis sativa
  modified_base (379)..(393): a, c, t, g, unknown or other
tccttttttgtatttttttgtttttttccctaaattttttctcatgttacattagaatggtatttctttccgtttcaaaatggaatagtttttctaccaaaatagtgaaaagggcattaaatgacattccaatactttaaaaatgcaaccaaacaaaggaaaataatgaaaattgttttctttccattctattctatttcattaccttcaaccaaacgccaccttgtctgtaagtaatataaacgacagtggtcctcaatttgcagtatcgtatcttttctttctcttgaaacccaatcattaagagacaaatgttacagaaaaagatttcactgaaaaattggaagatcataccattacaaaatcgattctatagacnnnnnnnnnnnnnnnctattccttaattctattgtttgattctcataaattaaggttaaattcagatttagagtattcttaccagtttgatcaccagttagagattaatttcaatatatgaggaagatggatctgattctcacctcacctcatctttgaatattggattagaaaccatcatatataaactgctcatgtctggtctctcaacaaatttggaatttggataataaaataagttttatgtagaacaatcaagtgcatagtattcatataaaaatataaatttgatattataattaataatggagaccgacaaatccacagccacatggatatggcccaacttttataagttaagttttcaatctatacatcatagtgatcaaatcatactatattacgtaactctgccgacgtttttttttcaaacattgggctaaaagagacatgattccttaaaaaaaaaaaaaattaaaacaatttataaacatttatttgacttaactctttaatttgtttccatatgacaagtcaattgattaattatttacttaaacagtgataaaagattgttcaaaaaaaaaaaaaaaacagaaaaaatgaaatagttgttttttataacctaataaatcaaaacaaaagaaaatatgaacttgttaatgagatagcatattcattagatctacctaatgaaattcaacaaatttgattactattattgcgagagagaaattataatataattaaaattagtttttcatattttttttgaataaaaattataagacatattaattaataaattcattcaaaacaatagaatacatttcagagaaacagtcctccaactgaaacacacgacctgtagagaaataagagtctcttgttaagcaatgagccaacttatttaattgcagatcgttttacaaaacacaaattaacaaaagataaagccaaaagtaaatttcgaagatcttgaacaataaacccaagctgtgaaggcataaaaataccgttttgaatcgcttggacacgcaccaagctatctgtttccaacatgactctatcccacgaa

SEQ ID NO: 126626 - DNA, 850 bp, Cannabis sativa
acctattaactagttttaatgcaaacttaataacaaatttcaatactaatactaatctatgtattaaattttggattagcttatttagtaaatagtgcaaataattagtatatttaattatactagattcatgttatgtacaatatgcgtatgattaattttttttaattcgatttaattaagtaatattaagtgcaatacatgtatgttcaattttttaattaggtagtgtactgttattgtttaatttttgaaataggatttgagtttttttaatcattagaattcttttctttatctattacagttacattgatatgctatttaaatgtgattttattttttttaagagaaatatttaaatgtgattatgtatacgtattttatatgtacaataaaagaataaaaaaataaattttattgttatacatattttgtattgatctctatatatgttagaaaatattttgacaaaatttaagtttgattagagaattaattactttcaagatacattaatatatatttaaaaaaataataatagtgatagatacatttttaatttatagttaggagagtgtggttacaataaaatgtacaaattattaaatatatatcttttatatatagatgtaatctttatatttaaatatatatgataaaattaatttttttaatataaaatatctatataatttatattttcttaatatgtatataataatattataaaattaataaaaaatattatgttaagtaattaggatatttagttaaagttaacgcagaaaactaaaaaatattgttaaaccaaaaattttgttacatagctacattttatatagaatag

SEQ ID NO: 126627 - DNA, 533 bp, Cannabis sativa
aaccaaagaagaagcagcatctaaggtaacttcaacaatacaagggccagcccgagcccttttgagaatgtccctgagggagtcaccaatcatgaccgaatgaggaataaaagctggtctttttgaaccagcaacaaccttccctttagccttcttcgtaatccttacctcctcctcatcagattcagaagtgtcctgatgaggaacatggacagtgatagcaacaataggagaagcattaactggagtgttacaatgaacactgacaggtgtgaccccagttgggttattagagtaatgataatctgtcataggaggaaaaatattcacaacaccattataattgctagaattaggggaccggttctgaaagttttgagaaatcataccgtcaacaccagcaatatggccaaaagatgaagaaccatctcccaattcctctgtagtaagataattgttgaattttgtgccctaaataaaacatatttcaatatataatcagatttactaataaagatcagaaatcacatttt

SEQ ID NO: 126628 - DNA, 1523 bp, Cannabis sativa
aatattacgtaattaattttgtctgaattcaataaaaattagatattcatttatcataaaatcaattctttattttatttcataattaaaaatattccaatattcattaagatgcaaataagaaaagaattgctaaggggcattgccaagcactctaagaagccacatgagaatgcggttggaaccataaggtccctaatacactaataacaatgttcaaataaaaaatagtaagagcatttgtgatgatgttagacactattattcaataatgagcaagcttggtgaaaattgttatgtagtatgtcttgaattttttttcttaaatgtttacttgaaatcatttagactatatatattgggtgaaaactaaactcagctaatagcttttaaataatctctaaaaattattgtacatgttattgaatttttttttttttggaaaggtcaattatcagcccaatacttatattttaggaacatagtagtgcaattgagagggagcgccaatcctagatatgaaatctatagcttctataactattagaagtaaaataatgatttcgttcgagcttggcttaacgcgacaaacgatggagtgctcatttcagtaattatattagtttactgaaatattatttataagtagctaagtattttaaggataaattacaatttatccctactcaatgtagattatatatagagaatctttgattatttggattgaaacaatggataatttatagtgtatctattcttggtaaatagaacattctatgtaaccaggagttcaattccaaatttatagtggagttagaagaaattaataagttagaaaattcacttggtaaattttgaatttacttattgggagcttggttacatacctatggtccccgcactaactgggataaatatattttgtagtttcaattaattaatttatttaatcaattagaattctaaataaatactttatcttatttgtgaattttatcaaggaagggcacaattgagaagaaaagggagttcaaggtttatttattaattaagagacattggaaggtctaattagtaaatatatttaaatagtaattttatttataaattatttataattattaaaaatgtagaattagtatttaaataactagagcagaaaaaaatattattgaaaaaagataaaatttgtttctttaaggaagcaaaataatgacaaaattctaactcatggaattcataagggatttggcgataagggcccattttaattcattggatctttctaatcagcccatttagctcttactctaagcctaacgaatctttataaatcgcataaaaatgaaacctattattttctagatgatgatgactctagactctcttttgtctgacaaatcgaataaaaaagaaacatattattttctatcattatttacgaattcctcttaagattttttcatagaaatttatgctccttggtttgagaataagcccacacatgtcaaagcaatacc

SEQ ID NO: 126629 - DNA, 1544 bp, Cannabis sativa
  modified_base (169)..(187): a, c, t, g, unknown or other
ttggccattgttgattattcatggccatttcttcaagtaaatcataagcctcatttgtaatttttctcataaatgtcccaccagttgcagcgtctataattgttcgggtattaccaatcaacccattgtaaaaattatggaccaacatccactttttgatcccatgatnnnnnnnnnnnnnnnnnnnatctttgaatctctcccaagcctcgtagagagattcgttgtccagtttacaaaaattattaatctctcctcgcaacttgacaactttagctggaggaaagaacttcgataagaacttcattgccaagtgagtccatgtagcaatggatttgggtggcaaggacaccaaccaactcttagctcgctctctcagtgagaatggaaacagtctcaggcggatagcatcatcactaactctgttcaccttgaatgtttgacataactccacaaagttagacagatgcagatttggatcttcaaagggtagtctgccaaactggactgaagattgtaccatttggagtatagttggctttatctcaaaattgttggcctctacggcaggtggtcttatactgactgaaccctcgtcaatgttggaagaacatagtccctcaaactacgattgggtggattacgaccgtttgcatagtcttctacggcacctccattattattgttgttgcctctattgttaccaccattaacattgtcatccatgactagttctgcttcaaccctcgctgcacttccttctaccttttgtttcttctacaagtcttctcaattttaggatcaacaggtagtattacactttgtccttgacgtcgcatgcacccccaatgcttgaaatagagtaagaaaaatttaaaagaaacagattagcaataagtaaaaagaattaaccaaagtagaatttaatctaattattgtaatatcaatatttaatcgattccctggcaacaacccaaaaacttggtactttatttttattcactatgcaagtatacataatctattgcagttttaaactcacactagagtcgatccatagggaattgttattgagtactactaaattagatttgtgtttctatttagtaaaattgacaaaaaagattgaataaaactgaaaatttaaaagcaggaaaatatcaataaaaagtgtaaataattatggatgaatgtttatgaatatgaatcctgttagtttagtttcccaattattaatgttaattattaattctcttccttttggtgatcacagattatcaaattaaccctaactcttctcagatcattaaggtcttaaatcatatattatcttgcatctttgaagtaaattaacatataacttgcattaaattcagaatctgaaaatcatgtaagctatgtaaatactatcgttttacatcaaacttatgttttgtcctattagagcattcctaatattcacttctcagattttatattaagatcataaatcacatttaagatggacagtctaaaatatgtaattaaaataaataagaacaaat

SEQ ID NO: 126630 - DNA, 690 bp, Cannabis sativa
tctttaaatctaacaatctcaatatttcaaaaatatttttaacgaccttaaaagttcaaaagacataatttaatacatgtcaaacttcagaggtaaacatcttaattaacttagatttattatgtctcatgagtggtcaatacactttgtgaccgtgcttattgttccttagctagtggccaccaagaagtggctctgcgattaattagtgaatttcaacggataatgaaaagttttattgttgtgtggttgtttaacaagacttgaaaaaaagggaaattcaaccaaataaaataatatagtacctatatactaagtttttcaaataagggaatgaaacaatatatatgtgaatgcgatatctgaagcaaagaatacaactgattctcatgaaaaatgtaaagttaaatatgtatatatataaagaatgtcacgcttaataaagagagtaataacatgttactctgtctaaatcataaccgttcatttttatagacatatctcgtggttagaatatgtcatttggaaattgacactaatatgacattggcagattgaataatagaggtaacctatttataatattcggaaattttacaatgcactcccttaaaatagatatattgatgcacccttatctgttttaacacccgaaataattttttagtcaatttttttctcatagtcatg

SEQ ID NO: 126631 - DNA, 1862 bp, Cannabis sativa
aatttagaatggttttggagattccgacttcatagaattgctcttgggtagctatgggactagtttcaatatttacttgttgaatttaaggtgattttgagttagaaattgagttcgcaactttataaatcttaagtccgaacattaatgacattttccattgaagagctttattgtaatttttgttgcataagaattattgtatttatagtatacatgtttcctgtgaagtttggaatgatttggataggtttaagtggtgtttcggtgtgtgcaaaatttaggatttttgatccctagtgctgcgaaccggtccatcacttggtgcaaccgtttaatagattcatgggaaagcggttaaaacgtttcccaaccgatttaccgcttctaggaattttagggaaatcggcaattgtatttttgtcataacttttcactcaggcgtctgttttggatgtttatatactgtttcgaagcttgcaaggacatctacaatatagtgtatgtcttagagccaaaatataagttttatttaagtgtatttatatcacggggttttgtaggaaaccttaggttatcctttgcaaatattaagaagtattttgatataaacacctattggtttactattgttgtgacataaggccgagatcgttggggaggtttctacactttggttgaccgacatgcatgaatctgtatcaaaggtaagaaaagtataatgtaccacatggcatgacatgtttcataattatcgactgtttgattaggcagtgataatgcgaatgcgatatacaatctcacatgattaggcgatgtgatgtatggattctatattatggtatggactttcctgattaggcaatgtgatatacaagcccacatgattaagtgatgtgatatatggatgccagactatgacatgggtttgcctgattaggcaatgtgatatacaagtgcatctgattaggtgatgtgagtgtccctctatggtaaagactgaaattgtagttaggtttcttctggtgagggatgcttatttatgttggaacttattttatcagaatctagatttactaacatgtacgtttaattaaccctaaatacgaattctctaaaacattgtaattaaacaaattagagtttagaaaccttacattgatgcatcagaacattaatgactctttccacttaatctctaacccttgtttctctctgtcatagagtaataacaagatttgagcctagatctccttctctccttaggcttgggtaaccaccgtcttccgcattatgattgactacttgacttgctatgtgtgggaatggtactctatcactatggctcgaattgatgaagaacaatgaataaggattcgaaatcactatgaaaggagtctcttatctactagttgtcaaagaatgaaaactaggtttagtttggttgaagtgagttgtgttggatgagaaagaaaaaacatttatagtatttcaactagggtttcggatttaattatatggattaaaaatgaaaaaaataatgggcaaaaattaactaagtggctggccactaaatgtgggactcactagttacaatttttccactttatttggactatttatacttcttttaataatgccatattttctaattttaatcctataaatgtcaaaactatttatttaataattatagttaattatcaaataaaattatcatttattttatttattagttagacttaacaaagcctcttatttaacaaataaacttcaaaacctcttttcttcaaaattaagcccttgcttagtgaaaattcataaataaaacatagtctaattttagaattattattgattaa

SEQ ID NO: 126632 - DNA, 999 bp, Cannabis sativa
ttgtgctccgatgtatgctaaaaccgtcgtgaacaccaaaaataggtaaagaagagtcttcttttctcctttcatggttcgatcttgaatttggggtggaatttctgtgtttggggttcgatcttgatttatcttaacgtgtttggggttctatgaatttctgttaagactctgtatttatagtgttgaaaaaacaagtttcgcgcgcttttttattttacaaagagattgaatattcccaagaattcgttacgaaaccgttaggaactactacagtacctaactctaactgattaacttggtggtgcgctctttcttgattgggcttgaactgaagtcatagtccagcccaatattggcccagtgttactttacgctcaaaagtgatataaccactcggcccaagacgaggaaaggaaagctcagaccaagctaattctgttatcttcgtaatcatctccttggtttgattcaaatattgcatatataatagatgaaaaataaaaggaaggaactccacatgaaatacctaaaatcactcatttttacgtttttatggaatttctcctttttacattttacgggctggtatttcttttgaggaaaaataatattattttcgtttgttgtaacattatacgtactatatttctgcaatgaaaaaataatgtatttttagaacaatccaaaaataacggtagaaaatgaaatccgtaaaaaagtaaaaaagaaattagtattatgtaaaaatgtaaacttttttttttttttttgagtatttctaaaataatctcaaaaataaagctctccctcctaattttctattttttttttgaagaaacttattctctatcttgatttcctccaaaaataaaaataaaactaatgagtaatgaggaaaggaaaaaaaagagaaaattatataaatatcttatattgaattatttatggaataattacataaggcacaattttttataaaatatttatatttttacg

SEQ ID NO: 126633 - DNA, 719 bp, Cannabis sativa
  modified_base (533)..(537): a, c, t, g, unknown or other
atagtttacctttggagaataagatacaacttatcattcactttttactttgttgcaatcactgaaccttgaaaaaataaataaataaagatacacatatagaacaaagaatttgaaacaaaatttatgtcccacacaaaaatcttaagagtcgaatttagacttttgtttatttgaaaaagtttgacaaaataatatccatgaacctaaaaaaaaatggagagagacagtgacaaaacaaagcttatccaaataatacatgagtgccaaaatggtatactttcaatggtataatagtgctgcacgatgcatcttgagttcctgtagtatcatataccactattaatgtgttagctaaactcgaatctatagaaaaatagttctaatgcaagtaaccatttgacagccccagatcattatattttgaacttgggagaagagaagactggtcttgaagtccaacacagtcaagcttttttcaaacttcttatgaaaaaatctgcaaaacaatataaatatatatatatttatannnnnatatatatatttatatatatgaatatgcaattgtacatcccaaagctagtgaaagagaagacttaaaactaaccttaacagtactaccttaaacagagttgaatagagctagcactttcagtatttgataataaatcattttttgaaaataattcatctttcagataatagtttaccattgg

SEQ ID NO: 126634 - DNA, 627 bp, Cannabis sativa
taaggtaaactcttaaaagatgtcacgcctccaatgctcatagtccttctgcttcctcagtagaagtgactgccaacctgcaagtttcagacttcattgatgattctactggttcagaggatgttttagcggtgattgctcagcaatcccactcttcatcatgaatgtcgttagttaaaatgcacggggccaagggagtctgagtgcgttccgtcgcttgtgtttgcttgtccgtgagcaaactccccaccttttgtttcttatggaaacaaagttaaaatctagttgtatttcccgttttaagcaatgtttaaagtttaataatggcctggaagttcctcgttctggactaaagaatggcctaatgttattatggcatgatgtaaatgtaacacttttatcaatgaatactaactactttaactgttacatttcttataatgatggtccctgatggtacttttctgctgtctacggtttccctgaagctacaaataaaaaacacacatggacacttttcactactagaaaaaagagttttagtgatacacattgagtgactctaaaattatttagtgacacttcaccgcgcgtcactaatgtgggtgactggaaagacaattttta

SEQ ID NO: 126635 - DNA, 760 bp, Cannabis sativa
  modified_base (27)..(45): a, c, t, g, unknown or other
ttgtatgtgtttaatttatcgttttannnnnnnnnnnnnnnnnnngtttaaacaacatacttgtgagtctatctaagatcctggtaaaataaattccaacaggaacttcccagggcgatacattggatcaggtaaacccaatgtctaacattccctaaaattgtaactttagttccttaagttatgttggagccatcctataaggtactttagaaactagctctgctcctggtgctaggtcaataacaaaatcaatttcccactacggtgataaactgggtaattcttcagaaaatacatccaagaaatctttcacactactttgatatctttaagctcaattgttttaggtctgctagcatctagcataattgctaggagtcatatgcatccatcttgcaataggtctctagctctcactaatgagatgactaggattcaggaaccccaaactaatcccacaacggtgaatggctcctcacccttgggttgaaagattaccatttttcttttacagatcaatattgggcgcacacttagaaaagaaatccattttgagaataatgttaaaattctttgtgactagctcaactagattagcactcaactctctatcatccactctaactggcatagacctcgggttttactcaagtattcaatcatgtttaaccctcaggcttgatactcaccaagaatctgattaacaactagttgtgaatcactgtagatctctagtgactcagctttgattgctagt

SEQ ID NO: 126636 - DNA, 876 bp, Cannabis sativa
agtagcgaactatgctggtaaaagtgacatttcttgtagtgagagaaaaaaaatcctaattagccaatttaatattaagataaaatcaaaccaattgatacaaaaaacctagcaacatataactattaggactaatcaactataaaatgaaattaacaactgctaataaaagagtataaattaaatttatattacaactttttgaagatgtaaataagcgatgcaaatgcaaaatatagttcattttgttaaaagtcaacttgtgtatcaaattgtgatataaatatgtcacataacaaaaaaataatctaaattaagatcacaacataacatgatacaaaatttctataacaataaatgatatacttctatatgagaaatactaaaaggctgcagtggtgtctgacaccctcttatgtgtcattatcgttattggtctaattaagtatcatgtatcatatagtttaatgcaataacttctagggggtatcgctaaccaattacaagacgacatgtgtagggatgctcgacaccattgatgcttaatagcaatacttcttttatatttaccattatattattaaattttagttagtatatttttttttgcattaaataacttgcattattattattaaattttatatttacttttgtattattatattattttatatttttctaataaattattgaatgaatattaaatgacttattaatttttaaagaattgctaaaagtaccactggtgtctggcactctcggtgtcataccactataatgtaattaagtatcaggtctcatataatttaagaaagagaaatgataaaacactctcttatgtgtcaatatcactcaggcccggccctgggcata

SEQ ID NO: 126637 - DNA, 3174 bp, Cannabis sativa
  modified_base (2676)..(2681): a, c, t, g, unknown or other
cttaaaaataaaagaatattctgttaaatttaacggaagattaacgtttgaagttaacacttctctaatcttatacgaccatccttctctaacaatccttctgtacccttacgattagtttcaaaagccctaacctaactagatctctaactcccactgccaatcgattgtaagccatttctccacaccccaaattccgatttgattcctggatatccgaacccaaatacctagatttctcaacttgggtatctctataaagtctttcatgttttggttctgatcggtactgttggcgctgtcttctttctgtagaatgtcggtgataccgcggcgcttctctccttcgagaatcaggttgaagctttggagaagatcgaattccgcaaagtgaattggaattcgattactccaatcattgataagggttcaccttatgcaaatttttggatggagaggtggatcatcgtctccgtctctgattatgcctctgattcgcttagaaagctcgtgaagatcaagggatggcaggtcttggcgattgggaactccaaaacatcgtcggattggagccttaaatgtgcgatcttccaccctttttctcctcaacttttcttctcaatttcattctttgtctctttttcttgctcaaatcagaaagaggtgtgcattattttatagatatatatttttttcccattttatgtatccttttcatgaattttccaattcttaggtcgtctctgctctaaccatttttgtgggtctcctttgatcgatgagagggtgttgatgttttggagaatatttcaagataattacaattcttttcgttttattcttgtagaattcagaattcaaggctctgaaactgttcttttgatcaagagtatcaaatgggcgacttctggtcttatatattaaacaaattttttcctaagttgacatttttagttttgggttcaattatttttatttatttatttttactaagttgacatctttagtttttggcttcaattatgtttttgtatgttagccctctattcgcataaatcttttattttattgtatgtaataggaagatggatgaaatgttagtgtacttgctaattgttctgttttgtaggtctactttaattgttgtcttgcatatttttggaattaaattataggatgaaatgctctaatcatagagttacttttctactttaattgctacaactgtttatgagagaaaagtatggaaactggtacagaatgaacaatgactggaaataattcatttttaaattttaaacagactgttgaacataatgcttacgaccaagatccttatgcaaaagagttcggaatcgggatcagtgaaaaactagcatatgttgaagctcaaattcatcctgcgccttgggtaatggagcaatccaatttcactttcatgttttatagttctaccatacatgaaattttaacttttcagttatattaattataatattaatttgtcttggttttcttttatgcagttaaagtatcatgacactagaaacgaaaagaattgattgacgcaagttggtcaatggaatatgatgaacaaggtatggtaattgtgtatgtatccaccataggcttatttttgtacctattaagtattaattgtgtatttattattaagtatttgaattatataatgactaattaaatttatgtcttttgttcatgtaatacagaaaatgattaatggaatgactgttagccggtgagtgtgcattaacttctcaagaagtgtgcaagagactgtagctcgtggattttgcagtgaacttgctcaaatgtgtcaagtatctggcatggtaaagtattctgtattttgtctgcatgtttccatataatagttcggtatttgaaattcttttcttcctaattttggtgtgggcttgcaggaatttaacacgaaacctgttattccaatttacaatgctcgaccagagcaagtagaaaaggcattgaagcatgtttaccatgcatatttccatgaacaaaacaaaagaaaaagaattagagcttgtgttagctatcttgcctgacaacaatggctccctatatggtaaatcataaataatgtttgtcagctaagcttactcaattgacatttccttgtgattatttgagttcatagtaagccaaaattttgaattgaagtttttgttctgactttctttatcttgttttaggtgatctcgaacgaatatgtgagacagatcttgtattaatgtcacaacgttgtcttaccaaacatgtcttcaaaattagcaagcagtacctggctaacgtgtccctgaagatgaatgtgaagatctgaggacaatttaagcaaatgtttaacgagatacaccacaagatggatgaagttttctctagcagggcttctcctcctatcaggaagttggaacaaatgatcaaagatcacctgcggtttatgaacgaacaaaagagcataatgcagtgacagtgagccttacttcattgcatatttttgtttgttcgcgatattatgtggaaaatctggtttagtttagtggaaagattgaggcttaatttaatatttctttttctgaaatatttttaaaacgatgatcattgaattaaaacatttgaataacaatgtgtatattnnnnnnttatatacacaattatgacattcttaacaagtttattttcataaaacatatcctttaataaataatttacaatttattaccgaattcttaaacaaaattcactaaaacttaaatgaaactaatatttacgtggctcgccacataactttcatttagtatatatatatatattgaaaaatataggattttttttttattggttagtacatagaaatattttttagttagtatttatatttattatcgtatattttacataatttttttttaaaaataaaataataaattatgtattatgaaattattttaaatatgaattttttttttttgagatttatccttagtttagagtatattatgtattatgagattttatttatgtttataaattactagtggagtctcacgtgcttcgcacgtgtggctctgaaaaatatctaagcacaattattttaaaaaaataattaatattttatttacgaaatttataaca

SEQ ID NO: 126638 - DNA, 2134 bp, Cannabis sativa
  modified_base (1866)..(1903): a, c, t, g, unknown or other
cggttttaaaccgtgccctatactaaaaccgtcgcctatagtataaagcacggtttaaaatcgtcgcctataccttgttataggtgacagttttaaaccgttggaagtccaaattagcgatagttttaaaccgtttcctattttgcccgttttatgacggtcgtataggcgacagttatagaaatcgacgggaatactttaaacggctgtttaaaaacgtcgagaaaaactatttttgtagtagtaaagtattttagtcacaaaaaacaaattattttaaaaaaattaaataattattccaaattataaatttttcagtgaccaacatttagtcaaaactatgcataaattagcttaaaaattaattcaatttatatagattcatttaaattatataattatattgtgaaaacaattgttcaaaaaatattcaaatcataaatatataaacttgttacataagagaatttccaatgtcaaacctaaagattacaaattaatgcaaattttaagaatttaaaatgtcaaacttaaagattacaaacacaaaatactaactttggaccaaactgctactgaaatgattgcaatgtacttcaagatatctatctcatataagatattccaacaagagtcatctttactttattcaatcttcaaaacacactactagttatttataaattcttgaacttgacactgtaataaaattctttacttaagtatacttcctccacgttgcatatatgtctttgatacagagcaaaatgtctttgagttgtgctgagtaaatttaacgagccactaacctgtaaattgtaaaaaccaacactgtaatgatttgagaaaatgcaaactttgtgatttgtgtgtctaatgtcctttaggtttagttttataacctctcaaatatccaaagagactagttttatacaatttgaaatttatacacaaactaaattattttataaaagagtggtctaactaaataaatgaatgaggaaatacaatcttatcatactctctgccttatgttcagtagcattatccccataaacattcttttcttcatcaaatacagcctgcaatttttcaccaccctctttacgaacctgataatgagggttctattgggattttatgccttaaataaaatccattttaatataattttattcgctatcaatggaagattagaagttatttacattaacatattattttcatgattgtagtttaatatacaatttctaataaatctagaacatatagttatttacaattacagttatgtcatcacagtgaaaagaaattgtgattatatatttcaaagtttatgtcccataattcatcagtgcactgtatttacactgatgtgataatcagcaatataatttacttacaccctggataaatgttacgtcatttttagggcattggtaaagtatgctagtatcaaatgtatagagtatacgttggattggaccgttattgaacttggataagatattataaacgtactgttgtatctttctaagtaaatatcacttagttgatcttagatcaatagatcttaatcctgagatggttactttctagcagaagtgttttatttatgttcttagagttgttcgttaaaactgacccattggatcggcccaatacttatatcttgggaacatggtagtgtaattgagtgggagcgctaatcatagatacgaaatctatagcttctatattgacatagaggtgaaatgatgatttcctttcagcttgacttaatagtgataaatggaagaactcttatttcagtaattatattagtttattgaaatatcatgtataggaagctaagtattttaaggnnnnnnnnnnnnnnnnnnnnnnnnnnnnnnnnnnnnnntactcgatgtaaatcatctatggaggatcttttattattgagagtataataattgataattaatagtgtatttatatttggaacatataaagcgttctatataattaagagtgcaattctgaatcaatagtttagtcaggaggaattaatgagttagataatttactcgataaattctggaaccttattagaagcttgattatagggtcatggtccccacactagttgaga

SEQ ID NO: 126639 - DNA, 764 bp, Cannabis sativa
  modified_base (700)..(707): a, c, t, g, unknown or other
attcataaataaaattgtagaaaaattcttaggtgggagtattatttttactctcacgtgtataagcattttttttttttaaaaatttcattgattgaataaagtgattatatggtattaatatatgttgttgagttaaataatatttggtgtacttttttttttaattatttatattgtgattttactttcaatatcatcctcaattttttttgtttctttattattttaaaaatatgatattttttcttaaagcatactcatgaaaagtataatacttttctatttttaaattttctatcattattattcttttatattatttgataatataatataataaataaattaaattgtgacaaatatattattataaaaataatatatattaaagtatttggaggttatattatatgagatataatgtaacaaacacataaatattataatatgaagagttgcaaatctgaatataatatatgtaatagaaaaactttaatttgaatttagtcttaattaatttatgagaaatttaacaatagatacaaagattaatggaagtgtatcagaatctatcgaatcgattgtaaaaaatataatctttcaagtttgcatcaaaactttctctggaactttattgtcctggtaatggggattaaggaattttttttaaatgatactgtaaagtccttttttggcnnnnnnnntgacaaaataatttttccatttatggtaagattgttgtgcattcatattcgatttct

SEQ ID NO: 126640 - DNA, 793 bp, Cannabis sativa
attgagctgatgactcatgatgcaaaaactgaattcgctaagtgttgattgctctgcgcgggtcgccagattcttgctctaggcatgccagcgaggcatcctgctcggcctgtcttccccagcagatcttccaagtggactccacgtctcaccattcccgtgattccacgtcagagtgccaaatttgggataacaattttttcaaaaaataggaaaaaatattatcttagttaagttctttaattttaaaaataatttcattaaattttttaaatagtttctatttaaataataatccattttcaaatttaacttttcaataatttttttttaagaaattactaacttattataaaatatcaaattaatatcattttgtttaattatcttaaaattttactaaaattcctgtggcataacactctaaatatttctaaatacatcacagattcacaatatttctacataaacaaaaattatatatatctaaaaatatcaaacaagtaattaacactaatgaaagcaaaaacaaattacgtataagctattttatttcaaaattacataaaacaatattaaattagattttttaagacttacaccaaaaaaaaatatttttttataccaaagattagtatatattacaaattatatatatttacaaattaaaaaataacatataataaataaatttataaaaaaagaccaatattataatatatcaaagtatatatataatacaaattaatattgttgactatgcttttagccaacgacaatgagtctttttgat

SEQ ID NO: 126641 - DNA, 1049 bp, Cannabis sativa
aaaaatgtggcaaaatcccgtgaaaacacgtgtaagtcacaaaatatataaaaagatatgcccaatggcagtatactgccgaataaaaagaaaacagtaaaaatgtaaaatctagcatgttccaatataattgtaagaaatggggaaaagttagtactccatgtaaatttccctaaataattgtatggtaagttgtatttcgcatttatcaacggtatataatctggttgttgtggctgttttttctttggctatattttaattaacaattaagctttgatttaatttttggtagaaattaatgacagagagagtgaagcttgattgtgtcattatactaattttacaaataaatatatcatttcctctctcttaagtagtaatttttacaaaatttaatatttttctaaaaaaatttaattgatcatttttcatagatatttgttttaggactcgtttggtaagttgtattaggtcgtattatattgtattgtactatattgaattagattatatatcatatttttatataatattatgttaaattttaatgtatactaaaatattatgtagttaggagctcataaaattcaatatcacatatagttttacataaaaatattgcatgaaatacaatttaatataatattatacaatacaatacgatataatacggcggaccaaacgaatcattattgttttcatataaggtcatgtatccaatatgcaatcctaccgttattatttcttttttttaaagggacccgttattattcctaattattgttaagatgagtactaggaaaactctcttttgtaatctcttttacactttcttattaattaagtgacatgtgtaacattctaaattatgtttaaaatagttataattatgccctcaattagtttttattatattgataattaaaatgactcatctcattcacttattttttttaattttttaaaattaataattaatttatttatttttactgataattaaaatgcgtgattctatttacttgcttatttgtttttcagacaat

SEQ ID NO: 126642 - DNA, 2025 bp, Cannabis sativa
  modified_base (1979)..(1987): a, c, t, g, unknown or other
cactctttccctacacgacgctcttccgatcttagatctaagatcctggtaaaataattcccaacagttttaccatattttaagagcaaaaactatagcatcacactctaaatcatgcattgagtaaccctgtctgaatgcatcacaataaatgacaaacttttcttgatctattggcaaagataacaccggtgctgttattaaccactactttaactcctgaaaactcggttcacacttgtcagaccaaacatactgttgattctatttagttaacttggttagtggcatagaaatcttggagaagcctttgacaaaaagccaataataccttgctaacccgagaaaacttctcacttttatcattgttcttggcctcggccaatttttcactgactcgatcttccacgggtcaaccatgattccatcttttccgataatgtgccctcgaaaggatacttctgacaaccagaactcacactttttaaatttggcatacaacttatgatccttgagttgttgtaataccatttaaagatgtttctcatgatcctcttctatctgagagtatacaagaatatcatcgataaacactatgacacaattatcaaggaaatccttaaatactctgttcatgagatccataaaagctactggagcatttttgaatccgaatgacattaagaaaaacttgtaatgaccatatcgagttcgaaatgtagtcatcaaaatatttgcttcccaaattctcagctgatgataaccagatcgcaaatcaatctttgaaaagatagccttcccctgaagttggttgaacaaatcatcaatcctaggaaatggatacttgttcttgatcgtcaacttatttaattcccgttaatcaatacaccttcggagggaaacatccttctatttcacaaataaaaatgaagctcctcagggcgattcactgagtcaggtaaaccctaaatcgagcaacccatggagttgtaattttagctctttgagttctaccagagccattttgttgtggcagtaatccaggtaactccttgggaaatacatcaagaaattcttctacaactctgactacctcaagcccaaatgtttcaggtttgctggagtcaatcacaacaattaaaaatcctacacatccaatgtgtagtaaatctttagcccttgaaattgaaataaccgggattcgaaacccctgaacagatcatacataaataaatggatctttgccctctggttgaaatgttaccattttttgcttgcaatcaatgttggctgaatatttggacagataatccatcacaagtatgatatcaaactctgtaagttctaattccaccaggtcaacactcaactccctatcttccaccctaattggcatagacctaatatgtcttttggagataaccaattccccgctaggcagtatagttctaaacccttttttcaatgaaatcacaaggtctacccaattgattaattactcttaatgccacatatgagtgtgtagccctagcacaagattagggttttggcgtgtcatttacacagttttattatgtgattagggcatccataaagtacgagactttttgttcaggtcggccaactcacttgaattcagaaatgaggtaagaataacatataatatgtgatatatatatatatgcgagtgtatgtatgtgtgaaatatatgtgcatgcttattatgattaatacactaccaacacttgtgcggaaatggtacagagtgcatttgtatagtgtatgctattaaaagagtacattatggtgttaccagcacaagtacgggagagtacagggtgtctgtggtatgtcacttagtggtactcagggtacgaaataaaccctaccaacactcgtacaatgttggtacgaagtgtatgtggtgcagtggttgtaccccagtatggaacgttcttactcatttgttaagccttgtnnnnnnnnntatgggcgcctagatacaagtcgatattatgtgatatg

SEQ ID NO: 126643 - DNA, 946 bp, Cannabis sativa
agaatatctgaatgtgtatatgaaaatgaaatatctaaattgcccttgaatgatctaataaatggaatactggcccaagggagcaaaatggtcttttggccatttaccattatttcttgtgaaagatattatttgattaagtgttaaaaattaaaaaaaaaatagaaatcattttttggttctttctatcccaaaccgaccccctctcttctttctcaactctctctttattctcattaaattcttgaggaacttgtgaaatttgtaaagaattggagctaattttttgggttaagcttgaggtaacttctatagcttagtctaattgtttaattttagtagtgtatgaacttgatttgagttataaaaagagtttgcatgttgtatgtgtggatgatgtccataagagaaatacaaggttttctttgtgattatcttgtattcttaaatcttagtttggaatttgttgttgtttatgtttatattttggtttgtgttaattatgagcacgagaataattctaggtcattgatgtatgttgatgttgttgtggttgaggagttgagcatgaaaatgttagtttcgtgttcttgagtttgtggaaagcatgaattggaaccttgtcatatataggtatttcaacatatctatttgaagtgtaaatgcctaaaagacaccttagtttggcatgaattttgttatttatgacataggtgaagtttggattgagtttgtgcatttttggagatataaaattggttttttggattttttgaacccaatagccgtagccaaaaccttgcagagagcattcccaattttgtcgaatttgttttggccataacttttgactttgaactccgatttggatattctttatattgttggaaagctcgttttgaactctattatttggtctagtgttagagtcctaaatgtgaatatt

SEQ ID NO: 126644 - DNA, 2765 bp, Cannabis sativa
taattgtgaataattatatattctggatttaacataaattgtatattaaaaccataaacatagaaaatacatgtaaacttaaatgacttctagtcttttattgacatcaaataagattatattgaaatgagttttatttagggcataaaatctcaaaaaactaacataaaactagaagtgcattttaattagtccattatcttgatattcatatcaagtgtagtgtgtttgactatgctcataagacattattaaacattacttttccatatgtattattcctctagggatgctgaattatttactgcttgataagtgcatctgaatattcagaatacacaactgtcattctattcaaaataggatagagataaaatagtaagaactttcttcagtttgattaactttctagtatcttttaaaaacaacttagttatttagcttcactagtggaactaaattattatagatgagtttttacacccattcagaataattcttccaaccccagagtaatcaccattaatttcaaatattaagttctgagttagtgtagatataaggattctaaatacacacccctatgatcatctaatatatataggtcacttttagagattctttcttgattgtctcttaatgttcattgtttgattacatctttgatagctcccactcaacagaggagtttggcttgatgcatatgtcagtgtacatttaacttcttactattggtacttaaggacatcttgttgtgacatttatctttatctggaaacaataagtttcttctagactaagtcatcaacaaagcattctagtacattaatgtaaaatacttgctcaagattaagtaaccactagagataccataaaatatttcataaggaccaagaattgtgcttgagtctttcgaatagacattgcaagattatctatcttatccttataattctgataagttacaactatccatgtgaatggttagattaacttttcttagttttatttaaataaaatttcttgaacatatatcattgtaaataatcactagtgctatccaaataatagtcgactggaaaaatccttccactaagataaggtacagtgattctatgtccagagactttagtggcatctattactattggaacatatacatgatcaagaataaattttattagtttactagtttgtataatatgcatcttatatatatgtctaatcaaaatatatgtgttatagagattctgtgatgttttgaatataatctagagttcatagtaaaattagatctttgaactgcatatattaataacttctccactcctatcagatcataagatctttactaaatcaaatcttaataattgtgtaagaaatataataaatgtaaaccacataaagacttgataaactgacaaatataactttggtattgacatacaagttataaaatataaagcttaatttcattaaaaaaaaaaagcaactcataatgaaatgcttttaaagagaaaaaatttaaattaatactctcaaaaatatcacatgaattatctgcaataataatatgaaattagaaatataatttccaaactagattgttcaaaaaataaaataattaattcaaaataataaaatttgagcttcatcttcaagcttggacaagctttacccctttgtccaactatgtctcaattcgctaagataatgagccaagtctaagcagctgaagctgaaataagaagaatataaacatggttagtagatctagaagtaataactcgaaggaataataattttctaaaaacacatgaattcacaacaaagttagagataccttgattcttcgtcaaaaacttaggaacatggggtttccagtgatcattttcgttgcaataaaaaagtatttcccttttccttttatctttgaattagcagtctttttacctttattagctgtgttaacagctttaagaggttttttattgttgttccacttcttcatctttgcgggcttcaaagtagaggcaatgtttgtctcaggttttaccgtaccaaccgtagcattgttagaacttggagctttgttacctcctttctatggacctccaatcaaattctcaaatgtcttaagattgttgatcaactcctgaaagtcaaaagtcaacttgtgcatgacgtagtttgaagtaaagggaagaaaagctgaaattaaactattcaacatcaaactcacttgagtttcttgatcaatgatagctccatggatctcagcttcctggaaataactagccatcaagagtaggtgttcacgcacattcggataaggtttcatcagtgcattggtgaagttcttggtcgcatcaaaacgagcttgatctgacaccttcctaaacaattcagttaactggttcatgatctcagcagtcgtgaaagtgttggtaaaccttgttttcaaggtatcaataactttgctagacagcataaagaaacgagctttgttgttagaattttgccaatactcaatcttgtctcttactgaaacatagtatacgacacccactaaagctatcaaggaagatatataagtgaagggtttaactaagaaatgtatctgatttcttttttatatagtacaatatacgtgtgtatttctataattcactacaagaaatgtcacttttaccagcgcatttcacaaactgcgctggcaaagaagtcaaagttttaccagcgtacatttacagtggctaaaatct

SEQ ID NO: 126645 - DNA, 620 bp, Cannabis sativa
acatcaattaaacatttataaacacatttttcatagaaaaaaaaccagttataaaaagtataaaaactaaattacataaaattaaacaattacaaacacaattctatactaaaaaaaaccagttaaaatacaccaacaataacataaccacttgagaaactcaccttcttcttcttggctcgagatttcttaacctcgtgtttctttggggcatcaaccggaacttcagagccagttccagatgcagcgccaacaaacgccacattaccaggctcaacctgttaacaaaatgaaaaatacaatattaaaaccggttataaaccagttataaaaacaacaagaataaaaacaaaaagaataaaaaacagaacaaacaaaagaaatcagttatatacctggtccttcacatgttcggaaatagcttccgattgatgagaatctttttgttgaactccatgatcaacatatggaataatatcttgaaaacattgagtaacatataataaataacataaaaacattaaaacacaataaaaaatacagacaagaacaaacaaaataaacacatgaaaatttaaaaacataccttagttacatcacccctttttcttttcttaata

SEQ ID NO: 126646 - DNA, 872 bp, Cannabis sativa
  modified_base (845)..(846): a, c, t, g, unknown or other
tgcctttactaatccaaattactaaagcggtcattacaaccttggtaccaacttttttttgaagaaaaatagttgatagtgtttttacttaagggattgttgaaacttaaataaccaattaaccagagctaattaattactttagaattaaacatttcttggtaaataccacttgcttttaggactttgtgaacttaaatatttaattaacctaaattaattaatttaattgactagcttgaaaattttagttgtcttaacatgagttaactatgaagcctgaacttctattttaagttaaccttaagtaattttgtaatatattaaatcaattccaagtatactaaggtagtggcttacttccacttccctgaggtttcagttttaggcgatactccctactctgatattttgttaaatgctagattaacttcaaatataataaggtaggggcttacttctggttccctaaggttctgatttcaagcaatactccctacttttagacttgtcatttaatttagttgtttcttgtgaaagaggtctaactttataatgatataatgtatgctaccccgaagtgattaacagttgaaacttttgatcacttgttacatgatagaactttcaaagaccaaatatgaaataaaaacttcgtcttttattcatatacttcctgccctaggcacacatggaaattatacagtacaataaagagtaaagaaaaataaaaaggaagctgactagccctaatttacgaaatgtatcggcacaggtggtcaacgttccgtgttcttaggatttatgttccatctaatctttttaatgttgggttttatgccctnnataaaactctttacaatctgattagt

SEQ ID NO: 126647 - DNA, 1058 bp, Cannabis sativa
atgacttggattacgttccagattttgttctatgagaagtattataaggaatctatccgtgctactaaggtagaagaattcatacagctagagctagttcatggtggtatgacggtgactgagtatatgccaccaaatttgactgattggctaagtttgcctcttacgaagtggccactgagattgctagaaaggccaagtttattggaggcttggaagaacatattgctcaggatgtaattgtagctgttaaataatcaagggttgttcgatcttatgctcaagtggttgagttagcccttgattcatatagaactacaattgttactatttatcaatatgatttattaatttgtagtgaaaatatattgtaaaaataatgtttatttatcattataattattatttttttccttactaatgtatattttctttactagtagttaaaacattttttttcttggaggggatgtcaatcttcacaagcacaagcttctcaccttcatgctgctaagatattcccctcaagcccaaagttgtttgttgctgggttttcttgtttcttttgtagagagtgattatgaagttttcgtgaattctttccattctttttcttatagtatctccaagtgggacttttttttttatatcttttaagatattatctatttttctagatgtatgccttcaacatgtaatgcgaaattataataacggatcacatggtgggtataatatgcactacagatcgaaaacgaggtttcttgattggaagaaatttctccttgtttaataaccaatgtattgtttgactttcagcaataaaattggttactatattgaaaaaaattaaaaaattactcttaatatttttttaagaatttttctcacattattttgtgttaatttcaatacttattttaatttcattttaatatatttttaaaaaaaaactatgtatagatattttttaaaaaataaaatttcatataatttttatttaatttttgttgctataatatttaaaatataatttatttttgtttgataggtatatt

SEQ ID NO: 126648 - DNA, 953 bp, Cannabis sativa
  modified_base (684)..(685): a, c, t, g, unknown or other
taagcttccccgctctgagaattcgctatcttgctactaccagagcttagatcgctaagttttggattgaaaatcaaagaaaatagatataggaggagaatgttttgtggaaggggaggaacgaaggttcgttctactctgttctctgtttgaatgttttattatcttattattaagttatatatataaaacttaatatcactagttttacttacttttttaacgttaatattattataataataatgatataatattaattaaaattttattattaataattatcttatcgtttcttagttactaagaactaagaaacttttacttctagggcgctacattaaatcctacacactcctaattacccaaatacctacattattaacttatcacaatattcccattaattctatcaattaagtctgttatgacatttttggcccctaatcgagtctccaagatcgccaaacctgaagatatttttctttcacaaagagttcatattacattcacacatgctatataaatctctgtaatttaaatagcaaatttaaaattttatgttgaactagattattaggatcataatcccacttattacctcgttaactcataatataaatataaaccttaattattaattattaagcttattgggatattacaaccatcccctccatatannaatttcgtcctcgaaatttacctgaataactcggaatacagctcacgcatctgcgactctaattctctagtcgcttcctcaactttactactcttccataggactttaactagagggatcgttttatttcgatgtactttctcctttctgtctaagatctggataggttgttcattataagataagtgtgtctggagctcattatcatcgtaactcaaaacatgtgtcggatctgacacacactttctcaacatagagatatggaaga

SEQ ID NO: 126649 - DNA, 932 bp, Cannabis sativa
tttagtggtacttaatccaattccctgtgggatcgacctcacctgtgtgagatttactacttgattgcgtatacttgcgtagtgtttaaaattatagcaacaacttgcaaaatgaatttctttacaataaagagattcgtttcgttgttcactcacctcaccttatctcattgtggtgctttgtagaagttttatttggcagtacgaagtatctatcccaacatatcataaaacttaccatctccaggacaacagaccataagttcaaaaaggtcacgttcgggtactaatcaaaagcacatacattcattaaagaggtgattttctattgttttatagggaaaattggcacgaataagatttagatcaaatatttaaaaaaaatgaaaaaaaaataaaggtatgttgtatcaaatcaactaccttcactgataaggatagtctgtgctatgagtttctcttcctcaatagtggctaaggcaagaaagtatgagatttttgccacacaaataagttaagagaaacttttaccaagtaccaaatatgagcattgctaataaggatcagtggtgtctaatactttttataagtgacaccttacaattggttaacgacattctttaaaggttattttttaaaattatatggatccaatacttaattacaccaatagcagtataatacaaaaaaaaaaaaataaactagataccaataatattttttaacaattcttaccgtatacagttgatgggaattacctaaaatattattgggtgattctacaatgcactcccttaaaagggatgtattgatgcacccttaacttatttcgtcattcaaaaaaaaaatttaatcaatttttttttcatattcatgtacgttatagctatttaagatattctacaaaattttgagaaattcggaataattta

SEQ ID NO: 126650 - DNA, 932 bp, Cannabis sativa
  modified_base (887)..(898): a, c, t, g, unknown or other
gtgccgcacgggtgttccgctgcctgaaaaggtgagcccgtgacacagggcatgtcgaccaacaatgctgaacgtgactcttattttaaaaaaaaactaaaagtttagccgcatacacttcttttattattattattattaataataaaatactctctctctctcttataaagacaaattaaaaaaaccctaactaatatgattcacacatctctttctcttcttctcatttagccacctattccttataaaagagagttaattgtggcataacttttagaagtgtcatctcgcttgcaactaactaccaattcctaaattttgatgataaaaccacctaaattccgtgcctattagcaaaaacactcctccgtcaacaagaccccattatctgccctatgtggctcgggagacaaatttccacgtagacttacaactgccaagtcacaaaaatttcaattgcatggcattatgaaataaaaaacttattaaagacaatttaaaataaatgaaataaaaataaaagtaacctaaattaaatcaaaaccaatttatgaacagaatcccacaaaacccaaactagaagaaccccaagtcctaatcaaaatctcacacccattttcgttgaaaatcaaaacaaacccagtagaagggttggccaaaatcgaagaagaagaagagaaaagaaagttcaatggtttgggatactcctacctagattcatcctccattgtcgaaggtgaagaacaaactaggtgaaaatgtctatgaggcctctccactaccgatgtgatccccctagagttgcatagatgaaaacaacttggataaataagaatcatagacgaagatgttgggttttgtgccctaaataaaactcattttannnnnnnnnnnnttactaattaataaaagatcagaaatcattttat

SEQ ID NO: 126651 - DNA, 759 bp, Cannabis sativa
gcatggccaactcaattttatgatatttgtagaaatattaatgaaaattacacattttatggtttttataaaatataaatttttttctttcttttcaataaagttattttaggagaaaaattcaaaaaaaaaaaaaaaagttaaaaaaggtaactaaactggttagtggttaccctaagcagattttactatattttttttttagaaatttacattgtatactaacttttattattttttttacaaaaatactgtcaggcgatattttttacttttttattgtaatttttttataaatttcatactgcagtatactatgttaagttttcactggtgtcctactattttgcgttctactagtgttttataatttttttttttttttaaaaaagtcatatttttgtaaacttttgctaaaaaaatcgtacaaatgaaaattcccctattgtagcctcttacacttatagctggtattggcccatgatggataaaagtgtacattaccaaataagtaaaggcttggataagaatcttcatgaaataaatgcctatcaagagtttttctattaatacatccattaaaatttggaaaatgcagtccaattccaaaaattagattgattacaaaatcagttaaacaacctaagaaagttcttgtagataataatatacaataaatatatcaagagtaatttgtggcaaaaccccctcaactatcaatttacttacaaaaaaccatccaacctcatattttggtgg

SEQ ID NO: 126652 - DNA, 1716 bp, Cannabis sativa
  modified_base (1639)..(1655): a, c, t, g, unknown or other
ttaaaaaattcaaaagtgaaaacagttttatagaacgcgtttttgaaaaaatatttttactttttcaattttaaaaagaaaaaattgattaaaaaagtgttgccaaaccctaccttaatttactaaccaatgatccttaataaaaagtgttacattctagtgtaaactttacaaagctaggaaaattaaaaaaaaaatgaattatttagaaactatatttataaaaataaaaataagaaattttaaaatttcttataaaattaaactgtaaatcaaaataataataaaaaaaaaatctagaaacttataagatcaattttagctctttacaaatactaagtttagattgaggagctagagtaaccaagctcaaccaaaatcaataaagtctattaagttctcttacacatattgagtctcccattctcaattatatacacaattaactatcaatttatcattatactaccattattatcatactacattagtcactaaacacattacaaaattatcacctagaacaaatcataactataacaccctacttgcttagacacattatagtattttttttaattattgtgctaacttttcctaattaaaagagttataacttctttttttttttttgaatagaaaagagttataacttaaagtgtgtataataaaaatttacgtaataattactactttactaaacgtacaatatatttataaaacatttacaatctcaaatcccgaaatctatttttcaaaacatacataaaatacataatataaaaagtgtagcctagagacaacctaaactaagcttgttctatcccgaagatcgcaaccttccaagtctaaatttttgaatatgtacactcttcaccaagctcaccactcactgccgcttagctttagttgtgcctttacctacacatagaaatataactgtgagtcgacagactcagtataaaaaacataaaacatacaacatatattgttgaaagttattttaccaggatctagatttactaacatgtatgtttgattatattctataatctaacatcctaaacatgaattttctaatataatgaattaaacacataaaagttgtagaaaaccttacattgatagtagcggaatattatggttccttctgttcagatctctaattcttgttcctttctatcacagagtaataacaagatctgaacttggatctccttcaaatattagaattcttcacaatcttccacactatggttgagtactgacttgatatgagcgggaaatgtactctttatagagacgaaattttgatcaagagaaagagggagatcaatttataaatagagagagaaggctcttttgtttatcagaaaaattagattggggagcttatgttatgttgtcaggttaagagtctatcactatctatttataagattccttctatgattaggtttaaattatatggattaaaaaaataaataaatggctaaaaaatcacttaagtggtcggcctctataatggaccccactagttacaattttatcattttattttaacaacttatcttttctttcataaatgtcatattttaactttaaactttttaaacgtcaaatctaattatttaataannnnnnnnnnnnnnnnnataaaattaccatttaacttatttattaattaggccttacaaagtatcttaattagtaaat

SEQ ID NO: 126653 - DNA, 2144 bp, Cannabis sativa
gtgagtcagaagaattctttgtaaataaccacaatcgacacaagatatacatcgtcgacctcgaaagaaagaatggccccagctcgctattgggatcgttgtaacgaagtttctgtcgagacatgtccagatacagcaattaaagacgtgtttactacacaatagttttgacccagtaaaagtgggaaaatcacaactatatgattttcaaatcctaaaccgcatttacactacgtgatgtgtaatcaaatcccacgattttagggatgattgttgtaaacacatttcggtcaattttgtaattcattgtccactatataattataaatagtgacaaagaagatcaaaaaagggacaaaaaaactcatatgaaagaggccctaaaaaatactcagaaatcagaataagattgactcgtgaactacgcaaaattttaactgcaaaaccacgtaaaaaaccccatgttcatatcctttattttgatagctttttttttttctgtgtgaaatcaatattatgaggctcaaatttggttaacgaaaatatgcgttaacaaactctatagcgtgaaattgtcccctggtaagagcattaattcacagttaatcatgatgtacctgaagttccagaaagcaaatcttctgggaattgatttatcaaaagagcaatggattcaattcattctcaacagccttccacctgattatcatggatttattatatcatacatgatcaacaattttaactcatccaacgtagacaagctatatgcagaattgcatgcttatgaatggactttgctacctgcaaggaggcctccctccagttttgtagacttgcgcaaaagaaaagttgaaatgattgagaataatgcttctaacaatgctgcttcttcaagttcaattttgaaagccagaatcaaaattgaaccaggaaatgaaacaattagagaaaaaatgagtaaaagtattcttctatgttcatactatggagagaagggacattcggaagaaagatgtcgcagacttctaaaccattggaacaaagcttagctataattttttcccaccaaatgtcttgtcttagttctaatgaactgagccacatggggatcatattcatcagacaatcttctgcttctgttcatctgaggcatagtgacttcaaaaatcaattgcctacaacaagaaaagtcttttggttttgaaaagagaaacccaaggtaattttaaaagaggaaattctcatctcacaaggatagtgtcttcgaattttgaaagtctcaaataaggaattcaaggacattttgggagttcaataacccttgaagcaaactcaacaaaggaagagaagaagaaaatttttgaaaaaagaaatctaccttgatggatgaaaagcatctaaagaactgatgaagatgaaaatcgaaggctctttgaaaaggcttgagcgtgggaagctagaagggaagtgaggaaaatttgattgaaagctctcttatttatttgtgaggtcaatctcctaatcataaagcaattgggagtcttttacatttaaagcttaaaaggaaaagataaatgataagaaaaagatgaaaatcatttctctcctccttctagcttagaatttcaaaattcctatgagaataggaatatgaattctaaatttaaaaggtaacaacaatttgtagtaatattaagaatatggtaaatctaatgtttaaaaagaaaaagataaataataatcaaaagatcaaagatcatttctctttctcttttctactctaaatttcgaatgtcatttcaacaaggattaaaattgtaattcaattaatcctaatgccatgagaaatacatgaaaattttaagtttacaaagacaaatataaaagatacgtgaaaaaataatgagatttttatctttttctttgctttaaaattttcaaaaataccctaacaaaagagcaatggaattcaaagttctaattctataataatgcttgaagaatagaaacaattatctaagattgttcaaatttgtaagaaccattattttctgtagtgacaaattatgtctagttgcattccagttgcgtctgggactcgtagtgttttgtctggagttcgtactattagtgttagtcca

SEQ ID NO: 126654 - DNA, 1373 bp, Cannabis sativa
ggtatttgtttaatttttttttttttttttgtgattaaactttactataggaatatatgaaattttcacttagattgggtttgtaagtcttttttttttttttttgtgattaaactttaccataggaataaatagagttttcacatagattgggactatgataagtgaaaactccccttacttaattcaacttgtcaattgaatagaaataagaaaaattggtaattacattaagaagtaaaacaaaggatagttggggatcataataatccttgtttttcttattgtttatttctctaattttttaattatttgctttgctttatttatttttctaaaaaaaaattaattaatcaaatagaaacaaaaaaaattaattgattggtaattgataatcagtcttcgttgggacgagtactctactttatcattatattacttgattcaattacgtatacttgcgtactaaatttatcgaacaagtttttggcgttattatcgatgattaaaattatcaattattttatttctaatttgattatcattttattttgctaatattttaattgtatgagtttattttgcaaggtacataaaaaaatgctacatcaagattaccttgtgaattttttttcaacaacacaatgaatcattcttcgttgcttgggggaggtttgataaattggtaaagagatgtcatcacaacttttcaagagattgtctcactttatttattcacaatggaatgaatgatgaaacaaatatttgggtgaattatagagcagaggtaactagagagtcattgttaagtagaagtagtcctaatgacataatgcatttgttgaatgatatgtctgattttgatcaccactgacattaagatccttcactttaaggttggagtcaccaataccctccatatttcccaaactcattccaaccatttgagaaggaatatcatacaccatcacttgcagaaaaaataactcaattggagtgtatggtaagatctctatttgagaatttaattgtgcataatatggagtgttttaaggaaaaagactcaaatgaccaaggttatgagtgttgtttgaataaagtagaagcatcattagttgggtcaatagaagagtttgaacttgtaattgaatatcaagacccctttaaagtggtactagctaaaaatttggctaaattagatttttgtttggcaaataatgaatatagtatggtgaatgaaattaattttattcatgatcatgaaattattgaatatcaaatcacaaacacggttatggatagtcaattagagagtgagctgttagataaattaacaattaacccaagatctatttgtatataacatagaacac

SEQ ID NO: 126655 - DNA, 521 bp, Cannabis sativa
ctctctctctctctctctttatagatcagttacaaactagaaaaatatatccttttaaatgaatctaggtctccggcttatctcaaactgaaagtgagtactggatcaaaacagtaagttctcaaatacaaaataattcttttattatacagctaatgaaaaatagagtgaaaattttatttattttataatatttaaataaaggtattcaatcaaaattaccatggtattcttaattatactagtgccataacaaacattacaagctaaatatttattgggaattttattattagaatttggagaaattataactcaccatgttttacagacaatttacattatttttttttacctttttcttaatatatataaataatttataagatcaaaaatatagttcaaaataatcaattgcacacctattagtaaaatgattttattctattaaatgaaataaagtgtacagaattagtttatatagggggataatattcaaccctagaatacaccaaacccaa

SEQ ID NO: 126656 - DNA, 736 bp, Cannabis sativa
caaggcatcttcattgagttacaaatcacaatgaaatgtagggtagaatctgttaacgagattactttaaacaacattcaactgttgttcatggttcgaattagatctatcatgaatattttaaagagtaatttgcggtataaatacttaagtttaattctcagttacaaataaatacataaatttaatttttagcgataataatacctaaattttaattatgaaatttctgtagataccgaattattaaatgtcaagtaaattattacgtgacaattcaagattagtctaggtcataaagtttttattttttatttaaaaactagtttaaatatatcaataaaaaaatgacacatggataataacatgacacttaatgaccaggtacctacggaaatttcaaaaatataacttaggtattattaccgtaagaaattaaacttaaatatttatttataaaagaaaattaaacttaactatttacgtcacaaattattcaattccaaacaaaaaaactcaacaagattcgtgtaattatgtccccaagcaataatacaaatatatgacaccactaatagtttataaattgagtaaaacaagtgtaactatgggtgtgtttggaaataattatataattattaagtaatgtacttactagaatagtaattatcttatattttaatacaagttgtgtttggatatgaagtgttaattatatatgaatttttaatatttt

SEQ ID NO: 126657 - DNA, 948 bp, Cannabis sativa
cacttgaccttccctaggcaatgtgggattgcacagtttactcgatattttttcccttatagatcacgggattactaactgtcacagccatactatggctttaaaaaataggtcaatcatttaacaaaaattaattggcacatttaacaaaaacgggtcgggctatttaatataaacggattaactcattaaagcatgacacgaatacgaacccaacacaaacaattcgtacttatggttcttactaacctgacctcaaagtatgggtcgggctaggcaccacccatattttttttacaggtgatgccacctttaataatattcataagtaattactatctcatattcaaacacatcttgtattttaaaatagagtgtactcacgcccagtcttgagcataaacatgctaagcctgtgcgtaaggcccacctaacacatgagcccaaaaaattcccttttaaaaatactcataatttttatatttattttaaaaataccacatatccttttaaataaaggcccaattctttttcctacgggccactaaaattcagggccgaccctcaatgtacttaagaactaccttattaattatacaattactttcaaatgcatcctaaaaattctcttttaccaaattaaaatcttgtaattgcctaagagataattgatgagtttgaaatttatcaaagaaaaatataataaattttatgacatattacgaattaatcattaagcgtcacctttatttaggtaatataaagcaccattaatacttaatatcaatgctctaaaaaagtcctacctttttttatgttctcacataattaacctacgatagaggctaatgatataggacaataactttcccctaacacatcatacaactttgttcctaatgtacattatgttagacttttatttgggcttacattaagttttattgg

SEQ ID NO: 126658 - DNA, 751 bp, Cannabis sativa
ccccactattctacactcaaggttatgagtgagtgtatttatatatttatatatatatatcttcttctacctttcttatatataaaaaaatatagtgtatatatattggatatatattgtatattatgtgttgtttcattaatttaatctctttgttggtccttatattgtattgcaatagagttgtaatacatcatgattttcttccattataataatatctctaacatacaagttaccacctcatattatatgaataatttttttttaatatttatatctaaattatttaatattaaatattaacaatttaacattcaatcatatataaaaatatgcatctagtacttataataaaaatatcgtaccaaatttgaaatttcagatagtttagttgcatattacccaatatattttaatatattttattcttatatacatgaaaaatataatttaaaataaaattcaaaatattttcaacatgcaactttttttgttctttaatttgttagtttttattttacttatttaggataatagaggtaaaaatccccaaaaacataaggttgatgcacattagtctccgatctcaaaaattagtagtaatagtttctaaagtcacattttctataagttcgttggtccctctatctaattgattcgttaaactcaaataaaatgccacgtgtcaattttttattggttcaaataattattttaattaaagaatttaaaataaaataaaaaatta

SEQ ID NO: 126659 - DNA, 1752 bp, Cannabis sativa
aaaaaaaaaaaaaaagagtattttgtatctgaataaaatgtaataaagaagaaactaatgaggtgaggttataaattataatgaggtgtagttagttcattatcatcaacaaattattctatgcaagttaagtatattgataaatgatgtgactatttagataatcccaaaattggaatagcccctacggctctctttaactaattaaagtttattaatcataatgcctgatgggtacctttatatatatttaaattttaaataatacccacttgagctgtttgtttaacaaacacagacacactatccaaagttatataatatgaaaattttaaaataagcctttttctggtctaattttataaatttttatagagaaaaaactgcaacaaagttatttttttttttttttagtaaatactaatttagatcttgtattttgtaaaaattattgattggactcttagttttgttaaatgacaaaataaatcctgtattttttaaaataataaaaataagaaactgagcttaatttttgataactttttttttttttaatataaccaacttgaaaataattcctaacatgaacatatacagaaaatgtaaataattttgtcataacacaattagatcgaattattattaaattttattttgacaaaaaattatttcaggatcctatttgtaccattttggaaaatacatggtccattttgtcatttaataaaatagatggtccaattagtaacttttacaaaacacaagatccaaaatggtatttactcttttttttatttataattctttaatttttttttatttttttaaatatttttttacatggaccaataaaagtataccatatgtacactatgttcacataaatttgcacgtggatagtcaatatgacatttaacacctaaaataaatagaattgttaaattgataacagaacacgagtattagaaattttaccgctaaaatttgagttatgaaaattaaatacaagtaaaataaaagtattgaagatttggccacaatttacacttcaacaaatcataatcttattaattaagagatttttacaaaaatattaaattttaagttaaagtttacaattttactgcaatacgaaattttttacaaaaaaattgttctttttataaaaacccgtaaaacaacaaaacataacaattaaaaataacagttaaacaaataaaaaaaaattagaaatttctgtgatgtaattattccttaattaacccgtttaacacaactacctcaactctctgtcttcaaatgagtaataatatgtttgagatacacttcgaaataataatagatgcttccaattgaatcatgggccgttttcaaatgggccttgagccagtccaacggtaaaggcccaaatgagtgggtcaactccctggcctggttgatttcgggagagtttttcattctcgctggcagtaacattgcccaccacgtggctcttcgagcgggttttgatggaattaatctgaaagggatcgtacaaaacaaatctaatattaattaaagtcccacattgaatatcattaataatattaaaatgtttataagcaacagtaattatttatgggttaccaattgatttttgagtggaacccatacacttattaattaaccctatcaattcagaaagtaaggaggaaaaaaaaagaaaataataaaaaaaaaaaaagagaaaaaaaaaattgaagaaaaaaa

SEQ ID NO: 126660 - DNA, 565 bp, Cannabis sativa
taggatgttaaataacatacaggagtagtaaatctagatcctggtaaaacatattccaacaactgcaccactaataattcctccagtcacatagaagttattattcccaaccattaacattgatttgatggtgagctgctgaagaacaaaaatgacgaaccaacaacaaaacaaaacaaaacaaactatatcattgagacaagactaaccaccgtaacctaaacaaaagatactcaaaactatattgcagagacaagactaatcaaaatagtaaaaatataattgcaataacctaatcactgtagaaaaaccacagagcctgactaagccacgcctaagcccagggtgggctagcgggcctggctagagaaaaagacaacctttggtggctaaggatttaggaacgacaaactcccattgacgatataaaatatttatagaaaccctcattttttatttatttattatttttttgagtaaagaaacatataaatgaaaaatttataataaatatttgggtaattcttgttggaacttattttatcaagatttagatttactaaca

SEQ ID NO: 126661 - DNA, 701 bp, Cannabis sativa
ataaattattcaccatttacattacatatataagaaaaaataaaggtgcaaccatgtacataattaattaggaaataatactgcattaaatataatattgctgcatttaaaaaaaaaaatatataatattggtggaatgttgacttaaatataaatttctaattttgtaaaaagagaaaaatgtacatgtttccctattttgggtttgggcagattaattttagaaagggctctagtaatgaatagaagcaagttttcttctgtaatttgaaattgatccaagtaataaatactggtttatacatttgtttaaaaagtaattactggtaatgtaatgcctgtttgtaatgtaatttatttagggtggatttggtagtttttctgatttattaagcaaaaaacaagtaaaaatatttattagaaatatattctataaaattatttttactttttaattgcttaattaagaattaaaatttaaaaaatttaaaaattaaaaaaaataacacttacataatttttataaaagattttttttcttaattagtattttagactcttactctaatttggatcttgggaccgaatttcgaccccgtctccagtctcagactcggactacggccccagtccaaacccggacccaaactcaaactcgacttaaataaaattaaaaaataaaaattatagaacatactttt

SEQ ID NO: 126662 - DNA, 1492 bp, Cannabis sativa
tatcgatttttatatggactattgcagttgttgactgactatttctgattttgacttatggtactctagaatggcaggcttgaagaactagtttttttttttgaaagaacctccttgttcaattaactagaaaaaaaaagatgggagaataacagggggcactccctccccttgatacaacacagcaacatcactagaaattctagtgttttttgccacaccatcggccaccgagttcaaacacctcttaatgaaaaagaaatcacaacttgtaagttttttagacaaattcaaaatagaaaaatagacatttgatgatctccaatcaggcggtctcccttctgcagcaagagccttcaccgcaatgtaagaatccgatagaatatgcacctggttccaacccctctccactgcccaggaaacagcaagaaggatggctttgagctctgcttcgagagctgaaggagccttatctttaccagctttgacaaaccagatgccttgtcttgtgtcaactccaattgcagcaatcccacactcaccatttgtccaggacgcatccgtgaaaatgacatgatgatccaagcttcttcgggtaccttcttccgagaccagatcttcagatggtgacagcttagagacagctgaaactccttcatcgacacagttatgttccaggctgcgcaaatctaccatcgattttccaattcttgttgtagcttggataggatctgcagactgatttctgatgcaggaaaaatttctttgctgccagacttccgagaataaatagccacagagatttagcagctcaaatctgtttgaagaactagttgagttttgatactttgtgaattattcttttaagggctatctttgttacttacaataattctaaaatttatttcttgtgaatatcatgtgttggtaaaaaaaatatatattaaaatatagtttttattgcaaaaagaggatgatgcacacattatgcttagtaccatgataaagtatcactttataattacttattttttataatatttatttaagtaaaataagtaggactcgatattgagttatatcaatcgtgatattacaccttataaaagtgccaaggaccataaatgctctttagcatttctcttattacatgtgctgttgacgacttattacaagtgatattgatattaattattaatttactggtaatatagattaattttttttattattatcatttaaatattttaaaaataatataaataatgattgccgaaaaaataagacaattaaaaaatttggttaatttaaagatttgaaaaacttgtatactgaaaatagtagattttataaaggataaatactattttagaccatatgttttgtaaaagttactcattgaactctctgttttgttaaatgacaaaatagatcttgtattttttaaaattgtacaaatagaaccctatactaattttttgtcaaaataaaa

SEQ ID NO: 126663 - DNA, 1491 bp, Cannabis sativa
  modified_base (30)..(31): a, c, t, g, unknown or other
  modified_base (227)..(232): a, c, t, g, unknown or other
aagaatataggcaatcttgagtgtggttannaggaacctcaccttgtcttgccacctagtgaaattagtgccatcaaagcggtccaatatcattaagtcttggttcatcaacttgattatttctccttccattgtttttgttaaaaaaatatgatatatcaatagaagaataacaataagatgaacaaagagaccaagataattacaactctattcaacaaaattannnnnnctatagattaaataaaagttacaatctcaaagcacaaaatacaaataaagagaaaataaaagatgaggacaaagttacaactcaaagcataatatacacataaatgtaaaaccaataagagaatataatatatatatatataataaagatatatatatccgaccgaacggttaggcaagactacgggccggactacaatggtggcagctgagtcagatgagcagtgccatgccataaacaaaggaataaacggaggagacttatgatatatagtagaaacatagtgtatatagaataatatctatactacgtataatgttatacagaatacgtataatgttatacagaagagataatatatatatatataataaagatgagaagagggtagaaaataaatagaaaaatagaggatgaaaaagaactcaagtaagctatgggggatcaccaaaggcttgaacaaggtttaagcacctttgtccgaaaaagcttatttccccctataagaaacacttagggaatagaatggaaatacttttaggaataaataagccttttaatattttctagcttactgtttaggaaatagaaattgttgttgtctacaagttaatcaaagacctctatttatagtgtttgaggattacatttgaaaataaaatcattttatcacatggttgttaccaacactttattggtgtttaatgggataaaaacgttggacaagagagctagtattaatttatgtacgtttatgaacgtttttttaaaaacctgattttagttgttcgaaaaacaaccattaaacaattgtttccaaaaaactcaaaatttagtttttgtaactcctcttcgagttaaatcttctcccaacgtctcaatatccatttaaattatataattgagtattgtaacagtttctaaccgctaaaaacttatctcattaattccataactttcatatgtaataactcacatatttatcaattgtgatccttaggttacaatctattttcagatttgtaactcctaatatgttacaacttttatgtgtattattatattatatataatataatacaacctccgacacataatatatattaatatcgtattaatatataatatgccacattttaatctttattaatatttgttaaataacaaatacaaaatagggctattttcaaaaatatggaaaaaattattaaggttatgataaatatggcataaaaagtaaatgtcactaaatatggcat

SEQ ID NO: 126664 - DNA, 1247 bp, Cannabis sativa
agatcattgaaatatcttcgaaacataagttgaaacaggtcaatcaaatcaatattaagtgagttatgacagttttactaaatgctgctctgataccagcggccaagttaacagcccaacgccctggttgacatatgacgtcaaccttgatgtttggtgagtagaaaaacgtgctggggatgtattttttgatgcttaagtgatattttgaaaccacttattcaatttcttttttctggtaaagtcgttcaccagttcttggagatgttactgttttgcgaaatcgagagactcgaaactacccgatttgcgactaagtcattgtttaccgagtttttcaaaaactacgtatttaaatgtaagagccaataattatgattcaaagataaattgataagaacactgaaggtttttctacgttgttgagacgtcaattagtcttagtctacaagtcaatattattaagatatgctaggaaagtcttagggattacagaaagtatgaacactctatatttgcttgagcaaatgagccaagaattccaaaaattttgcatgtaggtttgatgcggtatttatagagtatatagattatactagttacaatttttctctctaatggagagttacaaatataaaattaaatttaggcttatcttctgaagcccggtccatggggcaccttgtgtataccaatgtacatgccacaacacgatgctagttgtcaaaatcatgtcctatatttgtgggacattgttgacacattaattgcttgattaccaattacctttattccttgtttagtgagataagatcttccatccaagattgtaggaaggcaatcccttatcttgtgcgatctattaataaataggtaactgtattgggcttctggatgcatactgaaggcttcttccagctatgtttcttacatgttttccagattttgaacatactggatggaaccatgcctggtagagttaatcattatttaccagaaaggatcaatgatttatggattcagcctagtgacgttgttttggcccattgttgggccttggatatatgagctatatttattatttggatttcatgtgtcccttgccaaaaatacgggtaatatttacgcacaagcttttgaaacactgtgagttacggaggcttgtttcaaactacatggatggataggtggaggctaaaggtgaaacctttatagttggtggattttgtgccgtaaataaaacccat

SEQ ID NO: 126665 - DNA, 732 bp, Cannabis sativa
  modified_base (700)..(707): a, c, t, g, unknown or other
taaaatatataaactttactataaaatataaaattattttaatatgtataattttcaattattattaaaaccgcgcgaagcgcggtaccattccctagtttactcataaaataatttttcagttttcaaccaatgatccataaaagtctattatcatatcttttgaacaacatttaacgcaaactattgaatggattaattcaaggtcaaagtcgtaatttcctgtccttaagttcaaaacgacccatttaatctaattgaattggtctggattttggttataattattaaaaaaaaaaaacaattaattaattattaaatataattatttctcgttaattaggtggtgatatcatttttgttttttaattttttaattataaaataaaagtagagttttcatttttaaaaattttgttacaaaagtgttttgcaatttatttttaattttatttaagttaaattttagtacggtaatattaaataaaaaagttgtttaaaaatttgttgtaagtaattttttttactatttttaaaaaggatcatgtttttggttaataatatttcactttttttttttttaataaagaatatttttactttttaaattaaaaaataatttgtaaatgaattaaaaaagataatatgacattaattataagtattattatttaaaagtgggtaaataccattttggacnnnnnnnnttgcaaaagttacagattggaccct

SEQ ID NO: 126666 - DNA, 748 bp, Cannabis sativa
  modified_base (170)..(172): a, c, t, g, unknown or other
ttagtttctgatattaagaatattaagttttaaaataaatagaatataaatgtaatgtatctgaaccctccacgtgtccttatttatgaatcaatggaagtggtagtaatgggtgtaagagaattgtaacattgagtatttttacgtatttaagtgtataaaatctgaannnattaagtatttatgccgcaatttagctaataaaatacaattgacgtgtccgaatgtaattaattcataatataatccaattaattaaattctaaaatgtatattaattaagattaaaaaaaagaaatagtaactaattagtatatgattggtatttggtatcatgagtaattttatgtttttttttttattctagaaatagcataaaaatatatatatatatatatatatgttttcacatcttcaaatgttcaagagtagattacaataatatatttttaggctcaactgaataatgatgtggcaagaatttttttttaaaattataaataaaaaataaaaaaaggaaaaaaaaaagaagataaaaaatgagaaaagtaaattaactatttttataaaataaacttaaagtaaataaatacaataatatttttctcacttcaaataattgaacaaatttataaaaaaaaaaaaacaacaagaaattataaaacgtagcagtatgagatatacctcattaattaatgtcaacacctgttatacatgtatttatgacacgtttactatatagtaatca

SEQ ID NO: 126667 - DNA, 1447 bp, Cannabis sativa
tttttatatagattatagattatagatatatatactttaatttagttgttcttagttaacaatatatagaaaccgttaatatacatcattggtaaggtatttttcaacttaccccaaaaataccactaacatactttcaaatgggccatattagttccaaacacctaaacttcagaatgccactttgagtatatttctaactaaaaatatcataatattatttatatataatcgtaatgattaagaattgattgacttcgaatcgaatttactctcaatcgaattaatgaatcaaaactataataagttatttacttgcaaaaatcaaaatcagaataagcagtattactatttttttttaaattaaactcttattaataataatcagattttgatacatcaatagaaaaatgataagaaactatcaatccaagctcgttcacaatccatcctaagtgtatgcacaactaatttatgaacggagacatgaactaaagatgcctcaagaaaattagaaagtaaactagccaaattaatcaactaagaaagcgtctaaatcattatatcaagcgaaacacttagaataagctgagatcaaaactaaacaatcagactcttgaaataaatagatctccaacaaacaagagagaccaatctatcctttccatcaaaataactgttctctgcttgaatgattgaaatttttcctacaaaaataaccaaacaaaaaatgagttcttacaaaatatcttgtaacatcaagtaaactaactataggaaacaatcataaagaaagcaaagaaagataaaaacttatctcatgtaagtaactccaaaagtgaccttgaaaacatccataaatagtcatcaagtaaaacaaataaaacaaaacaaaaagtactatactataacataacatatacaaacataaaaaaaataatccaaataaacttaaattaccaataattagtaaattaaaaaaattaatcaacatatactatataattaattagtttaacagtaacaaaaacttttataaaatttgaaattcgtattaacaccgtataaaaataacaaatttaaaacataattctcaaaaatcaaaataaattaaaaggtaaaagaaaaaaaacaataaaaataatagttattgtaatattacaatttagattaaaataataaattaaattaaaaactttacaatgaatgagaataatcaaatatataaatattctttgtagcagtattaacatttatgtgttacttttttttttttttataaagttttatgtgttactttttatgttactttagaaccaaaataaattattttaagctataaaaataccaataccgttaatgaaaattttaagtctatgtgttagaatttgaggaataagatgaatgaggttccatcccaaaacaaattggcaatgggaggagtagc

SEQ ID NO: 126668 - DNA, 1372 bp, Cannabis sativa
attttgtttctatgattttttattttggtttgattattcaagattgcaaatcttcgttaacaatattaatttatctttacttaaacgatttgcaaataaatttatttatttttgagtattttttatcatagagttgattatattcaggcctgacttggtacaagtgagttaggtttgtgcttaggacctacttagtctaggacccatgaaaaaaatttctccttttaaaattatacctttttttttactaattttaaaaaatattatattttttctagataaggggtttttttttttttttgctatactaaattttaagaccaaccctaatcgtattattagtaggagagatgttcataatgatataaacataaaccacacaaacatatttggtgattgataacaagattaatatcaagatttttttagattcttgggtagattatttatgatatttatggtgtaatatctattttttttttaatttcaattcatgttattgttctaagaatgtcaatggttcacactagtactttggctaataattatgttatgttcatactattgagaacaaggtctgatggtctggttttcctaattgtgtataacatcttatatttgttgaagtttcattaataaaatatttattttaatcctcgtttcattatctgttctctctttaggtttattggttttcaggcgtttaaggtcaattttttctaaaacaaaatacaaacacaaacacaaagcaatggaaagaatttcattatggtgaggtggtttaattaatttaggtcaaaaaattaatatttaaaatacaaagttctaactgataatatttgttattaccaccaagatctgcaccgacaatcgctccgtccaaactcaccttaggttttgcagcaaccgccgctccctcttacactcatcagggccaaatataaacctttgtacatgaaaaataaaaaatttatttatttcttctattactttagctttttataggccatatttggcatgcaatgtagacaatactacatctcactcttaaaaaatatttgttataatacactattttaaaaatatgttaaatatttataatatgatattaatttatattgtaacgtccctgcttcaagtttctattgggtccttatacccacggaatgatggctcttatacacgagtatgccattctggctgcttcctggattgacgactgaccctacaaaccaacacgagtgttttcagcgtgcgagtgagggagaacttcccagtaggtcactatgacagtcagtagtcctgtgatccgtaaggggaaataccaggtaagctgtgcaatcctacatcgcctagggaaggtcaagtggga

SEQ ID NO: 126669 - DNA, 5285 bp, Cannabis sativa
tcaatcaaggaaggataaagattattttcacctaatccctaagatacctacggtataggtcatgtatgccctattttatatcgggtaggaatttgtgcccctaaggggcagacacttaaagacaagtgatccctttctggtgatccttacaaaaatactataaataccccaaataatagaaggaaaaagggatcgatcgatcgattaaggaatcgaagggagtgaagaagagagagagagattcaccaagaacattctctgtataagaactctcataaataataaagactcgtggactactgctcattaatacctgaatcacgtaaaaatcacacatgtgcattaatgcttccatagctctcattatatcatttaattggttgcttcggtcaaaaatatataaataagaaattaggggggaaaaattaccacaaataagtaagaatgtgtatgcaatgggaaatcagaagttgatggatgaatattaattgttttgagcaagaatgtatacacactaacactaagcaaaataaggagagagtagatagtaaaaaaaatatatagtaaaaagaattatattataaataatcatttaaaattagagcataaaggttaatcaatagacaaagaagaagaaaaattcaaattgtaccttaatagacagatttacatgcactcacataaacataaaaattaatacatacaagatatataaattaatgacttatattattaacaacacaatccaattttcaataataaaaaaagagagtataatctaaattctaaggatgatatagtttttataaaagaatgtgacaatatcgatatttttttttttattttaaaagaagaatttgatatagtatattgttaattggcttaatgggatctctcaaaaaaaaaaaaaaattggcttaatgggatatggtatagtgtgttgatgatgaataaaattgagagagaaaatgtgtaagaaagagtaagtatatattatttatatttttaggtgaaaacgtggagttggaagagtaagaaagagagagtatatatatagtttaatatttttttttaaaaaaaataataaaattaaaaaaatgagtgaattaagaagtgaataaatatattttatattaattaatatttatgaaactaatgaaaaattaaaaaataaagagaattaaggagaaaacaaataatactcattagagagattttagagtaccacatcactgtctcatacttctcctttttttttttttgaaaattagcgtgttatcatagatcaaatagaaactagacctcatggtcattacataacaggttcttcggtaacacagaaaccgggatagatccaaacatatgatggacaaaagcccatctagccacattgtgagcggcaaaattacaagttcggctaataaaagaaaaattacagctactaaacgagtgagaagacttagtacaaaatgagacgtagttctcaagcgcccaacgacattccatcccattgatagcattgatcaccaccctcgaatcattctcaactataataaacttgaaacccatctccaaggcagttgaaatcgctaaacagcacgcctcagcttctccgcagagcacattagagaaatccaccctcgttgtctgaactctaaccactctaccgaggtggtccttggcaacaactgcaatacacatattgtcaaagcccactttaacatcataattcagcttaatccaatcccgtgggggaggggaccaaacttccttgagatgagaggtgggactgggtaataaagcagcatgaatatcaacataggtaaaatatacatcatcaacacattttttcacatccataaggcaattattgtggactttgtcattccgcaccctccaaattttatccacaacgatggaggcatacaaaaaagcatcctctactagaactcctctcccgtttagaccccagatgaaattgacccaatcccatacactgttcccagaatcacaaatgggataaaaaccctaaggagaagctcgccagagatgaaaggccacatcacaagagaggaataaatgttccatagtttcttcccttgatccacaaagagggcaactagtatcctcaatgtggaatcttctattgatcactgatcttgtaggaagtgcattagacagaatacaccaccacaggatcttgtgtcgttccaggattttgctataccagagcttgttccagaggcttagggcaacctcacgctggggggctctatccaacgcttgaacaagataagccgacttacacgagaaactaccattactagtttgagtccatatccatctgtcagtgccacttccagagggttgccccccttttaagatggctacaacagtttcatgatcaaagttttcattcagcttattgacgttccagtgtccattgggaagtaacagatcagacacacggttgagataagacgcacatcacctttttggttttggacagaagcctttgaagtggggaatccagggatcctcccaaatagcagtactctctccattagccacaagtttacaagcacctctctttaaaatagagttagcctttacaacactcttccagaaccaagagtcagagtttttatacttatacttgagaaaatccttcccttttaaatattttgccgttaaaactctgcagcacaacgattgactaccagtaaggatatgcgccccccacttaggcagaaacgcctgattcatttctcttgttttctggaagccgagcccaccaagagatttaggaagacacaacttgtcccacgcttttaaatggagcccatgatttcctttctcaaaaccccaccagaagtccctaaccaggccatcgattcggctgaccatacgattagagaggttggtggtctgcatagcatacatgggcaatgaaaggcccacagattttataagagttgcatgacccgcctttgacaaagtcatagccttccaaccctggagtttcgaagtgagactatctagaataaagttgaagtcagcgtcctttggtcttgaacggaacaggggcaggcctaaatacttgatacacccatcaggcgaatcgatccccagcttttccttgatctctcttctcatgctctacggggtgttcttactaaagaaaatagaggtttttaatttattaacctattgaccagaccacaaacagaatttctccagacaacttcagaaaccatcaacctcctttaaattggctctacccatccgacttaaatcatcagcgaaaaatatatgggagagaactgggccgcctctacttaactttaagccttgaattcttccctgagccagggcgtcttgtaatagtctcgaaagcacttccgctgcccaaataaacagatagggcgacaaggggtcaccttgacgaagcccacaagagggtatgatttttccaacctgacctccattcaggcagatgtttaaagaagtggtggatatgcattgcgagacccaattacggaatctcacaggggtccaacagcattccatcacatggtcaataaaacgccagctcagacgatcataagccttgacaagatcaattttaatagcaaaaaaaccttccttgcctttctttttgttgaaagaatgaataacttcttgaacaatgagattattgtcatggatgtttcttcttggaacaaaggcagcttgagtagggcaaatcaaggaaggtagtaaaggttttattctgttcgctagaatcttggagataaccttgtacacgacattgcatagagagatgggtctgaaatgactggttctcttcgggttatggacctttggaatgagtacaatattagtagcattgatacctctacgcatattacccgttataaaaaagtctcacaccgcctcacagaaatcagtgctaatagactcctaatagtgcttatagaacagaaatgacatcccatcaggcccaggagtcttatgcttattcatggcaaagagggtgcttcttatcttatctacactagggcattgaaggagattctccgactcctccaaagaaattccctcttgaaaaaaccgactacaatcatagtcctgcccgatatccgccctagtgaagataccgttgaagaaatcaataaactctctgccaataagctccctaccagtgatccacttattgtctttgtttaataaactctcaatggcatttcttcttcctttaatagtggcagaaagaaagaagaacttagagcacttattcccttcattgagccagcaggaaatccttgctcgttgttgtttttccaatagatcgcttttctttcccgggattcatttaaggctcggcgaatctcacattcccggttccagtcgcgggacccagcgggaaggctctgtaaagagttgagttgattttcaaggtgcttgatctccaaatcaagcttgccaaattaagtacgattccagtgcaggagggcaactctcgtggcaccaacttttttaaacactcgcgcaggggcccaagagtgaataaccgacttccaagcgcttgctaccaccaatctgctcctctcatcacgagtccacccttcctcaaacttgaaacatctcttggtctttggttcgaaaccacccgattgaaggaacagcggcctgtggtcagagttactcgtatggaccgagcagagaacgactcttggaaaaagattgaaccaagcaccgttggctaatcctttatcgagggcagactttacatgtcctctaccagaacgatgattatcccaagtcatcttatctccttggatagacatattgataaaaccatgggagtcaatgagattcgagataattgggataaaagggtcccttcccgatgatccttctctttcagaagcacagagaacaaaattcaaatctcccataataagccaaggaccgccaaatctatctcccaatttcaaaaatttagtccaaaaatttttcttagcatgcaaatagtgagggccatacacacaagagagtaaccacgggtgggaaggaggatccgaatacactaaactagagatatgattacgcgagcaagatatacattcaaaactacaaccagacttccgagccaatataataccaccagtagaagcggtcggcgacaaatattaaaataaaagtggagggtctttagagtacgtaccagtggtttagcatccacttttagctcagacagaaaaataacatctggagatcgc

SEQ ID NO: 126670 - DNA, 603 bp, Cannabis sativa
ttctcaattaaactgatggtttgagtctagggacaaaaaaagggacaaaaaaaaaaaaaaaaaaattctatttaaaattatgcatattttctaaataaaagattcaataattttctttctcctaaaatccatcctattacaagattggctttgtggtttagctaactaatgaaacacttaacaaattgagttcatattatgtaaatatataaaatttgtatataaatatatatatatatatataaatatagaaaaatgctaaagggcaccagtgctgcctagcaccctcctatatgtccatatcgctattagtccaactaaatattgggtcccatataatttaatataataccttttagagagtattgctagtcaatcgtaacgcaacatctcaagaatgtgcctatggtgcctaatagcaatattttatacatatgtatgtataacaatagtataagtatcgacccatatgtggtagaaaacaaattatgtgtacacaaaattctcaataaaaatacccaataaaatatataattattagatttttttcttttttaaaaaaaggagtaagaattattagatttttataagatcggaagagcg

SEQ ID NO: 126671 - DNA, 1220 bp, Cannabis sativa
taattcacaatcgtcaatccagaaagacaaagaccaaatccacctagtggatactataaggtctcctgaaggtaacagggtaccaaaccccgaatcatatacatcacaaggttgatgaaaactttcaattactctacttgacatgtaggaatgagtagcttctgagtcaaacaattctgaataggaacagccatttatagataactgacctgtcaccactgacgaactagcatatgtgccagcctgagtcagggtaaaaagtcgtcctgggtttagcgtagtatttttcttcggctcttgtttcttggcccgaggacaatctcgaataaagtggcccaccatgccacactagaaacaatccttggcccgacattcacccttatggtgtttcttgcacttcagacactcgggataagatcggaatgaaggtcttcagccctgacagccacctctgtttccccaaaactttctatgactccatgatgttctggaagcatcagcctaccatttgtgatcatggttaccactattggtccccttactgatattaccactagtaggaggattcgatgccatggtggcatcctttgctgtctgctcttttattacatgtcgctcagcctcctcagaaattaaggctagctctaacactttcttgtacaaagtgtaatgagtagttgtaattttcaagtcgcgatagattgtggcattcagttctctcacatatttctcttttctggtgaaatctgtaggcactataacaccagtaaatttggacagctgatcaaactccagagtgtattcaaccacatacattttcccctgagtctatttgacaaagtcctccatatgtgatgtcctcacagggaagttataaaatttttcctcaaacagactcttgaactcttcccaagtcatcacactgacatcacaagtctaccccgctatatcccatcagacgcgggcatgatcttgtaacataaaagctggacaatttactctctgttcgcgtcacccccatattatcaaggatacaagtgattgtactcacccactactcagctttaattaaatcaatacctcccagaaaagttggaggttgcagcttcacaaatccctcaaacacagaatctctatgcggcaatatgaacccctggttacccaccagttgcacaggtactggtggtaacacttgctcaacaggggcagtcggtgccggt

SEQ ID NO: 126672 - DNA, 574 bp, Cannabis sativa
aagtatcagcatgccaccagcatgcaccacaacatgcgccaccacttgaccactacttggccaacttgtgggcatcacttagcttgtaacgtgctatattggaccgcacgtaacactgagagtggaagtgtggtttaaaaagtaagatgaaataaagtatacagtaaaaaatatgagattttatttcaaaataaattggtagtgagtaagtaatccatggtattattaatgttaagtttatatgaatgtgaaactatctaacaaatataaggtatcttaaaaccaaacatttatcaaatatatgtgcacaacaccacacatacacatatagcagccttcatgtcccccactcacaagagatattattaaacaaaactaaaaatagaaataaagcataaaaaaacaagacacactttaattttgatgagagcaacactacattttattatacacatacatgaaagactataacaatgcaataagatatgacttcaattttcttttttgtttttctttgttttccttttaataaatcatgcaatatttttttttttgaataatgatgaaattttat

SEQ ID NO: 126673 - DNA, 594 bp, Cannabis sativa
ttccatagttcgacgggtgtcttaggaattgctttagatggaaaaacatttagaatgtcgttttccatctgtatagcatatcaccagaaggacatagacatagttgaatatcctccaggtcccattaggctttagaactaaaactagattgtcaagccatacgagatatagagcttccctaaggaagtcaatgtttgtcaacatgtccacttctattttcactgcttctgtccttggtggatctaagggtctttgcttttgctgaactggttcagcgttgggatttatgtacaatgcatggcaaataacatgaggacaaataccagtcacgtcaacatgactccaagccaacacatcactatttgccttgattgtcgagacaatttgctcttttactacaggaggtaggttcttcccaatcgaataaccaaggtgggatctttgtcatctatacatatttctttcaattcttccattggttctagacacgctccacgtaaaatagttttacaacatacattgcgatttttaaactatcatcaaataagcacataaaccatcatgaaactatccaaatcaacacaaacatcgttt

SEQ ID NO: 126674 - DNA, 2171 bp, Cannabis sativa
  modified_base (1755)..(1758): a, c, t, g, unknown or other
ctggctcccaactctaattcagggatcccgtctgaggtggacgagtatattgttccgccgggtatcatcctaacccattcttgctgatgaggaaagaacccaactccggatcgccaagcacaactatgccacggcagagtacacaaagaggaacgccgaggtggaggccttgaaaaagattctaagggaggcccatgacagttttactcgaagtgagtacgccaggaacgtctgggatttaaatctagatcctttgactgatcggttcaactacttcatcggacccaccctggctccctttgccttagaattaatgagccattttgctgccggcctagttcagctccctatgaagagatacgcgaccggtgcttctaccaatcccgtctactaaatccaggacgtcagcgtggccatgaccgcagtaagttcctctctgttagaggtatttttgggcttcttttctttttggtgcatgacattatgtattccttatacataaattttatttgttgtcagattgctgcggagactggttgtctttcaaagactcttatcgaccatgggtacaccatgtccgagtttgaggcatggaggaggccatgaagagtcttcgagacttggaggcacagaaaagagctatccgggaggaagcccagcagaaagaggcccttatggagcagagccaccaggaggtgctgaaggctaaggatgaggcgttaaaggccaaggatgaggcattgaaggctagggatgcggccgtggccacagtgaggcgagaactctgggattctaagcagcagtgcaggaattgactgccaagctgaagtctctggaggagttcatcaagtagatttgtaaacgacagccaacctaactgttgaagtgaaggggcgtcgtgaatataaagagtaggcacagaaggaggcagccaaggcgaagagagatgccctcatggccccagtcacttgccaacactgcaagaagcgctttgatgatggagtcttcatggtctggcaatccaatggtcgaaaccttaacctcagcttttatcccaagcctaaagaggttcttgttcgcttcttggagaagaagaagaggctggatgtggtgttggaggagcgtaggggtccttgtcttcctccttgggttgattaaatcatttgtttatctctattatctttattatcatttttttttgttatatatcctatccttcccctcacttctaagacaatttatctctctttttttctaaggggagacatttatggcccgtccccatgccttttctttttaaggttttttctttgtccaaacaatctatattatgttcgaatatatttagtttttaatttgatctgtttgcatttgtctgtgtgatatgccttagtacccccctaagtgacatgaaaattagttttgaagtcacttagtcttacaaaattaaattagaggtcgcatatatttgttcggtacaaatttcctttacataacataaaatttattttttagctattggtaatactttcggaggtgatcagcattccaagccctaggcactgtggttccgtccattctttttagcttgtaggtcccggagccgatctcatcctcaagttcatatggtccttcccaatttggcccaagtacccctactccgggttcttgagtggctgggaagactcttcttaagactagatcaccaatattaaatttcttgtctttgactttggagttgaagtgtttagccannnncttttgataagctgccatccgtacttgagactcaacccggagctcgtcaatttgatccagtgcttcttgtaataaagctttgtttgttaccgggtcgtaagtcgttctcctatgggatgggaacaaggtttacaccaagaccatagcttcacaaccgtatgccattgaaaatgacaagtgcccggttgtggttcttagagtggctcggtaggcccataacacttttggaaattcttcgggccagttgttcttgcaggccagtagcttcttctttgagtgacctttaggattttattgacggcttctgcttgtccatttgtttgtggccttgccaccacaagaacttttaatgactccgtgctagttgcagaagttagtgaattcttcgtagtcaaactgctttccattgtcag

SEQ ID NO: 126675 - DNA, 790 bp, Cannabis sativa
gtagcctttccgtgtttggagtcacttacacttttccatataagaagcttggaaagcattatatgtgatggtggtaataataaactcccaagaggctccttcaatcaattgagaaaggtggatgtgtggcgctgtggtagattaaagaatctgttccctttgagtgtggccaaactacttcatgagattatagtacaagaatgtgagatgatagaagagatcatagtaagggaagatggtgaggaagttggccatatcattgatggtgatgatcagtcttctttgcaattacgctgcttgcatttagggtctttaccaaagctggtccaattctattgctccaaccacaggccagctagggagtcatatcatccaaagcctttattcagtgaaacggtacaccatgatttagtactacacttctttttatagtaccaataattagtgaataaaataaatgtcacttactagctattactgccatatcgaacattttttgttcttttcatgaaaatatatacaaacaatggtatatatatacaccagtttaatggaatcaatagattaatgtattaatttatatatacatttttttgttgatatgtaattaatgggtattattgtcatcttatatatactctatttattcaattattacaaattaattaatatatttgcaggtttctttacctaacttggaggatttaactatgaaaggagtgaatatagaaaagttgtggccagaacaacttatggtatcatcaacttcttacatgcaaaacttaacaag

SEQ ID NO: 126676 - DNA, 693 bp, Cannabis sativa
aggagattatttctcttttagcggctgttggtggtggttcttgttgtgccatttcgcgtgatgcgaatggtgtggcccatgcactagctaagtctgatactagttctttaggggttcatttgtggacagatgcttgtcctagatttattggtccttcggtaacagctgatttactttgatttaatgacatactttctttcaaaaaaaaaaaaaaaaactttcctatttttaaaacgtcattttttcttgtagaaaatttatttcttttcaattttcttttaacattgtgggagattgtgagagcaagagattaagacttaaaacattttaaaaattagagcattgctattggataagagtgttgtctaacatttttctttataagtaataccttttggttataatattttttaaaaattatttttttaaattctctaaaaattaatgtcaaattttgtattgaccctccaacttggccacttgaagggctgtgacaggccacctggctttcccttgttggaggtaggttaggaaggctggtggtgctgactaaaaatcatgtgagtcattagtatatgttagaataggtaatactatagtatattgtaggaaatttaagatagaaatttactatcttgtccctacaccaacaaaacaaacaaatcagaatttcaaggtcaatttcgacctttc

SEQ ID NO: 126677 - DNA, 1836 bp, Cannabis sativa
  modified_base (112)..(119): a, c, t, g, unknown or other
acttaatgggccccacaatagtttcggttttgtcatttttctcaactattttatctatttttcacaaataccacttcttacaatttcaaccatataaatgccaaaactattnnnnnnnnaattaaaataattatcaaataaaccattttaattctccacacattttaaatcctattttatttattttttctaagataaaaaaatatcccatcttttaaaccaaattcctaatcccttccccctatctctctcttctccccttaaaacctccatagctgccactatctttctcactagaaccctcttcttattcttcccatttcatctgaacccaagaactcatccaccttcatctctttgatgctcaaaaatcaatcatcatttttgccgtctctattttttcgacccgcttgagcctgatttcatcccatcaccacaactagttcatctcctctgaatcacgaccacgacgcaccgtaagttttagatataaaagatcttcatgaagggaacccacttttaaaactcacttggtctattaagactcggcgtggaagatcttcactggaggtggctcatcggtgctgaactgagactagcgagggagaaagagaaagatcgaagacagcaggtcggggttttcgagtcttcgtcgggttcgtgtggtgggtggtggtggttaggtctgtaaatgaaagaaaaacgtagagatagagagagattgtgaaaaaagaattaatagttgaccaaaaaaggagagagagagagatagtgaaaagaagaaaaagaaagaaaaaaaaaagaagaaaaaaattgtgttttttaaatgaaaaaaaattgaaaaaaaattatttacaatttttgtaattataaattaattttttagtttttttaataattttttacgtggaccaataaagttatgccatgtgtacactatgtctacgtagatgtacacatagacggtccaacatgacacttaacacctaaaatgaatggaaatattaaattactaatataacactagtattaagggttttgctgctaaaatttgaattttaaagattaaatacaagcaaaataaaaatattaaaaattttgcaacaattaactcataaaaaaatacaagacaatattgagcaagagaaggacatattggatagcaaaccctctacccgaaatcacctttgcaccttatacttttttatacccaaaaatattttatagtttgttttgaactcaccctataatttaatggatcaatctataatcattagcatgtcaccatggtcttaattagataataggcaatatacaatctttataattatctttatattctaataaccgcaagggtagttactgtgagtccatatcaaaaatattttaacatgatattttattattttaggcctaaagtattcatcattaaaaaaaatataaagatgagatgagacaaataaaataacgttgcaaaagccaatgcgaacttgatctcgttttccttgtttggtggtgttaacgtagtaacagacaacaatagtgaggtttcggtgacacacggataattatatatcgttgagtctcttcttacgaatgtcagctttgtatgcaaaagccgttgatgaatattgttgtgtattatccttaaataattaataatgaaaacaattttcatttccctcgactatttctatatatatatatatcatattatactaggtgaatctaagtgccgagccacgtattgctagttttatttaagattttggtatttttaagattttgaatgtattttatttttaaagattacaaattttttgtttgaaaaaatta

SEQ ID NO: 126678 - DNA, 553 bp, Cannabis sativa
aaaaaaaaaaaaaaaatcctgagagtacaaaggaaagaaaaaaaaatgagcaacggacttaaaaaaaattcaccaagactaaaaaaaattaaaagagaaataaattagtataaatgtaaagtttgaaaaaaattaatattttgtgtaaaaaaataaataaaaaaaataagatcataaataatttttaaaaacatatttggtcatattcatgcgcgtgcatatcttaattggccacttagttgattttttttttttttttgtttttgaaaggaaacttagtagttttttgaaatgtatgatatatcatttaacccccataatctaatcatcatttttatttaaaagttcagctggcatgcttaacataaccaacttataacctattaacattttttcaatactgacacaaaaataaaaaatttataaactctagagggtgagaatatcaggctataaatatatatttaattatgtgtacagagtcaaaccacatcataattaaatacctgaaaccttctcgaccagtggcggactcagaatttaaagtgagggg

SEQ ID NO: 126679 - DNA, 819 bp, Cannabis sativa
ccttaaaagttcaggggatatgatttaatatatgtcaaaattcagggggtaaaaattctaattagcctatattatatgataagtctaccgtacacactctcttaaaatagtgttttagtagattttctatctatttcggtatctaaaaaataaattaatttttttttatgatcctgtatatgttatagttatttaagaccacctgtaaattttcagaatattccgagtaattcacaatgctaaaaataaaatttgcatattttgttataagcgcaactgttttttcttttacgcgtggtaagtaactgtttaaattttagtttcagtactgtaaattatctggaattttttaaaaatttacaagtagtcctaaataactatacgaacgtaattattaaaaaaattaaaaatctcttaaataccgaaacaaataaagcgtctaccgaaatgactttgtagtagggtctcctacataaatttcttatattatatttatatatatgtgtgtgtgaagggttgtgaatagaaattaaagttatgcatgccttgacaaacttttgggacatggcaagataatattcaaaatgacaaagctataacttataatatagtgccacctaaataaatccattattatgtaatgggaaccaaaagaggcatggcttcctttatcatgtgttgtcccttccattccattttatttatcatttccaaaacaattgataggttgtatgatttttcttcacatgtagtcaccacaactgtaacgccctaatgctaaggcacgctacagtgctttttcaattattgtgcaatctt

SEQ ID NO: 126680 - DNA, 760 bp, Cannabis sativa
tgatacaaatatattttaaaactttgtagatcaaatgtatattcgttttttatttatatgaaaaatataatttaaaataaaattaaatatttttttatatatataatttttttttgactttgaatttgatattttttattttatttgtttcattttgttgttacttgtgtgaaaaattatattttgttaatagatattaaataattcaataataaaagttataggtggtattaattaacgatattttttaaaaactattttaatagtagtatgatagtattacgctaggcactacgagtatctattagtatttttcttaaatgaaatagtgtgaattaaattgaataggcaatattagcgatatttattattcaaatgaaataacgtgagccatggggtttgaggtgaggtgagagagaagcggtggtccaactgaaccgctcgctcaggtcacactaagtcggttgacgaacgaccacggaccacccaacccactctccaactccattatctacgtcattccttcttccatttcctgacacgtgtctaccctttctttatttatttatttttttatgctatccagactcaatgatttttttgattggacagactcgaggatcttgtcttggcatatgtaaaaaaatcttctgtgttccgaatataccctttcgttttttttttattacaaaaagtatccaggtatgggctgcctccatttttattagggaaatttgattttctatacttagaaaatcaa

SEQ ID NO: 126681 - DNA, 3954 bp, Cannabis sativa
  modified_base (3888)..(3906): a, c, t, g, unknown or other
gcttcgaatccctgtggaccagcaaaggccatgggaggtttcaaaggggtggtcataaaaatccaccaccagctcctcaggactgggtacaaaggtttgccaaaatgcaagcctgaatcaatcaacaagaagaggatatttaaaggctgacacaacagagtcctcttgcagtgcctccacaacaagtgtcagctgctttggttctagcggtgctagtagagcaacccgttactggcaaccgtatggagcctttgtatgagaggttttgaaagcatgcacctctagtttttgtgggaggtccggatgtcatgaaagccaagtagtggcttactttaatagaaagaatgttgaatttcatgggtgtcatcgggaatgaccgagtgacttgtgccaccttctaattctaggaagatgcacttgtgttgaaggagttggtatccctcactcgagacgtcactttaaagacctgggaagagttttgggagctgttcaatgccaagtattataatgaaggggtctacaatgctaagtggaaggagttcactaacttggttcaaggagaaagtatgtcagtaacggaatgtacaacaaaagtaacggaatatacaacaaagttcgacctattagccaagttggctttacccacagatttcagtaagaaagagaaatacttggcagattaaaatgccaagataaaacatgatctagtgattactaaaagtgatacaacaacctaagctaaaatggttgagaaggctctacgagctaagagtgtagtgaaatttcttcaagagccccaagagactccaattgtttatgggactaccactcttcctacttctggatatggtagggatggtagtgattccaatgttgagcaaaagtggaataatttcccaacattttgaggtttgggtctatacaaaaagttcgagggaacaaaggtagaggtggacatcagggttattctttccctgagtgccctcattgtaagaaacaccatcccagagaatgaaatcagaagatatgcttctagtgtggcctgatcaggaattttaagaaggactgcgctcaaacaaaaagagaagaacagacgcaagaggcaatgtccaatcctgctcaagtgttttccattccttaagttaatggtacaaccagcccggtaacaggtcagtttcttgtcaatgactcatatataaatgtattgtttgactctagggctacacatttatatgtggcatcgagagcaattaataaattgggtaggccttgtgattttattgaaatagggtttggaaccctactacttagcggggaattgattatctccaaaaggtggattaggtctatgccacttagaattgaaaactagggagctaagtgttgatctagtggagttggaatgaacagagttcgatattatacttgggatggacttcatgtcgaagtattcagctagtattgactacaaacggaagatggtagcattctagctagagggttaggatccatttgtttatgttggatctattcaaggttcttggatcccaatcattttagttttaaaggctaaggatttactacacagtgggtgtgcaggatttttagtagttgtgattaaatccaatagaccggagacatttgggcctgagaatgtcagagttataaaagagtttatagatgaatttcccaatgagttaccagaattactgccacaatgagagataaatttcataattgatttgacacctcgagcggaactctttcaaaggcacctatcaaatggcttcggtagaacttaaggagctaaaaatacaacttcaggggatgctggatttagggtttacacgacccagtgtatcgcactagggagctccaattttatttgtggaaaagaaggatggatcccttcgaatgtgtattgattatcaagagttgaataagctaaaaatcaagaataagtatccatttcccaggattgatgacttgttcgatcaactttagggtaaaactgtgttctccaagattgacttgcgttcaggttatcatcagtgaagaattcaagagaaatacattctgaagatggaatttcaaactagatatcgccattaagaattcttgcttatgtcgtttgggttaacaaatgctctagcagattttatggatctcatgaacagagtgttcaaggatttcctcaataattgtgctatagtatttatcgatgacatccttgtatactcttagagagaagtagaacatgaggaacatcttcgaatggttctacaatgactcagggatcataagttgtatgtgaaatttaaaaagtgtaaattctggtttttagaagtttcattcttagggcatattgttaagaaagattgaattatgactgattcagggaagattgaatccgttaagaattggccgaggccgagaacaattacaaaggttcgaagttttcttggaatttcagggtattatagacgttttgtagaaggcttttttagaatttcaatgccactgatggagttgacaaagaagaaccaacagattgtttggtctaataactataaaatgagttttcaagagttgaagcaacggttgatctcagcaccagtgttagctttgcaatcagacgaagaaaagtttgttatttattgtgatgcatccagacagggtctggggtgtgttttgatgcaagctgatagagtcatagcctatgcttctcgtcagttgaaagagtatgaacaacattatctgatacatgacttagaacttgctgctactgtgttcgctctaaagatatggcaacattatttgtatggagaaaagtgcatgatctacacagaccacaagagcctcaagtattttttcgatcagaaggatatgaatacgaggcaaaggcggtagttagaactagttaaagactatgactgtgaaattttatatcatatcaagaaagctaatgtagtagcagatgatttaagtagaaaaggtcccaggcaggttttcaatactgtaaagatctcacctgagttggcttcagacatggttaggactagtattgagttcatggttagaaaactaaataatctaacactccagtcagacttgttagaaagaattagagaggcacaattggaagatgtttagtttgtcaagactcgagaggaaacattagctggtcgagctaaggatttctcagtctcgagcagtggaatgctactttataaggcttgggtgtgtgttctgagcaatgttgggcttaagaaagaaatatttgatgagacccatactacaccttattcattacacccgggtaccaccaaaatgtatcaagacttgaaaccatattattggtggtgtagaatgaagaaagatgtagtagaatatgtgtttaaattcttaacatgtcagcaaatcaaggtagaacataaaaaacctatagggttactgcaacctttagtacttcctgaatggaagtgggaggatattagaatggactttgtggttggattgctaagaactataagaatatatgattcagtatgggtcatagtggactttttcacgaagtgaacacatttcctgctagtaaaaataacttatacaatggatttgtatgcagagttgtatgtgaaagagatagttcatctctatggagctccaaaatccattattttggatagagatctgaagtttacatcaaaattttggataagtcttgttagagagctatgggtatgaagctgaagtttagtaaaacttttcacgcacataatgatgggcatttagagaggataatacatatactaaaagacttattgcgagcctgtgtcatggacactgagggtttatggagtaaatgttggaaatattttatcaggnnnnnnnnnnnnnnnnnnntatgtttcattaacatcctaatacgaatttctaaaacaatgaaataaa

SEQ ID NO: 126682 - DNA, 2138 bp, Cannabis sativa
tcatttcaaatgtacctagttttttctttctttcaataaatagtacatacatgggtgtatgtacttgcctgttgcatgcatggcttgatctcaattgtaataaatacaaaatttcactttttttcttaatagagaacaaatttttattttataagtaacataaaaatactaaccagataaatcaacggtttgattgtcattaattgggatgttctaagataaaaaattactctatttcacaatgtttttgttgactttaaaggctcatattcatccagtcgatcaatattgagggcggtctcatagtttattgttacctagacatagaatattttgatcacctaatccacatcatcacccaaaatgttttaagattgaagactggattaattgtcaatgattacaaatttgtttaagaaatttattataaaatattatatataatactagttagagtaacaaaaaaatgtctgtacatatatatttttttttttcattatgtgtcactctcatagttaattaattccttttatgtatcaatagatttaattaatttcttttatgtatcaataaatttctttttggacttttcatatccaattcttataaagcaatgtttaaaaaaattatgcacaaatttatgtacaatagattatgattcataccacaacattaattttgcgaatctaacaattgaaaaaaaaaaaaagagtcgtatcgcaaaatccaattacagaaaaactctaaataaaatttttaataataaatgataaaaaaataaagataaattacaatgcacaattatattaattgatatatatataccttatacaacttgcggtgagataatctatcttctcactaaaactagtatctgacaaggagaatttattataaaattgtattctttccaaactcaaatccttaatcatttaatgaaagagaaaaccttttaacttcatcaatggaagtcaccaaacaaacaaagtgtgtcactaagtatttttatttttatttttttatgaaaattctgacaccaaaatctctcaaaaaaaatatttacaatacttctccttattaggttaactttttttttttttttgcaattattattattttgtttttttttttaaatctttttttagagtaagaatgtatcatatattgaactagtaattttctttatttatatcatgaaattattaaaaaaagaaattaataaaaataatataaaaggaattagttaagtattggtattaaatatgagagtgacatacataataaaaaaaatatttgtatatacacacgttttttatgactctagctaagtattaaactaaaaaaattaattattaaattatatatatgaattattaaatttgtaatcaaatatactttacatatataaaagaaatattgcccctaataacgattatacctatattaatagtgtatgtactaataaaatatgaatcaagataaggtaattaatactcttatatttgtttacttatttaatttgtagcatttagtaacacttttattttttaattttttaatcacaaaaatacaagtaaaatttgtgtctttaaaaaataaaaaatgtattttattatcacttttgtttattaatttttcttacagcagagattggtttgaatccgagtttcgtctggcgtagtatttttgaagctagagacttggtggtggcaggggtgcgtaagagtgttggtgctggtctctcagttagcattttgaccgatccttggcttgctgagatggatcatccttatattttgtctacacacccggggttaattggtaaaacagtttctagccttatgaggatcgatgagcgtgcttgggatgttgagattctcgaagatctttttgagattcgtgataggatggctattctctctgttcctctcagttcctccattcacgaagactcttagttctggagttttgaaaagtcggggctgtacactgtgaagagtgcctatcggtacttggatgacttaaagaatggcttttcaacagataattctgctggtttttggaagaaaatctgggctctaaacattccgccgaaggtgagaaattttatttggagagctgcttctaatgtgttgcct

SEQ ID NO: 126683 - DNA, 1214 bp, Cannabis sativa
atatatatatcatatgacaaatatcaatcatgtcacagaaatgtttggcattgtcctttgtttgtttctgttaaactgctcagaacttacccttcaaatcctttcaaaacaaaaccctctaaagtagccatttcacaattccatcacagaaacaagaaccccaaaaaagtgttccaaatcttggtcaattttcattatttgctatattcattatgttactcttgtttctttctttcatctatacgccaatttcatcctttggtattttctctactctttttaagcacatcaaattattctaatattccttagaaaagacttctcatttggttgattccaagtcttagcataattattaaaaaaaaaaatgaaacatgtttctttgtagtaatgaacactttaaacaaaaaaaaaccgaccattcttttttcctttgcctttttcttttaagaattcaaaaacaacagacaaattcaacttttcacatttcaaaaaaattccacattttgtaggaagatcaacaaaacaacatgctcatatcaaacacgagacaaacatgtaaaatcatttgtacattaaatttggtttatatgattatatcactagggacaaaacaaaacaacccttttctcaacagggcccaatgcagcttaaactgagctcagttaatatatccaaacatgaaaaagattcaatttttattgttaaggagaaacaaaaataagaagaaaaaaaaaacagttaccttgtggagaagaaaccgtaacccaataaaagttgtttagagaagaaaatagaaaacaaaacaccatgaaaaccagaatgaagctcatttgcaaatgccatctcagaagccctagcttgaaagacagtaaccctcttcactcactcactctctctctctttcaaacacacactctgtatctatatatgtacatacagagaaaataaaaagaaagaaatgaagagagagagagagagggctgaagtgaagagagagaagtatgtattcttgtgagtgtgtttttgttgtatatgggtctccatgatctggtgtagctgtggttgatctttgggtttaatgagggttttaagtttttgtacacgaatcacgagaaaacgtgcagtgattaagaccataccccattttcctccaaaaatccaaacttttctttcttccctccacaattcaacttcttcttttcttttctttt

SEQ ID NO: 126684 - DNA, 1807 bp, Cannabis sativa
tcatttgttcgagtaagaataaatataatcacatacggcaacctcagattacatatagcgagacagtcacttcgcaatcttaattaaaataaagagacataacgaggcgaaccacctgccaacacttagtattttttcctcattaagatggataaggagataaactcacgttaagcgagatacaaccttccaagtcagcaataaccgtctaagggataaaaacaaaaagtagttgaacaattatctgatattatcccacatgttattaaatgaaacgtggtaattgtcgacgttacttttatagttacatttaaaatgatctcaagaaaataactgtcaacctatattcctataaataagagcagattacagagaaaaagtgatgagaaaattgtgagaaaaatactataattccgatattgtattttgtactcaaaaaaatacaattaataaaaaagactcgtggaggatgtagattttaattacaaaaccacgtaaaaatatctagagttattaatttctaaattatttaatattatttttctaaagtatttattacgtaaaggcttattaattttggttaacgaaaatctatgttaatagtttggtgctttcattgagagccttatagtgataaactcaaaaaaaatcctccttacaaacagaaatttatccatggctgataacaatcaaaatgatgaaaattgccctgaagaaactacacatcgccctgggaaagagccaatgggttctcaaagaccccatactactagaacatcacgttcaaggagaaactatggtggtaataatcaaaaccaagaaagaaggaatgaagataccaataattctaccggatatgtacctagaagtgaggatgcttagatccaactaggtatgtaccattactgaaattggaaaatagaaaactccggtagcgcttagccaaatctaaccgatgaaatgctgagttggaaagagaggctgcagcggcaagggtgaatcaaggaactaatactcaaaatcaacctgatcctagggtgagaagaccacgaggtagatctcgaggttgaagaagtaggagagaggaatcaaatcaaggaaatccccaaaacacccaggaggaacatccttggggtactagggatattccattggatgaacaacaaaataatcaagagcaacgtcgagacgttcctcagagatcccaaggatttatgaaccaagggaatgaacataatgatgtaccggaagcttctcgcagaaatgaggatacgagacagccctgacctagagatcaagaaatccctcatggcaacaagaaaaaccctaggacaagtgggctgccaccgagacacccttatcgtacctctcgatcagagagggaaggtgtgtaacacatacctaaatagaggatgtgaagtgtatgtaacctcttctgatggggaagaccaatacaagacgaagcaagttctagttcgagacactcaaggtctcgaggacatagtcgatcaaataggaaaacacgagagtgaatcagaccttaacgttatgccgattaagagagcatgggcaatacgctaagctaccaatcagagagttactagaaaacaaggtttgttagtaattatgagtgaagacaaccagactttcataagcacttgaatcaaaggcaacccaatcttcgcgggtgactaaattagaatgcacctgacttatgccatcaacttcatgcaaatcagcaacagttggatctcatccagttttgaatcattgagttggaggataagttcagaaagtatcaggatgg

SEQ ID NO: 126685 - DNA, 2248 bp, Cannabis sativa
ctagattcaaggtgtgatggatctttcttggtggtgagagtataccccgatggggtggtggaactacgtgaagcactttcaagaagaacattcttagtgaaaggtcaaggagtgaagtttgggggtggtgaggtcaaccgagcaaagacctccatcactttgaaagaagcttgaagaaggacttcgggttgccttggcattattgtatcacatttaggaaacctaggagcgcaagaacaagattatatttagttatatatattgtataataaattttggggtgtgccaccctttgtaaaaaaaagagaagagtgtgattaaaattaagtttggggtgtgccaccccatgaaaaaaaaaaaagaaaaaaagaaaaaaaaatattatatacatacttatataaatatatatatgtataattttcaactttcttcaattgctaatgtcatggtatggtgaatgttattgcaagtgcaaggcataaaatagagttgttgtaataggctgaaaagcaggatttattgtctgaagcagcaggtcccaggagttatagcattgcctcagcattttgaaacggggatgcataagagaatgaattgctgaagcaatgctgcaacaactgggagtattgggttcaaaaaaaatatctataaactaggagtatgaaagggaaatagacatgtgggtgaggcgtgcgctgcaaaaaaacttgcgcaaagttgtcccaggatatccaaactttccaaatcagattcttcaaccttggcatccaattgatggtgaagagtccaactcttgagggagttttcttttttccttaatctatataagttagcgtaaatgtctgcgctagttctatttgtttagcttaaatgacttcagttatgtgtgtttactcgtttaattagtttatttttgtttctggccttagttgtttgtgtagtaacattgtgtggttagatatgtgttagtcatgttacttggtcatgtttgttttgttttgtattagcttgtaactaagaagtatatttcatttgctttagcttggtttagcgtaccgctcgatgaagaaaaagaaacttatcatccatttctcgccatttgtgccttaattttgtgtgttgaaaatgccaagtttaaatgctattttgtctaaatgctagtttaggaagaattctttcaagtaggtgtacttgtgctatcccattatgctttgagtttttagaatgattaaaaccttgagagagtttaaacttctagaattggttagtgtactacttgaggcgaaatcctatctagttttacaacttggaaataatttaggccatctttggacaattgaacctttcaagctaacccgagaatatttaattgtcaacagtcacccctaattgagccaaaagcctagtttttcttaatgcccatcaaagttaatagacccacacacacacacataaattcatcattcaccacctgaacctaattgcttaagttatcaaggacaaatcaaacattaaaaaggttagggaagtgaggataaaactttgtaaaatatggtgaaaaaagttcacattagagatgatgatgggatgtgagttcgaggtggtgagagttttgattcatataacactaaagttcttcttttgttatatatatagatatgtaagaaaaaaaatcacaaaagaaattataaatatatatatatatgtacatatatgtacaacaatagtaataaataaaataagagaggaaaaaaaaagcaagtttaaggctaagtttggggtgcaccacccctaatcaaagaaaaatgtcgttgccttttctctctttatctagttgatttgaaaatatatacattatatacatatagcaagagagttggaactggataaagtgatcattgtgggttgagattgaaattttgggtaagcgcttgagagaaaaagaaaagtccttgataaattgaggtaattaggtcatgagcctaagaaatgtcatcctttaccaaactcgaacctaaacctcacatttcaagcctattaaagtccttttgatctaagttgtaaagataagctacattagcggagacggttgcactagttcaacttatacaagctataaagtccttttttggcaagttagttgacaaaataatttttccacttatggtaagattgctatgcattcatattcgatttcttgccttataaattcggattgtagttgccattttccttgtttggaaagttg

SEQ ID NO: 126686 - DNA, 3525 bp, Cannabis sativa
  modified_base (335)..(335): a, c, t, g, unknown or other
tggattcggaaggcaaaagtttctagaggtaaaagaaaggttcttttgagtgtcattacagcaacaatttatttcatttggcatgctagaaacaaggtgttgtgagagcaaaaacttcctactattaaggttactttcagttgtattgctaatagtgtttgtactagagtgaactttttgaaagctaagaacttgagtaaaatagatagagagtggatggaagctaagctttgtaacattatcttgtaagtgtttgttgagctcaataaacttttctgaatttaaagaaaaaaaatctaacaaattcccccaaactaagcatttactcgtcctcnagtaaaacactaaaacgaaaaacacacaatttaaataagtcaatccataaaacatgagtaattttcatgtagactcaataacatgattatgaaaaatttcacctatgcatgcataacaatccagaatttcaatttaattacacccttgacacacttcaatttttttcctcattcagctcatgaaaacatagaacacatttaaataacaattgaaacaatttatgcatgccaatttcaaccatcaatcaactaacccaaaatattccatatgcttgtcatacttactattatccactaatatatatcaacgcaaaatcaagaatcaaaaggtctttctaggcttgtaatgttaggcttaagtacggtagttgaaatggtcatttaggcttgcctataccataagcttatccaatcatgtcacccgatatttttttcacaaacaatcccaatacccatttttttctaactccatgagagaaaatttgtttgttttttttctttcgacaacattgcaacactttatttttatttctttttttcttgaatatgacacttattgtcaaaattttctttttttttcttgttgttaccaatcaatatttttacatattctctcaattttcacacacatatcacaaacttcccatctaaattcctccaaactaaagatccactcatggtataattaaggtcaaattttggatattaatgggtttatcttatttaggatcaatatgtgtagaaacaaagaaatcagttaaggctcaaaaagggtaactaggataaattacaaggatggcttgaaaggcacaatcgatcataatttagtattttgtctcaaatagcaagcaagcaagttcttaaaaattttcaaacaactttccacaaatcacaattagcatacataaaccaattgaattgctagaaaattacctaattaatatgatttcatgttcttttaaagcaactattagtcaagaatgtaatatcaccaagcacacagattttttcaaaaataaatgaaatttccaaaccatgctatctacctacttttaaattgactcacattaagcaaattgactcataataataaaagaaacaatgaaaaactaaaaactaaagactaaaaattttaagttcaccttcttgcgtagcctttgaggatggggaattttgatgtgatgatcaatgctaataggaagtgaagtttctttttgtggagaccttcagtagtcttcttcttctcttttgttggtgctggttcttgttgatcctgatcttcctcctctgacttgtcttggcttggcatggcataattcttaccacttctcaaggtaattgccttacagttctcttttagattgacttcagtagtgctacgcaagttaccttgattcctgttagtattttgagtagccaacaaccccatctgagtttcgaagaccttaatggaagatttaaattctgtcatgaattgaagtagcatatctgtctgaagattagaccctccactagagccttgttattgttgattatgttgttgactttgttgagactgatttctctgtgggtagaacccttgttgctgctaatttagaaactgcccttgaaaaatctaccgagatgacccccttggttgtaaccatggttgttgttctgatagttcctaatggcttgagcttactccattggcaaactgttcacatccactgagaaagtatcataagtgtgaggtcccccacaaatctcacaagtaacttgagcttactttgcttgagcagtcgccaacttagtcaaggcctccacttgggctgtcaactttgttatgacatcaacttcatgcatacctgcaacttctttcgattgacttctttctattaaccattgttcattgttcatggccatctcttcaagtagtttataagcctcattctacttttttctcataaaagccccaccagctgtgacatctatgagtttttgggtagtaccaagcaatccattgtagaagttgtgcatttgcatccacttttcaatcccatgattagggcacattctaattaagtccttgaacctctcccaagcttcataaagaggttcattatcttgttagatgaagttgtttatttcagatcttaacttgacaatcttagtaggaggaaagaacttggaaaggcatttcagggttaattccttccaagtgttgatagaattaggtggaaaagataccaaccaactcttgcctcgatcccttaatgagaatgggaacagccttagtctgatggcatcgtcactaattccattcaccttaaatgtctcacaaagctctttaaagttagtgagatgcatgtttgggtcttctgttggcagccccccaaactggactgtggattggaccaactacaatatggtcggcttgatctcaaaattgttagcatcaacagctggtggctttatacatgatctggcccctgttaagttaggcagcaaatagtccttcaggctacggtcattttaattgcgaccattagcctggtcttctacaacacctccattattaccattgttgccaacattggcattgtcagccatagctacttcttgttctatccatattataactttttccaatcttttcctccttctctttagtcagcaagtcttctcaatttcatggtaaataggtaatctgacagttgctcattgacgtcgcataaacaaattgttcctgagaaaagagaaaaatttgaaacaactagaactagtaataaatttaaaagaaaaaaataaattagaacaaaatttaatttttattaatattaattaacaatcccccgcaacggtgtcaaaaacttgttgtggaattttcaacacgcaagtatacgtaacgtaaacaagtaatagactcacaaagagtgtggtcgatcccacaaagactgtagttaagtattttaaaattaaatctttgcttctatttggctatatcaaatttaagagaaaattaaaactagaaaattaaaggttagagttttcgattttagttgtatctatcaattatggtttaacatgatttaattgctattaccgaattctatgttatagcaggtttactcaagtaatttatcgtcttcttagatatataaatctcaattacatgcaaattttcttctctcgtgataaattaaacatg

SEQ ID NO: 126687 - DNA, 716 bp, Cannabis sativa
aaagacaaagccattggggctgttctggccgaggagtaggcaagtgattcttaatcacttgttcgaacctcgttaattgattgtgtttcatttccttctactacttctattgcttttaattaattatttactcttgttcatttctggttcttattactggttttgctactggttttattgcactttgttcatagctgcattgtttaatttcaattgttcagttctgttcttgattaaattctttgtattgtgttgtttgcgaggtgagtgatcatgtattgatcacatcagtaacaaaacaaatcttatgaataatgtaatgcttaaattaataattatcaataagatgataattaatttttttcgaattaattagttagttttaagatatttaagattatgtaatcgtacataagattatattttattattaattagtttgttaaatcaaattcataaaaactgtttaatgatagttctatgtttattttggattaataatgaaaagatgtaaaatagaataaaaatattattattttaagttacaattaactataaattttatttttactattattattttcacaataactgcccaatgtgtaccatgcttcttccactagtatgacaaaatatattaaaatatataggaacgcatataatcaattcaaatcaaataatataaatatatatatttactagatagatgttacgtg

SEQ ID NO: 126688 - DNA, 835 bp, Cannabis sativa
tataaatctagatcgtggtaaaataaaatccaacactttgagggttcgcggagcaattatttgcctttgatagaattttcctacaacaacaactaccagattacaatagggatgactccctatgagatgttatatggtaggaaatgtcgttctttgattctttgggatgatactggggaaaggaaatatttggaccctgagttagttcagtagaccaatgaggcaatagaaaagattaaagcttggatgcttgctttgcgaagcaagaagactagttatgatgatcctaagcatacagacatagagttttaggtagggaacatgttttcctaaatgtttcaccaatgaagggtgttaagcgctttggaaagagagacaagttaagccctaggttcatagggccattcaaaatactcgagaatgccgagcaggtagcgtacaggctagccttaccaccattgttcgctatacacaattttttttatatttcaatgttgagaaaatatgtatcagaccgactcatgtcttgagttacgaagccctagaatttaattcagatctatcctatgaggaataatcggttcatatcctcgataagaaggataaggttcttcggaacaagaccatagcattaatcaagatactttggaaaaatagtaaggtggaggaagccacctaaaaattagagtccaacatgagggttcaatatctagagttgtttagattaaatttcgagggaaaaatctttttgatgaggggataattgtaatgaccgcatacttagaagaataattaacttttttagtccctgtacttatgacactatactatgatg

SEQ ID NO: 126689 - DNA, 1912 bp, Cannabis sativa
cccctgccattggcttggcagaagcctgtctcatgccatggggctgtccccctctcctccctcatgcgcgcatggcctcttctaggcctctcgtctccctcacgcgctagaggcgtgactagtcctccttgactgtttcccttcagcacaaacttgaatattttattcagccaatccacgtgttccacgtggcaccgccttattcaaagcaaccaatcaacgcacgtgtcaactctagttttaactatagggtaattacatttttacctacatgtagtttgtaataagtttaattgggcattagtcattttatcttcttataaataaaagtttaggtttttagaatccaatacaattttagacagaaaaattcagaaaaaacactcaaagtgttcgttagtttaccgattttcttatgggtttctaagttcccttattattaaggtggacgatgaaattcattgtatctaattaagtatttatttttattttgattttcagtacaatatatgcttatgctttttgcttcttaaaatgatttccttcatctttaatatcacgtagttttgagagttataaattattaacgctttgttctacattttattaaaaataatattgtttgattttatgtatttacattaaattatttcacgtttaatgcttagaagttataattttaaagcgaaagaaaatccattttttgttaaaaaaataattagtttgattactaattaaattataagaatcaatataaaatataaaatatatttatatacacttaagtggatactgaatccttaataattcccctaaatatcactgaaaatactgttactatcatttttaccattaaccactttattttattttgttaccaaaaatttcactattttcagaattaggttagaattataataacttagattaaaaatgttttttcttttatctcatgtaattcttatgggttcgacctcattcttcacaatctctacactataataaaaatttgtgcgcttgcgagttgataaatgtaaaacgtaccatttcggtcacagtggtactggcactacttcacttttcttaactctaaaatgatcctggtgcaatgaaaaaaaaaaaaaaaaatttggccacaactctctcgatatggcttataattggacaattgaagattttttatggaaagttaagagaattttgtacaaatgctattggcaatattttttcaaaaagtgaagggatcctagtacaaaattggcttgaagtattagacttgatttttgatcacaaacaaaatttattaagcatcccaacacatataattctccgctcatttcattttaaaacttcgaactccatgctaaatctatcatttaagtacatgggaatcccaatgattgtgaagggataatagataaactgacaactagaattaagacatggagtactcgtaatatttcatatggtgataagtgtgtccgaattaatgttttctttaggtcaattcatacatattggacccaaatttatatccttacaaaatagttcttgctatagcaaataatatttgtagagcttttcttatggaaaagctcgatttcagatttaagtcctggatcaggtggcttagaatgaagtgtgcaaatctaagaataaagaggggttaggtttccaaaatattaagaatagaatatttctgcagtagggagatatatttgggatctagccttgaaaaaggataacatgcatttggatttgatggatacatttatatgaaagagaagaagtggtagagctatgaggctccttaaggatcgagtgttaaaagatttataaaacactcaaaatatatatctattctatataaagtgtgcttatataacccaattctaaattcatgggtgacttt

SEQ ID NO: 126690 - DNA, 887 bp, Cannabis sativa
  modified_base (831)..(832): a, c, t, g, unknown or other
gtgtgttctgtaaagttaatttttatttttattttttacttttatttaagtctggtttaggtctgaggtcggattcgagttcgggttagaggtcgggttcagcaccaggggtagggggatttgggtcagagtttggtcagaatctaaaatattgattaagaaaaaaaaaactatttaaaaaaatattgaaagtgattttttcttgtttttaaaattttgattttcaattaaaaaaattgaaaagtaaaaacagttttatataccatgtttttgaaaaatattttcacttttctaattttaaaaacagaaaactgattaaaaaagtattacttaacggcaccttagattttaaatattaaaaataataaaactaatgctatttttatcaatatactattatttactttattttattacaatattattatttattatatgattaaaccaaatattataataccattttcattacaatttttatttaattacattattatatatttatattatcaatagtatgactattacattatattaaagcaaacattaggtgaataagggagtttaagtgatggacttttctctttttagtgtttacttaagcaagtgacacatgtgcccaaagatcatgacttaacgttccccaacctaacaaccaaaaatgtcataatcatcattattatcaaattaatgcaaacaataatcttatattcgtacaaactaaagaaaagaaaatattagttacatattgtgtaactactctaaagtgacatcaggttatttgtttaataggtttattttatgaaaatataatgggtaaataccattttnnaccctctgttttacaaaagttacctattggaccctgtgttttgttaaatgataaa

SEQ ID NO: 126691 - DNA, 576 bp, Cannabis sativa
gtaaatgatagaaaaattaaaaatggaacaaaatggtgaaaaatagcccaaaataggctgtgcacgcgcccccacgcgcctctttttttttttaacctgtgtcgtacgacgtgttgtttttggtaaacgatatgtcattttggagaaaacgacatgtcgcaaggtccaaacgactcgtcgttttctcggctgggggctgaaccaaaatctgcgaacgacatgtcgttttttccaaacgacgtgtcgtttcagccaaccaaaaactacaactccaggcgtgaacgacatgtcgtttggcgcgggtcatccctgaccttggaaccgggcgagctggtcgacgaaccgggttgacgggacctgaaatcaaacccgcctgagaacgacacatcgaaccaccgttttcgtcggatttggtgggggtgttcttccatttctaaccctctcccaatttccaacatccatttcatctatttttttacaaaaatataaaacactacccataaaacacaaattcgaaaatgggtttccaaccattgataaactcaatgaaaaacttgcaatcttacaataaaccat

SEQ ID NO: 126692 - DNA, 674 bp, Cannabis sativa
aagcctggttcactgacccttccagcttggatgttattaaagatgcgtggattagtatggatccgtatgagaagaattctgtgctaatgagtaaattggtgaaaactcaaaatgctttacgttggtggagcaggaacatctttggggattgtgatgttagaatcaaacaattggaacttgagctccaaactcttcaatccaaagaggctcatgatgtggatgtggttgccgagagaagggtccatgattctatcgttgatcattggcatcgtaaggaatcaatgtggaagcaacgttctagggaactttggctcagtcaaggagatataaattcctctttcttccatgcctctactttggttagaagaaagaggaatcatatatggaatctaaagaatgctagtgggcaactatgctccagggaaagtgaaatggggtgtatcctgaatgattactttaagaaattgttctcttctaaggggggggttctatacaccgggttggaagatctaataaatccttcggtgtctttggaagaaaataccatgctttcggccatcccagattttaaggagatcaaatcccatgttttcctaatgcatcctctcaaagctccgggaccggatggtttttctgggtgtttccaccgaaagtgttgggatttcgttggcaag

SEQ ID NO: 126693 - DNA, 1387 bp, Cannabis sativa
  modified_base (54)..(54): a, c, t, g, unknown or other
  modified_base (133)..(143): a, c, t, g, unknown or other
  modified_base (216)..(222): a, c, t, g, unknown or other
  modified_base (278)..(285): a, c, t, g, unknown or other
aagatcaacaattgatattgacttagaaacatataacggtaagtttatgatatnttatccaagatcaatatcggtccattccaatgtatactccatgcacctgatacttgtaatctttgccaatgccctggannnnnnnnnnnacttatccaaggtgtaagcatacatcacacagtgaactgacaaatcatgggaattaaacttttaaacatatannnnnnnttatattccactgtgctgacgacattattaataaatatatatttatatatgttctnnnnnnnntagaatttatatattaaaatcatgtgaaatgtgaaccatgcaacataaaataatttctggtcttttattaattagtaagtctgattatattgaaatgagttttatttagggcacacaaccaggtggaagctgaacattatttagtaaatacataaaattaaagtttatcctttagttatcaattaagctatcaattaagaagctaaattgaaagcaaaattatttcttgctttctctctctcactttcagctcacaagaaccaaaggaaagccagtcaacctcaccaatttttagagatttcagcaagcaattgaagttgttttagtaaaggtaaaccttataaaactctcatcctttgaatgttttaggttttactaggtttaagcatgcaaattgggaattagtttctgtctgagttaattgagtgatattttagtttttgggttaattctaagttacttggagctagtttgagtggtttttaatggggttttgagtggttgagcaagtttgagttttggcttaacaatggcagtttttaaaattctacatattttggggttttgttgcttggaactagtttgttatgttattattaggtgatctggagcttgtgttgaagtttggggtcaaattgggttattttgatacttttttgttttctgcagcagaaaacggcagaccatttctaagaaaatggtctgctatttttactggcagagaacttagaaaaatagcttgttatttttacagaaacaacctaccatttattaggagttttcttgtaatatcattttttttgtgtgtttcttcgatatttagggatttttcattctatttatcgatagagaaacttttagttttgagttgaggtccctaaaaatatcttagaaagttatttacccgtttgacgtgattgtggcatagagcctctgttcagcacgtgattttccattcaggtcgaccgacacgcttgaatttggaaactaggtaagattagcagaaaatatgtatatgtatgtgtgtatgtatataaattgcattcaagttatgttagtcatatactactgttgaccgaggttttcggcaactagtaaaata

SEQ ID NO: 126694 - DNA, 1246 bp, Cannabis sativa
cagttttgggatatttctttttacactttttggatttaattggtagttttcaagtatgacttcatgaatttattttttcattatctttggtttgaatgtattactctaatatattttaaaactaaaattgtgattgaatattggattgaaaacctaatcaaccttaactatcgagtaatgaaaatctgaaataatattaaagttacatctaaaagaatcttataacataaaacttttacttagaaaaaaaataaggaaaagtaatgctatattttttctttaaaaaaaaaatagcgtagtgacaacatatagtcgtcactgatgtttctttttcatgacacacatcgaccaaaaacaaactgttcagttcagtaacaactatttccgtcatgtacttttttttttctctattgtctactttcctaaagtcccaacgaaaaataatcgtgagaattctaatctaagataattaattatagggaattgatcaattgttccattaaaaagtaaaaataaaaattgatttatttgtcaaaataaaagaaaaatagaaaaagacagctagagcttggtaggtatagagacaacatttacttatttacgtagcttcagaaaaagttactagtagacagttaagctctcatgaacgtagggcttatgtcatggtggaatatctttaaaaacagcctttccaaagaaaaaaaaggagcaagaagaagaatatcttaaaatgagcgactagcaaatttggtcacatcagctctcaaacttttgcgtatgcttgactttctgttgtaggttaggactcatatatacattctaatcctctctccctcgacctttgggtcgcctaccaaacagcactactcaattttttcctttctccctttaacctgactgtctactaccatccctttaattggaaatgggaatattgtcacaattaattctttttatgcaattttactactgaattctatacatataaatatttatataaaaggcaaattagtaatgttatttttgaaattttaataatattgattccgtctctttaaatatataaaatttaaaaaaaaaaattgtacttttacattttagtgaaatttagtctttttaagcttcctctcaatatttattaaataattagcatttttaccccctcaacttatgatactactatattgtgccccctaaactatatgacatgttaatatgacatgttaaaaactccccttaaaatata

SEQ ID NO: 126695 - DNA, 1995 bp, Cannabis sativa
tgactgaaaataagattttttgtaatgtacaagagaaaaaaaaaagttataaatcactactgcttaagctcaatggctgtgattactttctctcaacaacataaataacaaaaattaaagaaattataatagatccagctcagcataaactaactactcaaaacagaacctaaagcctatataaacccagattgaagcccgaattgtatacatgctgtaattttcattctcttctagagagtttctccattgttgtaccgagaggatagaaagaaagagagagttagtaaaagaaaaagaacagaaactaaatgcaatagaggaaaacactgaaaagattatctactaaattatgtgacatataatcttgcagaaacgaaggattgtacctgtttttgacgatagtggaaactcgagtttcattgaggcgagctcgacaaggacgtagcctaaaatttgggtgaacctggacaaaaatctcgtgttctttcgattcgatttgtttacatcttctcttcactctctcttcacttctagtttgattctcagatctatgtgtatttgtgtgtgattgaatctaaaaatcctaatttgaatgtgtgtgtatgttcttcgtgtttgagattcacaaaggagaggctcaagaaggttctgattaaacctaaagagttgctacagttttgatcactttgtaatgaatttgggtcggtgtggttaggcctttataactctcttagtagacgcattaagaatttttagattttcaccaaattttatgttactaaatgggccttatattagagaactagaggacattccactgaatgatcctattgaaacctctaaccctatctctgatttaattcaagcaaatttcatatgagtagcattaaaactgacattgataaatttgatggcttagatgattattggatctggagaagaaaaataagatcattgttggcacaatagaagcttctaagagttcttagagaatctattgaatggccagaagtaaccttcagcattcaaaaagaataaatccttgaaatggcaacatggatcatcattttctatctttatcatgcaattattaggttggtggacaaggaggaaactccagcgagaatctggaagaatttggaagaacagcttcaacagaaatctttaactgagatattttctcaaggaaaggatctttggattaaagatgcacaggcaaaagaatctagaaaagaacctagatgatttttttaggatgcacaaaaaactttcaaattctggtgaaaatgaagctctaattgatgagaatcaagccattataatcatgaactcactaccatattcatgcagagaggtgaagacatatgcgagaacttttacaatcctagaggaagtaatctcgacactcaagtccatggatctgaagatgaagaatgaaaaactaagaagttccaagggagaagtacatttaagtcgtggaagaaataattaaaataatccatggaacaatagaggtcctaacagaggtgaagaacatggaaaaggaagttctcaatctagagggcctaaaaacctaaatggatgctataccattgagggaaacttggacatttgaggagggatttttatttttggaataggaataagaacaagtctgattgaaatgaaactaatacttactagggatttacaaaacagaaacctaagaaacaagaagctagcctaagtgatggacatgagagtagagaagtctacactattgctttaaattttcaagatgaatggactctagattctggttgtacatttcatatgaataactaacaataaaaatatgctttctaattacaatgaatctaaaggttaaaatttaatcctagcaacaatcaaacttatataaaaggatctggaacttcaagtttcaagatgtttgatggtgtggtaaggatactaacagaaataagatttgtgcctaacttagctagaaatcta

SEQ ID NO: 126696 - DNA, 1319 bp, Cannabis sativa
atatttgtaagtttttttttaaaaaaatatcatatttagtgtaattatgtttatatgtcatatatatcaaaacttatctttattttcttatttatttgtaaatagcccataaagcaattaaacctcatagtcagtacaaaagagttcaatcgggatggaattgataagaagccattcaaaccgcttgtgggtaaaagtccacttaaccatattatgggccgcaaaattacaattctgactaatatttgacagaatacaactcacaaaaaaaggaaaacaccttttacaaaatgaggtatagttcttaagcgtcaaataagagtcctttccgttgagcgtattgaccaccaccttggagtcgctctccactaagaaaaactggtgatttttctctttcacgacttccaaagccaaacaacaagcagctgcttccccacacaaagcatccacaaaactcaaaagtttggtttgcacccagacctcctcaccctgaaaatttctagccacgactgcaatgcacatgctatccagcccaactttaacatcacaattaagtttaagccactccttgggaggaggaagccaaccatccaccatagtagaggcaagggagggaagaagggatgcacagtaatctacataagatatagcaatagaatcaatgcactggtttacattatcaagtttgttattatgtaccttatcatttcgaaccctccatatggtgtcgacgaccgttgacgcatagagaaaaacctcatcagaattgataccctaactctttaagccctagaggaattttacctagtaccacatgcaaatcccagtgccaacgatcagaaaaattccccacgaagaagattgccacaaatgaaaggccaggttacaggaggggagcagatgttccacagattcctcctcacacccacacaaagggcaactcatgtcttctaatctaaatcttctattgaggatcgagtgaaccggtaaagctttagacaacatacaccaccataaaaactttatgacgttccacaattctgctattccacagtttattccaaacattgcaatgcggccctctctccaaggcttgggccaggtaagcagatttacaagtaaacctcctgtgcttctctaatgtccagatctacttatcatagccctgacccgaaggctgccccaccttttaagattgcatcaactgtatctttgtcaaaaaggcacgaaaccttctggatatcccactcccctctttcaatcaaaagttcagccaccttaagaacatgggatgcattgggattaattgttgggttttg

SEQ ID NO: 126697 - DNA, 987 bp, Cannabis sativa
tcgcatttcatatcattgtatatgttatattacatacactacattatagtctaacagaggactctactaaaccaaatctccaaataagttttgtagtcatgtttcagtacacgtttcataagatatagtttcaatgtttaatagttttgtagtcatgatagaaggcatcataagatgagtgctaaattaaattttgataatttataaatatatgtagagagtatgtgtatgtgtgtgatatcaggcgttgcatacaacagttgtgaattttggtggtttaatttattcctaaggaattttcattcacgattggtaatctagacaaccaagatggtgagctagataaccaagatcgaagaaaatcattttagtactgaaagtgtaattaagattttattataatataaatatttttctattcttttaaattttcttaatattataaagattttcttaaagttgtaagttatttgccttcaaatttctttgtgtatcaagtacaataatattataaagtatgatcagatcaactttgagatgggaaaaaaagaaaaagaaagaagtttaatttaaaaggttaatgttttctatatgggtagacaaagagaaaaggaagcataattgtgttacaatcaaaattcttcaaatattatacaacccaatcacatgcatgtcacttgaattgcttcaactatcatataatttgtagttctgtaatagtccattagatttggaacaagtattctgaaattaatagaggacacaactaacaacaaatttttaagatctacaaatatgagaaattgaaacatgaggactccactaaaccacatctccaaataagaggatctgtgtaataatccaaaatctcaatccagtcaaaggaatggaaccatttgaaatacccattactccatttgaaaaatacaaaaaagatgaaaagaaaattggggataaagcttcgtgaaattgagagagagagagaga

SEQ ID NO: 126698 - DNA, 1117 bp, Cannabis sativa
gtatattatgtaaatttccctataattattccatgttatatgcataattattgttctatacatagttccatttgggagaaatttcaattattattttttagtctaaaaaattatatcactttgaagatacataaagctttataactccacattattcttcaaaggtaccatcacttaatttccacatggagctaaaactactctctttcccaattctcttctctttattattagtttttgtgttcataagcattgtttccaaaagaactcaaacaaaaaactcagcttcaaaactacccccaagaccatgggcactaccattggtgggaaatttgcaccaacttttatgctctttacctcatcattccctctcaaacttagccaaaaaatatggaccattcatgtacctcaaaatcggacaaattccaaccatagtagtttcatcaccagagtatgctaaagagatcttgagaacacatgatatcatctttgcgaatcgtcccccaactctcgcttctctgattttgttttatgaaggtaagagcatcatatttgctccacatggtgagtattggagaaaacttagaaggatttgtatgcaagagcttttgagcccatcaagaattcattcttttcaacccattagagaagaagagatgtttaacatgattgatcaattgatagcttcttcaaaagttggctcatctattaatcttactcgaatggtcaaatctttgacctatggaatcacagctagggtagcctttggcaagaaaagtagtgaccatgaagagttcatatcactttgttgaggaatttttgaagtcaattagtggctttgaattttcagatgtgtttccttcattgggttttcttgattggaaccctagggctaaatatgagagccttaaactaagggcttcaagaataatggaaaatatcatcaaggaacacactcatcatgatgaagagaaggaaaagtcaagtggagaaggggaagactttgttgatgttcttttgaagtttcataataacaatggagatgttgggttcaccttaacaagtgacaatattaaagcaataatctttgtaagttttatcaatatcatttattata

SEQ ID NO: 126699 - DNA, 724 bp, Cannabis sativa
aattcttgctggtatgaatgtgaatcttgatgctttcttgatgatttctttatgctttctttattaatctttgctgcagattgtgccttgtttggctctcataccactgtaggaatttatattcctagattgtccctgcacatagcaaaaataatcaaaaaatagccaaggtcaaatctgacctttacccagtcaacccttcccttttttgactccctggtttatgccataaaacgacaccccttttatcaattactacatgtcgttttaatatataccagaaaccctacatacaatcagccatatacatatgttctttatccctcaaatacacacacgcaaccaccaaaataaaaccctagcagagacaaatctcctttttcgttcttctctgaagaacacagagacaacaacaaatcacaacccagaaattaatctctcagcccagaaatcaaccccaaccgagccttccttcttcaatgttcttctatgaagaacacagtcccaatacccagaaaaaaacccagaaattaattcctttctaaaccgatacaaaacccagaaaataccaaaccgaaaataatataaacacaacaaaaaaaaaacaataatgagaatggagaagaaaacaccggatttttatagaggttccccaaaaatattgtgctgggtacgtcctcttcgagctcgcctcgttccactatgattcttcaatgttcaagag

SEQ ID NO: 126700 - DNA, 584 bp, Cannabis sativa
  modified_base (537)..(540): a, c, t, g, unknown or other
gggctatagtccccacatcaatcttaatgggtccgtccctgctcccgtgtgaatgaatgccaactgaaagaacttgtaaggttgaccttgagtaatgataagcttaagaaatttattaaatgtgtgtgttttgtctaaagtaaaatgaaagtattattaagtttctttttacaaaaatttttaaaattactatcttttactaatgcaaaaaaatatattatataaaaattttagattctgagtttgagtaaactttacgcacgggtttaatccgccttaactcaagacctggcctgagaacgtgttatccttttgcttagtaggagatcccttcttgtgacttgtaaatgattagagatctttcattagagtttgatgctctcaataaaaaatcctaggtatataaacgacttaatatatttgtattgattaattttcgtctttaagcatcttcgtctcataatacattctagactatctcattttccataggggtgttcgcggtgcgggtagtgtggtttttgactattttttcannnnaacccgcacatgcggttttccaaattttccaaaccgcacccgca

SEQ ID NO: 126701 - DNA, 1589 bp, Cannabis sativa
atgttagttagggtgttacattggtagcctgataggctctttgtattaacatggtggcctgtcttgttcaatcgtcatggctgcttgctgagcccccaatgtttccacctccttatccctccattcagtgaacagacgtctttgctcttcaaatgcaaggctcactgcagcagggagctcctcctggtcatgatgcaaggtattagtatgaccttgcatgagttcaagagcggcatggaggttctagatcttggtgtcgtctccaacggttgtttaggcatttgttgctagcgaaaccccaaaactcggaatacccagaatggttactgaactgatatttccagtctcttgcacaccaggtgtgattccattcaaaggagacgtcacaccgtgacctacagttggtggtcgctcatgatttgtggctggtgtaacctttgtatttcttggattctacaatgcaggatccactgtcggtggattcacttgatcaaccacgcctgtacgagtttgtaccatcgtgtttatgattgaatctgaagtaaagagtgagcttgagtttaacgatctcaatgaaagcattaaaatgttgacctcgcttttggctaacgacaatgagttaatatagatgtaaaatgaaataaataaagacacagagcttttaaagaggtttggccccgagcagtttggtattagcttactccctttaatttgtattgacttaggaacaaagaatgcaatgattcttctcttagaacttttacaatgatatctctgagtatatctcttagataagtttttcgaccctttgcccagtgaggatagatcactatttatagggctataagctgtaatggaaaagtttcccttctgtttacaatgactataattggcaagataacacattaaatacagaatacactaattaagggatttggacagcttaccatatctctgtgatatgatcccaggattatagggattgcctttgtgattcaagatgcaagtgttgagattgataagtgttggcatgttgttcggattgtacactgcccggttaagaaggcttcgtttgtgcagatatttgtggtcatttgttcggcatatctctttcgaacagatatgtgaagtcgatttcacgtgtcaccagtatgtgatgccacgtcagagtgcaaaaattgggataacattgtatatcaaattgactcaattccattgccactccaggagtctttctgagactttggtttcagtagcacttgatggagagggtggttggttagtaatcttatggtgtgagcctaaaagtgtagtcttaatttctgtgaagcaattagtaagtgaaaggaaagcttctcgatcaaaggatatctagactctgcacctagcagtctttttagtacataatatactggaagttgtacctttccttcttctcgcactaaggtggcacttatggcatgatcaaacactgccaagtacaggaacaatggctctccattaactagtatggacagtataagagccttctctagatgttattttagttgctagaaggctgcttcacattctgttgtccgttggaattt

SEQ ID NO: 126702 - DNA, 1002 bp, Cannabis sativa
agggcacaaaacccaacacctccaacttccttttctttgctaaaatctccttcataaatttaaggtaagtcagcatctgctccaaagcttccgcaaatggaatgttggtgtgcaacttcttgaatacttccaaaaatttagaaaacctcttgtccatgttgttcttgcgaagcctctacagataagaaattttgacatggtggttgatgttgataggtgtgaagctcctttcattagtcttcttttcctctaattttggtgcatgttgatcttgaccaacttcttccactggttatttctcactaggcccctcatacttcttctcacttctcaaagtaattgcttgacactgctccttaccccttacctcactagtgctaggtgaatttccttaagcttgttttgccaattgagtagccaactatcccatttgagtttctaaattttaaataaaggctttagtctccatcatgagttagagcaataaattagctttgatatttgagcctccactagaacttagttgtgggctttgttggggctaagttctcttttggtagaaatcttgctgctgctgatttgaagactgcccttgattgttcttacgatgaccccctccttgcctgtacccatagttattattttgagaatattttccaatggctttagcttgatccattagcaaattgttcacatccactaagcatgtatcatatgtgtgaggccccccacataactcacaagtaacttgagcctattttacctgagcaatcaccaacttaggcaaggcctcgacttggattgtcaacatagttatggcatcaacatcgtgcatacctgcaactttcttcaattggcttctctcagttagccattattggttaatcatggtcatctcttcaagtagctcataagcctcgttttcacattttctaatgagatcattgaacctctcccaagcctcatagagagattttgttgaaaattattttaccaggatct

SEQ ID NO: 126703 - DNA, 689 bp, Cannabis sativa
  modified_base (653)..(655): a, c, t, g, unknown or other
atccacataattattaatatttataataaaattatattattataattaaatataaatattcaaaattatagtatatataacattgtgcactttaaaaataacataataacaataataattaaataaagttgtacaatataaataataataatataaataaataaattgatttacacttgtaaagcaaccaaatgctttacatattaatatgtgagtatatatgtgagaataaagtactttttagtaatttacttagtcaaggccgaaaatattatcacttttattatggtaatagattattctccacaatttaaacttacaaattatccattattatccacaaattaatagacttttgtcacaagttatttatgtaatttcttgttagtatttctaaaaagtacatttatcttgtacctctcttacaattattctgatctttcatatcttattttttttttcaagaaatttattatattctctaagtaaatgagtttatatatttgtatatattattgcgcttctttcaaaattgttttgagcttacatatcttaaattttgccctctgaacttggggcactatttaattttgttatttaaaatataccatttgttaaaattcttcttaaaaattatacagtagaacctctannnaagaatacacttgggaccaagtaaattatattct

SEQ ID NO: 126704 - DNA, 606 bp, Cannabis sativa
catctgtaatgtgcatgtgtttcctcctaattctcccattttgttcatgtatgtgtagacaaggatgctaaaacaaaatattttaatccactaagaatttctcaaaaggcctgcactcacctcccccaccagcttgaacaactttcattggtaaattaaattattttttaactagacctttttactaaatgaaagtttcaaaagcttgagacttgatggtaaggggaaatatccaagagaatttgttgttaatcatcgacaaatatatgtaatacttataattatcttggatgcaacatgagagggccccaaaattttgtatgaacaatttcaagaggttgactgtcacgattttgagacaatagaaagggaaatctatgatttttaccttgttgacaacagaatgaataataaagcatatatgaacgatatgtaatgcgaaaaaactatagacatataaaaatcgtatatgcgatgaaatgactgaattatctccagccattgatgtttgagcttcaatccctgcgatagctttggtatgggaattcgggcttcctcgctctctcaactctcgttagatgaaattttgttgtttttaacagaatg

SEQ ID NO: 126705 - DNA, 913 bp, Cannabis sativa
  modified_base (866)..(866): a, c, t, g, unknown or other
ggtaaaataaatttccaacagcaacactttcaagagtatggataaagtgatataatggtgtttggaaaaatctattttgaattgtcaaaatagtgattatttattttgtaataaataatttattttaaatttttatttaaataaattaggaaaaagacaaagtgttgtttagacaaagacatcaccattgtcaggttaaaataatgttggtgccagtcactgtttaggacaaagtgataggtgcctatgataagatgggccccactgaatttatttttggattgattaattaattcaaaagataaatatttatttaaatttgaatttaaaaagtggttacagatatttatagtggttgagatattctctcaaatggttaagagattctctcaatcgattattagatatttaatttaaactaaatatttaaattcaaaataaatatctacaacaaaattggttataaatatttatatattattattttaatatttgaaataataaatatcttatttaatcaaacttttattattatttttttattgatttaaattaatataccggtataattctaaatctatgagtacacataatttaagaaacttaaaaaggttaatcacatcattattcactcagagaaagaagagctcggattcaaacctccaccttgaatgaagttgtgacggccaacagagccaaacgttacactaactataagaacgctacgtactgcgactaaacatatactaatcccactaaaatgggatctactagagccaagagcagaaattaaactttaaaaatacagattacaattaataacttgtaattaataaacttcataatgttgggaatattttaccagnatctagatttattaacaagtatattgaattaacatcctaaatatgaa

SEQ ID NO: 126706 - DNA, 809 bp, Cannabis sativa
  modified_base (774)..(784): a, c, t, g, unknown or other
atttagagattattcttatttataactggcccaaattgggacttgatttttttttataacaaattagagattattcttgaatagagtattcctaaatagatgttctactgtatcttgcattaactactgacatagataagcaataatccaacaactgaagacgtatttccttgattttattctgaactccaaaagctaaccatttatctacgcagctataaaagtcgcttgtttcaaaatcatctatcataaacttaaaacttgttatgctagaatccgagataaaatacatacctctcttgcgttgttccaaacaattgtcaacaaacttacaaaacttttctggccaatcgccttcattagtaaaatggcaatcgctgtcgcagaaagagattgtggggactgaataccacatgagtttccaatgctttgaaagaaagcaagtctgcatctggggtgggcagaaatgagaggataagtatgatgagtgtattaggaagtttcgagattctgtcctcatcagccattgatgtagttttaactcttttttcagccataagtaaaacacaaacgccctaacggatctcgggctgtaacaagaaagaaagaaaaaaaaaacctaagagggctcattaattcacatgctctaacccctacagctagaggtttaacataaatttttaatgcaattatgaaaaaaaaattagccagatccgttaatccttacttgtagctgcagaaatctagttgccgtttggtaacacttttttaatnnnnnnnnnnnttttaaaattgaaaaagtgaaaata

SEQ ID NO: 126707 - DNA, 773 bp, Cannabis sativa
gaacacgagtttaggggattttactgccaaatttgaattggggttagttgcaaaaattctgaccacttaaagaggttatgtcgcaaattactcttaaatatattacttttaattataaatatatttaacaaatatatatatatatattttattcgcctcctagtctctatgtgggttcacccctgaagacgctacatcaaggtaccactaatacctaataacaacgttcaaaagtgagttaaaaatgtgaaagaagatagtcacgcgatgagatttgattagtagacgtattccaagttgtacacgtctgttgttgaatgcagtgttgaggtggttgattatactaagattgaggaataaaggtacgacaaattatagtaaacaacccaataataaactactacgtaagtaaatatcaccatttaaaatttgtaaagaaataatctttttgttgatatattaattttttgtgctataatatatcaaatattattatatatacaatgtatatatttaataataatatatttattcattgtaattataataaattatataaaatattaacaaatttacataatataactttattgatatgttaattttttaaaaaattcacagtatttatataatttttattatctaattcattatatttttctattttgttaaacttttgaaaaaagaaacatttatttaacttattttatttggggtcatttccatcctagcacataaagataaggaaaatttacaacaatatatattttttt

SEQ ID NO: 126708 - DNA, 699 bp, Cannabis sativa
tctctctctctctctctgttttggcgtttattgatagagattgaatgtaggtcttgccaatgagtgcaaaatattgaatgtaattaattatttaaatattcaattttaaagttaaagatgctttcattttagtatttacagaaaaaaaatatagtggtcatctaattgaatttttcgtgcagactatgtggttgagaagcttgtcatagactggagcaaaatttgtcaattgggtaaccttttttacaagaactatggcaccacaatggctggtttaaggttacgccttcaaatttatcctttaggtttaatcataatttataattgtttaattttcaataatttatttttttggggaacatggattaaaaaattctttggttttaccatttgtaggcgattggctatgactctgactatgatgaatatcacacgtaacaaaattattttattcaattcattttcttcttctttctttcatctttgttcaatgattacatatttaccctagtttaacaattattttgtcatatataacagttttgttcatagaagactaccctatgacacctatgacaactttaaacttgaccccattttaaggtaccttttgcttaccatgccttatcgcaaaattgcaagtaaatattctttaaattgtaaacaaacaaaattgttgttttctctcttttttttttt

SEQ ID NO: 126709 - DNA, 1210 bp, Cannabis sativa
agatagaggtgcatcaatatatccattttaagggtgtgcattgtagaattttccaatacttatttagtatcctgtattttgtaaaaatacatatttagtactttctttctgttttagataataattaattaataccatgtatttacaaaaattacatactttgctactctggctgtgtttaaatttataaaatttctaaattaccttaattttaatattttaagtttataatattattttattcttagataaaaaaataataagataaaattatgtaatacaatttttttttgtaagaattaagtactacaaacaattaaaaaatccaaatttaaagttatcttcaacctctcatcctcttaactctagctatcacctcactgataccttcctggcgttaatggccagcccactgccactatactccgatcgacctcctccaacattgaccaaccactcttctgacatctcccgcttgcaacagaaggctgtagcatatttttgatgatcaaccacgccatatcgtcggcaacgataagcgagttgaatctttgttaacggtgcgactatgtatcagttaaaaatgaaataattcccttttaacttattggtgaaatcaacattgagtctatctatagacttgatagattaaagaagtgcccttttcttgagtactaccaatttttaacttattttatagcttatgctgggaggataaatatattcattgaaaccaatgaataagtatagagtctatagacttgacagactgaagaaggaaaaaaagaaaaaagaaacaccttataagtttaaatttttttatgtacataatattttggacaaaaaataggtcttactatgggctgaccatacaatggtggatagattttgacgtagcatattgaaggtcaacgttgcaggaggttgaagtgggctgaatcgacggggaaggtcacgaagggattggattggagtattaaatcaatattaatgttggatagaggaaaagatgagagttttttttttcaatttgttttactttattaattactaattttattttactattattgtttaatagattaaattattcaataataacataatataataagtaagggtgttcattggatcacatccaatatttttaggcctatccagatccgatccaatcatatattggatgctagattttaccatccgatccgat

SEQ ID NO: 126710 - DNA, 2257 bp, Cannabis sativa
aaaaaaaaaaaaaaaagataagttccaaataaaatagcaaaattgaaacccaataggtccactaaagggattcgaccataagggtttaaataaagaatattttatctttttttgttgcatttaattctaaacctagccctaatagctatgctataaacagagaaagatgactcttattttctaacctaattagaaaaacataattgactctttgtcaaacaaattataaaataaagagtctcctctattttcgaattccttcttctttttctcaataattttgaaacctatagtgattgagaatatacccacacatgtcaaagcaatacctagcattgtgaggaagattgtgtagaaaaactgtcaactgaaggagatcaaggttcagatcttaatcatactctgtagcagaaaggatcaatagttagagatttgaatggaaagagtcatattattctggtgccaatcaatgtaaggtcttctataacattatatgtgtttaattcattatttagagaattcatatttaggatgttagattatagttttataaccaacatacatattaataaatctagtacctagtaaaataagtttcaacaattggcctcagagccattgtaatgatttactttcatgaaatataaatttaaaatgatgtttgattgatttggatgtgttcatattagtttatgtgattaattaatgattgtgtattacgaatttttctataacaataatatgatttttgatctggaattattttatttgaaaagtttgtgaaaaattaaacaaattagccttttacataactcaatttggattaaaattgaaaaagatatgattgtttttattttttaaaaattttagagttaaagcctaagtatgcacgaaaaagggcatttttcttttgccattttccaatttttttaactttaaaaaatcacgtgctgtccgtgtctttgtttttgtgctattggcacttcttctaataataataataaaaaactattaaaaatcatttttttaatgaaataaaactcaaattttagtaaatttttgtgtagaatcttatttttcaaatataaatctaattataagattaacattaattttaatattaattaaaattaattttagatattagtaggctttaaatttgaaaaattaatttttctacaaatttactattacgattatttaaaatttgattattatttattatttatttattgattttaattataagatcagatatttatatatttcatttctttaattaataaaatataaaatgatcttattttgacattaaaaaagtaataaaaattaaagataacctatatatttttaaattgctaaccatatatatgagttctcaaaaatttgttattttttaatatatgttattaacttaaattataagattagataaatgctatttatttaacatttatcttattagatatttattttactaatttatattttgtttatataacatgaattttgatagttaattgatattttttaatagatatttatagggtttaaaccctcaattttcgaaaattatggtttgttatttaacttttttataaaaaaatataaaataatagtatcttaactaaaaatatcctaagtttcaaatttagtttattttattaaattataagattagaattatcatattagaaatattttaatttttattgtatcataatatcttataaattatttaattcattaaaatttatttaaataagctaaaaatttgaatattagttggatattcaaatttaaattgaaatattttaggattttgttagatttattatttttttaatattttttaactacctaatttaaattcaaattatgatatttttataataatattttatttattaagaatagaaatttcttaaccaactgtccatatttgttacatgcttgttttttttatatttttttaataaacatattatttctttgatttaaatagctatgattaacttgttgatagatcaaatgatcaaaattaatcataatttaattatcaatagttcaaatttttatgataaacatagtaattttgtaattttaatttttttcctctatgataaacatagtaacatgatagggcccattcaaatcaattatttatgtgatcttatatgtttgctattgggcctagatgcatataggaagtccatttatttttgaataattaaatggactaggttgctcaaataaa

SEQ ID NO: 126711 - DNA, 523 bp, Cannabis sativa
aagttggccttgagttgatttaaatttttggacttgtatatggtattttaaaaaaaatacaagaaatatgtatatttattaaaaaaatatattttttatttgagccttatatgaatgagttttaggcacgagcttaacttgctttagtcaagagtcgtcttggttagcatttttcttggatttgcatattataattattattatttttgttgtgggctagctcaaaattttaaaactacgcatttacggtgtcaaaagacaagactccctcatctattaattaaaaacaagcacataattttttttttttatttttatttttttaagttgggagagtgaaagttaagttttctagtgtgaatttttggtgtgtcacacacatttatatatgtgacaaacagtgacggacccataatttttaattagtgggggttaattatcataaaaatatttattatttactttacattaaaattataattattttgtgggggctttttactattttgttgtataattattt

SEQ ID NO: 126712 - DNA, 1436 bp, Cannabis sativa
tggataattgttgaagtgttggccaaatatcaaagtccctaaactacccctactgtgcataacagaattaaccaactgtcagctatgacagttggtaaacgagcctcacacaccagctttaccattactatttaaggctcaattggattaaacattggcggctaatcttaaaaaaacagattgagaaagagagttgtttatgagctgattttgtttagagagagagatgagttgtcgttaaatgttgtaatggagtgatacattgtttgtcatcactaccactagtgtgttcagttgcagaagttaagcttctcatgttgtgtaattgaactattgtaatctctcattgaagatcagttaataaagattctctaaggccattattatggatgttttctggtcgaggatgtaggcaaggtgattcattattaccttgttcaaacctcgttgagttcttgtgttctttataattgtttaatgttcttgttgctgatttaagattgttgtcgtattagtgttatatgttgaattggtttcattgatcatggtcttgtttattttgttgttgtcgaggtgttatttcacaacaatataaatataacttataaaaatattaatcattaacaaaacctttatataatatagataggttgacttttttaatcttcacatattttatattttttctattaacttataatatgcagtttaaaatataataataaattcataatttttaattatgtataataactttaaaaaataaaaattataattaatttatttattaacatataatgcatttatacacatttttttggttctaactattcatgtatatacgtaaaaataattgagtttttattcatatgattatttaaataatttttaaaagttaataaatttagagagtacaattattattattttttttttttgaaacaattagagggcaaaatacttatttattttatacatattgtattaatatagctaaaacacactaggatctaatgtgccaaatcaattttatattaaccatataggacggaaagtaagaaaaagatcacaactcaaaatcgagaatatttaacttcagtaatagtttagaattttttttttcaaattaggggaaaaaatattaactaatttatttttataataatttaaattagaccacagctataaaattaacaatgaatttaaatcgtaaaaaatatataaatgttattataaaatataaaaccgcgcaaagcacggtaccattccctagtaaataaataaaaaaatcaaagattattatcaatacacataagtgatgatgaactaatacgtaatgggaataaatggtaagataatcattttcttatatttatttatttactttattaaaattaagaaatggaaaacttgattaaataaaagataaaaaaaaa

SEQ ID NO: 126713 - DNA, 1024 bp, Cannabis sativa
agagagagagagagagagaagttcctaaagttatatctttatttttacgagcgtcaaacatgatttgtggtcagattcgaccaccatgacttggatttggccacacatctgggcagagagagagagaaggaacgcgcaggtcatgcaaatgggcagagagagagagaggtgctccatatgtctaggccatcggagaggaagaaagagaaaagaaggacatgtgggcgaggtcaccggagatggctgggagttctggcggcaactataggagagagagagagagagagagagaggcgaaatatagaagggaaaacatagggtttttttgttaatgtgtgatttgattgtttgagaagaaagagagaggtgataaaataggttacctttttcatttttattttctcagattgtagtttagttggggttcgataaattttttattttttatttattataaattacagctgtatttttttttttttgaaaaaaaattacggtattgatatagtgacacgtcaggtgggtcagggcacatttacccactcgcgcttggtgcgtcactatatgtctcaaattttcaaatgaataaaaataaaataaaatgattttaatctttagtgacactctatatttttaatgacccacattgtaggagactaacactgaacatttagagtctaattgtgaaaacaaagacatctcatgtagaacaaattaaacggaataatttctagaactcactaagaatttagtaacccacgctgataccaattgaaattctgtattttaatatttccagttttattgtttaattaaatgcagaataatgaaactggtactaaaatagtgtttctgtagctacagaaaacaactctgtaactccaaaagaaactagaaaaacaaatagggtagaaaaataaaaacacacagggtttttgtacgtggtttcaacaatcctttcagattgttactagtccgcggggccacgcccagagataagattcattagataggtctcaaaaat

SEQ ID NO: 126714 - DNA, 1719 bp, Cannabis sativa
  modified_base (1667)..(1670): a, c, t, g, unknown or other
atgatatgatatttggagaaatgagtgacattccttaattaatttacaaaaattctaaaataaactcctaaaaagttagtccaatgttccgaatttggaaaaaataaaaaaactagtcaacactattttttgtaatgacaaattaggtccagtcacgtctaaaatggttgatgtgttgtctagaatttgtgttgttagtgttgtccatattaataaagatattttgggtgtttaattatccaattctacttcaagtttttttgtttaattgggtataaatatgttatcttgttactgttttgattaatccttttgatcggagattagagattacatttctttcttgttttgtttttgcgtttcgtaatactagtgaggggatgaagaggggtactatgcatgaattggggcttaacttgtctccctcgaacattaaatacttggagctcccgctttttagacctaatcataaagatgcggatcttaacttcatccttgacaacctggtctcgaagctgcatggttggaagctgaagttactctcgaaggctggtcgtgcgacccttatcaaagcgatggatctggctttgccagtctacactatgcaaacgaccaaactctcgaaaaaacttgcttccaaaattgacggtatgatcagggatttttggtggggacatgagcaagataatcgtggtttgtgcttgaaggcctgggaccatttatgccttcccaaatcaagaggtggtctcggttttcgtaaatccttggaattgaacctggctttggctaaatggggatgggcccttcttactgatgaacagactctttgttgcaaggtgttacgagctaaatacttgaagagtaattcgtttttagaggccacctataaaaatttcgactcttgattctgaaaaaatgtggtcaagactaaagcaatcctgaaaaaaggggcttgcaaaattatctcgaatggggaagacatgaatgtttggacggatccttgggttgtacatggtaaagagttctatccgagacccgctaattcttgttctgaaagggagattaaggtggcggacctgctcaatcctaatggggactgggacattgttaggcttaaggctatgtttgactctgagactattaccaacatcctaaaagggggtaggcctagcggacaaggatgtgacagatgcatctggacaaaggaagggagcgataaattcactacaaagtctgcttatttggtgcaggcttacgtgagagcccctaattgtgtggttgcgccgacattgtggaataaactttggcactctaaaattttagaaagacataaggttctttggtggagcatactttcgaatgctctaccggtccgtggtctcctggcagggagaatttccattgaatacgatctttgcctattatgtggggaggctgtggaatcgatggaagacctattcctctattgcaattttgcttaccatctctggagatcctccccgtggggggtgttcttgatcccagactctagaggccgtgtttgggactggatgaaatttatttggaacttggagtcgagaggggtaaaatctgacaacctgttcctctatgcctcaatcatcgttgacataatatggaaaacccgtaatgacaaggtacataactcnnnnttagcaaaccttgttgtaaagaccacttagtttaatttggaaattaaca

SEQ ID NO: 126715 - DNA, 824 bp, Cannabis sativa
  modified_base (39)..(46): a, c, t, g, unknown or other
aagttcatatttagggggtttaaacaacatacttgtgannnnnnnnaagatcctggtaaaataaattttcaacactatattcctggatcatatctcagagagacttgagtctggtatagtatgaagtaacattgttcgatccctgctgaaggagttgcatagcacgtttagcttcaaaaatttgtggagtatttttttgactaacctttcttgtaactctgtccaaatcgatgaagcattttaaagatacattaattatactatctctgatctcaatcgagacatcacgcagaattcaagaaatgattagactattgcatcagcaccaggagtgttagtcttcatcatcttcatcaagttgaggcaatcttccatccacgaacttgtttcttgcaactaaagcaacaagcatcgatctcttccacaagctataattttcagatccagtgagaattttagctacaagcattgcacttggatgatctccatgagagagatagtaaggacttcttggatcatccaatcttggattcggatcagtagcaaatgaacgatttttatttttaaaaatgtcgtctcaattggaattgcttcgagtctgagctactcctcccttcgccatagccagaagaacaaggagaacagagaaagaaaacgaagagcaggaaaaggaaaacgaagagctcaagatcttcctgactctgatactaatttagtaaacagagagtaacagagtaaaaaaagggaaaaaagagattgtattattgtaatatccagattaaaatagtatttaattttttttttttggatattaattgagcgag

SEQ ID NO: 126716 - DNA, 939 bp, Cannabis sativa
agcttaggtactattgccgctattattggagcttggggattaatctgcatcaacatgaactatttggggacttttaccgcaaatatccctattaattaaattaaaataaacataaaatgctataacacacaggctgttctacaaggcaggccctgaaaatatatgggcctaagacgaattaaattttgagaccctaaaaaatatatataaaaaaatataaaagaaaagtgctatgggatttgaaccatgaccttatacattattccatcgacataggtttgataacttttcatacaaaaattacttcaaataattaacaattccaaaagttacccaacataatctcacatgccaccatttaaatgattaaatactataaaataatatgataaagtaatttttttgaaaaaacaaaagaaaaggataaaataatttcacatgacttgttgctaaatataggcaatggtgttaataaaattgtattaaaaataataatcacattacatatatgtggaaagaataactccatgggcaaccctcattggagatgttgttagtctagattgggtgggctttaggaatttatgaagagtttttttaacaaaaatacttgattttaagcaaaagtttacaattttactgtcatacggaattttttacaaaagtattctctttttataaaacaaccgtaaaataacgaaacagaataattcaaataataatggaacaactaaaaaactaatcgtgaaactaaaaatagaatactgtcttttctcacatatttttctctcaatgtcaaactcatctttcacacatttttctctcaatgtcaaactcatctgtaaactccaagttcttgtctaacttatcttttttatatttagtttgattttatcttgatttaagcttgaatataaaaagaacaaaatcaaagattca

SEQ ID NO: 126717 - DNA, 801 bp, Cannabis sativa
aataaagatgttagggaatttattctatctggttttactgatttaaataaagatgatttttctctactaatgtgtattttatggactatttgggaatatagaaacaaaaaacttttcaagaatggtcatttggatgtaggggacttagtgcagtgggctagcaattacttactgcaatacaagaatgcacagtccaagagaattgatgctgaagtagcctgccattcgcagcaacagatcagagccatcctaaagaagggcattatcaattgtatacagatgctgccactgatacaaagcacttcaggattgggcttggtgctattgttaaagattggattggaaaggcaatagcaggaatttcatcacctataccagctcaagtctcacctctcatggcaaaagctatggctcttaaatcagccctagattggtgctgcagtattcgaattccacttgcaagtatattcactgagtccaagcagctaatcaacaaaataaatagctctaagaaggagctttctgctcttgctaatattgtggaggatatcgggagttccttgtctcatatccctactgcttttatctgttttgtgccgagagattcaaatacttatgctcatcacatggcgcgaaatgctttagggctagatgagaaattagtttggaaggatttttgtcccaacttaagcattgtaacctgattttcatgtttcatctgttggttacactcgtcaaaaaaaaaaaataaataaataaaatatttgtgaatgacagtatgggccagtatagaaattgaga

SEQ ID NO: 126718 - DNA, 1022 bp, Cannabis sativa
ctctctctctctctctctcagcctccaaggctccttgtgtcatctttactatttatcgttcttatttacaaatggtgattgtcagtcataaataaggctccactgtcggttgaccaaattttgagtaagcattttgttgctttcattgagagccttttttagttccttcatctcgttttgatcaattaccatggttctaaccagaagaactccccccttaaatcctccttaggatcccatgatggtggatcccaatgttcgtgttcccctaccacaaaaggtcctattaatccggatgcactgccaatccagccaatcttgtgaatcctaatgatcctgccatttttccaaggctggaacaactcacaggatcgcatgtagaagagcgaatcaacatggaacaacctccatagaacacaattgaggatgttccacattcctacgtaggagaaacagggctagcaattggtgaaccagttattagtgagcctcccttggccctgggagatgatattgagctagccaggcttagagaaacggtagaccatgtcacaaagataggacaagaagaactaagcgatgctagttgccatgcttttgcccagtagagatgtaaattcctaaggtggatggatggcgagcaggccatcctctgggcccgtcaagaagagctaaactgccgtaatcgagaggccaatgacctgataaggtagttcagtgagtgaactgttggaaaaggtcaaaatttgataagagatcctttacaaggaaggcctgacaacatgtcaggcagggtctacaggcaggtagacaagagatagacagtccaactagattcctcaaacacgaggatagacccttccctacctaacagtcaaatcttgctaaacacaccgtgtaatatcccggaaaataaataatgtttaaataggcatatttaattaaatatgtaattatgttggtaatgaagtaagattatgatcttacttaggataatgattgagaatttactcaatgaaata

SEQ ID NO: 126719 - DNA, 1210 bp, Cannabis sativa
tcatattcttttggttttggttcaaatttatttgatgggttcagattccattattgagaacttgatgttggaagtttaaaattttcattcctttaggaaaattttcaagtcctacctaccattctgaaagaatattcatttgcaaatttcagagaagtaatattagagtatacaatgtggacaaaggctggaaagtgcagaaaaacagtgttgtcataggtttgtgatggactattaccgatacatctctttcctcagatcaacgttatctggtaagttgtatatcatttgtactttatgtataattggtgtttttgctcttcataattttaaaatgccttttgttttatacattagatttatggtttctgggaattaggacaaaattattggtaacggaattttgatttttcattttacatggctcaacttttgcatactttttgttgcgtttagtaaattccttttgttcacatatcttttagtaatttgaggatttttctccaggacttatctttaatctaacggacttatgttttagtattataggtttatgccagtatgtcacctattgtccatattattaacgtggggtatgttgaaatggagtcactagctaacgttactgtatgaaatgatttataatttatttggacaatgatattctaatttgtcacgtaaagaaaaatgagtgtatgtcattatctctgttcttggaaaattacctttccttaaatatacttatgaaaatgtgacaaggtttgacacattcattcacagcttatctaaatgttgatccatttacaggtgaggaaactttcataaaatataatttttagttggaaagtcttctctttgctcattaccaagttcctaatgcaggagagatgtttacattttgctatgcgcacactcctccatacataacttaccgaattatttcgaaagatagtttcatgcatgagccagtttttataacagtatgagatccaatcatgatgcatgacttttttcttgggatagatattcataattctcttatttcctgccactatatatgtaattggttaattaatatattggaattactatctgttattgtaggattggtttcaattcttttgttcattacacttattgtagttgtgctacaatcaaaataaaaaatacctaacataaaatttagtatacgtgcctcgcacgtagtttt

SEQ ID NO: 126720 - DNA, 949 bp, Cannabis sativa
attgattgaatgagagtgctaacatcaggggtcagatgggtttatcagaggaagaacaaaaggaatctcagtaccagagactccagttaaacggtgaaactaatgtcggtaaggacataagtgagttggtacaagcacagagagctctttcaaacgatggtgctatcatatcctcgggcgatattatgagctgctgtcaggaatacggaagcacttcgtgttgtcaaacccctgcattacctgagaagaagtatagtttcgatgatgcaaacgagaaatcaaagaaagttgttgtggtaactgataagaaaaagagcaaccgaaatttactctctcggatgaatagtggcaaagggtcttcaacacgaagagtttgttctatgccgacatggttggagagttgggagcgtgaagatacatacgcggctttagcagttgcttgtgctgctctatcggttgctgttgcttatagctgctacaaacaatcaagataagtctacgaacctcacactttatcagagcgatcgttgtttcgaaaagtcgagatagtttacaaaccttacttcactcactggtgtgctaaaatattttgtaatacaccaatagaatgaaagaagtatagtgattatggaagaaagataagtttttttttcccagaaaatttaccacaggtgttgtaaaatgtggggcttggcttgggggatgtatttggtttgttttctctttcttctgttctttttttttttgttttcctatgtattgatagaagtttgtagttgtgaatatattaatgttttttcttaaacttttacatgaattccacttattcttttcttgaaaagttttgagttttacaatttgtttggttgatgttaggctatttttagcctaagtttcgggtcacattttatagttgtttttcttctttattattatttttggaatagaa

SEQ ID NO: 126721 - DNA, 1041 bp, Cannabis sativa
taataatgtaattacaaaagattgaccatacattagaaaagaaaatgtactcttaagataaatttggggctttattaatttttgtacctaatatagtttatttttctcttttaagatgacaaaattttattgaagaatatctaaatgatacaagaataagaaaaatccttcggtccataacaactaatatgtaaaatagtaaaataagtataaattaaaaatatatgtattttatgcaaaatataaataataaaatacgatatatttatatatttttgaggtaggaataaaatttcacaaaatatatatatatttcatctcctaaagatgtacaaattattaaattagtaaaataaaataatagtttagttagaatggcaaacttgtaataaaattacaaaattatgggtatttattagtataaataagcctggattcaaaatgacacttgcaatagaatagaaagagtgcaaaagaaagtttaaaatagttgagcattgttattaggtactaatagtgtttaatactttttagatatgttattttacgattaattagtaatacttcttaaaaattattacattgagttatatgagacttgatacttaattaaattaatagcgatattgacacgtaagaaagtgctaaatgctactagtatcctttagcatttctcaaaaagagtgtgcttagcactctttgcccatttaatctaatggggaaattaattgccaaatttcttttattaaatgagtgtattcttaatagttattatctataaatgagtagtattaaaaaaatttgagtttatatgcttaatttttcttattaaaaaaatatctcatttttatgttatatggtctgagtttgtttcattagctggaacaaaataagaaaaaatatttttcagcaaaaaaaatgtaaaaaaatgttagtttgacttaaatattttgtatataaacatattttttatatttaattacgtagttgaactaagcatgaaaattattttttttttattatttattattggatcaaaat

SEQ ID NO: 126722 - DNA, 1061 bp, Cannabis sativa
tgctaacggactagtggtttaggtagttttaccactaaaattttagattagggggttagttgcaaaaacctgtccactttaggagattttgccgcaaattatcctaaaatttattgaatctttattttaaatatgccatttttaaaaattattaaaaaaatatatttttaaaatttttaaattagatgtaccctgaacacgaaccaaccctatctatatataacaccttcgttaagaattttttttacttgattaagaactaagaatattgccgctcttcgcgcgactaatttaattgtttactattataataaaaaataattatttattaatataatgaataatgaattaaaagttatttcattatataataatattaaaattaagaattttaatattaagaattttcgttaagaattttctttactttattaagaattatctttccttggtgaacaaagttagcgctttatggattggggcaggaccgtctcaaatattttagaagccctgttctaattttaaaagtaggcctctaataaaaaaatttataatttataaataatatttttgaatatcatcatattatgaaaatatattttacataattaagcaccaaaacattcaaacaattttattaaaattgttgttatttctaataaaacttcaagctaatatcaaatattatgaaaaaaaataaataaaaggaattaaggaaaaatcttttttttttatttggcataacacattagtggaatattgggttaaaaaaaattctaaggaatcataatgggcctttttaatttgtggaccctgtgcattagcacttgttgcacagctaaatggctggagaaattatgtagaatatgaacttttttcttaaaatttgataaatatggagaaattatgattttacttaatctatggcttttttctaatttaagttagttgagttgaattatatttccatatgtttaagtttttatgaaataaagccatattttatttgttaatttatttttatagatatttgtattattttttaggaaaatttattattt

SEQ ID NO: 126723 - DNA, 1269 bp, Cannabis sativa
  modified_base (498)..(503): a, c, t, g, unknown or other
catacttgttagtaaatctaaatcttggtaaaataatttccatcagtacattcgctctgacgaggtcctcttaacggagcagtgtgcaagccgcgcaacatgccaactcttagcaaattcagcattcccatcgtgagtcaccaaagaaatacctataactttgggttcaaattacagagatatggcaagttgtccaaatcccacgatcagtgtattctgtatttactacgcaatctttctacttatatacattgtaaccagaagggaaatacttccctcccaagcttatagccctataaatagttattcatatttactgggcgaagggtcgaaaaatctatctaagaattcatattcagagatattcttgtaagagctctaagaaaaggaaccattctccttgttctttattcgttttattacactcgtattaaactacatgtcgcttaaaaattagacttattgtcgttggccaaaagcgaggtcaacattttggtnnnnnnattgagagcagaatcaaggattgctctttatttcaaatctaatcaaaagtacgatggtggtacaaactcgtagggtgtggttgatcgggggaatccataggcggtggatgctgcattgcagaacccagtgaacacaagggttccgccaaccgtaaatcccagatagccatcaactgcgggtcacagtgtgatgactcctatgagtgaaatcgcacctggtgtgcaagagactaggaataccagttcagcagccaaccatggcattcttaacacaaccgttccggccactaccaatgttcaaacaaccattagagatgacactgaaatcaagaacctctgtgctgctcttggaatcatgcagcgtcataccaacacactacatcatgatcaagaggaactccatgctgcggtgaatctcgcatttaaagagcagaggtgcatgttcgccgaattgagggacaaggagatggaaacgttaacggcgatcgtagtcagcaggccactatgttcatatgaaaagcctatcagactaccagacaatagccggtaaccgtcatccccttgggcaaaaccgatgaagatccagtgatgaacacttctcaaactataaatggtcagctgtccaatccccggtcacagattccacctgtgggccaagtggtatgtgtgcagaccttgtctagtaattcatcaagagaagtcatacccaataattccaaccaagttatgttgggttttgtgccttaaataaaaccctttacaatct

SEQ ID NO: 126724 - DNA, 811 bp, Cannabis sativa
tgaagctgatgttcgaattgcactatttcaaatgcatccagctaagagcccaggtaaggatggtatgaatgctggtttttatcaaaaaaaattggacattgttggagctgatgtgtgtaaggcttgtttgagttttattgatgggtcggcccttgcttcttctattaatgaaaccattattactttgattcttaaggtcaaatctcataccctcactagtgaatttcgaccaatcagcctctgtaatgtgttgtataaaattattgctaagatgattactaatcgactgcgggaggttctgggggatgttatttcagaggagcaaagtgcattcataccgaggcgcttgataactgataatgcaatgattggttttgagtgtctcaatgctattaaaaggcacaagagaggaaggaaagggtttctggcatacaaggctgatatggctaaggcttatgacagggtcgactggtctttactgcgtggtatgttgattaaactcgagtttcaccctggttgggttgggttacttatgcgttgtattacttcggtgtcctatgctattaacattaacggagaaattattggtcatatctcgccttcttggggcttgcgacaaggggacccactctccccttttctgtttctggtgtgtgttgaggtgttgacttctctcatcaagcgggatattgttcgagggacaatcttgagactttaatgtggcagaaggggtcctgtgatttcacatcttttgtttgcagatgacagtttcttctttctagaagcctcggtggctagttgtgttcgattt

SEQ ID NO: 126725 - DNA, 856 bp, Cannabis sativa
agtaaaatactagaggtactggaagtagggccaaccaaacagtaaggccaatcttgaaaatgaatgctgtcatgctgagatgtggccacgtagaaattcgggtgccctgaaagctgaaaagtagtacacaataataatagtgtgtgggtcccaaatactactgagtgtgagactgtcatgacatgactcatctcatggtttggttggtgactgaggatccattccatgcatttcctcccaaccaataatttcctgttattcttgtccttggacttggactggacgtggacggtgccccgatgtttacccaaaacaccaccgttggttcaaaacgccggattaaaattaaatctgtgccctcaatcgtaagctgtctcacacaagaacgactcagcattgggcttgggagttggggccctcctatgcacattatattatgaatttctatggataagggcggtggactagtgaacttacacaaatattagaaaatggagaaaattttacaaaaatattggcacacaaattttttacatttttattgtactaaatttataaaaatactattttaaagttttaaattacacaaatactatattttagttcaaaaacaatcctaaaaacaaacaatatgaaaagaattataataaataaataaataaataaataaataactatagagtgatagaaaaataacaaaacaacgttctacttatagtaggggccatggccccctagataatatattatcttaaatttatatatgtaaactgaattttttcggtaattattgtgtgaaataacttctttcactctatatgtatttacttacgggaaaaaaacagaaaaatataaa

SEQ ID NO: 126726 - DNA, 3398 bp, Cannabis sativa
  modified_base (26)..(62): a, c, t, g, unknown or other
acaatctcaatagttcagggggaatnnnnnnnnnnnnnnnnnnnnnnnnnnnnnnnnnnnnntacatgtcaaagttcggagagaaaaattattaattagcatacttttaaatgataaaaagtgtaaatttattcaaaagaaataatatataaccagtttttcttaccaattgtgttgacattaaactattttgaggatatttttgtaatatcatgtgttttgggtaggaataaaaatataatattaaagtagtgtgaaaacacaattaataattcttttctagataaatttaaaccacacacaagtaaaataggtagtgactaagaaacttatatttagtatgtgtaatatgggaatgtggtattagagaacaaactgcgctttgtctgggttacattttgtttagtgataattaagttataaatttatatcaaattttgaattttaatattttttatataatatatttctttattctcagaaatacaaattaataatctaagaaaaatcataatacaattcttcacacatgactatatttggaagttgaattttggtaagaaaaaaaatagggaaactattaaaaaaaaaaaaaaatacgtgtagacaacaaaaataaataaattaatttttcaagtttaatatgaagatttttaacgaatggatgtttttctgtataatttttctttccataccaaatatgagatttattattttttatttttaacttcttagtttactcatcatacgtatcattttaaaatcattgtaatcaccatatgtcactcgtagtcagtttgagtcgttattatcactgtatctcacttgtactcattactatattcaaagtcgttttcatcacatatctcacttataatcgttgtatatatttaatataataaaacaaattattaatacaataatataataactaaaaaaattgaattctaataatatatattgaaaagaaaatgagaagaaaaaaaatcatactaacaaaaaaatataaaaaaaaaatataaaatacgacatgctaacaaaatttgtggtatatatactatttttttttttagaaaatagcaaagtttttcttcctttttttccaaattaaatataacaaaaattttgaatcttgaacaaaacaaaaaaataatatgtcacacaaatctattctggaaaaaaaaaataagatgaattatgttgattgcgactgaacaataacatcttagtgacatcaataacaggaactcactgtaaactacattatacaaaaatatttcattttatattttgaacttggagagaacaatgacctataagatatatatatacaaaaatattttataaactagtttagaactaataaagtaattaattattaaaatctttaataatattaaaaatttcactaaaataaaataaaaaaaaaaacattaaaatggacatcataacgacattaaaaacggacatcataacgatactaaaaacgtgtgaggatccctgttatgaaagtttcacaaaaggactatatacaacgacaattcaaaatacgaaatcaagatacacagcagatacagtccaaaacaactcctggcaacttggcacacaggtcggtgggtcaatatgtacattgttggagaagactgtcacctcatggttgctctaactttttcttgcccttacctacaccacagaacacccgtgagtcacaaaggctcagcaagaaaagtaacgaaaaagaatacatgaaataactgattacccatttcactattataaaatgatcatacaataacagttaagagtggataatataaccaaccatgtgcatgggaataaaatgtatcacatattgcattgcctaatcaggcaagcccgtgtcataatttggcatcttacataatgtcactgcgtcacctaatcaggtgagcccatgccacaacttgtcactaatgtatcgcatcgcctaatcagacgagcctgtgtcatagcctgacactcacatgtcattgaggttgaatgtaataccaatttctttaaaaaaaaaatagtgctcaaaatttattgagataataattgtataaaaaaaaaaattgtcttatttatttctatggatagtgagtagagataatttttagagtttagtaactatgtctcccataatctatttgaagaaatattctacagattcagaattgttctttgacaaaaattagcatttctatgtcaggcatcattcaaagatttttcgaggttgaaagatcaaccttattgctttatgcgatcacaaataagctacacgtttgatgatcggactctattcttagtgatttgaccactttgaccaatatcactcgtactgagtactacaaagttaacaccacttctaggtttgggagatgttgggcatcatttggaacgtctttgaggttgaaaaatcaaccttattctttatgcgatcacaaataagcatctcgtttgatgatcagactctatccttagtgatttgaccactttgatcaataacactcataagctaacaccacttcaaggttcggaagatgttgggcatcatttgaaacgtcttcgaagttgaaaaatcaaccttattgctttatgcaatcacaaataaataacacgtataattatcgaactctatccttagtgatttgaccactttgaccaataacactcatagtgagtactacgacgctaacaccttctttggatttggaagatgtcgggcatcattcggaatgttttctaaggttgaaaaatcaaccttattatgttttgaaaaaataaattaaggactcgttgaagattggacttactccttactcttatctctataaattttctttatttatttatttatttttatatatagagaacttattttgtcttactattcagcatgcaccaaaaatgaatttttttgaccagttacaaccggttctattggaagtaataactacagattttaataaaaaaagataagcattatttatttctatatttattagcagccctaagatagcaataaattatttattgagccaatttaattatagttgaaagcttgaccagtcacgcagcttgacttcatcccctggaacaaatgtacactacacattcatgcactcagtctaactaaaaaactaaaataaaattaacatctatcgacacaagaatcagcacgatttacgactctgcagcgtgacttacgattatgaagaatagattgcttagttacctttatttgagtgatacctaactcataacagtaatacatattcagtacgacccataatgcacactatcactatttcagaaatctcttaaagaaaatttagaagaacattttgagagaagaacactagaaatttatttagtag

SEQ ID NO: 126727 - DNA, 983 bp, Cannabis sativa
tcttgggtcctaagtcatgggtcagggtccccgattcaagttagggtcctacgtcccggtctgggttagggtcccagtctaagtgcaggtcccagtccgtgttttgtactagtccttgtccgagtatcgggtctcgggtcctaggtctcggtccagggtctcggtccctggtccagtctgggttctaatcctactccaggtttttgtcttggtccttgtctgggtcttggtcccagtcctgatctcggtcgttgtccgagtcttgggttcgagtcttagttctggtatgagtccgggtctgggtgcgagtctgcgtctagatctggttctgggtccaagttttagtctatgtatgggttggctcttgatctgggtcagggtttgggtctcgctacgggttctgttacgggtctaggttctagtcaaagtcccaggtcaccggtcctgggtttcgagtttttgggtcgcaagtcctggcagaagtctaagtctggcttcgtgtctaggtctgggtatagatccggctctaggtccgtgtccgtgttcggttactcgtctagatccaattttggctccaggaccaattcttgttccagggtcccgattccagtacttgttccgatttcgggtctcgggtccaattttgggtttgggtcctggtcttgaaatggttcatggttcgggtcttggtatgattccaagatctggacaccgactatgggttgggtctgagcctcgggtcatgggtcaagatctgaatcccaatcttgggtcccagtctcattccaattcagatcctgggtgccggtccgtgtccttatttgggttgaggtttcggacagagacctgggtaaggtcttgggtcccagtccaatcttgggtcccgattctggttttaattttgagtttgggtccccaatctaggtctggtcctaggtccaggtctgagtctccaatctcagtccgagtcctgggtctgggtc

SEQ ID NO: 126728 - DNA, 543 bp, Cannabis sativa
  modified_base (42)..(57): a, c, t, g, unknown or other
ttaacaaaacacagggtctaatctgtaacttttacaaaacannnnnnnnnnnnnnnnatttaccctttttttttattattttttaaaggcatgtatcaattacaattaatattgacggatttgagggggcatagagtttttcatcgaactattaggagcaacatgcacattattagcaacgactttggggatgttattagaagatattaggtgcagattgtactactatgtcctaaaaaaatgaaacctaataactactgtgcatacagtcttataaaaatatttagattttgttaattttatttttgggatatttaatagacaaaaaatattttataataatattatagatatctcggttgagttatatattactttttgtttatattttatttgacttattcaatttttttttcttttgcaaatgaatttgatctattcatttaaaaaatatttgttgtctagcatttttagtttgagaaagtaatacttgttataaatattaataattatgtggatgtccaaatcttttatttattacca

SEQ ID NO: 126729 - DNA, 1687 bp, Cannabis sativa
aatctgattatattgaaaagagttttatttagggcacaaaacccaacagaaactagtttcttaattaaaaaaaactagattcttgatggaaaaaccagtttcttgatgaaggatctttggtaagcaatttatttaaagattaaatatgggtttgaaaattaattttacatatacatggtgttgacctcccttttagcaatcgatagtgagtcttaattaaagcgatgagaataattaaataataaaaagcaaagagcataaagtaaaagtttgaccccttatgtttggtgatagcctagtttcttttttgttgtattaacttgtgagatgaagaataaaatattctctctcgaaagcttaatctttgagtaaattactgttaaatcatgatttcactcttaagtcttttctctttgaattctttcatcttcctaaatagtgatatgagtccactatttataaggactaattacataaagaatgatttttcttaatctataacaaataaaataagaaattagcatgtttccataattacaataaagagattgggaaatctaggctgattttctttattttttgaattaatcccacaaatgtagggattgtcttcgtgacatgcaagcttagaaataacaatgttcatctctgaaattggtaacttgcaccccttggtcaatgcatgcgagctatccatttgatagagctggttggatgtctacatgtgagcttgttcggatatccgactaatatatatggctttgagcttcatatcaacctgtacggcctgttaggagtaaaaccatccaccccggttatgaaatatgatacacgtatcatctagtcagatgccacatcatagtacacaaattaggataacacatggctaaagttgtacattcgggtagcccggcccagcccgtttttataaaagtccatttttttatgtaggcccagcccgacccatattataaaatgggtcgggccaagcctggcctatatttttgaagtaacagcctgacccataaacacatattagttatatttggtcagactcgtactgggcctaaatgggccagcccatgtgaaatggttgacccatatttatcaaatggcctttaaacggaccatggaaaattgtcatttttctgtactttttaaattaatttctaattttaaagcacaaataaattatttcaattaaaatgagtttcaaaatcaaaataaaaaaattataattataattacatgtttaataaccaaaataataccaccaggtagtccattaataaattttcacataaagttgtcaataatattcaacataaactctttcagcaaaaaaaaagtcaacatattaaaatgtgctcattcataaaatgtgccaacataatttaaaactttctccaagtttaaaaactaaagagattatatatattaaaataatttaattttttagaaaatatatataatcttaaaatatttaaagaaagtattttacgaaagagtatatgaattattatataaaaaaattattttatgaatttttattaatattttatttcatgcttacgtgcaggggcggagctatatggtaagttacaggggccttggccccccctcaattctcaaattatatatattagtttataataatgatgatctaaataattttatatatatatat

SEQ ID NO: 126730 - DNA, 1072 bp, Cannabis sativa
tttcttttactcctgcaacagtaccaggggcagaaaaaaatggcaaaggaaaaaaattattgtcgtacaatctcaaacgtctaaacaaaggttctttccaaaagggccccaaaacaacgattgcaaattagtttgaaagtcatcgcggcaactcctgcaaaagaagaatagcaacaataaggcttatgacttcgaactggcagcaatagatatcaacatgactacaaccaatggcgcaaaggttgttctaaacagagcatatataacaacattcatgaagatggcgattatgatttcagtgacatgatcgcacaatcaaaaatatggcataaagaagaaggttagaaagagggagcaacccttcgttgttctcccagccataaagaagcaaccccaaaaattgcaacaaaggctccaacaatcgcaaaatcaaggcgtacagtacattccacactttgcacttcgaactccgacattccattggagaaatgaatatggtcatcaatggagatcacgaagctctaaatcaatgaattgcagatccgtttatacaagtgaaacgacgttgagtaaaatggatattcatctggtatttggtgagcgcataaaaagatggaaaatatggcgttgaaatcgaaactcacctagttgtctctcttgtcaccgatcggagaatttcaagcgatgaatatatgttttgaattgaaacgccagtaatatatatgccaaccgttcgacaataaaaacaaattaatacaatgacaataatatgtgacaagaaggaccgagaacactttggtcattcccgtcatttgagaaaaacatttttgggaaattcattacaataatttatcagcgctaacaatggttaaagcatacactcaattgtgaaagatttgaaaccctgctaaagagaagcaaattgggccatggagcaaagtgccttaatgaggaaattatgtagaatatggatttttttcttaaagtttgataaatatggagaaattatgattttacttaatttatggtttttttctaatttaagttggttgtgtggaattatatttccata

SEQ ID NO: 126731 - DNA, 807 bp, Cannabis sativa
gagagagagagagtggaggagagggatggcacgactcgtggtcacggaggagagagagccaagagatgaacaaaatttaaaaataactttgaaaaaatgagatctgattttttttaagggggttatatatcttaaaaggcgagaaataaaattttgaaatttaagatgcggagtaaaaaaaattttagatctgaaatgagttaaattaaagcatggttgacaatttccatttaaaaatacacgtgatttcttaggcacgtttaaaaaccgttgcctatacctctcgacaatttaaaatcgtcgagaataccctatttttcttgatagttttaaacactagcttaatttttttaagcgacggttctccaaaaaaagtatttttaggaccgtcgtgaatacccttttttgtagtagtgtacaaataatgtaaatgagttctctattttattcaagctctttttcacatgtggagaaacattattcctattaaaatatttgaatagtatttaaattatattttattgtaattttattatatgtattatatacatattaaaaaatatatattaattaattaattaaatagagaagttgatgtatgatgtataggaatagaaattggatggataatgagtagaaaatgcattctaaccccgtcgcctttccctatccctatttatgcaccctattcccggcctcacccaccttaattcttgatgggttcggggtaggaaaattcctatattagctatgggtacccatgaagataataataataataattcaaaatgaaaataaagaagagtt

SEQ ID NO: 126732 - DNA, 3246 bp, Cannabis sativa
  modified_base (388)..(389): a, c, t, g, unknown or other
atctaagatcctggtaaaataatttcccacaaattcttacaacttatgttttggaaatctaataacatggattcctgcaaacatgacgtacaattatggaatcttaattttcctaacagatcgaatattggttccctttaagtgttaattctggaactgaaatgttgtgtacaaattcagataggatcctgaattatacttccagtagtgaattattggaactaaaggcaaataactaatgagaaaggcaaaatattatattgaccaaaactaattatgaaccaacacatggaaggctaatcactagaattgattatattaatagagttaaactcagtaaatataattctataattactaagagtgcaattctatatttatagtggannaatcatggaattaataaacaagagattattttgttgatgagactcaataaataatctagtttattggagcttagaattataggtccatgatccccaatcaccaccttaaaatactattaagggtagggataaagatttgtataaggagttcaaagcaaatctattttgaattggataaatagtaattatttattttttgtaataaataaaaaaaatcaaattaattaaatagggaaaaaattcttaagataaattttgtcgagataagatttgtcaagacaaaagtcgtcaggataaaagacaccaaccttgtcctaaagacagtggtgggtgcctatgattgttcatgtccctattgaatttatcttttttggttaattaattacttaattaattcaattaggtaaatatctaatttgaaaagtgattaaagatatttcaagactgtggagatattctgtcaagtagttaagagattcactcataaatatcaataacaaaatacgactatggatatttatttatttaaacaattaaatgatgatttaattaaagggatttaactaatataaataggagcctaatttgggaaattaaaacaacactttacacagaaaggaaattgatttttctctcagttgttcttactcatgtgttgagaacacaataagaacaaaggttatactttttatcacaatggcccacactatttcttgtatgtgatagatcaatttgaaatatactggtgtgagtccaaatctcatattcctcatcaactagattaagggatacaacttacgagaagttttgaggataccctgataggcttcaagaggtatactctaaacttatttttttattattattttatttaatgtacacacatatggagatcctataggctatggtacaatgataatcagataatacgaaactctttcactgcgtaccttaattagtaacacgaaactaacaattggtatcgagagcacttctatgaatgtgtatacattaaatatgtgtgggatatatttatgtatttatatatataaatatatgtgatatgtatgtgaatggatggtaatattattgtgaatgtatgagtggtgataaatcgttaattatattgtataattaggtgtaggttttgtcgtactatttttttaaaaataatgtaagccaatataagacatagggatttttatataatttatttattttttgaaattaaatttttacgtaaaaattattggttgtaattttcatagcatgtgagctcaacttgaatcccggccatgcatatcaaaaatatcataagcaagtgagctcgggttcatagaggaacccaagccatgcaagaccttgggtattgtgcccctctgcccaggtcgatgcaggcgaatcacactaaggaaattaaatccctacgattcacattgaatatggctgcatggtggtctaaccactagtcgatggccacaagacctttggctcctcaatttatgagtcgagaagtcgtatgcatgcacatgcatggacatgagatgtccccatgcacgaagacccgactgggtaaggcctgacccatgccttctcgtctgcctgctgctggactctaaggtggtcgaccgtggccaaggtgctcaccagagtcaccggccatggccaggccaaggtggacggtcctccttgtttacttgaaccctaagtgtatatatacattgtattttgtatatagtatatatgtatatattatgtctgtaatgtgtatatataatatatagtgtatgtatagtatatacactataaattatttattaattatttaatattaataattgaaattattttagggatatattatttatatttgaattttaaataaatatcaaggttattatttgaattctaaatttaactaataactattctaattattaatttacaaataataaaatatacttttattatttttaataattaaactaaaataagagagtttgtgggatatatgcttttttaaatttacatttgaattaaataaatataattgattctaggtttaaaatttaaaacttaaaactaaattaagacagaagttatcctaacctaaattaaataataaatattattattttaagacaaaacttatagataattaatttgtcttaaataaagggtttatttaagaattaataaaccaaaattattttcattaaattaaaagaatttaaaaggtgtattaaattaaatattaatttagttataattaattaaaattattttaattaaaaattcaaagcttacgacaatcctataaaaattataaaaatgtcattactgctatggaaatttgttttgtaatttagtttttaattttaaaggttctaaaattaaaaatattgaatttatacctagttcattatcattgtttatttattgatttaaataaatattcattaataattgattaataacatgcttgtgcattagtgaataacatgtcatacataaaaatctcacagagtttaaattattacacatctcataatagaaacataatatattaagattatcctatgtatttatttatttactgtttttgaaaccgaaagcatgtaaactgaataagttgaatttagaattatcttggtaaatttaaaattaacctattaatttaaaagaattttaaattatgaattaaagagttaattcaaataaacccttctacaaaagtgtttttcacaaaaatcatttaagtctaagtattcaatcgaaaaaactgaaggtttgggcctttggaacaagaactgttacagtcagtagtcccgtgatccgtaaggggaaacaccgggta

SEQ ID NO: 126733 - DNA, 1375 bp, Cannabis sativa
  modified_base (1108)..(1118): a, c, t, g, unknown or other
tagtgagaagacatggtggtcgtggcaatgaggcttacagaaccttagatttttgactcaaggttgtcaccacgaccaggctatttgtggtcgcgatgaggtgctatgtatgggaaattggggcagtttcgtaattttgctattttgagttataaaatggatttttctaagagggttttaaatttttaaggaaacatttacaaatagaaccctagaaacaaatgaagaagacttgggaagtgagcgtggcaatcctactgagttctccatctagtttctttctcttccttttttatttcttatgttaatttctattttattttaaacatagatttgattgttgaagttatgaactaattttttaatttagggatatgataaatgttgattaattttatttcaatgtgttaatgtgattggctatttcttctttctagatctaggtgattagtcatacttgttttaatacatattttagattggctacctctgacataatttatgatcctaatgtgaaatctgaaaagtaaatattaggaatgctctaactaaacaaacataggttttgatatgaaacgagagtattcatataacttatatgaccttttagattattactcaatacaaactatatgttattttatctcacagatgcaatgtatgataaataaaaactatatgtaacttgatactttatttctttataaaaacttaattaaaattaaattattaataattattaattaattttatgcaatttgttaataagtaaagatcttttagcaattatttttttttaacttaaataattaaaataattgcaacaaaactccatattatttaaagttacacacataaccttaaataataaaaaaaatatataaatgacctctaattagtagaggtaattttacgctcaatcttattttttaacacttttaagtgccaaattagtgtgtcggtctaaaattggttcaagttatttagttttttctcttttaaacaataaaaaattaagtaaaaatataataacaactataaaattaatgattgttaactattttcgctctttggttaaattattttcatcaatctaaagattgtaaannnnnnnnnnnaaagtagattaccaattaattgaaatgttattttttttttcacaaataagcataacagtagaaaaatagcaagcaagttataaaaaactaatgagaaatccaactgtagctggttgaatagacaaatgagtttgtagcatagatgtaagtgattatatcgaagtagaaaatttacataatgttaagttaggacaaactaaaaccctaattttttttatgtaaaggatgaagatgggtcaagtgattgttgcaaaata

SEQ ID NO: 126734 - DNA, 2460 bp, Cannabis sativa
  modified_base (2331)..(2332): a, c, t, g, unknown or other
aataaagtataattataacataaattaaaatatagaatttaaaattaagtaaaatcaataagtattagaaatatttgagatggatactttatttacaataatttaattaattattataaaaatatatagttaaaaatatagtttgaattattatttactttttacataacaaataatttttacgctattaatgcttttttttttattattataagttttttattattaactttagtattttaacatttataaaaaatctattgaagaatttaatgaataagagttgaaattaagatttaaagtatttttttttaaaaaaaaaaagtacaatataatttgacatgttattaaaaagtatagtatattatcacacatcaatcatgtcatgttacttttttagtttttttagatttagaagtaccaaacaattaatattttattaatatcacataaccggttgtcaatttaataaatacgaatacccctattaaagtctactaactttataaattaataacaaccatttgattaatgactagactcaatctaacgactacagtacaatcacggattgtatactcaaaagtacaataatgggacaaaatcctatccctatatataatggacatgtctatggtaagtaccttacttttgtccctatggtaggcacacatttatagccatagatatttaatctaaaagacataaattgatgagtgcatataaataggtaatacttacaatgtattggattattcctaaaattatttttttaataatacttttaaattaaataattaatttttttaacctcctccaattagttaatcttttttttttctctctctctctctttcattaaaaatctcctccaattattcattgatcatcatcaccatccaccaaaagcttcccttctcaatatctcttcgtctccatcttgcgaccgaagaatgatggaggtagttttgaatttaaatctttctttcttctcaatgcgttgagtggtgatcttttaatggtttcaaaagacatgcttatggaccgatcaatgagagaagaggttgatatattgttaaacttatcttcataccatttgtattgagattacacaacactcattattgttatgcttgtttgttaatacaatcctcaataatagacttagttttggttcgacccttggtagctttgggagtttggacaagtcaagttcgatcttaagcttggccattaaactcaaagctccagcccagaacatagtgattactaataacagagcctattgatgaagaaaaaccaatataaatggtatccttataaatggcgaaagatcttccgtcaaagcaaaagaggttttggggtttaagagcttgagacggagctaaagtcacgttcatctgcttcttaacagcgccatagtctacccatactctcagcgtcaaagacaagcaagttacggtacctgagaatgcactcccattctctgatattgatggtgggcaacttacgggccagctgtacggtctgattccagcgaaattaggcaactgttacagtttccaaatattcatagccgcgaacaatgacatcaaaggatcgcatcctcttctttagttatcttgaactctaagtaagaattttgcatgttttgtgtgattagttaccgtagttgttgttggtgtatgatttgtatttctaaagttagattatggttagatatgttgaattgagctagtattggtggttgttagtaggtttgagcaagctttgagttttagaactcaagcttggctctttaatgatggtttttgattctaagcttggttagtttgttttgttccttggaatatgtctattagggtataatatgtaggtctggaaggtttggtaagaattagaatcgatttggttatgttttggatttttgggggttttttggtgtaaactggttaaccggttttacaagacctgtaaaaccggttaactggatttgctgctgggttcccccgaagattcgtgttggtttcagagctttggttggttaattccctgtcagtttagggtattaccatgtcaacttatagtaggtaggtttttggtttaaaacctaagtcctcggttgtgatttagtgtgtcacttaaccatcttatgatcgatgtgatttaggggcctgtaattcgccgagcagttgttccactcaggttggtcggcacacctgaattcgaaattaaggtaagactagtataatgttatgcatatgtaattacatgtttagcatacatgttgtttatgcatgttagagtacattgataacagtaatagtatanntagagttgtattgattactaataaacgtatgttgactgaaatactgattgatgttgtcacatcaatatggctagagtatgactggcatattgagtatagggtgatattatggtcgatagtattgtcgt

SEQ ID NO: 126735 - DNA, 1478 bp, Cannabis sativa
  modified_base (63)..(63): a, c, t, g, unknown or other
  modified_base (113)..(115): a, c, t, g, unknown or other
  modified_base (979)..(979): a, c, t, g, unknown or other
  modified_base (1418)..(1429): a, c, t, g, unknown or other
tccaagtcatgaatttttaatttttttttaaaaaataatttataagagtaatttgcggcatanatacctaagtttaactctcagttggagataaatacctaagtttaattttnnncggtaataatacctaagttatattcttggaactctgtgaatacctaactgttaaatgtgaagccattatatccacatgtcattttcttattggtatatttgaactaattttttttaatgagttggactaatcagggattgccacgtggcaatttatttaattaggtacctacagaagttccaaaattataacttaggtattattaccgataaaaattaaacttaggtatttatttacaactgggagttaaacttaggtatttatgccgcatattactctaatttataaataccaataagaaagtgacacgtggataatgatttgacatttaatgttcaggtatctacagagttctaaaaatattacttaggtattattaccgtaaaaaattaaacttggatatttatttgcaactgagagttaaacttaagtattcatgccgcaaattactctataaacttctactaattgaattactaaataacttttattattgaaaaaaaactcccatttatagcaaatatatatttatatatttattattgtttagcctcaaaactcatatttttttttttatttatttgaaaattttgtcccattttttatatatatatttaataagtgatgaatagtatattaatattataaaattattattttgtaattttgattccttctattttctaaaaattaataatttaatgaactaagttatgcatttttcctaacattttgtaagatagtttaaacttttacatataaaagttaaattattgtcctttttttttttgaaatttttgtagagttcaatgtatattcaaagttcattaattatatgtgttcttttctttttctttttctttnttttttttaaaaaaaactatttataatgaatgtagtgatagttttaaattaatattttgtaattttaatttttttaattaataattagatgaaatatttattcatttttcgtgcagtaatttatacatatagtttaaatttgaagatataaaaattaaattaagttatcgtaatttttattttaatcttaatttttttatgaagattcgttttaattttacgtataatgtggagtattttgcgtaatttaatattcttggttttatttaagtatatttgtttggttatattattttaacaaatgttaagtatactatttttatttttttcttagactatataaaagtatatattgttttataggcaagtacattatcatcaatgctattttatagtcaagtattgagataactcatttttttggaaaattctacaatgnnnnnnnnnnnnatggatatattgatgcacccctatgtgttttagtatctgaaataatttt

SEQ ID NO: 126736 - DNA, 1099 bp, Cannabis sativa
tgaagtgtttaattgatttaataaatatttattttactaaattattttaagaattttaattcttattagtagttatgatataatttgtactaattatttcataaattagttattttgagttattaatgtaaataatataaaatgcaaaatcttttaagtgaaatatatttctatatttagtgtgaattattagagttgttatactaaaaaataaaagactacactaaattaatgtagattacacacaaaattagtataaccattaaagatggtcttaataaccatcagtcatgttgtcaaataggattacatattctatttttttaattatatcatatattaatatatagtttgaagttcaggttagcactatgaactacttaattattagtgacaaacaacattatgttgcggctattatctacaccaaagagacttgtgttcctttgtgcttgtttgtatgatattggaacatgttctacatggaaagacaaaattatcctttcttcttcttttcttttttcattttctaaaaataatagacaattttgacgtgaaaaaattagacaatttattgcatcaagaattatttaaaaaaaaaaaaaaaagatgttttttatggtaagatgataaaaattaagataatgatattagttttttgaaaaaaaaaaaaaagaagaattttattgatatttaattatgaatgaactgttttacaatggtagcagtagaagtatttatagacagtgtagagttagttagatcaaccaatcagctaactaccactaacacttaactaacttcttataactaacatagtctaataaatgaaggtaactatgttttgtaatgagtaaagaaatttctccatcaacaaaagcctattgtttatcttaaaagcataaaagatatattaagaaaatttaaataataaaactttaataaaaaaaaaaaaacttctaatttgtgatagaatatttacaaaataataatataaagtcaagttagttgacaaaatattttttcatttatggtaagattgttttgcattcatacccgatttcttaccttgtatattcgatttttagttgctcttttc

SEQ ID NO: 126737 - DNA, 2600 bp, Cannabis sativa
gaccgccaaattcggtgatgacgtggaaccgaaaattcggttacggtctggtcggtttgatggtcggttttggtttttcggtttttatgaacacccctaattcatatgctatcaagccccaatttaacatcgcaattcaatttggagagagaccagcactccttcaggcaagagacagggaaagggaaaatagtagcatgtaattctgcaaaagaaaatcgaatagagtcaatgcacttcttcacatctaaagtgagattattatgtaccttctcatttcgagtgcgccagatggtgttgaccacaagtgaggcatacaggaaaacctcctccacatcaatccccttatgtttcaggtcccaaataaatttgacccggtcccacatcagaatactagtgtcacaaatcggataaataccccaaggagaagatcgctagacatggaaagccacatcacaagtaagaaatagatgttccatagtttcctcctccctcccacacaaagagcatctcacctcctcgatatgaaatcttttcctaattacagacctgacagggagggtgttggagagaatgcaccaccaaagtaccttatgacgctccaaaactttactgttccaaagcctatttcaaagtgagggagcaacctcacaaaagggagctctttccaaggcctgagtaagataagcagatttacaagagaacctcccgtccttttcaagagtccaaatccacttgtcttgacccatgccaaagggagcaccacctcttaaaatcgcagaaacagtttcacgatcaaaaaggctattcaacttgtgactatcccaacctccatttctagaaagcaactccgcaacaagtctatggtccctggcaggaatcccaatgggcttagggaagaaattcttcatgtgagggatccaaggttcctcccaaattcgtgtatccctcccatctgccaccagtttgcaagaacctttccttaagatggacttggttttaacaacgttttccaaaaccaagaatcaaagtctttgaaaccacagttaaagaactcttttcctttgaggtatttcgcttgaagcacccttcagcacagagactgacttccattaaggatgttccacccccatttagccaaaaatacttggttcatttctctagattttctgaaacccaggcccccaagagattttggaaggaaaattttatcccatgcttttaggtaaatcctgtgattgtctttctcaaaaccctaccagaagtcacgcaccatattgtcgattttggtagccaaacggttggagagtttagtagtttgcatagcgtacatcagcatcgacagacccatatatttgatgagagtagcccggcccgccttagacaaggttttcgctttccacccctgcagcttagctgagagattgtccagaataaaattgaaatcagcatctttctgtcttgatctgaacagggggaggcctaaatacttcacatttccttctggggagccgattcccagggcctcccagatctcccgcttcaggccactgggagtatttttactaaaaaagatcgagatcttaagtttattaacttgttggccagaccaagaacagaacctctcaagacactgtcagtaacctctggcttcgctcaaattagctttgcccaccagaattaagtcatcagcaaaaaagatatgagagagaaccgggcctcctctactcagcctaatacctttaataatgttcttgtagagggcatcatgaaggagccttgataaaattttggcagtccagatgaaaaggtaaggggacagaggatccccttgccgaagaccacaggagggtttaatcgtgcccaccagccccccattgagatagattttgaaggttgttatcgtaatacactaggagacccaattgcaaaacttcataggtgtaccataacaagacaacacttgtttaatggaatcccaattcagcttatcgtaggctttcatgaggtcaacttttatggcaaaataaccttctttgcctcttttccggttgaatgaatggataatctcctgcactatcacattgttgtcttgaatattccttcccgacacaaaagcgacttaagtggggcaaataagattaggcaatataggcttgattctatttgcaatgatcttagaaatgaccttgtacataacattacaaagagaaattggcctgaaatggttggttcttttaaggttctagacttttgggataaacacaatattcgtagcattgacacctttgtgcattttgccagtcctaaagaaatctgaaaccgcttcacagaattcatcgtccactgactaccaatagttcttaaagaacaaaacagacataccatcaggaccgggggctttatgattgttcatggcaaagagagtaattagtatttttgtcttatggatttttgacactaactaattatgctcactattacataattatgctgtaatatcccagaaaataaataatatttaaatagacatattttattaaatatgtaattactttggaaacgaagtaggattatgatcttacttaggtaaattgttg

SEQ ID NO: 126738 - DNA, 579 bp, Cannabis sativa
gcgggtgcggtttggaaaattggaaaaaccgcatgtgcgggttggtttaaaaaaatggttaaaaatcgcactacccgcaccgcgaacacccctaatcgctgggtcgcaacttaaatcaaaagaaaagaagtatgggaggaatatacctaatactataaggttcttgatgcttcgattggagatgaaggcctagggaagctcatcattctggttggtgcaagttcgtatcaacaatcccttgataatttgaaggggatttttattgattactcttaaatacctcctgttaaattatttttctaagtttattttcttcttcactttgttttcttttttaatatgtcagttaagttttcttagttcagatttgcatttgatttttttcttttttcacaaattattatataagattttctttttatttacaattacaccagtctttagcatggttactcatattattcttaattattcatcttttttcttctttaattgaaaagttgattggatgataattttttagggcattttacacttttgtatatgttatattaattaattacaaaatatgtgcaaaaa

SEQ ID NO: 126739 - DNA, 1389 bp, Cannabis sativa
  modified_base (1339)..(1358): a, c, t, g, unknown or other
gggaggcaatcctaaatacccatcgtctcgagcatcggcaggggccgagacacgaaggagccaagacacatcccctatagagttctccaactgggacgacatttttcggaatgccgcagctggaataatggtgaaaactcgcttcatgagtccgttggctcgacatttgatggctaaagagagagccttgtcgaggacttgttcagtatcatcgatgatccgccgtgtgggtcgttcatacaggtcagaactggctcgagccgcctggcgtaagagaccagctagcttttccgtcttagacttaagctccgtacactcctgcttaaaagaactagcttcatctgctgatttaatcacttggtcagccaattggatcggctttgctaggatctgtttcactatgtccgccatggctaccacggcggactaaggtaatccaagttctggtgtttagagagttttttcttttcttttggggggtctcagatcaagagaagagaagagtaaagtgaattttgggggaatctttttagggtcgtgatagacggagatgatgatggaggcaggtgggtctgttgagagaggggagctggatattattattatgtgaatttgggtaatggcatttatacatacaaaagagtcatattgtagatttaggtctcttttgtgggatattgagtgctttaattgcgactgagtctggcgagcgagaacaatatgtgtgtagaaagaaaagaagggtcagggtcgacgggttttacaaggtcaaacgcgttccaacacacaaccttttataagtttatttatataactctctctctctctctctctctcgtccagttttcacatatctgatatttctccttaaataaaaaaattaatgggtaattttagtacaaataaggtttgtttcggtacctaagccactgagctaaagaaaagatgggaaaaagggtggagtataagatccaattcacgactcttactcacattagtttttctattttattttttaaaatatctcattacaattttattttctttaacttcagacttttatattatattatacaccatttttttttatatttgtatctgtatcattaaaatgatatatttttaatacattaataataataatatatgttaataaaatattatattatacattataattaattataaaaagttattaaaaccatagtaataaagctaataaaaaattagggaattatttcatatacagtttaggttgctttagtggttgatgtgtaggttgtcatattaaatttaggttactccatatatttttgtataaatgcaaaaaaaaaaaaannnnnnnnnnnnnnnnnnnnaaaaaaaaaaaattgtttttaaaaaaaaaaa

SEQ ID NO: 126740 - DNA, 1304 bp, Cannabis sativa
aaaaaccttggaatagtattacaagagaaacaggggagagaactctgttttattatactggaaattgaatgaattacaaagcaaagtaacagcatatatatagtatgctcaactaaatgtacaaccaactaaccaactgtaacagaaataactgaatctaatagactaatccttcagcccccttcaagttggagtgtaaaaatcttttacacctaacttggatacaatttccttgaagaccattggaaaggttggtttggtgaatatatctgccaggttcatcttggagggtacatggttgagcttgattatgccgttggtgagcttttcgcgaactatgtgacagtcgatttccacatgcttcgttcgttcatgaaagacagggttctcagatatatggacagcagcattgttgtcacaaaacaagttagccgggagggatatggagatctggaagtccttgagaagtgcaatgagccaagttaattcacatgttgcattcgccattgctcggtattctgctcagtagaagaacgagtaacggtttgctgtttttttgatttccacgatatgagtgagttacctaagaacacacaatatcttgaaattgattttcttgtatcggggcatgcaccccaatctgcatcagcgaatgcttgtaatgttaattttgttggagttgtagcatgaaagaagagaccttggcccagtgagtttttgagatattgcagaattctgcaggcagcgtcaaggtgtggttgtcgtggtgtttgaatgtattggctaagtttgttaacagcatagcttatgtcgggtcttgtgattgtgagataggtgagtttgcctatgagacttcgatattgtgttggattgatgagagctgtgcctgtgtctttgttgagtttaaggttgggctccattggtgtttaggcaggtatggtgcctaattggccagtttcttttaggagttgaagtgtgaaaggcctttgagaaactgaaattccttgtacacaacaagctatttccaaacccaagaagaatcttaagttgctgagatattttaatttgaatttagcatcaagagattgtttgaaggtagtgaggtcattcaaattattggtggcaacaattatatcatcaacataaacaagtaaggcaagaaaagtgttagatttgtgtctgataaagagggattggtcagattgtgagtgatgaaagccttgtgtaattaaatggttgcttaactttgcataccattgtcttgatgcttgttttaaaccatataggcttttttgtaatttgca

SEQ ID NO: 126741 - DNA, 1735 bp, Cannabis sativa
gacatcaaagtaaatgtactgtatataatagagattatatatgacaaggactgatatgaataaagatgtctttattaacatgcagtttatcataatgacctaattcatatcataacgatgatcaatagtagatcgacctaaattctgagttatcatgaactcatgttcatgttatttgtttctttaattcactcattaaagtttctcagagaatatgtttcttacaacttctattttggaaatctaataacatggatggctgggaacatgatgtacaattatggaatcctgactttcctaacagatcgaatgttagtttttcctttaattgttaattttgtggaattggaatattgtgcacaaattttgatgggatcttgaatatacttccactagtgatcaattggtctagaaacataggaaaaatggtcttttttgggttaaatatgcgtactttattgatcagaaacatagattttctcctaagaaggatttttcgaaaatgaatttggcatccagatattcaccccaaagttgccattatgctttggagagttttgaatgaagctcttcctaccaaatctagactgtcgaaactcatggaaaaaggttgtttactgtgtgggaatgtggttgaaagttgcctgcatctttttaaagactgcaattttgtaaaggcaatttagttctctagcccgtttgcttgtagaattgatgttattctcggagactccgtgatccaattttttgaagctttccttttggctttgtcaagatctaattgtaatatgtgtattacttattttggttgtttggctttagcggtttggcagcagaggaacttgctatggctgaatggaggcattacaaaccttaaggatgtatgtagtaagactattcttctcttctctgagttttttgtgttgcatggtgagagtggtctgccttcgatcaagccgagagaggatggaagattgcctagtaaggatggcatttctactgttttatgtactgatgcttcttgggtagatagtattgctagtttttctactgtcatgacaaattttgatgatggatcttgggctcatctctcagctcattctacagcaggttctgttttggaggtagaaattggggcagtgcatttgggtctatcctgggctctgtagaattcttggaatgtggttcatattttatattttctctgactctttgattttggtcaatagattttctaagttagtttgtcctccaaattggagtgttcttcatgtgtctttaggggttttagagttcattaaaaagttcaatgtgtctaagttttcttttttgtgtcgaaatttaaattcctttgcggacggtctagctagaagagctagaatttctagcctagatgctggtttgtatcatggggagggagtctcgcctgtaactcccatctttcgttattagttaatgaatctttcaaaaaaaaaaaaaaacagccacctcaaaaagtagaatgtgatggtattatctttgagcttaatcaattagtggtgtagctaaaatttatttttgaagttaagatagtagataaatatttttttttataaaaaataaaataaaatgataataacaaaacaaagagtgagacattaaggaggtaaataatttttagaaaataaaatggagaaatacacacaagagggagacaaaagaattaaagaaaaaaaaattgatagggaattggaaa

SEQ ID NO: 126742 - DNA, 541 bp, Cannabis sativa
taggatgttaatgaaacatactaggtagtaaatctagatccttgtaaaagatttccaacaccttgaataatgaatcacttagaggagcccccacacacacatacacacaagtttgaagcaaccgcgtaggtgcaatggtatagtgtgtaacatacgactgggaaccatttggagtacacccaacgcctctaaaagcctacaacaccagttgttgtacaaatggtagtagagacgtaatgcacatgtgtcagcacggcttggaacccaacaactactaccttaactacccttctgcaatgctgactttggatgtacagtcaaagtgtgtttgattccctttaggaccacttgtaacatagagccattagagctcaagtataaatagccccctctaagacttgtaaggaagttggaaaatcatattttgtaagctccatatttagaatcaatacaatgttagcttaccttcattttcttttgttatcctaaattttgtccacctgacatggcatgtgttggaaattattttaccagaatctta

SEQ ID NO: 126743 - DNA, 1619 bp, Cannabis sativa
  modified_base (96)..(99): a, c, t, g, unknown or other
cctacggaagttccacactagtgacggaaggtatttttaccgccaaaaatatgacttaggtatttatctgctactcggcataaaacttaggtattnnnnccgcaaattactctttttttaatatggcggagtatgcatcctatttgcttttaaattttataaataatttatggtcttaaatttaaatagtgagttatacatgtatattcgtgtaatttattattttaaattttatttttaacacttaaaattttcaaaattttctaaaaaccgataggatgtctaaatataatgtaaatgtaaatctgtcgtataaaagatattagtacataatttcactaggtactataaataaaaaatgatcttaaactagcggtcaaaaaatgattcttctacctaaaaagttcactataaataggctatttaatatttttatctgtctaactataatttctgtattatcacgttccttgaaggtttgtttaatacattgaattagattgtattgtattgtataatattatgtatacttatattttatatcatattgttacataatactataatactatgttacattatgattatcaaaaaattatatattttatacacataagtcaataccaaatttagtaatatataaaaatatgacataataatttgatataatattatacattgtaatacgacgtaatatagtgtagtgaacaaactttggtttattttctggttgttttgttacaattagtcatcgaactagtcatagtgttgtaaagtgattattctattaagttttgttacacggtgaacccgggccttagatcatggacctgcgtctggggttcgagattcgagattcaggatccaagttcgagtttaggtccaagtccagatcgtggtttggattggggtcgagtttattataaggaatttataattttacacaacttattagtacaagttaatatcaaatatagtattgtattaaataatactaaaacaataattcaacacaatactgtacaatgcaacacggtgtaccaaatggataaaattgccattgtatatttaattttaaaaataaaaataaatagaagttattaataatgacattctttagaaaaatagtgggaggagtattctttttctttaatcccttatttaattaagtttttaattttttaattttaataaagtaaataaatataaataaatgactactttactattaatttctattgtttattaataaacatcataaagttacaacaaataaagatataaatgtggcacaaaaactaaacaataaaaatttaaaacaactctacataccataacttgaaccaaactttgtcccaccttataatttttgagactgaaagtgtcacaatcaatatcatcttatacaaaataagcataaataatatgatagattgaatatcaaatgttagacaataatatcaaattttcatattggaaattaatacctttctaaataataatatagtgagcaatctagaatatatgtgtaaaaatgctacaattaagggcccatttggcacagcttttggaaaagctaaaagttgcttttcaaaaaaactgtgacaaaaaggtgtttg

SEQ ID NO: 126744 - DNA, 1137 bp, Cannabis sativa
atttggggcgtaatagcggcggagtggtccgtcgctaatagagtaaaatgttgtagtgtttctacttttttttatagaaaaatgtaatttttacgttgtttccccatagcgacaacatcaaaataatattattttgaaacaacaaaaaaacgacactttgtgtagttgtaaaaacaaactacgttgcttttccataacaacgataaaataatattttttaaaaaaacaacgaaaaaacaatactccatatttttgcaaaaaaaactgtaataacgtaaattttttgttatttttatatatttatgaaataatcccacttaattttagattacttaatcaagttttaggatttagttttgttgcctagaatttcttccaaaatacgtaacagtttaaaagcaagccatatggcaacgggacccgcattacaagacacgccaccttaattaatcctgagtctattatttcaaaggaataaatgatagattagtcatctccatgagggtctacctggagggtttaaaccatcatttcctgatttcacgagaccccatacatcaatccaagactgcataaaagagtcgtcaagtcataaaaaagggataagtcaaatcctaccaaatacctatagacagcctaaatacatcccaaaataggcaattataccctaagatcagatttagaaaattgtgcaaagcatggtgcatacaaacacgacaatattggccttttatcaccattatgagccaataaataccccaataatgtatagaaaaggggatcaatcaaaaaaagctctgtaataaatactctgattgatacagtgactcgtggactaaggcacattaatgccccaaccacgtaaaaatcttctcttctaacattcattaattacttcatacagctctaattattggttgctgaaaatctcgatcaataatttagtgctttcattgagagatttaggaagcttaccaaaagagaaagtcgtagatagcctcacaatataatggtgaagataagaaatacttcacgtctacaataaacatatgacccaaaggctcaagaagaggaagaggcaaattctaaggtgaggacgacttattgttgggttgtatgccctaaataaaactcatt

SEQ ID NO: 126745 - DNA, 932 bp, Cannabis sativa
  modified_base (27)..(41): a, c, t, g, unknown or other
atgagtgattttaatcactttgtcaannnnnnnnnnnnnnnaaaaaataataataataataaagtcaatttgtgatatgcttatttttaatacgttgttactttttttatcttgtgatttaaattatttatgaatatatgatgtagaaattcgtaaatattgtaggaatcttttcaaatcaaaataacttatcgtgtaaccaaatgatatactttgtcaaattataaattgctgaaacaagcgagtaacacgagacaaaactcctctcaaaaattttgacaataaaattataacgttctccaacagcacaccagaagagttagagtttcggcttataacattaaaaaactacctctcaaaataaaaattaaaaaataaattatattagaatagctattaaagaaaataatacttcaataaaatactaaattcttaactctagcacttgattcaatcaagtaaaacataaactaatcaaattaacttaaaataactagctgaaagtgttactctttcgctagtagcaccgactatcacccaactaattctaacccgctaaatttaataatcatactatattaacccctaaaataagataatttcctaaattataattaacgattatatcatttcccaaaaataagcaattattgtctaaattttttttaatatctcacattttgaaaaatactaatttaatttgaaaactcaacctaatacaaattaaagtttgaaacggccataaaaacatgaagatgtatttcaacgagttaggagcgttgtttgaagatgttataactttattatctaaattttcaggacaattttgtcctatgtggctcgctctgagaatttagcagcccatggcttggcaaagcatggtctgcggttagacgatgagctatccgggttcgaggaggttccagcgccgg

SEQ ID NO: 126746 - DNA, 916 bp, Cannabis sativa
gtgtcctggaccaggatccgaacccggactcgggacttgggatccaagacccgacccgtggtgttggggtcgagtttattgaaaatatattataattttacacaatctattaatacaaagtcaataccaaacataatattgtaatggaatcaaaattctcgttgatttattttaaaagtggtgtaataggactacaatataatgatgattacatcatatatagaattctcattgcaccaaaaaaatttgtgtaaggattatattacaaatggttaaataagataaaactaaaataattttaatacccttttatttataaatataaaaattaaagtaggaacaattttattaatttatcacttattttaatattccttacaacatcaaaccaaacatcctaatcaatttatattactattcttatttcattataccattatcattttattctaccaaaccaaacatcaattaatttgattttgtttttttttttttgaaaaatttacaaatataaaaaacaaaaataaatacataaattatttgtgcacttatataaaagaatgtaaatggattgggccacatgaatattttccttcaaacaatgaatcttgagaatctttgtggaataaacaagcacatgaccgaataattttgtatttttttaagaaaaaaatctctccccaattatttcactgatatttttaattattataattaaatccccaaattattaatatatattttaacatagaggaaccccatgcttatctgcatcttttgttatttttggtaaaataataatcattaatgattaccacatatctctttttttaaatcgttttgttttttcatgataggttgttatatagaatacatgaactaatgatctgtcaagtactctttttttttttttttt

SEQ ID NO: 126747 - DNA, 560 bp, Cannabis sativa
atatacttttatattatataatccgattatatatatattcatatacttaatatatttttacatatacatatatacatatttatattcatattcatattcatatacacgtttatatatattatatactttcatttacggtacatatatttttcggtatacatttttatattatactcatttattcattgatttcattccatataattaatttattatatatttttatgatatttttatatagtttaatatatatatacgattatatatgtatatatattcacgtgtttacatatttttcgggatggtgggttcaaaaaaatttgtttaattactttggatctttgatgcgtttttcaacattaatagccttatcatttatgatgttatacatttaatatatgcatgaaaaggttttgaaaaccatcaaattctacagaaattactgaagaatccattaggacctgagaacactttttgaaattaaagtctacattttacgtgtttttgatgcttgaaatcaatatggatctcttaactttttttcatttagatcattttga

SEQ ID NO: 126748 - DNA, 1233 bp, Cannabis sativa
aaagatgcttgtaactcaacaatattgtcatttagggaacggttgtatatatgttaagagttatgagaataccaaggatcttcctcttcataatttcacgcataaaattacagccgtactcacacttccaaatataattatcatatttattggaccaaacattccattttttggcattcgcattcttgtacaaataataatattggaaagctttctccccgttactgaattctggttcgataaaataaatagtacgttcaatagcactaggatttccattgttgaatgaagctatatataatggatacaaatattcaaatcggcgttgatcttcttcattcattttttttaattagtataaagttaataaagttaacctttaaagtcaatttttcttagacagaataatctcaatttttaccactttcaccattacacaattgttctttacagcttggaagtgaagtttgaggaagaagacaaggaaatctacttgtagaattccttgccagctcaatatgaccagttcaaagacactatcatccactcgaagggcacattaattcttgaagaaattataggtgccatttactcgaaggaactgtccctaaaacattgaggaaaggtttcaagaagcaacttagaggctatgtactcgagaggaagagatcaacacaagggacatcatccacccaaaggaagaggaagaagtcagaacgtcaagaaaagaggaaggtctcaatctaggggtcataaaaaaagtaaatgatatcactgtgacaaaataggtcacatcaaaaaagattgacatgaactgaaggaaaagccaagagggcaaagaattgacaatcaaaacaataaagaacaagaaacaacaaccaattatggagagcattgtgaagatggtgaggtgttcatgggaaagtctgcaacagaagcattggtcacaaatgaagtgccttagaagaatgagtggatcattgattcaggatgtaacttcaacatggaaaacaataaaacttggataagagacctgagagtccaaaaatatggccaagtgatatttcgcaatggctaaattaacttgtccaattgaaggaattacaaatgccatgttcagaatgaatatgatgggcaatgcaagaaacaacgtgccagaacttgcaagaaatttgatctgcgacggaaagtattgagttagctcattcccttagccaactttgccacatgttc

SEQ ID NO: 126749 - DNA, 2697 bp, Cannabis sativa
  modified_base (2626)..(2626): a, c, t, g, unknown or other
tttttttttttatctttttaagtttaaactctaaatcttttagtatcttttaggtaactttgttagcctatataaacacatcatctttagtgtttctaatacgttttctagagttcaaaactcaaaaactcttaattagcaactacttagtatttttcatcttcttttttttttttttttttcttatctttctctaattttgtttatgttattattttttttataatgaatgcaatggttatgaacatgattttcatgcactaattttcttatgtaagagttaatgaaatgactttaatttctattttactttgctatgatgttttattgatttcttcctctttattttaatatgtatgatttatgcttaatgcttgtaaatacttgatcactatttacatgtttttatgatttcaattcgagattcgagagatgagagttgaatatgttatagttatataaacataggttacatattggatgggagtacccgtatgacatgtgtggtaaatagaatttccaatcttaatgccttttacatgttaaaatttatcatggattagtaaaaaatttgcatatagattgagctcttatatattgaaaagaataggatttactttacttaactcgctattaaaattggaagaaggaattgtagaacggattaataaaatagattgacaagttgatgaaattaataccctaggttctatatattaatattcataatcattgtttgcctactttaattttatagctaaattatttttctagttttaataatgttctctcatttttcgtttatcaaatagaaagtagaaaaataattattgatacttggtagtagtctttgtgggacgatactcgtgcttactcactattattacttgaaacgagacatatacttgtgttataaattttacctataaattttttagtgccgtcgacgggcacaaaattaaccaatataaaattaattatttttctttctactttgatttattctaacacattctaatttcgtttgtttcttattttcttaattttttaggattaataataaatttatgcgacaacaaggtttggagtcactagtgcctgtgtgttaacctagaaactttccctagtgacgtggacatagatgtttgacacgtgaaaataaagataaaatcttggagttgagtagtcctgagtcatagcagtcaacctgggaggggtccctagccctgcgcccaagtttactctgggaactccataatggaagtttagattttgataagtcatttccatctcactatctttaagtattatgtaccatgaagacatggagcaaccaagtacaggccccgagagctgaaactacatgaaccagcacctcgaaagtcaacctaggcacctagggtttcacctagcacccaagttgacaaccccaactagggcttcagtttctaggaccgtcttagtgcaaatgggtcaaacattacattagaatatgaactagacataccacaaatatatttgagatatcataatcaaattcggagaactttcaattttgagcacctggacacccggtgcccgggcaccccaacgcccaagttaacaatctgtcaatctagagataaaaaatctaaatcatgcatattctttgtcttgataaaaaaggaggaaacaattacttttgaggaagaaacaacccaaccagggtgccaaaacaagggcccagcgcccaggttgataaatggggatggcccagcacccaggttgacattttgtcaacctgggccaattctaaggagtctttccaaaaaatctactaggcatattctccgttttcaccaaagattaagattcaactattttcgggaaccaaacagaacttccaggaggcttgaaactggacccaccactaggttaacatattgtcaacttgggctatttctaatcaactttccaaaaaagtgtccaaggtattttctctgtcattagaaataacgaagatacaagtaaattcagggagaaaaccacaatcttaagggcatcaaaactgagcatggcgcccaggttgacctggtgcttggcccaacgtcaaagttgacaatcaacttagttcgctagttttgatcactcaaatgccaattttgcttcaagcgttctttctaaaattgtcaaaacaaggtaggagaccgcgtcctcaagtcctaaaaccttggaagtatcaaaaggacatccatgaagctctagaaagagaacccatggcccaggttgacatgtgacctagtgcactgggtttttcttattcgattctgattttgtctcgatcgatcgtctaatttttcatagtaactgagagctatgaagtcagataagtcaaatttataactttatattttcacttttttaataaagtgacttactcccaaattgggtagtttcgagtctctcgatttcacgaaagaacaacatctccaaaaattggtaaacgacttcaccaaaacacataaaatagctaagtgatgtcaaaatatcgcttagcctttaaaaaaatacatccccaatatatttttctactcacccagtgtccatgttgatgtcatatgttaactgttgagttttgtgccctaantaaaactcatttcaatgtaatcagatttactaattaataaaagatcaaaaattattttatgttgcatggtt

SEQ ID NO: 126750 - DNA, 984 bp, Cannabis sativa
tcacaacgtatgaatgacaatttataattattcacaacttttttatttttagtcacaagttttattgtaactaaaagtaagatttttagtagtaaaatataatttctgccgtgtggcagtaaaattgaaaagttttttaaaaaatctaatatttttttataaaaatcccttatttataggtttttaagctatccatttctattttcacggtcgaatttcttataattgattgaacattttctaattttaaataaatgtttaattagctttgtcattttatttttaccatacttaaataaaatagttatttcataaaataaaaaagtaaaatcaatatagggaattctaaaaaaatatctttttttgttatgttttatttgtaatttttggacgtaaagtttttatttataaaaatactcttttaaagttttaaaattaaaaaatatatttctcttaactaaaagtaaaaaacaacaagaaatcaacctcataacaactctaaatcaaccgtaaataaactataaaacaatctaatgacaactatatacaactataaaataaccaaaaaatgatttactattttttactgaagttgtatttatgtaataaaaaattcaaatggtaaaaatgaaaaaaaaaattcggttaaagtattttttttttattttttttgtttttaatttttggtctattttgtaaaattttcatcaatatattgaacatacaaaaatattggacaaatataatttatccattagaagaaaaaaaaaaggtaaaattgcaaaacacaggctatgcatatgatacagggacaaggcccataaatctattcttcttgtccggtcactcaactcaatcatatagtgtagtttagagaactcttgtactcccacctaggggtgggcattatccaatccaatccaattgaaccgaaccgatccaatctaatccaattacaaaaagttggatatccaattacaattg

SEQ ID NO: 126751 - DNA, 1334 bp, Cannabis sativa
gatatcttaaatagctataacgtgcatgaatatgaaaaatattagactaatttttttttttctgaatatcaaaacaagtatgcatcagtacatctcttttaaatgagtgtattacaaaatcaccttatatattttttattttttttttaaataaaaggtaggagtaattatttggggccttgacataaattttgcatataaagtgctaaacaattaaatttacaagatttttggaggagggtgccaaaaaaaaaaaacctttctagcaatgcatgtttatgagctgttaaactctattacattcatatatttgacaattctagcatgatctgtgtatctgagtgtatgcccttccagttgaaaaagattctctttcaataaattataattattagtagtattagaatgagatatttcacaatgaagaagattttttcttatttgttattttgtagaataatttagaaaggattttcaattattacaagtgtacactataccgatcacacatcttatatatttatttaagtcacgtttaaaataaaaataaaaattaatgaacaatataaggcatggctcaactcaaccgaaaacaaatttctgtaataaaaaagtgtaaaagcacagtgagtgaggccaggtccactttcattaaggtatggacccaatatcttcaaattgcctaaatttcattattttattttaaaactaataataaataatataataaaaacggacgaattagtggagcttatatataaatgcaattacctgtaaaattaattgagcaataacttggcaaataatagtttttaaaaataatttagtcaaatttcaaaaaaaaaaaaaaaactctgaaatagtgatttataaatcatatagccattaataaattgattcattttctaaaataaataataaaaaaattttgttgtttttcttatattatatatcttatacataactttgacttgaatcatcaatcaaataataaataacacttccatcaaattaagatgctgatagctaaactatccattagaatatagtttcttctttcttcacaattaaatatttatatacattatgttatttagggcatgtttgaatgtgattttattattgctaatttgtgttttgtgtagttattaagttagtaattatattattaaataattacataatattttaaaacataaaaatatgtttttggatgtaaagtagaaaagtatatgtgattcttatttcaataaaacctatttgagaatataaatatatatatatatatatgtggctatgtttttaatgggtattacccatgtatgtgtatttta

SEQ ID NO: 126752 - DNA, 1346 bp, Cannabis sativa
gctagttagggtgttacaacaaagatgtaagaagtttatactcaactataaaattccaaaaggtatacaatccaagaagcaacgttttgatgagctatactatgaggctatcaagttgagtgaagaatggtcaatgtccttgaagagttttgacattgcatattatgctttgaagaatgaactaaaaaatgtgttatggagaatcatttactaaagaactccataaatcttaatattgagtctcatgatcttaacaaaaaaaataatattgatagcaatgtcatgtgtaacatttcactaaattatccacaagtttcaaagactaaaggagcttcaaaaagaatgaaatgtagaattgaaaaaaaaatccaaaaaaggcacatcttaaaaggtattttaagtgttctgataaatataagatttttattattttacattttctcaaattaatatgtgagatttttatattgaagacattgttatttcagaaagaagtcggatgttcttctcaaaagatggtttattcatttataaaataattattattcttatatattatttttatttaaagctttctttatttgtaaaaatatcatataattgtaatgtaaacaagtagaaaacaatactattaccgccttaagattaaaatttacatagtaaataattttaatcaaaataattcatttgagtcttttctttaattaagaaataaattgtagagaaatatatatacatatatataaattgtattttttgtgcttgtagggagatgataacattttaatatttttgtctaatctacattcttaacatttcaatcaatgatgaagacaaatgataatagaaaaaggtaaactataataatttgattttaatatatacatatatatatttatatatatattagaggcttataatgcaggacagtaaaaaaaaaaaaaagactccatttatagggatttaaaataaaataagtctcattatattttatggatataaaagagggtttatggccactacaatgtagtatttttctaatgtaaaaaaatactcatttttctttaaaaaaaaaataataaataaataaaaacacttatttcatattaatgctctgtgcaaccctcttaaatactctatgttttgagtatcttgtgaacgtttttgaagagaatttagggaggacaatttcatagcttcatcaggtggctattataggtaatgatttgtatttgttttaattttttgcaataaaaatttaaagaaatcttgtttgtgcagtttaaactgtaacgtccccgcttcaagcctacattgggcctttacacccatagaataatggctct

SEQ ID NO: 126753 - DNA, 2017 bp, Cannabis sativa
  modified_base (1985)..(1991): a, c, t, g, unknown or other
ttgccaataataattaaataattatgtaaattaagcattaagtgaccaacatttagtcttaaaaactaattcataatttttttaatttagagtttatattcaataaatcatatatcaaaaacaaattatattcaaagctatatttaaataattttaaacacacttattcttaatttgtcaaaaaaaattactattacgttaagcgagatccaattgtccaaatcaacattaaccatctataaagataagaaaaaaagcagttaagcaattatctagtattatcccacatgcttttaaatgaaacgtgagaattgtccatatttcatgaacaattacatttcaaatcgatcccaaatgtaaataactgcgaacttatattcctataaatagggacagattccacagaaaaagggacggagattgagagagaaaaagatcatcaattgtatcttgtatcaattatactaaaaaatatcataataaaatagactcgtggaatatgtagaattaactacaaaaccacgtaaagtccctagagttatttaaatagtttattactatttctatgatatatttattaggtaaaggcttattatttttagctaacgaaaatttgtgttaacaatagcttacatcacttcgtgatcatagtagcaacaaattactatttctctaatcattcttaaactatcaaattttctattgaaccacacaaatttctttattggactcaatactcaatactttgctaatcatagtttcgcactgcttatatttctcaaataacaagaataataacaagcattcatttacgtattaatcaatcgtatagctctaccatgccatctcaattaatacatactcataacatactataatcaacttaactcatgcttattctacatatatgcttataatgatatcagctaataatcaatcatataattggtacgtaaataatacttactattatgagtcaagcttgtctttaccgtgaatgtacatatccagccagtcttcaggacctttaaaactgtggctgctctgataccatgttgtaacgccctaacccttagagacactacgtgtatgcatatataaactagtttatgataataaactagtagtttagataaaatgtgatttaataaaaattttattaactaatataaattaaaaaaatcatggcaccgtccctttttacgattgagggtatcctatttgaaatattacaagacatgccattacaatattatcataaaatatatttaaaaattcaaaacatttgaaatacaatatctgacaactcagcaccacttgccaaataagctaaaatgtacatttgctagagaagatacttgactcgtggttgttcaaatatttctacttattacatgcaatacataacacatgtgagttacaaggactcagtaagaaaaataataacaataattctataattcaccacacaatatcagtaagcaaactcacatcatcagaattaaataatcatacattaatcatatatttaaattttggtcagtacaaatattcaaacataatgtatgtcaatataaagatatacaattatacaaaataaactagtctaatgataataactatagtcattatttcagaaagtaatcattctcaccactttcttagcaaagtaattgtaatacctcacgtggcatactaatgtacttgccattatttaataaaatcaccctgatactcaaaacttatattcaaatgttactactattgtcaaatcagacaaccaaaaaatcattctccagtattcataaatctcattgcctaataaagcaagtcgatgctctaacctggcatcatatatcatattgcctaataaggcaggtcaatgccctaacttggcatcacatatcatactgcctaataaggcaagttgatgccctaacccagaatccatataactatgtcattgttgttgggttttatgcccnnnnnnnaactccatttcaatgtaatctatttt

SEQ ID NO: 126754 - DNA, 533 bp, Cannabis sativa
aaatatttactaaattttagaaagaaagaaagtataaggcccacacaacaaattagggacaaaacaaatagaagtgttctcccccatttttatagggaatatatttctctttcctaacttattttattttaattttaattttattaataaaaaataaaaaagtcaaatatgccctttaaaatctataaacaaaaaatatttacatattttaacaattgcagttttatcaaattaaaacattatgattacctttcctagttatgtgaataaaataatataattttaattatttttttcgaacggtttagtaaatagcataataaaatattattttcgattattttttattttcatatttgtttccttaggatattttatatttatagttttcggacactttttattacataatatacaaattcactatttaaccaatttttataattatttcattgtaattaattatcgttaatatttcgtacttttgtgtgtatttgcgtgggtttttctttttttttttcttgggaaaaaaa

SEQ ID NO: 126755 - DNA, 1215 bp, Cannabis sativa
agaggagaccttcatcatctcctcagctttgcagtggaggaggtcttcatcatatcctaggctttacaacagaggaggccttcaccatctccttggctaaataacaaaggaggtcttcttgacaattaacaacaaaaattgctggttgttctttggtcaattgaggatgtgaccaacttccaaatttatatacccaagatggggttgatgtcttccccatcttaagtgcaccttagagtgattgtaggtgcagtctccactttatccttggtcttaaccttagaggtcttcgttgtcccttctactatattcataatggaagatgccttctttgtccgcttggctgtcttgacaatgaaggaggtcttctacttcccctcggttgctagaacagcagaggaggtcttcctcatcccctcgacagttagcacaatcaaggaggtcttcttggtgaatatcaacgatgtgttataatatttgtatgctactctttggtttccaaggagacggtcgatagtagctgctgttgagaacttgacaaacaaatggtagatgagtgagatggcttagaggtcactaggtgttgaccttccaagaagacttggtgtcgatcactatgaaggtattcatagtaatgtttgccacggtgcagttttgattgtgagtggtaacctgattttaccatagggagcgacgttggctcccctaaaaccttacatgagctgcttgcatggctccggatctcttaaggagtgacccactcttttcagggtctgttttgattagaatatttggtgatgcttgatcattaaccatcaccattatgtttgaaattttattgatactgtctgagcttgactgctcttgcccccagtgttgatctcttagtaactgaggtaaaaaacattgaagtcttgtatgttgaagctatctgatgtgagtgagatagaacattgctgaggtgtagtgggttaacttcttgtgtgcttggtgctcaagcataagttcactttatgatcataagttagatgaatcactgtcgaagaaaagtgcaaaaaaaactcgacagatcatctgtatgggggcaaaatcacaagttgttgaagaactcgatttgatgatttcaactcatagacccttgttaaaggtttaataaaaaaactccaaaagaagaacaataagaaaagatagattggattaaactcgtgctaagta

SEQ ID NO: 126756 - DNA, 719 bp, Cannabis sativa
aaaatatccaacgttgttctaaagttgatctcggttaactacttgcatttcattagaaattagggatatgtataaaaacttagaactcaattgatagttagaccactaaaacaaaaagtacaaatgaacaaaatattccaagttatggaatttatacaaattctcttgaagagaaatgggcgatgggaagaaagaaaaaattatgtcaattataaagctagtggagaattcataccaaaagaattcaagtatgaatagctcgtacatatttacctctcttcattacaaccctacgaatccagtatcaagcaaaagatggaatacctctaattaaaatacgatccgatcctcttttttttacttgcaactgaagatcaaagaaactgacttgaccacatatccattacacgtcatcacacataacaacaacacaacaaccaatatattaccaatgttcacatcaaaaacatcattagatcaacaagatggttgaatacttgagaacaacacaccaacaactgaatgatacacactggaacaacaatcagaggaagaagaagaaactgaaagagaaaaaggcgacaacaaccacttcgacatagttgactatgcaaatcttgttactgaggtaatagtagaaattgtaaaaaacaataataaaaaaatagatccaaagatttacatcaacaacacaaagctcataacagataaattttacc

SEQ ID NO: 126757 - DNA, 1336 bp, Cannabis sativa
tagcgcccccactcaattatactaccatgttcgtaagatgtaagtattgggctcatccaaatggtcagctttcacaaacaattgaaagaacacaaataacacaattaagctagaacctaaccatctcaggattaagatctattgatgttatccctgttcccggatagcttctacacagaagtggcaaaaagcgtgccacgtcaaatcgtatgggaatatcccgaattgctctttcttttaagatagaatcagggaaggcattagagtatccaagagagtatatccgttgtgaaggaggaatcgatccttgaagttgtaacctaatactttcggtattcggaggcatattcgaagcctaagactttagggagcccttagaaattgattattttagcaggtcttgagttcacttcatggaagctccctgcgacctaacccaaaaatacactcgacggttacagctcgcctgacaccacgtcagatcttatctcctacatcagaccataggtgtgtgtgtacatgcctttgtagtgcttattgtccaatgacttgtctggaatattaattttaaaggagaaacctttgaacgaaatgtgtccatgtcctcacatgataacctgtgtgaattgagcattgcacgattgaagagctacctaccaaatcaacaattagatagtcttgtagtatttcacagccccatttgcgtgctgagtaaggaaccctagtggggtaagaatgggcctataaatatctccatttcttatgtacaaagagagaacaattttaacttacaaaagccttgctgaaattcctagagagctttctacttatagagaaataaaaggaatacagagattgccattgtaaacacttgtaatactcaaacatttgccaaagaaggctaatactactgactcgttgactaaggatcattaacgcctgaaccacgtaaacaattttttttatctattatttagtattttccattttcttaagctcttattaatccgtttccaaaaatcttggtaaacattttaatgatttcattgagaggtgaggaaagctagttaattgttgtctcatttcaactatggtgaacatgcaaaagaatactagtaagaaagcgacactagacacagtcatggaggaggccgactcccacacctctgacctctagacgggtggtgttagagaagaagaaggtatggcccatgccaagacccgagaggaggatactgagaccgtacctaagctctgccacggctagggccgcgaccacggggattctagggattttgatttccctgaccgcctccggtctcaaccatgttaccct

SEQ ID NO: 126758 - DNA, 1126 bp, Cannabis sativa
  modified_base (1079)..(1098): a, c, t, g, unknown or other
aatggggttgcttcattttttattgtattttgtcttttttttttttattacaagttttttattataaattttacttttatataatcaaagctatttttctgatgaagaaactagtttcttaataaaaaaaaatcagtttcttgatgaaaaaatcaatttccagatgaatgatctttggtgattgattttgatcgcatgagaaactaagcaatttgaatcgtaagagagaaaaaaaatcttgtgtggctggagagagtagtttgatttttgtgttttttttagcacctctgttttactgtaatagggttacttcatttttttattgtgttttgtcttttttttattataacttgtcatattatcattttatagggtcaaaactagatttataggtttttttattataaattttacttttatataataaaaatcagtttcttaatgaagaaactagtttcttaatgaaaaaaccagtttcttgatgaagaaactaatttattgatgaaaaaatcagtttcttgatgaaggatctttggtcattggttttgatcgcataagaaaataaatattttgaatcgtaagagagagaaaaaaatcttgtgtggctggagagagcgtgattctattttgaaaatttgattatctttttaatatttatttatggcattttctttttaaatactcatatattattatttagttagtttggttatgaaatgctatatttagttgcattaactttacataccatatataaaaacttttatttatttttccatatttttgtaaatatccctttataaaaataaaaacttgtagataggaagggatgaaggcagaagttaaggccaaaaaataaaataataaattaaaaggggccaaatacataattttttagaaaaataaaatttttagcatgaaactgctttaaaaaaaattccaaaattttgggaggggtcatggcccccttccaactaaagtagatgagataattacataaaatactaatttttgtaaaatttttacacttttaagtttaaagttatttttgtagatttttacagtattttataaaaatnnnnnnnnnnnnnnnnnnnnaaaaaaaaaccaaaaaaaaaataaaaaa

SEQ ID NO: 126759 - DNA, 2025 bp, Cannabis sativa
  modified_base (1965)..(1970): a, c, t, g, unknown or other
tatgtgtttatttcatggttttagaattcatattaggatgttaatgaaacatactttgtagtaaatctagatcctggtaaaagatttccaacacacccttgagcctagcttttgagggaagaactcaagcgtattcctctcgaggagattttggtttagtgtgttccccactcttgttgcacgttagattgagtggtttgggaaaatggaagtaggatgttgtagccgtcagcaatcggatatatcataccccccaaatgagctgagaattctggggctcaaattctcgatcatttgctttgactctgacttgtgtctctttccaattttcgaagagtagtgtcgagcatacccttgcctcataatcttcctctctaagaagtgtgcagttaccttctaacttttaggaaggaaaaccaggagctctgggggagaactcaattgtacgtttcagcgtcccttttcatggtgaaaaccctataagggagattttaggctatttatgttgtggggcccgttagttttcctgtggggaaagctaggcctgcgcccttagaccattgtccttgcgtaggggtttgtttcagcaaaaatcatgttaaatcttatggcaacaagcttttggctttcactaggaaaggcagaaagtgcgcacgagctgggacaatgaatttgcttgtaaacaccaaagggtgaagtactgttgggctcacaggagtcatgcttgacttttgtaaaggcaagctttggatctagggaggaaggctaaagctgtctgcaagttcaagcctagactctacctgagaaggtcacaaggggaaggataggctttaagcagtcctttcaatctggaaaggagggttgaagacgtatcgtacccccaatgatctttcctgcacaaacatacatgcgagtcatgttgaatttttatataacaagctttggcttccgggaagaaaggctaaagctgtataaaaatttaagcttagactttgcttgaaaagatcaaagggaaaagcatcacgaggggtaggatacacttcaagcaatccttcaatccaggaaggagggttgaagacgtatcgtacccccaatgatctttcctgcacaaacgtactggtgagagtcatgttgaattttcatgtaacaaggttttgcttccgagaaggaaggctgaagttgtataaaaatttaagcttagactttgcttgaaaagatcaatgggaaaagcatcacgaggggcaggatagacttcaagtaatccttctaatctgggaaggagggttgaagacgtatcgtacccccagtgatcttttctgcacaaacgtgcttgcaggagtcatgttgaatttttatctaacaagctttggcttctgggaaggaaggctgaagttgtataaaaattcaagcttaaactttgcttgaaaagatcaatgggaaaagcatcacgagggccaagatagacttcatgcaatcctttcaatctgggaaacagggttgaagatgtatcgtacccccagtgatctttctggcacaaacatccatgcaagagtcatgttgaatttttatgtaacaagcttcgacttcttggaaggaaggctgaagttgcataaaagttcaagcttagactttgcttcaagagatcaaatggaaaagcatcacgagggataggatagacttcaaacagtccttccgatttgggaaggagggttaaagatgcatcgtacccctagtgatctttcgtgcataaacgtgcatgcgaaagtcatgttgaatttttatgtaacaatcttcggcttccaggaaggaaggctgaagttctataaaattcaagcttcacttgaaaagaatcacgaggggtaggatagacttcaagcaatcctttcaattcgggaaggagggttgaaaacgtttcgtaccctcaatgttatttcttgcacaaacgtgcatgcgagagtcatgttnnnnnnttatgtaacaagcttcggctttcgagaaggaaggctgaagttgtataaaaattca

SEQ ID NO: 126760 - DNA, 638 bp, Cannabis sativa
tgaaattttgttaatttgttgttatgtgtatgttattttttgttgttattttgatgttacttttatgttgttttcgtgttattttttaaaaacccgttaaaatataaaaaaaacattctttaaacgtaaaaatataagtattttacaaaaaatggtgcttttataattattcctaataagtaagcatcatttcacataactaaagtagacaataggcccaagtttcatataatgggcaaataatggagaaggtccggcccaatttggcgttacacactgcgcttcacaaaaaccacttgatttgattcagtcaaagtcactcttgctaacttgcgattcgtactaactacgggtcgcactttttgccacgacacaaaatcagtacgagttcgtaaaatacgagtacaactaagcacgaaaaaataaagtttagacacgacacgatactatatattgacacgacacgacaaaaaaaatatatccttaagcacgatacgtacacgagaagtataaaagataagacacgacatgaatacctactacaaaaaaattttacttttagtcacaataaaatttataactaaaagtaaaatagttgtgactaattacaaatcaccatttttatgttgtgactaaaa

SEQ ID NO: 126761 - DNA, 703 bp, Cannabis sativa
  modified_base (58)..(60): a, c, t, g, unknown or other
accatatcaatatatgccagccgaaatatacaaagaataataaaatatttttgtcaannnaatatgccaaaaatggaattaacgcatagaaagtgtagagacaaagtttaattgtaagcctagaaattatagtaatatggaagcacatgaagaattgcttcccattttccaaatgacatgtcaacctttgagaaaagcatatactaaaagtttaaacaatgatactaaagctaagacacatcaatatgtgctatttaattgtaatattgtagattcattcattgagtaagtatatcatttgttatatctcaaataataaaatctcattgctgatatcatatataattttatgtataatattaatttattttgtggggaacatcgtaatattattgcacaataaaattttcgtcaaagaacgatgactataaatcggattcatagccaatcattttcatcatggttttccaaaaaggtaagttgtattttaatatgattcataatttttttaacttaataaattcatacacgcattaaatgtagttattactatttgttaaatcaggtagaagaattatatgataatgggaataatcgagtttttgataatttacattgtttggctaaaggaccaaacaaagttttcattaaattcaaaagatatttaataaatagttttagattccacaaaaaaaaaaaaaaa

SEQ ID NO: 126762 - DNA, 1192 bp, Cannabis sativa
aaaaaaaagtttgtaatttaatatttaatgaaggttgattgtgtaatttacatagtaaaagcctaattctcacttttatagaggttataaatattattattccacgtgatcttcaacccaatttatatctatgatattaatacaataaatattattttatgggtgaatttatttattttaaataattactacattaaaacttaattttagtaacaacttataattaaaattgaagttataacaaattataaattatttttcttataactaaaaaattcgtagttaaaggtattagtcacaaaaataacaatttattatgattaaattatatatttttaatcacaatatttcttgtgactaaaactaaattagtgacaacttgtatacaaatattatgttttaatcataaataattttttattgagattaatttaaaagtcacatttagtcacaaaatttttttgttgtgactaaaaaatgtcactaaagataacttttttttttttggtagtgaatataattagaaattttttcgggtatatactaaaaagacaaaagtattatacaatattagaccagctctctataaacttttatacagcctaacaataaaaaattactagaataccttttgctctaataccattcagctgcacgaaccaccatcttcaacaacggtaacttcaagcgatcaaaccagcacgccaaccagacgaagaatcaccataaattttggtgacttaacttgagaagaagatcacaatcaatccaaccacataaaaattttggatttatggagaatcatacaaaaaaaattagtttgaagcttaaattcaaccctaaattacgattttaaatcccataaaattaatcctcctattatcaattttcaaattcataaaatatagatctctaataaatagatatgagtgtcccgataaatcaaaatcaggtatgatctaaaaaaaatatataatataatactatatacaaatatttatctcgttgcattgacattattttccagatttctaatgtgactttgttcatatcaaatcacgaatagtataataaattcgcatacacctaccactacaagaaatgtcacttttaccagtacaggtcgctactgcgctggcaaaaatattaaagttttaccaacacacaattgcagtggctaaaatctaacttt

SEQ ID NO: 126763 - DNA, 3563 bp, Cannabis sativa
  modified_base (1501)..(1507): a, c, t, g, unknown or other
aataaataaataaaaataaaagatataataataagtaaatgttttacatatcacttaaaacaaaaaagcaattacaatttatttgaaagaaaaaagcaactgcactttaaaaaaacattaattagtgagcctaattaacgccaaccaattcaaaagaaaaacaaaaccctattttctctctttcacctcttacctctcacctctttgtttctgctcacagccgcacagctcattcaaaaaaaaaaaaaaagaaaaatgttagatccagccaatgatttactccggccaccttcttccccaaccacgattgcaagggaacgtcagagagatcaacgttgacgctcaagatgagcttagtgttcgctgctctctcggtcgactacgacgaagagattgacccaggcgatggctgggtctcttccgcaagcgacagcttcaacgaagctggaatccgagatcttcgccccgaaaatattcaggtacccacttcctcttcttcatcttcttttcttgatttctgctcatcttttatttttttcttcgcatctttccttttatttctgtatatagatctctggtatatggtgttccctctcgttctctcttgttgaatttatctacagacgatggtggatcttgggatctgtatcgattgggctcaaaaatgatcgggcttgagtctgttctacggttgcagcttgttagggacagatcggaacttgaatcattgtgactaagttattttttctgatttttttgttcaaatgctcatacccataattatgggtttacattgttcttgtatttaattttaaactattatatattctttttactgctgaaaatatattactgtaatttattttagaattctatttttctttgttcatttgtataaaatcatctgagtattgtatgtaagtaaatagaattttgattagttattatagcattaatatccataaaaattactttaagttttatttaaaaaaaatggtatcatttttttttaaatgaaatctggtatcaatccaattttacaataaaatttaattataatatataaaattagcaattatatatatttatttactttttctaaaaaaaataatatattacattaataatataaattattatttataatatataaaatttaaattaaaataattaaatattctttttaaaaaaattatttaatataaaaaataaaaataaaaagaaaaaagggatatagtgacactttatgagtgttgttgttactttttcagtctgacaaggcttgattttatatgcctatagtgacgcacagaaagtgaatgtaaaagggttcagtgacatgtatggaatgtcacaaaaaactgtctttccagtcaccttcattagtgacacgcgttgaagtgtcactaaaaagttttagagttacttaatgtgtgtcactaaaacctgtttttctagtagtgaatatttaatttaatttaattcaaattttatatattannnnnnntaatttatattaattatatacaaatacaatttaatataataataataataataatgttataataatatttttatttggtaaaaaataaaaattcttttttttgttgctaaagaagaaaaataagaatactaatttagaaaaaaaaaatcattaatttgataacataggagcaaatacaaaaatcaacccaatacagaatttctaacatactaaaattctaacaaaaattctaattaatttgattctaagaatagacaaaaattctcattacaacaaataaaaatattgataaccaactgaacaatctgtacaagatacaagcaaggggcacacccccaatcaaaataaactctctacaaattttctctcatgtcccctcaaatatctatttttaaccacttgtattctgtagtatatgattctttttacatcatatacaatacagtttgacagaattagaatgcctattgaaaatacaattgttgctattatttcaaagactatacattgttgcagccaacaaagcgacaagaattctttgtctgaagttggtgttccttacctgaagccagcttttccgacctgttgcagcagttggccaagcctgaaaatccagccaagagaaaatccaacctgttgaagcttttcttcttgaacaaaaaaaatattgataacatacctataatcaaactcaacaaaccaatatagaatttataagaaaataaagcaatgcaaactacttctttactcccatttaaataataaaatattaaatcccataaaaacccaagcggcggtgacctctgtttggctcgtcggcgatgctggacctacgtcgtttaggaagaagatcggagctcaggccacatgacaaaaccagagggagagaaaagttgtcacctctgattagctcatcctcgttgatggcgtgcgagcgaaatggggtgcgaacgaaagggaaaccatgtcgccggagttcaggtgttgcgagcatcatgtggccaatttggaccaccgtagttcagagagaggcctggccgctggagcacgactgtccagcccaccgtagatgagagagatattggggctttgggttttcttgggttgagaaagccatggccgccggagcacgactgtccagccgtggccagtccaaaccacacgcagtaaacaaagggagagggaggatgtgggaagatgatgagatttagggtttgtttcagaaaacaaaagaaatgagattaattagggtttcaacatatccattttatacccccatttatttatttatttattttattttttcttttattgcctttaataaataaattgagagagaaagaaggaactagcacgtgtccttcaactttttttgctttttaatttttttatttatttttattgaatctttagtgacacaccttgtgtgactctgaatacatttagagttaggatgtgtgtgtcactatatatttatatattttttttaaaataaataagtttttagtgacacttcagatatatagtgacatgcattatggaacatatatttgaaattttcactgtctagtaatgtgtgtcactaaaaattgactaaaacatttagtgacccacattttttgtgcgtgtcactaaattgtgtcactaaaggtgtaaattgtagtagtgtgaagatgaccagtgtgtttaccaactcaatgataatcaagtggtagtattcctagtcctttatgttgataatattttgattattggtaacaatatcaagaaaatgactgacattaaggaatggcttaacactcaattcgaaatgaaagatttgggtgaagctggttatgttcctggtattcaaatcattagaaaccggaagaaaagatcacttgctctcttgcaagcaacttacattgataaggtgctaaagcaattctcaatgattaacactagaggggtagttatgccttctcagcctggtatccatctatctaagaaacaatgtcccactgatccccaagagatagaagacatgcgaaatgttccttatgcttcagtagttgga

SEQ ID NO: 126764 - DNA, 528 bp, Cannabis sativa
tagctcattttgttcaagtttgttggagtattaaaagtggattcaaatttggattgattcaaatttgaattataatatagcacaatataaaatttgtatcataataaatatattagatgagtgctaagaaaccttttatctcactctttattgtattctctctttaatgtgatgacaaatgtcatattttcagcaaaatttatttttacttaataattagttatgatattataatgttattacaattgtgctattactatttctcataattatttaactaacttcttatttataaaagaattaacccaagaataaaaatgaaaaaaaaaaacatatacatatattttaaaataaaataaagtaataattaatatttatttaaaaattgtaatttttttccttttaaaaaattatgcaatataaaaattaatacaacttcaatctttttttctttatgaaaaagtaatattttttttatgattattataattatattatttatcaatataaatacaccaataaaccatc

SEQ ID NO: 126765 - DNA, 1337 bp, Cannabis sativa
tttttttttatttgttgtttctcgactaatatttcagatttcatatcatctttcattttttttcatttcttctttcttaactaatagcataaacctcaatatttcttctcacattataaagaaatatattaaatgtaaacattatatatactagaatacaaagatcatatactgattcaatgaccatgtgagacttaaaactaagtatacagtacatccataatagtattttgtctaataataatagtatttccttggcttctctctaaatatttctcatgaggttgctgagaaaatttaaatgagaaaaaaaaagaatgtatagttgcaaagtagtgtgattccattaagttgaagaaaccaattcaacatcacattgcaagtggataatgtttcaacacttcaataacattcaactattaaaactcatttacaattttattccaagttagtgagaactgaaattagaaactacctcaagtcttaaactagagtctctcacttttgtacattctacctgtaaaaaaattatatatacagagttatgtaaggccaaatcaatgaatttaatcaatggggaaatcaagagtttttagaaggaagcgtaccttttgtacagagcctttacattttccgccagggcctgactgttttccaagaattcatcgtcgcagtccttgacatcgacaggctgtactttgaaatcctgatacccacaatattcgttccattcgaaccacatcttcgagatcaattcctttttgaaacaagcttcgtggtcttcctcttcgggtgagtcagcagcaaccaatctgtacgtgaacactttctttttctgccctggacgaaatgcacgcccaattgcttgacgggtgactgatggatttaagtgaacatctagaattataattcttgatgctccaaccagagaaattccctctccacaagctttgattgaaccaaagaaaaccttggctgatgaggagttgttgaagcgttccatagaccactctcgttgctcgctatttgtatcacctgagatgacaaagatttcccttccagtacaccaacccttcgcttttgtagctaatctctctaaaaacttcaaaggcactaggtactgactgaaaaccagtagcttctcctgattagcgtcgcacaaacttagcatattcaggaaaaatttcgcctttactccatcttctaagtccaagttttctagcaactcatccatcttggcatcacttgcagtccaattatcagaaaatgattgtaacttgggatgcagataaacggcacttccaaccgaacttgctttgaactttcttgataacttt

SEQ ID NO: 126766 - DNA, 957 bp, Cannabis sativa
  modified_base (43)..(53): a, c, t, g, unknown or other
atggtcaagaataaaatacccatacatgggtaatacccattannnnnnnnnnnatatatatatatatataaatggtaaggctattttcagatgtttaatattttaatttaaatctcaaaagaatttataatgggtcatctaaagacccaaaaattataaaaagtttatgttttcactaagtgcattattatttgctacgctaacatcatactaatgtgttactttataattagttagtaaattttaatgtcatttattaaaataaaatgcttagaacctaatattaaaattcaccaatagtatgacacattttatggtatttgataccttaagattaaccttagcatttctcttttactaattctatagttttaataatttttatgtagagtaatttgtaacataaatatctaagtttaatttttgacgataataatacttaagttatatttctggaactccataaaaaccttaccgttaaattttaaattattatccacgtgtcattttcttattggtatatttatactaatttttttaaaaaaataaaaatttaatgatggggaccaattatggattacatggcaatttacttaatatttaattgtcaggtataacttaagtataattatcgtcaaaaattaaactaaaatatttatttataattgggggttaaacttaagtatttatgatgcaaattactcttatttttttatatatataaaaataagatcattatttctttttgttattctaaaaaaatattgtttaaatgttgtctttacccaacatctatctatatatctatataaggctgttgttaaagatgatgacatgggagcctctacaaacattattatatttttcttgctctctcatttttttctaatttttttatttttcttaatattatttctatttactactaattacattaatgccaagtaattaaaaaaa

SEQ ID NO: 126767 - DNA, 724 bp, Cannabis sativa
ctttcaattgtattttccgtatgctgaacccaagatcacaagatagctcaagtgagtttcttgaaagcagagagaaatacaaatgtatttaagtagagtttctacttacaaaagttatgaacttacttccacttgatgaaatctaatatttatggtgaaaaaaaaaatcaatcaacattaattacacaaaatctacactccaatcagcattattgcacaaattcgcacctcaattagcttccttgattggtgggagttggatgagtttggatcttgggtgctagaggtggtgcttctagccctatcttcaccttcgggagggtagcacaggtgtttgtcgccttggagggacctatgatccctattcagtgctcaactgtcgtatttccttcttatgaaggatgatttgtctaataattaagtgttagggttgttgttgttagaaatttttttatcagaatcttaatttattactcatgtatgttggattaaaattataatttaacattctaaatatgaacaacctaaaaacgataaataaacacatatgaagattaggattttcttacattgggaatgcatcggaattaaatgtctcattccgttcaattactttaaccattgattctcattctgtagcagggtattgtcaagtaatgaactcgaatcttcttttccattaatgagtgacatgtagcattctacatgatcttccacaatggtc

SEQ ID NO: 126768 - DNA, 1442 bp, Cannabis sativa
  modified_base (1386)..(1411): a, c, t, g, unknown or other
tctaagatcctggtaaaataaatctccaacaaatctatgaagtagtcttggagtgggagcatggctccggacatcacatgggtttggcaccatggcccaaagctattgtagttgtggttgggtccttcattacttggaaggcgatggaaggtgatagtgatggaaaaccccgacactcgaaggtttgatcccgacaaaagtgatgatcttctccaactgatgggtgcaggtcaaggtcgagtgtaattcatctgcttcccagccattggaacgacaggtgaacttttgtagaccactgggcccttaattacttcatccaaagtggccaatttctttgcccccttttttttgaagattttgctccagtagaagtgggggtagacatggcgtggacttggtgaagttctaggatttcttggtcgaattcgaagaaaccgcgagtgtgaaggtcctatagaacttcactcatttgaaaaaggaaatctagtagttagccctcaaaccaaaaccctaagatagaaacggggaatgggggtcccctaatcgcaggaaagaggccccctctgtatgcatgccaaagaaagggaatcaagagattctcctaggcaaacatcgggtgcaaaacatcctaaaaacaaatataaagggaaaagaagcaaaaaaaagaggagtgtggaagttgcttcgaacattggatggaaaacaaacaaaagatcgccactttctagtctcaaagaaaaatagtaataggcatacaaataaaaaaatgaacaacagtggtcatcggacgccccactttggggaagcttcaccatgacatttgccataaccaccgtagcacagaaatcaagctcaaccaaatgagaatatcaccattcttattttccttaacatgcagaaaaagcagaaaaaatatgaatagaaacttacacaaaggttgtaaggaagaggttgacgatgtcctgtggtaaaaatttgtctaacaatgggagaggaacaacaggaggtagtcggaggtgtctagaatttttttaaggtgttggctgggttgaaaattgcaaggtggtgaaagtaacccagcaaaggaaagtgctagctcttatagcccaaaggcggtgcaaggtagctgtgatcagacaccatcgtacggtgagaatttgtagcgattccaatttcatgatccaacggatgggatgaataggtgtgaagacgagaaaggatggttgaaacgtttgagtgcctctctgacaccggaattaatgcaaaggtctatcaatggacatgaagcgaatctttgcctgcaaaaggaaatagaaatcaatggtgacaatcataaatgcgacccacacgtcaggggcacgtgctgttggatattattttaccagnnnnnnnnnnnnnnnnnnnnnnnnnnttattaacatcctaaataagaactttctaaa

SEQ ID NO: 126769 - DNA, 882 bp, Cannabis sativa
ttttaggccctgacctaggtgaaccttaggtaaaggcctaacccatctatgttcaagatcggacttgtatatatatatcaattatacttctcgatttatttttaccacttaaagaactcataattaaaattttcttatatgattgtatacattgtagttatagtagacattaatttcactttcacatgttttcgaaaaaaaaattaaaataatttataatattaatgtcaaggttcaaacatttagatatacacgaaaaaaaaaaaaaatatacatgcgtgcgcacaattgattctttaaattttagttttgacattataaattcttcaaaaaatttcaaaaaaggatagaatacctattatatagatcatcatctaaagaaaaatgaattaatttcttgaaatgtcaaaaataattaattctccataagttatataaagtaatataaaaccaagtataatatgtccaaatgttgcataaatatagtataatttaatggttatatgggaaccaattttcaaccttacactaatatgtatttttttttttttattttatgaaaatttaccaataaagaagaagcttacactaatatatatggtcaactatattaaccatttgtttttgattgtccaagttgtgtgccttttttttttttttttgaatcaaatcataattcaccttcaataactttgccttaaaataataaaaataaattaaaaatagaaaaaacaacaacatatatagtatatatatggacggtttaaaagtaacactagtgtctaatgtcatattgctattgttgtaattaagtattaaatctcatattgttatataaattaacaattaacccaagatctatttgtatataacatagaacac

SEQ ID NO: 126770 - DNA, 1362 bp, Cannabis sativa
aaaaaaaaaaaaaagtcgtcttaatcgggttagtcgggttagttctgttaattcgggttagtattattttcaactcgcttaatataaagattggatggattatttttttttttcgagttatctcaattttatttaggtgcgttattttgattaagcgggtttacaaatatttatgtacagccctagtgtatatatactaatcatgggactaaataaaattgaatttacaattgttggatgacggtggagatgatgtcatttaatatgataattattataataattgaagaagaataatatgtgtacatatcggctaacttatatatttatataatgtttctctaaattttgttaatttttaaaagggaacacagaatcatcatagtacagcatgaatctaatttcaagggacgggacaaatggaccgtaagaagtgcattaacgctacatatataattaataattagggaataataatatagctttattttgttgtgagcattattaataataatggtgattacgtggcattgaaattatacaatatgaattaagtagcatttatacataaaagagagactatatgtatatatagttttttgtatgtgtgaactaaggagccacaagagagacaaacacattgaatggaagtatcatctaccaagagatatatttagagagatgatatacggtcttgaagatcgtttcagaatataatttggcaaatccattcataaagatgctactagcaaaatcttttatgggtcatatatatataactaatgtggattgagggagttgtccagttttttttagggcaagtgggagattgttagggtttatgccctgaaaagcctataaagaatttatgattattattaaagcattgaaattattattgaataatttcttatccatatataaggctatgacttggagttgtacagtgaactaagatcacttagccatgtataaaacagtaagcaacatattaaagttatgaaatctttaatcaataattgctagtacaattcactgatgcccgttcttcgatgcaagtaatctttgctgagattacggatgttttatgacatcaaagtgaaggtattgtatataacagagattatatatgaaaaggagcgatataaataaagttgtctttacctaacatgtcatttactacacagacctaattcatgctataacaaagatcaatgatagattggcctaaaacttacgtaatcatgaactcttgttcatgttataagtttccatgattcactcgttaaagtttttaacttctgttttaggaatctaataatgtgaatggttgagaatatgatctataattatggaatccta

SEQ ID NO: 126771 - DNA, 1153 bp, Cannabis sativa
atatatgttcatcatgttgcatatgcctttattttgttattatcttgctacgtaatatgtatatctagcttcttaattctttttcttcatgacttttttcactatacttctagaaggtacaaacttgttgtaatcttgcatgtaattttaacaggtggcaggacatgcacgactcttcttcactatggtacatatataatacatatttgaaattacatagctacgtacaaatctcacttattcagtaataataaacaaaaaaatattgttagtgtatgttcatgtatgtatatatagatcatatttatgtttggtttaagtgttgagtaggaaataatttgcaagacaaagtaaaagataaaattattgttttaaaatatttttggcttcacaaatcaataagggttctatggtgtagtggttagcactctggactttgaatccagcgacctgggttcgactcccggtaggacctcttttatccatccctttaaaagacatttttgtccctaaggcagtaaatcataatgagttttcaaacttacttttattacaacattggactcccaaaaagtaaagagtaccaaattactattttcattaaaaaaaaataatttgcagccaaattttctatacttttatgtttattacggtttaattccctcactcaaaaattatggctatactctctgaattcgagaattgttttattctgtagtccttccatctattttagtcttttaagtattaaagtggactgtcacaaagtacgtaagtgtacacgtggaaaattttcattagttcacttaatattaataatataaatattaataaaataattaaaaatataaaaaaaatattttttcttttttcgttaattgaaaaccctaaaaccaaaatcatcatttctctctttcttcctctctcattaatctctctctttctctttgcttgtgcgacactaacgaacggattaggacaactgtgctctgaccctcctctcgtccatttttccaaaactcacaaccctaaacaccctgaccctctacggacccaaatgcctcaaccccagaacgtcatcgatcccctgcaaatcaaaacgtcgtcgacccccctacgcagggacggagggactttagcccatatgtaggct

SEQ ID NO: 126772 - DNA, 1361 bp, Cannabis sativa
tagttcgaagggtggctggttcaaatggggttcggtgcactagtgaaaagaaagaacagtgagaatgtgagaaagaggagagagaagggagttagagagaattggaggaattgaaaagagaggagtaacttaaaaaacaattgaaagattagaatatctttttatgtgtaatatttgggcttaattaaataccatagctaattgtttagcatgacttatcaaattttcctcacaaaatattttttacaaaatattttttatcaaaaaaataagatataaaaaacaaaaaaaaaataaataaataaaaaagaaacaaaatgacaaaaacaaagtcattttttttttctgcggaacatgcattcttatatatatatattatagataaatataattttgtgtattttgtggtgcatatatatatatattttgaaatggatagtttaggttatttgcattgataataaagaattgaaaattttatatttaagttgatggggtattagttacgcgtgggctggggttggtgatgtattttctacgttggaactatatttaaccaacagccttaaagaactacttaacaaaaaattgaaagcacagaataatgaagttaaaccaactagttttggcttttggtggctctcattaaagtcataaaatttaatacacattaactgaatgccgcttacaatttattgtatttaaccaaatgctctgttctttcatcacttcaacaatttatttatcttacaataagttttgaaaaataaaataacaaattaattaataataataataagcctaatggggcatgcacatgcagcatgctgcttgtttggttaggaggaaaattcaattcttcaagaagacaaataattatttatatatatgtaggattataggattatgtatatgtatttatttcttttgtgtaaataaatatataattaattcccattctggtctgaggtgagtttaggcacctgaccctttttcacgtgtaaaatatacagagttaggtgaaaaaatgattgggactgaattatagtggggtttcatagccagttagaccattcttgtcatggcagttgttaggtaggatgatataacatatatatttttatttttgaacttgggatatatatatatatatttataaatatgaaatatttgatcatttttcgattttgtatgtacggtaagattctataacatatatagaacttagattagttggaaattttatatatagtaagttagatatatcattcttgtcgtggcaataataatcaatgacaaaaaacattaccctaatatataatatataatggaagaggtttcaatggttacatttttattgt

SEQ ID NO: 126773 - DNA, 1035 bp, Cannabis sativa
  modified_base (969)..(979): a, c, t, g, unknown or other
gttatatttgatatattgctttgttggtgtgtttttgatagtatatcccccatatttttttgacatacaaagagggaaaatattgtggttgattgcaataattttttccaacaaattgaattatatgattcattaatttattgtctagattactttatctccatagaattcaaagctttattaagttaaataaattgtatgcttcatagatttattgcttagttaaaaaagttaattattgagtgtttcgtcttaattgcttataatatagaaatttgaataattgtctactttagcgttttttatgaaattaataatttgattggaaaattaaaataacatacgtcattcgtaattaagaatgatggttgagagtggaaattaatcttttgttatttcataaatatcatagcacccactttaattgctttcttaatttgagttgtttaattttgttctttaaaaaaataccctttttaattactatttaatattgaataataaagtaaatatagtctttataggatcgatccatacttatttttatattgaaataactaaaattcatacttatttttatattgaaataactaaaattcatacttatttttatattgaaataactaaaattattaaaataaaaataattaataaatttgatacgacatacgacacgcatcaactttcaaacatattaagaaagatctaatactccttatcttaattagatcaactattgggttgaaagttgaaacttatttagtattcttacccagattcaatattgtttaatgttatgtatgattgctatgaaagtttaacttattgttgatgatttattttggcattacggaatgtagttgtagatttgcttaaaaaatagggtaattctccaaatcgtatagaaacccctattgcaactagcgctgcaatcacgttagaaacacaaaccgtaaatttgaaaaaaannnnnnnnnnnaaataatatatagggtaattctataaaaaaaaatataggaatatatatatatatat

SEQ ID NO: 126774 - DNA, 1036 bp, Cannabis sativa
  modified_base (970)..(983): a, c, t, g, unknown or other
aattttgtaaaatacaagattcaaaacaatatttactcttgtttccttagagtaaccagttatcatatactatcttttttccatatatttttaaaaatttattgcaaaacaacttttttgaaaataataataaacaaagctatattcttctccattaaatgtataattctcacttttttccttccatttaaactctttgcttttgtttttgttatttattttaggtacttagaaaagaccccattacattggcatcctactcatagtgtggtggtgattgagattgagaatgggaacaagttaaaaatggcgctttatgttaatcacaccataaattttcaagaattcggggaaaagaatcgacgtcgaacggagctggttatggaggttaaaagggcttttgaagagttaaatataaaatgtcaccttctacctgaaacaattcatgtcaatcccgttggtttggactcaaatttggttcaataataatttttcggagtatatttaaaaaatttaattttagaccttgggtttaataaaagattacaattaaatcctagggttacaatattcattaatatgactaaaatacccttaaatataacgagagttatacaattttttaacattatgatgatcttgtatatctagaaattttattatgaattttaattttctttttggaaaatgttaaaactaaaactctaatttgggtgttaatcaaaatatttttaaatatagttaaaaatactcttgtatttacgaatgaattaaagaataagtttaagttaatactcaaaatgaaaagaaaaataaaggttttcaattattaaaaaatctaaaatatagggatttaaatagataatgaactaaaatataggatctaaaatagtgattctttatagtgtgtgatatgaaatttgctactcataatttgtattaaagttttggctaattaggatttttgccnnnnnnnnnnnnnnatgtaccaaatcatgcctcctgaacttttaagatcgttaaaaatgctccctga

SEQ ID NO: 126775 - DNA, 1412 bp, Cannabis sativa
atctttattaataagtaaatcggattatatgaaatgagttttatttagggcataaaacacaacacctccatggtgaccaagtacctattgagcgacccatcaggatcagagattgtcccgaggaggttgctcattcttctgcttgggtggcaagaaagggaaaggccattgtggtcgagcagaaggtagaggagtcttctgatgaggatgccccttccttgcttatttgggagggtgcccatatccacgtgcagggtacacgtggaataaaaccttgtcaacagcaagacaaagtctctttacaaggcatggtagaactgtcaagcaaaaagcgagaggagttgagcaagccatcacgaagttgcacaaccatgtttggctggccaaattgagtacataggccgaataggaggagcttgtatggccggtcaggatttgagcacaagctagatggccaaaaggcaattagcagaccaagaaagggcttgttcgaccaagaaagcttgacctttacaaggaaaaggtgtacaaaggttggccatcacctacaaaggttggccaacaattgcaaaggctggcaggcacttgatgtgcagcctgtaggctgccaggcacttgatctgcaatgtgcagaccctggcaggcacatggtcggctagaccctggtatgcacatgactggccagaccctagtatgcatatggtcggccagaccctagcaggaacatggccagccaaccttttcttggcaggcctttggtgtgcagccttcatccgtggacagcaagctaagtggtggtttggaccttgacaacccacaaaaataagaggaaaatataagcaacttccctatttttgaaggataattatcctttttattattcaatttatgtaaataaggccttatcttcctatttttaagggaaattatactactacaatttatacatttagtgacataatttagtgacccgcacaatttttagtgatacacattgcttgacagtaaaaatttcacatttatgtttcataatgcgggtcactatacatttgaagtgtcactaataacttatttatttatttaaaaaaatataaaaatatatagtgacacgtaactgcctaactctaaaagtgttcagagtcatacaatgcgtgtcactaaagactcaataaaaaaataaaaaaaaaacaaaaaaaattgaaagaggcggctgattcaaaaaataaagcctcctttatctcaaaaaaaaaaaaaaataaataaagcctcctttatctctcttaattaattacttattaaaggaaataaaaaaataaaaaataaataagggtataaaaaggatatggtgaaacccctaaatctaattcaccatcttcatcaacctctctctttcgttctttcaaaaaaaaaaa

SEQ ID NO: 126776 - DNA, 544 bp, Cannabis sativa
ttagaaattaaattttaaccatgtcaagaaaataatagtcaaaaaatgacatcatacggtagcgcatgtgcccccacgcgacgctgtctagagttggcttcgctagggaggggataatcccctaccatggaccgggtctgaaagaaggtcacgtgacccgactttctctagtcgagtcgaagacaaaaacgaaccaaaataacgccaaatcattagaaaaatgaggagttttgattgggtctaaaattctaatctacctatggattcaatttggggtaaaatacctaaaacgacgatagatattgtaatttaatccaaaattttaaaacaaaaaaacatcactaaatctactgatttttttactaagtcggtaattgaaatatgtagctacattataaaatattggagtcatttattcataatcaattttattcaataatgattataataaaataccccaaattttatttcatcattaaaagataccaaacctaaaagtttaatcacaaaattattctaatttactcaataattttagtcatat

SEQ ID NO: 126777 - DNA, 1779 bp, Cannabis sativa
  modified_base (30)..(61): a, c, t, g, unknown or other
tattttaatatcaataaataattttcatannnnnnnnnnnnnnnnnnnnnnnnnnnnnnnntaaagctaagcggtctttacattactaatgccttaaaaacgacataccacttatacaggtgtaagtaaactttatcgctgattatcacgttagtgtaaatcctgtgcactgataaatcatgggactaaagactttgaaatataaaatcatgattattttttaccgtgtagagaacactataatcatgaataactatatgtttaggatttaatagaatttatacattaaacataaaatcatgaaagtaatcatgtggaccatgcaacataaaataatttttaatcgtttattaattagtaaatcagattatattgaaatagcttttatttagggcataaaatcccaacaaactcccagttccactgatataaaactaaaagcacattttaattaatctcaagaccttgatgtctaaattaagtgtagtatgtagtattatctttgttataggatttgataggttgtattcaatacaaattttctccaccattacatctccttagtcacaaaatccttgatattgtgaaattcttttttatatgtttactcctcttagggtactagattatctaatatttgaaaactatatctatgttataaggaagtaacactagtagttaaaccatgactagaataatgcaaaaaactgtatagaactttccataggctgaataattattgattagccttttgagccactttaacattcaatctcactggtagagttagagacttcatataggtttatacactttctcaaaaatcacttctccacctagagtaatcaccatcccataagtagactttataacattaatgcaagtctagaaaactagtttagtgtagtcttaaagtgttaaaataccacccttatggactaacatatagttcctcttttgatcttaagatttatgtgattgtcttctattgacggtaagaacttgtcaataaattaacaaaggtttaaaatgttatttcaagatcttaataggagaatacttaaagtaaaaaccttacaaccttcactctctaaaaaaaattactgtttctttcaaatctctcttttttatgtccgtgtcattatgttagtgttattatatatttttttacttctaacttcttcccttgtttggccatccctttgtagatggcagttgcatctcaagaagtgctttcacaaggtggagctttcagtttctcctccaactaccaaactcttttgggcaacttggagtcaaccaaggcagagagggatcgtttgtctactttggtggcctcccatgtggatcacatttggcagttaaaaaatgaacttagcatggccaaagatgctaaaaggcaagcggcggaggctctcgcaacccatggagattacgaggtggaattcttgttggcacttaatgtggttataggggagcaagatgatatgcttgcgcagttggctaaagccactgaggagagggaggatgtcttgcgccgactcaagagtgctcgtaagggtaagagtgctcaagagtgcgatttgggtgatgatggctttgggtgagactgttatgggttcaggtttctgagttcggtcgaatggcggtggttatggtggctggtgagggtgaaccgtgagtgatggaggcggctgggatagtgattggagtgaagatggtgaattggttggtagggttgaatattgggctaaggaatgaggtattgggctggctgac

SEQ ID NO: 126778 - DNA, 848 bp, Cannabis sativa
atgagttttctttgttattgtaagaatcaccaaagtgccccagcgacggtgtcgtttcatgattaattccaaatccaatgctgaatgggaactgagaagccatagccataggattaggattggtttgcttgatgatctcatgatcatcggccagctgcaattccagtactgtactactagtactagtagtagtagtagtagtgggattattgttgttattagagagattattatctttgagaagagatcttgttgggcttggacttggtgtccatctgggcaccaccactgtaggaggagacttattattatgatcatccatacctgctaataactctattgattaattgtgttctgatcataatttaagagtagagtaagaggtgggtactgcatataagacaaaagcaattattatatttctgcatatatatatattatattatattgtatgatgattgatatattccagctattaattatttgtatccacttgtatagattgatatagagagatttcatagagaactgttatgcatagcgtgtacatatataatagaagatatattataggtggtgttctaatagaaatctttatattttatataatataaataaataatgatgattaaatatttgggatggccatattttaattcaatattttattattgttataaaataatatagaataatataaaataagtaagaagaaaagaagaagaagatgaagagagaaagacaaactgaatgggaattttttagttgtttatttcaatggggtgaacccctatttatacaaatacaaaaaagtcaaatattaagaaactaagaaaaatagaaactaa

SEQ ID NO: 126779 - DNA, 854 bp, Cannabis sativa
tttctgatctttattaataattaaaattgattatattgaaatggattttattgagggcacaaaacccaacaaccataacttatgggatttgtttcaagcgtagcaaatcaaagaatctggcattgcaagcctttattgatgcagactgggctagcttccctactgacaggaagtcagtgagtgcctattgtgtttttcttggtccatgcttagtgtcctcgagctctaagaaacaacatgccattgctcgatccagcactgattcaaagtatagagccctagctcatacaactgttgagatatcctggatagttgctcttctgcaagagatgcaattcagattattaaggtgtcctgttatctcatgtgacaaccttggagcagccttccttgttgctaatctagtgtatcatgctcgaacaaaatatattgaaattgatgtgtatttttttcaagttatggttctaaacaaacaagtagcaattcattatgtgccaacctataatcaaatagttgatgctcttaccaaaggactctgtgttaacaggtttataagacttcgaggcaaactgcaagtggtaaattcttcctttcacttgagggttaatattgagactaatgaactagccacagaaagtataaaagttgagtgattaagagagttagagcctgtttggctgtatttttagttttcagttcttaaaattgtgttttttttaaaagtgagaaaagaaaaagtttttaatcattttaaaaatttaatggtgtttggcacaaattttttaaaactatttttagattttttttactaaaaaaatcaatattttaacacctgtaatatcccgaaaaatata

SEQ ID NO: 126780 - DNA, 1136 bp, Cannabis sativa
ttgcttagtttaaattttttataattgaatatatattgagggctaattgtgtaattcaattagtgaaagtccaaaaagctattctcacttttatataggttatataggttatagatataacattttaattgtattaattatgtacattgtaatttaatagtaatttgttaaaaaaaatattattttaatgattttaacataatatatatatatataaattaattttacatcattatgtagcattaattataatcttttattccatttttattatagaataaattatatataatacatgtattgtatataaaacgcattttaaatttcctcactcaaattaaaatataatatataattttaaatttaattaattaataatttaatctttaaatatctaattaaattaactaaaaacaaaatcctcttatgaccaaattttacgctagtgaaggaccttgaatttttacaatttaaatttaaatttaattttaattttaccataatttattaattatttgtatttaaatcaattataaaataaaaaaaaaaaagaaaaaaaaagagttaatggaaaacaccatttgcttcaaattccgtttcattaattaagaaagaaacaattattatcaaaaaaaaaatttcaaaatgtaattattcttaattaattgttgctaaagtaatactttatataaaggacacatgaaattacaatcacatagaaaaaaaaaatggctttcaatttaatggcataaaatttagtttttatattgttggtatttatgttggagtgaagaaacaagaatttcaaaattggtttttcaaaaggtaaatctcttgttttttttttttttaatttaaattttattgtatattttgagtaaatctttaattttatcatgaaattttgagctctttgtaattaataatcttacttttatatattattaatatttcatttgggtggagaaacaagaatcttaaaattgatttcttaatgaaaaataatagaattattacatagaaaaaataaattgatactttatgtacaaaaatatttctataaggtaaagacaatatttataccttttatgtgattttaattaccaaaataccacttacacaatcagacgatggtt

SEQ ID NO: 126781 - DNA, 1163 bp, Cannabis sativa
tcaatggcagttttaaccgttaacagttttttcagttttcggttccgtcgatttcgattccaacggtgttcgctaggtcggtttgaactgttctttcagttttctagattttatgctcagccctaatttaatcaggcaacaaaaagaaacttttgaaagttaaagagaacaaagccccaaagattttaagagaaaattaaagcgaaccgaatcaagaaccttagtaaaaatgtcagtaatttatttacgtgtttcaatgtattccaggacaaggactttattttcaactaattctcttatgaaatgattacgaatatcaatatgtttagttcgtaaatgttgcacatggttctttgaaatattgattgcactagtattatcacaaaaaatagttaaagtgtcaagatcaaaccaataatccatcatcatttgcttcatccacaaaagttgagcacaacaacttccaacagtaatgtatttggcctcaacggttgagagagagattaagttttgtttcttgttatgccatgaaactaaattgtttcccaagtagaaacaacctccactggtactttttctatcatcagtattacctgtccaatcagcatgactaaattacataagattagcattagtttcctttgaataccaaagaccataattaacagtcccatgaacataacgaatgattcttttcacagttgttacatgagactccatggggtttctttagtacttggcacacaaaccaacactacaactcaagtcgggtctactagtagtgagataaagaagactaccaattatgcttctatacaatgtaggatcaactttgccaccattctcatctttggacaactttacatttgttcccattggagttttggcaatctttgaactttcaagtctaaatttttttaccaaattcatagcatattttttttgagaaacaaatataccgtcatctaactgcttgacttgtaaatctaaaaaatagttcaactctcccaccatactcatctcaaattcctcttttatctgtttcacaagaacatgcacctcattattagaagtagaaccaaaagtatagtaaatactattttagaccctatattttgcaaaagttattaattgaatcatcaattttgttaaatgacaaaata

SEQ ID NO: 126782 - DNA, 1638 bp, Cannabis sativa
taaccatcccattatggtagtgaacaaatattggacacatagttaatgattatgtttatggtattaagctcatgattatattagtccacaataataaatctaacatccataaaaataatattttatcaactataatctacataactcattcatatcatttctatattttgtagtagctaggctgattatttggtttcttatgcttatgtttagactgccatgccttggctatatatttatccaaagggtattgaagaattgacactacacataacaaggaagtacaacaatctacctatttacatcactgagaatggtaacaagtgatttttattattctcctaatgacctaattttgatctcatgtcataaattaatcaactttttcttttttgttgtgttgttttctcaggagttgtcgacaacaatacaaccgcaatattaaaggatgccttgaatgatagtctcaggactaactaccatcatcaccatctattacatcttttaaatgccatcaagtaaatatttccatacaactttattattattaatatttttacattagtaataaataataataataataataaataaaacaaaaaaattggcaggggtggagcagatgtaagaggttactatgcatggtcatttcttgataacttcgaatgggcatcaggctacactattcgatttgggattgtgtatattgattacaaaaacaagttgcagagacacttgaaagactctgccttctggttcaagaacttccttcaaaaccatcgtctcattcaacaaaatccgccattgctttcctctcactaatttcattttacaatatttaaattgtaaatgtacgtcaatccaagtaaagttatgggtcaagaactattgctctgtgtttataccttttttagtctttgaaaaccaagtcaattagcttcttattatgagtttagctattgattgccttgcctccagttgatccccttccgaatttcagttgctcaacatgaaaagttgcctttgattgtttttcatatcatgtacaagcccaatcaaaatgttgatgcagaataaaagttagaacaatattattaataagatataatttctttaaaatatttaaatggtttgttttaagtattcgttgtacgtgaaacttacccttgaatcttgataattctatgaaaatagagttatttaacttttttttttttattacaataatgttgttctcaagcattttaagttaaatttaatgacttttaattagttttatgtactttttaataaatattaaccttgctattatttagttttctatttacaattattaattttgattgtgtatttttaaaagcttaaatacaaatattaaaattaaaagagataaaaaatagacctgaaagaatttattattgggaaacattggacacattaagacttatcatataacatcattagaaaaatgattgttatataaaaacaaaaacaaacaatttgttttttcatatgttttttattttggggaattaccctatacattgattttttaactttttttttaaaaaaaaatttacggtttgagtttctaagtggttgcagcgctagttacagtaggagtttttgtacgatttt

SEQ ID NO: 126783 - DNA, 1078 bp, Cannabis sativa
  modified_base (222)..(227): a, c, t, g, unknown or other
  modified_base (953)..(966): a, c, t, g, unknown or other
ttatcttgaattaattttattaaataagtgtgtttttcttaaattaatttcaaaataatctaataaaaagtaaatttcatatattttgaaaattaattatgttgttaatcaattttagtaggttaaatcagtgtcattaacctattacagttattcaaataaggcaaatggaccttcacagttggggtttttcatgggagggagggctgggttcagtatgtnnnnnncattactaatggccccctaactctcacacaaggtccaaaaggaaggaatttaaccttaattatataattattatttattgaataagcccaatactaattagacctaaataaaaactatcaaagtgactttattattttagcaacctagtctattttaattatcaaaatcaaatgggtctctatatgcatttaggcccaaagcaaatatatagccacatgcacacactgatttggatggatcctatcatgttactacatttatacacagatgaatgaagattacaaactttacctgttacaaattataaatttgacctactgacaattggactatggttaatgttatgtgcattttcacaagtgtgacacgtggaaattcatcaggaaaaagtcaagaaatcattaaggctacccaagtaccttgctctgtgctccggaagggtaagagccctaatcttacgcaacaaatttccgtaagataagccttcccggatgcgggccacaagaaagacacctatgagctggcaactcactccactttagaagtcgggacattatgctcctataaggaacatggatcttaccccaagatacaccggtctggggtacacctttaacccgcggaagcttatcccactcgtgacaggctacaaacccaatgacaaagctctttttgatacgatgtcagaagttgtcccccacgccattgcttagtaaaaattcatnnnnnnnnnnnnnnctaattttagaattataattgaaactaattaactgtgtcttacatacattattatctcaactagtgtggggaccatgggcctgtataatcaagcttccaataagtagctcta

SEQ ID NO: 126784 - DNA, 847 bp, Cannabis sativa
gtcatgatttggtacatgtcaaagttcggggaaaaaaaatcttaattaacctattttataatttataatgtatgtttgctttttttttagtatattagtattctttttgcgaatttaaagttgtattctggataataattaatttattgaattataattaatgtgtaatattttaattttatgtagtttaatatttttatatatttaaatttttattgtaaactttattttttattaggggatttcacgccccgactccgcccctattaggggattccctgtcctatccctaatggagaataagcagggatgtggattaaaattcttaatgggaatggggacaaggggagcactccccgtcaattctccgccccgtgtgcatctcaaaattttttaaaaatttacaagatgatcttaaataaaactaaattaaaaaaatcttttgaatacaaaccagaaaagagatataatagaacgaggaggaaatcaaatagtatttacacgttaaataaatatatttgacttaatttttgagaagaataaactatttcattttctacaataaaattagttaaatataaatatacaacttaatatttatatatattattgggaaatttgcacaagatacttaaaaatgaactattttttgtttttcttaaaattttatggatttttttttaatatttttatgatttttttttatttatattttatttatggttattttttgagattttttctcaaatatacaaaaaagacctcgtatttacatttatatggacacatgcatatttaaacttttatacaaaagaagattctttttttttttcaaatatacgaacat

SEQ ID NO: 126785 - DNA, 2278 bp, Cannabis sativa
  modified_base (1898)..(1901): a, c, t, g, unknown or other
cctggtaaaataatttcctacatgggctatatgtaaggctcgcaatgatctgttatggaatggtaaacattgtgtagcaacagatgttgtttggctagctcgaaacactcatcaccaatggatttttgcacagtcaaatcgtttaagtcctatttccctggtctctaatcttgttgacaacatgaattgttggaccaaaccagtagctgggcagctaaaaattaatgtcgatggggctatttttgaagctacagatcaaattagtacatgctttgtggctcgtgactgtgaaggaagattagttgagactttttcaaccttgtctatcacaagctgtcaacctgctgttgcaaaaaatttgagtgtcaaagaggcgcttagttggataaagcagaaaaacaaatcgaatgtgatcattgagactgattgcatcttagctgtccagatcattcttacttctgtctcaatgccatctatatttggtttaattgttcaagattgtcaactcatgctttcttccttaaataatgttttcatttgtcatgttaaatattctgctaacaaagttgcgcactgtatggcacatagtgtttgttattagtctgaccttctttttactgagaacaatgttcctcctgctctacagtctattgtattaacggagttatctgtctaataaattatccttttcattaaaaaaatatatattgaattggttgatatttcagttgatttacaaatgtctaatagttgtttctctacatattactattaatgtataattgattgttgatcaatgaccaaaaaaaaaaaaaacaaacaaatattttcttaaagatgccctcttacttttgtcattattctaattgcaacctggttgcatttcaattgaataatagttgtgctacaataataatattatattataaatataaggttcgaaattgccaatacatgacttgaacagagaaatgtcgatagtagtaagcttcttttctattacatatggagtattattagtttttttgaaattttatattagttggctcgaaacagataactgttgcattacagtttgccgaaagttgacttacaatactttaacttttatactcttagaaaaaagacggaatttcattccccatattttacaacggatagtttgatgaagaaataaattattcaaattacgaagttagtggacaattcatctcaattgattatgaatatgaaaaactaatacacaagctggaagaagtgttggaatgcaaccaagaaaatactaacctgcaactgaatatcaagtgaaaaaggataccaactgttgaggataaattgcgatccaagtctaattcttctacatacaaataaaattgaaggaacctgacttcacaagatattcattgtgtgaacgtagtcaacaacaacaaacagtccatcattcttgaaaatgagcaactcattagttacacaaacaaatgcaacaacaacagtagtaatcaaaatattttgataataaattcaaaaaatcaaatcgagaaatgaaattataatccgaccatatttaaaatattcattcttatcatattttagtttgtaatcatatagagttcaaataatacaaaatcaatttaaataattttgtactatataattagaaatattctaatagatcaaacacacactatctcttttacaacccacaaactcactcaagaactctacagagaattcatctcagcctaaagtgtttttaaacttcatgtctcaaaatgtttggactctcttattacttggatagttagaaaagcctcgaccgtttaactaccttgacagttactagtcttgatgattagaactaagtgagctaaacctcacaataataataataataatannnntaataataataataaaattataaattaggctgagatgcaaaatggttctaaatttggaaactaagttagtaaatatttccttttaaaaaaaaaattaagaaaatagtcaaatataaaaaattagctaataagaattataaaaatacatttatcacatattttttaaaaatatatatataataataaattaagtcatataatttttttagtattgcatattattatattgtaacaaaaacaaataaatatattaaatcattaaatgtatacagcagtatttaatatatcgtggtattgaaaaattaatatactgtagtaataaaattatataccacaaagaaattataacaatactaaattaatactcaaaaaatata

SEQ ID NO: 126786 - DNA, 1839 bp, Cannabis sativa
  modified_base (275)..(276): a, c, t, g, unknown or other
agttaatttatttaagaaaaatgggtcaacataaaaatattgagcatgtggttggtgttggtttatcctataaaattattggcaccacacaatacaatctatattttttttatggcatgggaagacatgatatttataaggataaatgccattttagattgtgtttggcaaaagttactgattgaaccatctgttttgatataaatgacaaattagattttgtatttttcaaaataattatactaaatagtaattgattttttatcaaaataaannttaataataatccgatctaaaggtcttataacaaaactggttactagcatttgttcatgttaaaaattatttttaagttagttatagaattaaaaaattgtcgaaaattgaacttaagggtcttatttatactattttaaaaaatacatgatccattttgtcatttaacaaaaataaaaggttcaatattcaataacttttacaaaatacagagtccaaaataatactaatcctatttataataattttacaagcttttcaaaatacgaatttaaaattagcacgacacacaagtattaacaggtatacaccgttccacatttgaagcacatatagtatggagataatctaatagatcatagctaaatatttttccaaaaataacatggaagtcatatatgttgaagttgagaaattgataatgaattttctttctattaattgatcataataaagttatatagtacattacgtacaagtaatctgttgttcgatttacacaatttctagaaattttttaaaactaaatatgaattatatataaatacaataatgcaaaggttcaacattaatattaaaaatagaataatctaaaattaatagtaatattcattaataaacagaataatccatgctagagctttatttattcatcaattttataaatttttttttgtaggaagtaattatcatgaaactaaaaagcataaaagtaataatgaaaattttcttattaattaattcttaatattcccttcaaaaaaaatcttaatatatatttaaaccgttgtgtgtcaagaaatatccgacaagaacaatatattgacattaaaacagtagtatacaatccaaactgaaattagattcacatatttaatccccatgtgtatcaaggaatcaaagtcaaagatttataatgtttgcatttcaaaaattagaaagaaaaaaaaaggtcaaataatgtgggttttcaaagaaaaaaaatcccttcaattatatctatataaacaccccaaaactcactaaaaaataatcaatatcgacagagcaaaagcaatatttagatataattacacagaaaaaaaaaaagaggaattataaaaatggctgatgaatcatgtcctggtgcaggtaataaatccaacacttatatatatgtataatttttttttgaaaggaaaagtagatcgatatttatgtgtataaattagtgtacatattaattaattaatcatctcaaccattttattgctagctattatataaatatatatatttcgtataatattaataaaatgagaactatatatattattaggtcattttttcaaaggtaatatctctaaaaatattattaagttttttattatatgtatttattttattatatgagattctatattaattaaattatactaataacgatataatatatatttataatgacattttttttgtaaaatatatattatatgtttaacatttaatacttctataatatataaaattggaattaaatattttgtaattaagaaagagcttattattattattattaattat

SEQ ID NO: 126787 - DNA, 580 bp, Cannabis sativa
aaaacaaacagtctatatattttagtattcagattcagatatgatatctgattattcagatgtgcattcagatttagtggtctggatcttaataaaaaaaaaatgcaccctaagttggttaaggtgattcataattctttttaactaaaagtttggtccaagtgttcaagaggtcaaacctcaataattctacctggtttgatcacttgaacttttttgtctgacaagccaatgaagaactgctttctaattccaataaaaggttgtgtccatgaggacacactagatttgtttgactctgagtaagtttagacaatgagagagttttgtttttatagttttactgttattttacatttgttttatttgatttttacattattttttcaaaattggagtcctaaattatgattgttttccagctgctctatagttgattggtagttgccgattgtggttgttgagtttgagataaaaagcaaacttgatcagtataaatgttaatagtgggttaatttcacaaatgcacaaaaataacaaaaaaataacaaaaatacagtttcacggaattttaaacatt

SEQ ID NO: 126788 - DNA, 1494 bp, Cannabis sativa
tttgaaaacaccaaaccaatcaagtatttttatgtggacccccacattttaagtttttaaaaacataaaattgttttcaaattccaaaccaatcaagccctaagtattcacatacaaaagaattaaactaagaaaatatcgtgatataaaaaatataaaaaagtcaaccaaaatatttctttaaaaagtgcactagtttatagaaaaatttaatttaaaaaaaagagtaatttgcactataaatacctaagtttaatttttagttgcaaataaatacttaaatttaatttttgtcgataataatacttaagttataaatctaaaactatgtagaattggcccttaaatatcaaattattattcaatgtcatttttttattacctacaaaaattttataattataacttaaatattattatcgctaaaaattaaactatatttataaggtaaattattttttaaaaaataaatattagattctatttattatctattaatagtaaaaacattagatttttttttaaaaaaaaaagtaaaaaaattcacaattttttctagggtcacactcaccaccgcctcagtgaatctgaatctaaaaagggaatctttcagacgtaactataatctcacacgccggtgaccgaaacccaatccaactaaaaactatctctgtctccaccattggttcgtcacctcacagacgcgtaactttatcaaaaccccaccacccaccagcaacgcagcccacttgcataaaataaaccgaccccactaacgtcacgtgcaactaaatcaaactaatcaccattaactcaacacgtgtcactatcctattcgtcaataaatatattaaatttttttgtttccaatgcaacgcattacgtgcttttatcgtttatttttttttattataaaaaaataaataaacaaatcaaataaatctctctgtatcccacaaatctaatatttaatttatttatatttatatatatatacagagagagtggagtgagaatcgaatcgagaggagagtagagtaaaaagaagaagaagaagaagacaagtatggagaaatatagatttgaatggaagattttttctcttataatgatattggtttcttatttgttgtttgtctacgttcaaagctataattccaaggttagtttttctaattcccttaattaatttattaattaattacttaataatctcaattaatatgtgtatatatataatcagtatatcacttagaagacgaatatgaagttttgttgatttcaatgaatatttatatattttttaaaaaaagaaaaactagaatattatattttttttcatcaataacatgatattatttaatatattcatgtccttatttatctatttatttgaaagaacaacagaaataggcgataattactcatttctagttttttttttttttatctggttcgaaaagactagtcgtggaaactgcacggttacgggca

SEQ ID NO: 126789 - DNA, 514 bp, Cannabis sativa
tataaaaattatctatacatagtaaaaagaatacatatataaaatgtatataaacaactatatagctagatattacctcacaaacgccgccggtggtgggccgacgctacaggcggaggagagctggggcccaggcggtcagacgacgtcgggacggagccggagctgggcgggaggatgaaatagattttgggaagggagaggcggacggagtggggaggatgaaatgggttgaagaggatgaaatgaaatgtttcttaagcattttttttttatatattaaacaagtccccaatgactatgtcgttggggataaaaaaaggggagaaatttgccgcccaatgcaacagatatttttcaaaaataataaatacattctcaacgacaatgtcgttattgaagcctttttcaataacgaaattatcgttattgaaaaaaatgtcgttattgattaactatttttttttttttaaaaaaaaaattgaataactttcccaacgacaagtaagtgtcg

SEQ ID NO: 126790 - DNA, 543 bp, Cannabis sativa
ttaataaattgcacacacgtggcgttcctgttggacagggcgttacaattttgtgattgctgaaaatcggttacccccattgctcttccatgattcttgtgatactatggaggcaccagctatggggagagttgacaaagtaaatggaggagcatttaatgatgagcaatccctggttttagggaaagaaaaagagaaagttgtacaagaggtaactgattgtgatttgaatactggattgacttttgttaataataaaaggaggagaatgggcctagaaaaagataatgggctaattgacagtcaccacatggagctgggccgtgagacaagtagtcctaatggggaagaaaataatatggacctttcacttgcaacatacaatgataatggagcccaatacgaaaattcaaaaaacttgggagaggcgggtgttggtttccaggcccgccaagcattatgaatgttctaagctggaattgccgggggcttgggaaccaacggactattcaattccttaaagaaattgtttttcaaaagaga

SEQ ID NO: 126791 - DNA, 836 bp, Cannabis sativa
tgatccaatgaacacccctagctacagatttatcattctaaaaataatgctacagatatcccttagactattttcaatgagaaccataccaaaagttataaatggaatggtctgagctaaaacaacaaaagttaacaaaacaggttttgggactggtcggagagctaagctccgacaacttaaagaaattagaatgtgatgtagaatttgtaggatcctacaaattgtatttttttttatatacaaatatagttcaggggcatttttaacgaccttacaagttcaggagacataatttgataccttaattgttattttaatgtaaattaaataaaaattacaaaaatactgaattttgagtaaaaatttacaattttactgttatatagaatttttctacaaaaatactatctttttataaaacaaccgtaaaacaacaaaatagaacaaataaaacaacagtgaaacaactaaaaaataactgcggaacaacagtgaaaacttaaaacattacgcagtataaattttacacagtattttttaaaaaaaaaatatattatttttgaaaaaaaaaaatccacctcacaataaaaagttaataaattggaaaatttcagtatgtggtgtaaaaatctaataaaaatataataatggtataaatcattaaatatataatgttcattagttgtacatccaattacacctagtgaaattcctatttcggcccaaatgtgacacattttcttaggggaaatttacactcattactgttttttccatttttttttcatttgtactgtgacacggtggattttacttttgtactgttttttttt

SEQ ID NO: 126792 - DNA, 1871 bp, Cannabis sativa
  modified_base (1658)..(1675): a, c, t, g, unknown or other
gttgatccgaccaggtgctctaggtagatgccacgtgtcaccattctcgtgatgccacgtcagagtgccaattttgggataacaagtatgttttgcactattttggtttttctcattgtcttatttctctcattcttaactatatctccactgtctctttcgagctttgtattaataatggtctttctccttccatttttccctccagaggaataaggcagggtgatcccctttcaccatactttttttccttgttgcaaaaagcctttcaactatcatccattccaaagatcaagataatctctttaagggcaattctatttgtcgctcgggtcattgtatttctcactttattttgttgatgacggtcttctttttactcgggtgagctataagaattgtgaagccatcaaagatattttaagtacttataataaggccattggccaatcgatcaatcttgttaaatcttctgttctgttttctcctaatactagttctcaggacaagaactcttttcttcatttacttggcatggaggacaagacctttattaataaatacttaggggttcctcaatgtttttcgagatccaaaaaatcatctttcttttttatacttcaaaaaagcaaaaaataagcttaaaatctggatagaattatcgtaacaagtctttttttgtagattagaagccgtacttcaatgtgataaaattctttattacttcttacttgcaagaatatgaggaagcacaagttaggattattcctagaattaaagcaatcacaaaagacaattcctcaaataaaaaggcccctcataatttgttgccttgtcctagaaattataagctaagtgtggatgtagcagttcatagccaaaataatgtccatggatagggagcactgatccaagatagccacgatatatttatagctagttcttactcctcaacaatctcaggactgcccctattttcacagaagtagaatcccttcttagagctttcaacttatgctaggtgctccaatttccaattgaaatagttgtttcagactgtcaagtgctaatctccaacattctcaagaagtgtagggatcactcgactctttctgataaagtgtggaaaatcatctcctctttatcccactttcctggtgcaacaattagattcattcctagaagttccaatgttttagctcacaaccttgctcaacaaacattaagaactgatgaacagttgctttggaacaattgtgtttcaagttctcactggatctttgtaacctgtttttcctatattttctcttgttacagatcttgtatctttccaaaaaaaaaaaaaacttgcaactagggtgcatataggttggattgacagcatttgaagtaaggttgagatgtaaaatgaccctaaatttaaaaactaagttagtaaatgtcccttaaaaaaaattaacaaagtggccaaatataataaattacctaataaaaattataaaaatacatttactacatattaatttatttactacatattaattttttttaactacatattaattttttttaaaaaaaatatatatataataattaatttaagtaatataaattttgtagtatggcatattagtatattgtaacaaaaataaataaannnnnnnnnnnnnnnnnnatatacaacagtatttgatatattgtatcattgaaaattaatataccgtagtaattaaattatataccataatgaaattataataatataatactcaaatatatatatatatatgggtgactattcaatgtttacatttttattgtaactatatggttacattttttttacctgtaatagaaggttaccaataggt

SEQ ID NO: 126793 - DNA, 2940 bp, Cannabis sativa
  modified_base (2537)..(2542): a, c, t, g, unknown or other
ctggtaaaatatatccaacatttactacttgtaacgatacgtacactttcgtgtgcaaaatatcgcaacattagttggtcattcccatgcggccttttgatgtagataagccttagtaaaatgcgattagaattttaaattagttaaattagaaattatttccaacttaataaaactttatttccaatatttatatatttttttaattttactttatcggttaccgcttgatcgtttaacatttacacagtacaccatgtcttaaaaaactcaattactgggagtaacatcattattttcttaaagttatcattaccatgagagtacttacacaaatgtgcaaaaagaatttgaatgctcgtgtaacatatggctctcgtataccataacataacctatgtgcccccaagtgatcaaggaagttccttcattggtcacttgccataccagatctccccaggccttcttgatcatgacccttgagtggtgttacacgtgtgagcactctccaattatctgaggattcgtgggtggcagtatttaactcacttaagaaacaactgaagttatctcaagaccaactcacaagctttacttagcgcttagttagtgtcgttaggtctgtgagctgtaattgattaatttaaatgaagtaccaaaaaaaattaattatgctttttctcattaaattaagtacaattaccttactatgagctaagtttcaagaaaaaaagaatacactttgatgtagtagttacagaatttcttcttcatccaagcttagctaaagtgatcctcactatgctaatgccttgttcaacttttagcataggagccataccttagcgatggaccttttaacctagggacaacttcatcgcattatgttagttaagtggcgatcgttcacttacacgaggtagggtgaatcccactgtgaagtgagctattttggagacagctccttttattagtagtaccattatagatgcaccccgttccaataccttagaacctgttggtttttatggtccatattagagttataaaagcggaagcagaattttgataaaacagtttttatccaatatgaaccataagcccaaggatctcaacataatatatatagattaaatctaaattactaaaaaaattaattacctcttgaagcctattagggtatccttgtttcttttcgtataataattgaacattcaatctaagaactttgttgaagaattcataccttgatcttctaagccaaccttaacactaaggaatagagtgggctattagatcttattgtatgaacatatttaactattacagcgtgcactcaacttatgagatattggaatgagattagaattttaatctcacacacactttgaatagtgtgtacacgtgtgagacaagagagagagagagagagagagagagaggtgcatgagagaatgagaggagtctattttctcgtctttcagtttgttatttgtctctatttttttgtattctttttttgtgttctatttatcctactatatatctatatatagtgttatattttaagcttttaatcctttatttaaaataaaagataaatatctaatttaatttgaataaaaattcaaattcaaatataaacatataataactgaatattaaaatatcaatagattttttattttaataattatccaataatgtatttaattaataattaaaggataattaacttaatttaatttaaattatattgacttaataaattattaaactaaattaatcatgtgtctttatatgtcaccctacacgtgtagaatgggcatacacgtgtgggccatattttaaggtccaaagtaatttctcaattttaccataaataagatttattatttattctatcaataaataataattgattaattctcattaatctcttatttcacaaggattaaaataaatattattttctttaaaataatatatttctctctaaatattatttaagaataatattatatttaactaattaatatagtttatccaacaaaactaaatatttaaatactattaattacacaattcataattgtcataattaatcaaaataataatttcacaaattactattttgcccttaagaatttatttcccatagaaattaattttcactcgaaattcgttcatcaaataaaactttcccctgtacagtgttgtataaaggtgactcagtgaccgtgaatttatatttcaaaactctaataaacccaagattattatccatcttatcaatagaataatctggtttatcaattccagtattactccacaataaatatggaattgcacactttgacaatatagaattatatttatagaattcttacttgtagtccattgatataatcaatataaatagttcgccttctaattattagtttataattagagttggtcaaaataccattttacctttttaattatctcctcattcattaggtttcattaattcaatgtgaacagttaatctatannnnnntatagatttggatccaactattagcactcccaaaattaacattataagggaagtaatatttgatacgttaggaaagcttggattccactattgtataacatgttcccaaccactaatgttattaagctcccaaaacagaagttgtaagaatcatcttctcttagaaactttaaccagtgaatcaaagaactcaatgaacacaaataggattttatgtatactcaggatttagggtgatctactgatgatcatcattgtgatatgaataactcttgtcatggtaaacaaaaagttaatgaaagatgtttattacatatcggtccaatcatgtataatctaattatacacaatacatttactacatgtccatcgacatatgtgatctgaatcaaaattac

SEQ ID NO: 126794 - DNA, 2409 bp, Cannabis sativa
aaagattgataataaataaatcataaatgtttcaaaatgcatggaatggaagggcagtcatgttatgtgacccaacctcattcatttgtattggacagaaactagacactaacccattttggtgtaaagttttttttttcttcgttttcttaagtatcatattttgtatatatttttttgaaaaaaaacaaggtataatttattttataaaaatgctatctttaaattttcacaattttatactaatatatagaataaatagcattttttccttccgaactttttaccttaccaaattttgcgccttataatattatgcttgtcaaaaatagtcctcaaactatttaaactaataaattttcatccttctgttactctatgtttcactttggtttaaaactgatgatgtggcatttttcatgtaaaaaaactatgtaatgacatggcattactatttaattatcaaataaccaattattctaaaaatattaatatataaaaattatttagaaaattataataaaatgaaacgtgagttgagttggaaaattaaatgggctgttcaactcctatttcaaaaaaaattgaaaaaagtaccatttttacactgtgagttgagaaaaagatggttagggctgatcgaagttaggggtcgaaggtggctggtgggggtcgaagtcgaaggtaactggtgggggtcgaacgtggctggtaggggtcgaaggttttcaggcagttcagacggtggttgctggcagaggtctgtgactgacgtgacggtggttgcaggcctgaagggcgaccggtggtggtgaagaagaaattcttatgtgtatatattgattaattagttaatgggtttgtctaatgttgctgattttgcttttggttcataaatttaatgctttgggtgttgtttgatatagtaatggattccattcaagaaatatgattttttcttagtgttgttacagagatatctttgtaacttgtaagtaattactgctaccatcatagttatgtcaataaagtcaatagtttctgcactaaaactttcagtatctgacactttgtatgggtagagaagaagagtatttggtttcaaccctaatttgcaaattcattttcttttctcagcaatatatcaaggaaataacaccaccatctatcacagtaattttatctttttttcattgtttttcttttcttattaccataataacaggaaaggggaaatagaagaaaacataatgtacaactgccatgccataacagcaagattgtgaaacatcatcaaaattgttatactgatttgcttttaatgtttattgatactcataggttaatgacacaagcgtgaagatcgtcgtgcgtgaagcccaattttatttgcccatttcttttttttttttacaaaggggaaatagaagaacacagtcgtgcgtgaagaagagagaggaaataggaaatgacagctagggtttgattgtttatagttatctttttataatgaatttatttaatttgttgttttaattcattaatgtaaaaaaaaaaaatatttaggttacattaaaatatccacatcacccaaaattaatatccacatgtcttgccacatcatttttaatttaaaataatactgccatataagtcaataaacagcaaaattaaacagaagtgaatagaaggacgacgtttttgcattcgttataatttgaggactattcgtaacaaacagtacataatacggggcaaaatttggtagggtaaaaagtttggggggtaaaaatactatttattctaatatatatatatagaatattttttaatgggtattgcccattaatagatactaaagaaatttaactataaatattaatttaaaaaatattaaatcatttaattttgatctgatagaaaataataaaatagaaatttgaattttcaggcttaatttatcttattatttaaagaaaatattaaaaaatatatatatttttacattatatcaaaaatatatttatatgaaaaatatttaagttaaactcaaatttcttttatctttttttgccgaaaatttatttttattgttttttttataactgatggaacaacactagcccatataatgtaaaaatgagacatttttctaattaaatataaaaattaatcataaaaactcaattttttctaatattattatgagtgcattgtattttacttaattaataagggatcacgtagcaaaaaatctttttcccatccttcaataaatttgacaattttgaaactaatattacgtggaccactaaaaatttaccacgtgtacaagtgtgtacacgtggatagtccaccgtggcacttaactatgattttaagacagaggttgttatcccagtttttgca

SEQ ID NO: 126795 - DNA, 922 bp, Cannabis sativa
gagaaatgccaaaagaaaatcgacgaaattacagtagctgatccttctttattttcgttgttccttttattgatagagtaaaactgtggatcttgtgtggttttcatgttaacttgtatttgattaagcatcgttaacattcttgctcttgtgtttgggataatctgttcttatatcaatggcgatttattgaaaaataaatgcatacttgtttttcaggaggaacactacgttacgaagttgaacttcgcctggcctcacgcttcgtgcatctctggatttccagccaggggtaccaaagtcgtgattgttagctacagagattccgttggagaagtaagatgctatccgtgctttgattttctcttttcatcatcttttaggatataaatttcatgtatgaaaattttgtatcacaaaaggactcttcggatttcttgttcaggtacagaagtttgctctgcgattttctacaatttgtgaaactgaagcattcctcggttctattaaggtgattacataaccaattatcactagaattttaacataaaatgtttttaattcagaaaatttattgttttggcaatctttttccaggatatattgaatggtgctagtgacaatgtacctcttaataatgaagttggatcagcaatttcatcacaatctcacttcatgccttctaacacaccttcacatcggtaaaaaaagatcttctgctattgtcaaagtcaaatttagtatattccttctctttgcaagactttatagaacaattttcatgagactttaaagataaaatcttatgtttgtagagctgcggaggacacgaaaatgatgacttctgttcaagcttattctcttgaattgcctgcaatagcaaagatcgaagcctcacatcaacactcacagatcgaagctg

SEQ ID NO: 126796 - DNA, 656 bp, Cannabis sativa
  modified_base (601)..(620): a, c, t, g, unknown or other
agagagagagagagagaatgtgagcttgtagtgtggtgagagtaaataagaagcaaaatgtacttaagtgatagtgagtgatatagtgaatactgaatatatgtacttaagtgaaatataactttctttatgagtttggtaattttacctaagtaatattttttgttctgtttctctattatttcgttgtgcttatggttgatcatttttccccaacacaatcatagatgcaactactaatgatcgagaacaaaatcaattatcataaactagctagctttaataattaaaaaaacttaaaatgcatgaaactagggacaagaatataactttaaccctagtatcaatgctttatattataagaaagtagagaatgcttggtgaggtgaatatattatgtggcaaaatattgagatattataccattagagagaaaatgatgttattttagaaatttgcatgaatgttatgttctagcattgatgctattcattttttttaataaaaaattgaaaccaaaaagttattgtagctaaaaattaggatatatattaaataataatgtgtgagctaatatttttaagggaaatttacatggtannnnnnnnnnnnnnnnnnnnttacaaaaatactgctaggcggtattttttactttt

SEQ ID NO: 126797 - DNA, 1229 bp, Cannabis sativa
  modified_base (1194)..(1204): a, c, t, g, unknown or other
aaggaaaaattacatttggtctaattttttagaagaaaaaaaattcacattataaactaataaaattattagtgacaaatatataatatttgattttttgtaatagatattgataaatatgtaaaagttacttttaaactaactagtaaaaattattaggtaattactcctgaaatgaccgtttcagtatattttgtatctgttttagaatttagaagaattttttaatcattttcgtttttgttgagtaaattccatttatcatcagtcctttacttacaacatccacatcagcatatatcaacaacaattaacagaaaaacaaaagacacaatcctaggtggctttgcctctacaagaccaagaatcagaagttagttacaactgattttgtaactaatctgtgtgtgtgggtgaagatcctagggattttacttaggattgagcaagttcttgagaagaactcgcgttgctagggttttgatttttcgtgttgagtgtgtgttgtgtttgatcgtgtaaggcttcgagacttttcttgaagagtctttagccgagggttaaaacgacacagggtttggtgtcgtgtggttcaaagtgttgccgttttgtctaatttcatttagactaagaaaaggtcgaaattgaccttggatactgataataagtgttttgttggtgtacgttaaattggtcgaaaatcctgcagtggtatcagtagctagtagccaagtacaagactataaggattatgctatcaatagcaaatcagtttaacatggaaattgatcaaatggatgttactacaactttcttacatggagacctagaagaagagatctatatggagcagcctaaggggttcgaaattaaaggtaagaaggaaaacgtctacaaactggttaagtccttgtatggactcaaacaagctcccagacaatgaaatagaaagtttgatgctttcatgataaagcatgagtttaacagaagctatcatgacacctatctgtactataagggaagctcaataaaagatgtcatctatctacttctatatgtagatgacatgcttattttaagccaagaaatatccagggttgatatggttaaagatctgctcaagacaaagtttgaaatgaaagatcttgataatgctaccaagatccttggaatttcttgttgggttttatgccnnnnnnnnnnntccatttcaatgtaatccattttat

SEQ ID NO: 126798 - DNA, 597 bp, Cannabis sativa
tttaatttgacttatagtcattcactaaaaaagaagcaacaaaaatataataaaacaaaatagagctaccctatttttgtttttgaaaaaatgaccaaatgcattaattgaagaatttgactctacctttttcttaatataattgatgagcttcttttactatggaagagttgaaataaaatcatcatgataagaaaacaattgagaattttttttcttcttttttcaacatatgtatatatttaactttaaatgttgaacttgaacattaatttaggtccgtgttctacttcttcattttttttttaataaataaagaaatatggttgaacatttttatataattacgtaggaccaaaacaattgaaagtgattgtgacacaacaagtggaatacaaccgccataagattcacaggtgattcgcaaatttgtcttttggggccaatcacgtgtgctcatttcctccacgcttccttatgttgctgcattataaattataatgctatatatatatattaattccaatttaattattttatttatatacaactcagattatatcaacttatatttaaataaatatgtattgaaaaatt

SEQ ID NO: 126799 - DNA, 883 bp, Cannabis sativa
tcttctcctataattactgttcttcttcatttattatggttgttacccaatcaaactcttcttctccaattgtaaaaaatcccccaaaaaaactccagaaaaaaaaacctcgatcatcaatgggtaagaagaatttaaaagatcatcctcctagccctacatctcctattccttctaaaagaaaatatgattattcgttttttggttgtccttttatgatttgggtgcgcatttattatcatcgatatccctaatttacaataaaatgaagattataagccaagaacgactatagaacaacattaaattttgtaatattcattaataatcgtttctcaggaataatctatattaatctctactttttaaaatagcatgtataattatacatttttagtttatactttattttttttcaaattccaaatctaattttaggtatatttttttatttgttatttaattgaattagtgtgggtttaggtgtctaacctctttgtttcgtttaattatggctatgattagatggtagcctgagcattgtctgcccttaatgtatgctctgtggcagttaatgtagttatttctttttaactgtaaaagatcaattcttatcctaaatccttgaacttaactgtttccgcctctgttatttcaaaattttccactgataaactgctaatttctagttttttctcgatttaattccctcctgcttacttcccgattgccttcctttcgattgctacaatggaatccttcttctcagatgtttcaaattcacttactgaaagagaaaaatctgttgttagcatttccaacatatctgtccctacctttaatgtttctaatttccgtttactatgtcgtatttactcgaaca

SEQ ID NO: 126800 - DNA, 875 bp, Cannabis sativa
aatttttttttgaaaaaataaatattagcttataaaacttacattttttctccatatgtcaaatagaaaagtcatagaccttggttttctgcttgtgaaatttaacgaatttggatgacgtgtggggtaagatttgaggagaacactaacaaatgtaaaagtaagaaaagaaagcgctttcccaataaaattcattgggaagaagatattagaattttgtagattacgttttgtcaaaattagttaaagcttcaatcaccgcagcgtacactttttgattaatttttttttggtattttagaattcgagcaatttttagaaactacaaaccacttaatctaaatattttttaagcacaatttgttgtcttatgtcttatacacctaaattatagatttcatccaattttgagacgtctggaaagatatacgagtaggggtgtttcatctgatttaatctacattattttgttcataatgcatccgaccaccgcattgtaccatttttataatatcaaaattttgaattcgagcaatatttagaaataataaatcacctaatcttaagattctttgagcacaaaatttgttttctatgtcttatgcacgtaaataaaagaattatctactttcgagaggtgtagagggagatacaagcaaaatgatgcctgatattggaatatgacttaaaaaattgtgagttagtccataaaatttgtaaaaaaattttagttttgaaaaaattattcgttcctatactaaatgaagcattttcacgataaaaatcattggaaaagagatataagagttttgtagattaattttggaataattatataagacacattttttgtaaaataattacatttttacgtt

SEQ ID NO: 126801 - DNA, 1123 bp, Cannabis sativa
  modified_base (90)..(92): a, c, t, g, unknown or other
ttgcaataagcaaactaagtgtaacagtcggatcggctcgaagaacaagtatgcgagatgaccatctcgctatgagaagacttcttatannntcatccaactaacaggagcgaggcacataaccctagtaagtcagaagatttctgtatgcccgagattgacgtaagacatacattgtcgacctcagaaagaagaatggttctagctcgccgttgggatcactataatcaagtttctgtcgagacatctccagattcaacaattaaacacgtgtttaatccacgatattcttaacccagtaaaagcgggaaaatcacagctatacgattttcaaaatcatacaccgtattacatttcgtgatatgtaatcaaatcacacgattttagggaaatggctgtaaacatattttggtcagctttctaattaactgtcacgatgcaattataaatactggcaaaaaatctcaaaaaagggacgaaaaaactcttatgaaagaggccctgaaaaaaatactcagaaatctgaataagattgactagtggactatgcaaaattttaactgcagaaccacataaaaaaccctgtgttcatattttatttttctatagcttttattttttgtgtgttgaattatcatcgtgaggctcaaatttggttcatgaaaatctgtgttaacactaggttggaaccaatcaacataggttgtggagacgaggcaaaattctaggcgcgcagtggtttggtgagagggtttaatatttttgaaatttaaaagatgaaaaataggatttaatattgtaagagatctgaaatgttagagatgattcgggttaatattgaagaagatgaaaccttcaaatgaaaaaatggagaagagttctgacgacaaagtcgtcagtgatttttctagagagaaaattcctgactgttccaacagctctttttcgaaaaaaaaaatatatttgctgacgatattttcgtcattaatatttatatcaaagtcgtcattgatatggtgtgtcgccattgatgtcaaatttagcaaaaaaaaatatacatttttgtaaagtctttttttggcaagttagttgacaaaataatttttccatttatggtaagatt

SEQ ID NO: 126802 - DNA, 575 bp, Cannabis sativa
gcccgtgcgtactgcagctggatagtagggactattttgtatcacttggacacgtgtccctcaaaggtttaacctttaaaagtagaggtcacgtgtcgctcaaatctcatgcctttataagtaggagcctgtaatattcgtttggcaaaaaaatggtggtggtacgcgtattaccatgctcggatgtaggagacaagatgtgatttttgtcagaaaaagtataaccattactttagtgacctggcatgtataaaaggtaagcatcgggtacatctcaggatggtagacatccacattaaacctttcgagtacccatccaaatttggtttcagtgaacttcccttcttagacccttccgggtctgggaaagacatatcgccttccacgtctgggaagttatggcgagtataagtaggcctccatatatccttccttcctagatacttcccagctccaagaagcctctttgtgacagggtagttttacattaagttataatagtctttatattttatttctaatattattttctgtaagcaattattatcagtcaaatagttagcgaattaatattt

SEQ ID NO: 126803 - DNA, 1177 bp, Cannabis sativa
atgacctcacccgcataaaaaaaaaactataagatttccttggaaagttggcttggcttctcaaaaaatggctgagtgtatcccagtaacccaaggggcatgcgttcttaaacatgaccatggagtcactgggaaacacccaccattttgaaaaaatccaaccaaccctcccaaggtgtaaatcgcacgtgtgggattagcagagtgcctcaaaaaatggttgggcatatcccagtgacccaaggggcatcatgcgttcttaagtatgaccattgagttactgggaaacacccaccatttcgagaaatctagctaagcacaacctgcgaacatacctcgcatatccaactagtggcatacctcaagaaacagctgaggagtctcctgtatcccaagggacatgcctttctcgcataaaccattgggctaacagaaactcctcactgtttcgagaaaacctactagtcgaaacacgtagttgtacaagaaaagagaaagctggctatacgtcccaaatggctgggtgtatcacagtacctcaagaggcatgtgatcatatgcatgaacattaggttacggtgacacacccaccatttgaaagacctaaccagtattcccacacaaaaatacacagagagcataaagaaaaccctaagttctaaacagtgggtctaaataaccaaatctctagaatccctaagtaagtatacatgcgagtattcaaaatagcatgtaaaaagacgcgaatgttccaagtgttcttccatggattcacggttatacaaatttcaagtctattttctgagaattacccagttctaataaggccctatgtgtattccctacaaataaacatacagtttccattcctaaaaaaaaattcaaaaatacagatttctcaaaatcagaaaccaaaatttgtagatagtctcgaaaactaacgttaaaaatttgatgattccccatgtgaatattttcgatcatttcaggaactttgaagattcaaaagaggaaaaacagagatcaatctgagagggtattttctttgaaatttcggacgaagagagaaaacgaaaatacgagggaaaataagggaatcgtttcgtatcagggggcttaaatactaatagccctcataaattgggatcgtgacacgtggcaacaggaatgcctaagg

SEQ ID NO: 126804 - DNA, 1146 bp, Cannabis sativa
  modified_base (157)..(172): a, c, t, g, unknown or other
ataataataataatagcatcattgtattttcagcattcaacatcaatataatatataactggcttatagtttatatacaactgtaaatgaattttaatccagtagaagcagtagcttgtaagttgtaaacgtcatgtatctctctctctctctctcnnnnnnnnnnnnnnnntatatatatatatatatatatatataatctacctattgtgtaaagggtctggacaagagggcacttctctgttgatagttgcataaaagccttgttctccatcaataatatgatcttcattaatgttagaagtagtagaactttcagtactacttctccaagcttgaaccttgttaagatcttccatcttctccgtacttgataataatctagctccataaactccatggttgtactgtagagcaataataacagtactcatcaacaaaatcatcatgaacagacccttattaagtactacttgtttagtactaaacatggtctttttttttttttgtgttgagaaccaaaattaagatatgggaactgtgaactgggatatggctctttttggagaaaaaagagaataatataatgtggactggacacaataacttatgataaatatcagagatactagtagtagtgaataatagtacttcttgtttaaattgtttaatgagttgggacatataggctttaaagagatggagaaggaaattattatattgatttattggctgcacacgtgtgaatgtatgtatatgtgtaaagctggaaatatttggtcaattctttacaccacatataatccagacaagaagaaaagtgatgagactttataattaacttatggggtttgtgggagctactatgtgcgggtggttgaaaattgaaattgtattcaacactttctctaatagtacattagaaacctatttttattactttaagccttgtttagcaggaaaaaaaaaatgaacaataaaatatgtactttctctttcattaattattattattttttttttttgaaaacaagcgtaggattatattataataaataaaactagacctcctggtcgttacataaaatgtttaccggtacagaattgatcgggatcgatccataaacctggtgggtaaaagcccac

SEQ ID NO: 126805 - DNA, 1344 bp, Cannabis sativa
catatgacccggcttgttacagttctaacacaaaaattgcacagggtcattctgtttatgtgcaggtggctgccttccatgttggttcctattatggttccaaccctgattattgttacgaggaggattgttgtggttagaattagaattcgagttgcgattctgattcttgaaatttttgccattaggcttcagaaccgcttgtgtggacttcttagtgttgttgttttaaacaataagcacttcatctttttggtcttgttttctcgcttcctcctctatacgaaggcggttgatcaaactttttaaggaaaattccttagtcttatgcttgagagtacttttaaaatccttggttaactctacaaaatagagttattttagcatattttataggcaaaaattggtttagttcttgactttttaattattttattaagttgttaagtatttggaattctttagtcttaataattttttttgtagcattttgtgtgtgttagagtaattttattttgtttagttttaattttatactaattttttaattaattttctatatttttaggtgtatttattagccaatgtttggagctaaattggaaaaaatgtgaagaaatggagccagaatttcaaatttcaaaagcaaactcagattcggccctgacaaagcccagccccagatcaacaatctcctccatccggactgtctgcaagcagatcctattgtctaggagcgcgcgtgacgaccacctccagaccaaggcccgtggcacctcatcttctcctgccagctccagcacgtgggccccccacctgaccgcctgtccccccacgccagctcctcagtgtgccaagtgtctgtctctcctttcagctgccatttcagatgctctccatgtgcaccatttgtcagctcctcattccaagccgcctcttccaagctatttgatgctgccaagtgttccaaatgcatagaaaatgagactaaaatgtcaatttcaaaaatacactatcattttctattctctttcatttatttggctcatttttccatcttacactattttctcaaccaataaaattgctcattatatattttacctatttacttctcatatcccacctacctcatttatgccaaaaatttctagaaaatattaaaataattaatttattaattattttaattcactcactttggctataaatagagagttttggagaccttttgaagaacaaacaactcaacaaccaacactatgttagacatttatatgtatagactaaaacatatatgtttatgtataaattgcggaattaaatcaaacatatatacactat

SEQ ID NO: 126806 - DNA, 1264 bp, Cannabis sativa
  modified_base (177)..(182): a, c, t, g, unknown or other
  modified_base (622)..(629): a, c, t, g, unknown or other
ttcaacatgcaaatgcaacatataaaattaggcaacacataaatggaatgagcggaaaaaatcatcatcgagcaaaacactaggccacagaaaagctcttaaatctctcactgtcaaactaacaaacatataaatcacatggcataccaatttaaaacacaaaagacaacacacaannnnnncaatacaaactaaaaacgacacataacagaaaaatataaaatagcttaggtattaggaaactccctctactcggagtcctcgtggggctcctccggattcgaagccgatggcactgcccacgggtcgagaacctgttgaggaatctgcaagaacttggcatccacaacaaatgccccctaatccaacacacttcccaagccacaccaaattgacttcaattcattcatacaaaccattcacacatcaatcggccatggtgcattccctttgtatatattaatcacaatccaatctatccaaaacacaacacttccaacactgcaccaactcaagatttaaagcactgacactaataagcaccaccacaattagccacggcaaagaacaactcccaattttttttttttctttttttcttctttttttttctttctttttnnnnnnnntttttttttttttgaaaccactcacacaccaccttacacttctcaaatcacaacaaaaatttcaaagtcacaccaacatttttcatactacaccaaatccacacaacaatcactccctcaaacagtctattgttccaaaaccacaccaaaattccaatatcacaccaatagttgcaaagccacaccaccaattatgaactacacaaataatttcaaaaccacctcaacacttccaactatcaatttatccaattcaaagaatccacacaccaaactaacacttctactcacaccaaacttccaatttcacaccaagaatttcagagtattaatggaaacaaattaagtcattcacatatcacacaattacttggccaccatagcaaaattagaatccaaataatagcaaagctgctaacaaactagagaaattcaagacaagtgtgactgcagtgagttaatcgattgctccttgtacttctcggttgtgatggagctagtaatggtggttggttgctgaatcgtgaagaggacgggatggagaaggtggtgtgaatgaatgttagtgattcacgctggaatggtcgacttcaggtgttgctggacgagttgaacagagatgatggaatggctgg

SEQ ID NO: 126807 - DNA, 962 bp, Cannabis sativa
tgccacttggctttctcccaaactgctacgtattttcgaagaaatcccaaacaacagtaactttaatagagaatggaacaagttaaaaaaaaaagaggtgataaactaaccacattattcaatacacttttgtattatatatattatttcaaaaaaaatcagcaaaaaaaaaaaagtagtaaatttaattttagatgaaataacatagcataaaaataatgtaaaataacaataaggaataatgttataagaataggtgaacgaattcttactttttgttgattattctgtttttgagtggatgatatgggtgtttttagtagatttgtattgtaattactaaccacaaacttaaaagataaaaaataaaaaataaataaaaaaataggagagaggctaaaagagaaaaaatgagatcagtaaaaacatagttttaggctatttatagttgtgtttagtatatttgttttcaatatttagtaaaaactagtagagaaaacacttgctgcacgtgcgttatataattaaaacagaatatattatttaaagttaattaatttgattataatatattttaaaatagataatttatagaatatgattcatcttatataaaaaaatctttcattattctaaaatgagaaaagaagacttaaatttttgtaaaaataatattaaactaattttatttaaacatctaaatgatttttaataaattaaatgattaacgaagcagtttttataaatcttatatataaatttgtaaaaacttaatattttttttagtattattaaaaaaaatgtatagaattaaaatttaaacatgtacattttagtaaaaaaaaggtaattagtaattccccccccccccccgaactatgacacttgttatatcgtgccctccgaactatatttgacgtttaaaattcccctcaaactattgacaatgcttaatttattat

SEQ ID NO: 126808 - DNA, 1088 bp, Cannabis sativa
aaaaaaaaaaaaaaaacaactttctcacaacagagatatgtaaaaatcaaagcagaaaaaaaattaacatacccgattaatgcagaatgataccatgccagtggaaagggttgtgaagctgcttttcttctttcctgtcaattacctctgccttattagtttaggttctagaaatataaaagaatgtgtgagagtaagggatgaatatgtaagataaaaaaagaagatgaatattaaaattttagataaacatttattgagattgaatcattgacatggagtagatgaggaggcttaaaattttaatgtgagatggagaaagaatatggaggcttgaaatcatggacatgggctagctgcttagagtttgaggttttgatggagaatggagagagagataagagagccggagagaagaaaagaaagtcactagagacaacttggaatttggagagtcaaatttggtaaaggtaaagtaattttttttctttatttaatattaaacgggtatgcgattacttattattatcatataacatataatattatataaagggccggccctaaaacaaagtgggccatagggagaaaaaaaaaattgggtccttatgttagaaaaaaaatgtggtatttttcaaaatcggtaaaaaaaatgtataattttaaaagagaaaaaaaaaaattgggcccctgggctgggtgggccctaggcacaggcctagcccgcctatgcccaaggtcgggcctgattatatacatactaaactttaatcggtcggttccggtttttgttggtcgatttgctaccgatataaaaaccgaccattcaatggcggttttaactgtttttggtttttttggctttcggttttaacggtttcgattttagtggtgttcggcatgtcagtttgaacgattttttcagttctctggatttcatgctcagccctagttgcaataaactaaatacttatggatgttatgccggaaattactcaaagtataatagttgtgactaattataaatcattattcttatgttgtgactaaaaggtccgtgactaatgactaaaggtattagtcacaaa

SEQ ID NO: 126809 - DNA, 551 bp, Cannabis sativa
  modified_base (397)..(398): a, c, t, g, unknown or other
  modified_base (490)..(502): a, c, t, g, unknown or other
gtaatgggttttatttagggcacaaaacccaacagactccccatacttcgtcatgtttgatggccccagtgtcgcgctttaattctttgcaggtggtccccctaaaatggcgcccaccagagatcatggcgattcttccgttgggtctaggtggcaggccaagggtctattgagggattgatccttcggagggtacaactggtgccaatgcaccgagcgtacctcctggtgtcgcttgaggcactggaccccctcctggagtcgggttgagatgaagcagccggtttttgatccactcatacaggtgacccaatcggatcaagttttcgatctcatctttttagattcttgcactaaatgatcttaatcctggtatggttaggttcgatctcaagannattatacatgttctttaatttgttatttcagcctattttttggtcagggtatacgtgcattttgggaacatggtagtgcaactgagtgggannnnnnnnnnnnnatatggaatctatagcatctatagatatgtagaagtgaaatgatgattt

SEQ ID NO: 126810 - DNA, 794 bp, Cannabis sativa
aaagaggaatttggttttgtggagaatacctgggtaaggatttctacttgtgggatgccaaatcttttgaaatttgagacaaacgacaatatggtagaaggggttgcttgcttccatattagttttttttctatcttaaaaaaaaaaaatttaatatgttttcacatacttgtttcaggttatggcttccatgaggatggattaaaggtgcttactaaacgaaataaatttatataaaataattcaatcatgtaaaaaatgttgttctcaacaatggcataagactaatgttcatttttacaggcaggactggctgcagcacatggtttgattggaaaaagttgtgactttcttagtaatccaaatcacatgctaccttccctgacggaaagaggggcacgcctttttgttattaaatttcttaaacaatttatcactaaaggatgtttaatgtgagtaattgtactcctgaagttggaatcatttggatatgctagttatttgttgaataaaattcaaatccttacatttttttttactttgtgtgtattttgtttcaactgagatcatactttatagattgtacacttgttgtgtaacagtatattggaagaagggggcacaattttcacttttgaaggaaacacaaacaaatcttcacataaagtatctatcaaagttcacaatccacagttttattggaagattatgacagaggctgatttaggctttgccgatgcttacatcaatggagattttacttttgttgataaagatgaaggtttactaaatct

SEQ ID NO: 126811 - DNA, 525 bp, Cannabis sativa
accttcacaaccaaactcagccataaacatcccattgccatactcagagaaagaaataggagcacgagtgatccaggcatttctcatagcttcttcaaaccattcaattttaatggttcgagtagtaaaaactctaaaaacaagacagaaggatttccccaattcaacaccctctcccacatcatctagatgttcatgaacgacagcctctttctcagtaagggacaacacactagccatattatcagcaataccctccattacccaacacaagaaaaacagacaatattcccagtaatactcagagaaggaaaatagaagcaagcataagagtaaagaacgccaaataacccacacccttaaatagatagaattagagaaatacctgcatgtggcaatcttataggagaagaaaacactcataatgatcatcctactctgcagtaatcctagcccaaatccaagagccttagatgtaatcatcgaactcctccttgagaaagccaaaacgacggcttcaattta

SEQ ID NO: 126812 - DNA, 955 bp, Cannabis sativa
  modified_base (913)..(930): a, c, t, g, unknown or other
tgctgaatgctaggattgtgggattgaggctgtatacaccgatagtggaatcgtgtgtatgccacatccacgcaagttgatccctaagttatagggattgagttggcgactcacgaagtgctttgttgaattcgctaagtgttgctcattctgcacggctcgttgagtattccatcatggacatgccagcgaggcatcccgctcggcatgttgatccgaccaagtgctctaagttgatgccacgtgtcaccattcttgtgatgccacctcagagtgccaattttgggataacaaccttcaatatcaagtactttatgattatggatccataagttcctttgatactatttactgagattttcaaaaacagattaataagagcctaaggaatgcaaaatcttaaataatagataaacagatttttacgtggttcggacgttaatgatccctagtccacgagtcagtagtattagctttctttggtaaatgtttgagtattacaagtgtttacaataacaatatctggattccttttgtttctctctaaaaataaagctctttaggaattttagcataaaaattgttctccctctatacataaaaatgggaggtatttataggcccgtaggtgggccagggcataccctcttaccccactaggttttcttactcaacagacaaatgaggctgtgcaatactacgagaccatttgaccgttcatttggtaggtagcctttccatcgtgaggtacttaattgatgcaggttatcacatgaggacatgcacacgtgtcgttcaaagggatctcctttaaaagtaatatcccagacaagtcgttagacaatacgcactacagaggtacgtacgtgcacaactatagtctgacgtacgggactgttggaaattattttannnnnnnnnnnnnnnnnnaccaagtatgttttattaacatcct

SEQ ID NO: 126813 - DNA, 1170 bp, Cannabis sativa
tattaataagtaaatctgattaaattgaaatgagttttatttagggcataaaatccaacagatacatgttattctaatcaccacattgtaaagtataatgaatggagtctaaggaattctaggttcttctaaaatgactttaaaactaaaattaattttttatttttttttatccaaacacttttagaaagactttttaattctaaaaactaaaaaagagattttaaaagctaagccaaatagggtctagattgaaaaaaaattaatacgtcttatacctaatttttgcaaaaaaaaaaaaataaataattaaatggctactcttgcacagggccccacatgccaagagtgccttgaagatactaaagtcaaatttgcgactttgaccaagacttataaatgtcaaataagttaagacatccttcttgagggccccatgacacctctagagcactcaagaacattaaccaaccatttggtgttgggactcacacacccaagtgtgcccaaactagggttcatgggcttgcacgagcattttcagcctagaaacctcaatctaccaaggaaaccaacaaggacttgacttatttgggcataaaatggcttaaatttgtgcataaagtcaaaatggcataaaactcccatggaataaagcctatgcgcccactgccatatagaaatggcagtggtctccaattttgggagagtagtgccacaagaagatggcagtggtcgccacttacaaagtaccaagaggaaattgatcaaatgtgctccctcaatgagtggcagtggttgaccatgaagaaaggaaatgagatttcttgctaaaaatgtattttcaccaataatatgtcaaaatcaagtgaaagaagccaccaagtggtgtggaaaccacttggtcgaccactttcacacttttgggacgattggtggcagtggtcggccaccacataggaggaggagtttcatggaaaaattttatttccaacatctattcatcaaatacaagtgagaaaagtcaccaaaggcttcataagccccttatgcgaccactgtgccaccttttttggcaaaaatggtggcagtgctctcctaagcaattggccaagaaccaatgtgacaaagtggttttttagcatccatatgactaaaataagtaagaaa

SEQ ID NO: 126814 - DNA, 797 bp, Cannabis sativa
gctcatacaaaaataattacatcatcattttttatagaattttttacggctaaatcctcccatttatcatttcacttgcacttaatcttacaagttcaaattttggtggtaaaaccatccaaactatagaactattagtaaatttaaggtgtcatcaatttttcacagttaactgctaatttggattgcttatgtgtacactcttgtacacgtaagtgtacacgtgacacatttatactgatacacctaatattattatttaaaaattataaaactaattataatatttttttatcttttatttttataatttttaaataaatattaagtgtatcaatataaatgtgacatgtatttaagagtatatacataaacagttcatggtgacaattaaccggatatttactaataatttaataacttgttattgttattgaaaaatgaagcaaaatatcactgatcattgattgctagctagaggtacattattgaccaacaaatttttatagtaattataaaactattagaggagtttgaatatcttagatattcgtccatattaagttaggttttgcaaaataaatgtactgcagtcggatgactgacaattattatattgttaattcttttttttggttattttgtcttgttacctgatttacttgtgttgtttgttgcattgttagatagttatttatggctataagatattcaattatgcagttcgaaatttgaaagtgagcactcgaatggatagagcaatttaggacaagcattaaaataaggggttttttcat

SEQ ID NO: 126815 - DNA, 924 bp, Cannabis sativa
cttaaattctcagtcgatgtttgctctactccttccaaaaagttccaaatgaaaataagatgatccaactgtaaaaatataaagaaaattagcaattaatataaatcacaaaaaactatttctaagactgaatgtaccaaaaaaaaaaacttatctgctaaaaaagttgttctatagcgaaacaagcatattatttaaagtcgcaaaattcaaaaatttccattccaataactctttaatttcaattactcaatatctttatgactctaataactaataattaaaatactcaaaacccccacaaatattataaatttagaatagtattattagaaattattacaaagatacttggaaaaaataaaacatacccattcacaaatcaatttgaaattttatatgtaattgtataaaagttcattcataattatacatagtaaaaatttactattgtaagaatcaaataagcaatcatatataaaaagaataccatgatatatttgttaaaattaagcaacaaaaactgaaaataaatttttttattaaataataataataataattaaaaataaaattaactgccgcaaaccgacagagattaaagtcaccagaggatacaccgtaaccaccacaccaccacaaagtccacaatctccgtctaccaccgcaaccaccatcaccataccaccgcaaaaccaccaactacaccaaatctgaagccaaatataatctataatgaaattattttaaaataattcaaacactaataccttacagtttgttaaacacagttatttaacactattagcagttaaaagttaggtaaagagtcaaaccaaaggggtttccctttggttttgactctataacaattatactctaaaattttgagttttaaatttaaaagtacttattggtttaact

SEQ ID NO: 126816 - DNA, 904 bp, Cannabis sativa
gattagggtgtaattagattctatttcctattgagttatataaatgaagctgaaaatattttttctttattggctcctttattttagtgtgatgtaaaacttaatatgtttctctaaaaaaatattttgaaaatacagaataatttactcataatatttatgaaaccacctcattcatctttcaataatttaaaagaaaaaaaaaattacttatttctgctataaaatgtatagtgaataatgtaaaatagaaaagaaaaaaagaagaacatatgaacaaataaatagaaattgaaagagagaattttttaagtagtttattctaatatggtgaattcttatttattaaaaatagaacttgaagaatagaatattaaaacaataaataaagggaaatacaaatggtatctatgctaataattgatttgggtaatttagacattcaatttatatatatatatatatataatattttataacactcttcttggatgtacataataactgcttcactagaaacattgctagaaaatttagtaggacgaaaattcggtccagaaaaaaagagtacagtctaaattaactccccctcatttagatattcgtaaagatcttctaatcgacaaattctaatcttatatgccgtcttctcaaatattgatgttggtaataattttgtgaatgcatttgcaagattgtcacttgatgaaatttgtttagcatcagtcgatatcaccactctcttgaagatcgtgtgtaaaaaagaattttaatgaaaagggtttaattcgcccttaattctatctcctacgatgtacatttattttagttgagcgatgaaagtaatattatcttgggtaaattgcgccataaataccttaacttaatgtttcagattttatac

SEQ ID NO: 126817 - DNA, 1232 bp, Cannabis sativa
  modified_base (1165)..(1202): a, c, t, g, unknown or other
aacagagaaaagagaaacactaaatacaaatttaatatctatttctctaagatttcattaagtactcttttaaatgctataaaaatctgagcactttgttcatctccttccaatgataaatagttgctggatgatccatctatgcatctcgtattgtttattttgagaaatctacaagttaattaaacaaaaataaaaattacaatcattagaattaattattgtgaacaccttactgtcatttcatatataaaaattactaataattactataaaaaatctattcagcaaatgaacaaataatttccagaacaattaccataaatttgctacataggaaatgaataattaataaggaaccaagtttgcaaattgactcaatacccagaatcatgtaattcaattataattatcttatataattttgtgttcatgtataaacacacatttatagagtggtgattcatgattgatgaaagaaaagaaaaaataaataataaaaaaaaataagcaactcaaatgggttgtttgcataaagaaaaataaaaattacctaatggagccaaagtgtaatccatacgtaaatttgatgaagaatttcgatgttgaatgtataagttattacctgaaaacaccaagaaattattttaattaatgtagaacttcaataatgaaattgtaaaattttaaagtacgaaaatctgtatattaattaataccaaacatatataaaaataagtattaagtttagaaactacataatttctttggaacatttcttaatatcaatggtggtttaaagaaagcaaattgcagttttacttttttattttaggtagctcatctttgtaagtacgcattattagaaggaggttacactccactaattaaaaatcagtttaaatctttattatatgtggtaacatttatatagaaagtgttgtcttttattttttatcttcatcaatcaaaacacttttttaaaggtgttgctattagtaattattatttagtttaaaatataattgtttttaaaatataatatttttagcaacgttttatatttttgtgtgtctaattataaaaataaataagttagcaacactttttaattaaatgttgttaaataatatttttgtagtacactaagtacccaaccattgcnnnnnnnnnnnnnnnnnnnnnnnnnnnnnnnnnnnnnnaacgactagtaactaatcattaatatgcaa

SEQ ID NO: 126818 - DNA, 830 bp, Cannabis sativa
tgcttgccaaaagaactacccgcttctctttctgatctacgcattaagaattgtgaattgctaacaccacgagtcgagagggataggggggaggactggccaactattgctcacatttcaaatataattgtggatgatgagaaaatataggtattactcttttctcttctcagtcctacttgtttgaaagctttattcaataatgaatcaatgtcttcaattccttttctgttttaggttgtgttatgttgtgttgtatgtacaacactcctaggtttcagcagagtgagattgcttagaaacttctcaactctcttgattgactttgatttttccatattgaccaatgccattaatgttcatgtttacatttgctttcttaatctttgttttggatatgaaactgaattaagaaattattaacttaatacttgtggagagaagtataataaaatgtgcatgaattcaattgttaatgatgttctttcaaaagtcatattagttgaagaagccccttgaaagtattcttaaggttgtctctgcaaaattcaaacatcaaagaaacaaaactaagaacaagaagttgatctgaattttactaacatgacagcttgtatggttcatttttctgcagagatgtgtggatggcaaagaagctttggttagcattttcggttgcacatttgcatgcttcgcaactactttctttccttacatttctgattctcatcattggcggttgatctctactttttaaggtcttgatctgataatgaagcaaagttattggaagaagaaggaccatttgattctaccactgattaatgtga

SEQ ID NO: 126819 - DNA, 697 bp, Cannabis sativa
  modified_base (64)..(68): a, c, t, g, unknown or other
  modified_base (644)..(648): a, c, t, g, unknown or other
ggattggattttgaggtccaattggattggatcggatgatgatttttcaaatccaattactaannnnnttggatcggatgaggaaaaaaaagttggattggatcggatgtccacctctaatatatatgatgtgaaaagatgcccaaactaaacctatgtatatagtagtcattttttatttatgtcattcattttataaatttaatcaagttgtgcatgatcagtgtccttgttttaataatgcagtagcccacaccttagcaaagtttgctttgtcaataagtgttataacagcctggctggctggctaccgacctctcttattttcaaactcatagttttttttttttttttgaaggaaaactcatagtttgcatgatgcaaataatttataaacatagttctgtgtcccctcccatctctagagtttttttatctagaaaatatagttctttgggacctgtttctctaaaaaggaagagagagagaatatataatgaatatatattttgggtgagtattcaatagttacagtaaaaatagtaaaaatataatcataattgttttattttcttatgactttctataacatgtcactaataaaattttatttttagacttatataggtggcgtttggtaacannnnnttaatcagttttctgtttttaaaaatagaaaagtgaaaatatttttcaa

SEQ ID NO: 126820 - DNA, 3087 bp, Cannabis sativa
atcaagggatctgaactgttgtgagcgcctaccatacaatggtgtttgatcgacactgcctcacaccccaaatggtctttaaaagccaacactttcctcaactgggtcatttctactgcactttagtttccaaaaatttcaaaccaattcgataaaattccagatgcccctgattttcttttgctcttcctccgccgttgtaaggcaaaatattatcatcacacgatgtcttcattcctctcctttctttcattgtgtaagttctctatgcttttatacttcttttcatctgctagggcaaatagtgataataatgtgtaattatttgctttgttggttccttcaaaatgatggccttggttgccgttggcgcgacgccccctttgatgggcgtctgatggcttgtgtctttctttatcaccatattttgtttttcttactttcactatgcatgtattgcttctctctttcttttaaagagctgagatcagagggttttttgtatgcccctgtctggcagttcgaagttgcttttgcacgccatatatatatatttttttttctgattttcctgtgttgcttggatattttgcacctgatgtctgtctttgtgaatcgtttaattccttttgacaaccatttgaaggggacctctttccatcggttaggggacccccattcccctttttgacttagggtttgatgtgggggctaactcctgggatttcttatttattttagatgagtgaagtcctatgaccatcacaaacacagtttctttgggttcgaccaagaaattctcaatcgccatcaacccgactctatgtctacccctgcggctaccggagttaaatcctccaagaaggggccaaagaagttggccaccttagaggaggttatgaagggctcagttatttacaagaagcttgtgtgtcattccaatggttgggagactgacgaactttattcgatattaacttgcgcccatcaactagagaagattgtcactgttgctgggattaagccctctggttttggagtttaccactgtcttcccaaggatgaagagacgccaaaccacaactacaatggcttcggggttggagtcatgactcatctaatgtccggggccatgctatccctccaagacttaattgacttccttgttttcgttgggctttcaccctatcaactgattctacaagcttaccgcctgttatcaggcttctttattttttatgtagccaagagctgggctccgcccgacctcgctaaaattttatatttttacgaactactttcagtccccaagaagggcgataaatttaaagacaatttttacaaacttcaggcccatttggccaatgagactttagttccctttaatttccaaaagaatgtaaaggagtatcgccacagatttttcttctcttttgggttcaaggccttcgagtgtccagatctactaacagactgggtcaagatatcccccatgcattgtactacccccacccaattcttcctaaaccatgcgcaagtgttttccaattacaagaaataagacttgaatgtgggtgacctggttacgacagccaattgcaggagggccaagtttattttagagagtcaatttgtcgatgacttcaacttgtctaaggtcttttggcccaacgtccaaaatcttgggagtgaaaaagcgctcagggcagacattatttcatccgcaaaagataaatataacaagtatagatacaaaagggagcaggagctcgggtatgctcgccttcaggcttgcctccgggagggtttcccaaaaagaggcagggaaagaaaaaactccagtccagcctaagtttgcgttcctagttccaaactccgggtcccttggcgcaaatacctccagagtttgtaagtctcatttgcatattcatctcgttccttttgtccagacttacgccaacttaaggccaatggaatttgataaaagactatatagctttcggatgccccattcccagtggggcgataatgccaagggtttttatttctccaatttaagtcatttcttgggtcggtcccggatgggctctggtcctcccgtaccaatccttttggatcattcctcctacatgactttgagtcggtttcttccttcaaatagctttttaagagatgacgacactagctttttaatttatgaatttgctaggactgaattagatcaacagggtaggattagtctcgctgcactatacttgcatttgtaattttttgttgttaccctgaccttttgcttattttgaacagtgaaacccatggaggatcctctggacgcccttgcccagactcacagccccgagtcagacatgtcgatgcaccctcgagtgactatgactccaacgggaccttctattgaagctattaggaaccaggaggtggttttgatcgatgatgaagaagaataggtgctccctaaccttgaccgaaaatgtaaaagcgtcgcctctgagctaaaatcttaaaagaagttgaagagggttgacacccccgaccctagtgtcgattcagggattctttctgagattgacgagtatcctgcccctctaggcatcaacctgacccctgcccatcctgacgaggaaatgatctagctccgcatcactaaacacaactatgttatggaagagttgtccaagggggacgctgaagcggaggttataaagaagtggttgaggcaggctcaagacgggtcctcccgaggtgagtatacaggagatgtttgggatcaaaacttggaccccatgacagattggtttaagcgcttcgtgggccctaatcttgttccatttgcttcagagatggtgagtcactttcttgctaatttaacccagcttcccactaagaggtatgtagcttgtgcttcttctaaccccatttactggatccgagacatgagtgttgccttgatagcaataagtgtcaattttttacgcctctttttatattttattttcaaagttccaaccttattcttctttggtgctatattgctgcggaggccggtcgactttccaagactttgattga

SEQ ID NO: 126821 - DNA, 847 bp, Cannabis sativa
  modified_base (806)..(813): a, c, t, g, unknown or other
cctattctctctacgtttagtcgtaaattgattctcaattgtagagtgaaccatttgaaataggttatacgtcatatgtttgatttcgttgttaagtaagtttgactttgataatggacttgagtaactatgacttggcatattagcctacacagatatataaagtagtagattgaaagtgtactctttgggccgtgggtagggatgcacacgggacaggaaatttgtagggagtgctcctcccatccccatctccgttaagaattttagtccccatccctgcccacccttgcttattctccatcagggacggtgcggccctaatgaaaaataaagtttgtttcaaaatttaaatgtataaaattataaaattacctaaaaattaaaatattataaattatttattatacaatatattaattattatacgaaaacacaacttaaaaattataaaaataacattaatatactaaaaaaatacaaacacatattataaaatatgaaatattaatgaaaagataattaataaattaaacgggtccctgtcggggtggagagtatcatccctatccctgttccgtttaacatttagcgacaaaaaattattctcatctccatcccattccctatttagaccaaaaattctcgcctcatttagagtgggtctctacgaagcccattcccataagagtgtcaaaatccaatatttttgtaagttagcctaagaaaaaaatgttgcatccctagccgtgggctgtggtactattttttagaggaaattacacttagtatgggattttaaaagnnnnnnnnataaatatggcacatttaagtttggccaatttat

SEQ ID NO: 126822 - DNA, 1128 bp, Cannabis sativa
ctgaattaaaaataatgcaacctaattactaatattatgataatattttttttggttaaaaaataaccactatgaaaaatatatttcattttaaaataataaataatttagactaataaattattatgaataattattttttttttttatcattttatataataatagtcttatatctatattaaactgatactaataatataaaataaaaaaaatctaaaattaaatatattatcctatattaataaattattatgaataattatagattttaattattgtatatacataataatattatacatgttcaacaaaattaataatttaaaattaaattatatgttttcttatttattaagaaatattaaagatttttttaattaatagttgacaaaaattgaaaaatacgaaaatatgggttgcattaatttttaaaaaaattataattaattagacaaattaaatttaccaattactcacataataaataaataaatatcaagcacataaaaaataattaataggaacaaacaatagtgatatatatacatataatttataaatttagtattcacaacagtatcatatcattaaagcataaatagaaaaatatatatttaagaagtgttattattctaataaaatattgatgatgatacgaaacataaatataaaaagaatatatatttttaagtaaattagaaagtatgtgtatatgcatggtatttatgatgacatagaaactaatttaagtaattgtatatataaataggagatataggtaaataattaatattatggttaccaattcggcagtttggagtaggtcgttgtgatgacccatggagttaagggctctgtaaataacatctgtctctttgaaagcatctgcctcaaccaccaccgcattgcttccagcttccgaccaaaatgagctgcattatcattattattcatttaattaaaatttattatacactaaatcataatctaaaggggtccaccttagctgctacacaaaattattatataatatatactcaatactagctcatttatttttcttccacttttatattcatatattatattatatggaagaggtttcaatggttacatttttattgt

SEQ ID NO: 126823 - DNA, 1147 bp, Cannabis sativa
ttttagaaattcatatttaggatattaaacaacatacatggtagtaaatctagatcttggtaaaacttaatacaacagtgtactaagcaaacttaagaactgctctttgaccatagggttactatatactatagctttgagcaaacttaagaactggtcttttataaggttactatatactaaacttaagaattgctcttttacgttttcaggcttatatgctattttttaatttttttttttaatttacagtttaggttgctctagtagtttctatatgggttgctatatagattttaattgcgatgcaagttactctgctaattgttatatgaatttttataaaaatgctaaaaaaattactttagagtatagaaatgaaaaaacctttaaaataaatgaatacaaaggtcaaagtttaaatataaagtgaaatgctctttctagtgaaactttccttatcttatgtaatctttgttgaatgaaagaattctaataaaaaaaaattcaaccatgacacttactaaatattcaaagattcaaagatgtggctaatgtttttgttatatttgattttgatttttttttctatgctttctcttttataaattaatttttaattagttatttgaaaaatttataatgattttctatctttttatagtgttggttttaattttcgttgtactatattatattaaatacatatgacgtagattttattattactattaaaggtattagttttttcttattagagtattttagttattggttattagagttttaaaattattgagttattcaagttattaaactatttgaagtagcttgttccaagatctactgctggcatctgttatcccaatttttgcacacttgacgtggcatgtccacgtggccaacatcaatattgtgtgggagtatagcttgccaacaagaaagccaagccatctactcagcacttcaacaaacgaggggtccaagtacttaggagggatgacgagatgacgaaccattcacctcaagggggctggctggccccccctggccgaccctttggccagcataggctgtaacgccctaaataattaggcacgctacccaaaaatgcttatgaaatcctaatcccctaatcgggattact

SEQ ID NO: 126824 - DNA, 855 bp, Cannabis sativa
cccttcaggtttttcttcttatttattttaacgtagatgtaattcacttgtaataattagtataccttctcattagcctttatcattctcaatataaagttgaattattgttaatcgaatatgataaataggttgcttgaacgatggaggccaaatcaagccaaagccagggcaatctgggaaggatctgattcagtccttggaaactgcttatatggaaaaggaaaatgtgattcctatttgtatatctcaatttaattactgatttgttttttttttttttttgagtgtgggagtcattgatttgaaagttaatgtatttgttcttgcagatatatataacaagtgatctaggaggatgattaatctcaaaataaaatcttaataattgaagatatttagttctcaaagtttgtcgatttgatttattacctcttaccgagaagagaaatgcttcgaaaaaaataagacggtgtgtgcatatattttgcactttaattttttttatttaagccacattttacaatgccacattttcttttttttttataacccttttttccttttctaaaataaaaaaacagaatattatttttgttgcctaacttttccacctacagctacatatgattttcttttttaagtgagattaagaaaaaagagtgatctttgcttctctgctcagctatggctcgttctcctctaaatgggaaggattctaggtttcacaagatactaatttgttttttggttataatttgtgttgttttattgtgaataatttctagattatagagtttatagacctttgaatttgggtaaactctattggcctgtaattttttgtttacataa

SEQ ID NO: 126825 - DNA, 782 bp, Cannabis sativa
atttctgatctatattaataagcaaatctgattatactgaaatgagttttatttagggcataaaacccaacaaaagacacccttgagtcaaaattctaacttatattgtaactatgcataaatactcccttaaacagagcaatgaaattcatataaaaatgaaattagatagagctagctgccactttcagtatttcattataaatccacacaaaactaaccttagagaaaaatgacccacaaagttctacagccatcttgttgcaacatagtcctatatatgtatcataacaatcatatcaaccatctactcattttgtaaatctacaaaaacttactgcacaaattgcaacatgaaagaattttcaatacaaaaacttacaaccattgagtgttatggtgtgttctcctttaagtggtagctagcttgttctaccagtttgtgaatcacataaattgcagcttcatggagaaagaaaaagggtcacaattacagtgagaaattaccattccaaataagcttcactgaaagagaattttacttcctagcttatccattaaaactgttgcaatgactgattcagaaaataagtaaaaactaattggtgaagagacattgaaacaattcaacacatgtaaatcttaaatctagaagcaacttaaacctttaaaaattttagggtaaatagtggcataagttcccaaagtttcaagtttgtaagtggcataatcccaatgtttatttttagcggcataagtatccaatgtttataaaactgtaa

SEQ ID NO: 126826 - DNA, 1260 bp, Cannabis sativa
gcaataacatggttatctcttggcttgttaattctgtctctgctgaaatcactcaaagcataatgtactttgatgttgctactgatatgtggcaagatcttgctgaaagattcaatgaggcaaatggccctcgcatctttcaattgcaaacacaattagctcgtttgcatcaaggtgatcagtccgtcacctcttatttcactaaactgaaatccctatgggatgaaatgaaggagtttcaacctatcacaacctgtacttgtggagctatgaaggcatttcttgactactataaccaaaaccaggttcttcaatttctgactggtttaaacgagtcatttgcatcggttagagctcagattctccttaatgagcctattcccaatctttcaagggttttctccatgattgttcaggaagaacgttaaagaaccttaggcaactctgatgtaccctcctttgcatcatcagttaagccatcaaaccccaaaatcccccaagaaccaagaaaccaagaccctcttgttcgaattgtggaaaaccaagtcatttggtcgaaaaatgttattttttgcatggtttccccatggttatggagacaaaaagaaacaagaaaaagggaaggcaactgctaaccaagctactgctaatttccactctgaagatacaaccaacacatcagtttcagttgatctatccactcagtgtcaataactaatttctctcctcagtcaacaacttcaccaacatgctcctcgaacagaccctactgttcctacaacaacttcaaacatggctagtaaccattctcttaccttgtctaattcttggataatagatagtggtgccactcaccacatgtgtttcaacaaaaatctatttcactctttttcccatcatcaatttcctaaattagttacattgcctaataaccatcatacaccagttatggcattggaaatattaaagtcaattctacaataactttgcataatgttctttatgtcccacagttccatattaaccttttttttgtcattgcctacattgataacactactaattcagttctttttcaacctgaaattatttgtgttattcagcagcactttcagaatcgggtgattgggatagctaaaaggtatggcaagctcttcctgctgccacatgaggctactgtcatggccattacaagtcaatcttctgctttttctttacaaaataatgtagatcaatggcataatcgccttggtcaccctt

SEQ ID NO: 126827 - DNA, 1608 bp, Cannabis sativa
  modified_base (1353)..(1362): a, c, t, g, unknown or other
tatagatatttaatgtaattataataaattgatgagtgtatataaatagttaataatattattcataaaattattttttaaataatattcttaaattaaataataattatttaaataaataatttttaatctcttccaattaattaatctttttttttctttctctctctttcattgagaaccccatactttcactattgctaatattgttgttttgttaactatattcttgatccttatacattctggttcgttcggtactggtaatgagcatgcaatggaaacattcaattccatttggcattattcaatggagtgacaccagttggcccacgatacaaggcagtttctgttaaaaggaactgttctgatcattaaacttggctgacggcgaaattagaagggcaacaggctgttcttaatgggcaaagaattttgaatgatatcaatgatgaggtatgcttaaataattggttttagatctcagctagtatttatgctgcactttttgaaaaattatgcacctgaagatagtaattatgatattttgtgctatttttttgaggttcatttatacagttgggggatcatgttggttcttctgatctgtacattggagttacaacgaagatgatgctgatgatgaaaaagaggaaaggaaaaaataggttatatgagaagatgaagattaaaaattggtttttttgaaagaaaaaaatattaattttgattggttgttaatttttttttaattgggtgtgagatttttttttttctaaaaaaaaaatttaataattacctacaaacaagtacatcttactcaatgttaatttttaaaaatcatgtagatgaatggttagaaaagtgtatgtataatataggaacaaaaacattgccactatgatagaattattctatttatatatatattcaaagataaaaaaaaaatagtttgaaaagaaaaaaaattaaaaagaaaaaaacaaacacaaagagaaattagaaaaaaataaaaaagaaaaataaaaaaaaaggagaattttcataaatatggaaattgagggtgcagtttccttttttatggcataatttgataagtgctataagaaattgaaaacaacaatgaatctcattcttaagtagaagtacatttcctataattatatatagggcttatatatatatatataaatatatatatatatggaatacttaataatgagtattactcattaatgggtaataaataaatttaactataaatattaatcttaaaaatattaaattattagattttggtcaaatagcgaataataaaagagaaatttgaatttttatgcttaatttagctannnnnnnnnnaaaatatcaaaaaatacatctttttacactatatcaaaaatatgttcatatgaaaaaatatttaagtcaaattcaacttttttatcactttttttgtcgaaaaacttttttttattatttttttttccagctgatggaccgatcacagcccttataatggaaaaatgagaaatttttctaattaaatagaaaaattaattataaaaactcaaaattttctaatattactcattcatgggtaatacc

SEQ ID NO: 126828 - DNA, 1981 bp, Cannabis sativa
aacttaatctaaaattaatactaaaaataacctaacaaaatgatcccaaattataacactatgtaataaggatgttcaaaaaaattaacaaaccgcccaaaccaaacagaataaactggcaaaaaatacaacccgaataattttacgaaaaaattcaaaccgcccaataaatatattaggcgggttgaataataacctgtccaaataactcgaataaactgaataaatcgatttacatatttttttactaaaattattcataacatgatatataaattacatttaatagctaaactattttacatttaaagtttgtattttatagtgtttattttaagatttaaaatttatatttgataattttgattgtatgtaaatattgaagctgaaatctagaatttacatatgagtatattttttttattttattttttgaaaaatattgtttaatactttaatgtttattcaattcatatttattttttaacattaatttaaactataaatattttaattttgaaaggcatatactatacatttattttttcaaatcaattatttgaacaccaaaaactaacaacaatgaaaaaaaaataaaaaataaagatcgttttaaacgggttaacccaaccaaaccgataaaaattattggacgggttaaactttttttattttattttttcattggatgagttacaattaaatatttgcaacccgatatttatattgggttggtaaaaatacactataacctgaccaaaccgatcgatgtacacccctactatgtaagtaaatgtcatcatttcaaaacttgtagagaaatgatccttttttagaattaaaaacacattactttaagatcatggtatatatacattaatttcgttaaaatcttttttattttaaaattatgtcaatttttttaaatttttttataggttgttgtgggttgttggtatataatttttggtgtacagtatatttatattttgttatatggtatattattatccttagatgatatttatttcttttattttactatttataatagtggtatttaatttcattcgaataatacaaatattttaatgtaggtatataattttattgacatgttacatatatttcattagatcagatccgattagaaaaaaagattagattggattagatgtcaaccctagttgcaccactgttcaatttttattttattattatattatatttaataatttttaaatatatactaggaaaattttatggtgtactccttaaaaggatgtaccgatgtacatgtttgtttcgatattcaagagaatattttagtctaattttctttcatagttctatatattatagttatttatgatattctacaaaattttaataaattcaaaaaattttaacatgccataaacaaagtttaaacagtctgatgtactcgtgcatcttttattttatacgtatgttactacttgaacattattttttatattgtaaattattttgaatttattaaaattttataaaatattttaaataactacaatatacatcatcataaaaaatagactaaaaatatattgtaaatgccaaaatagtaaggggtgcatcaatttttggagggtatattgcctatatattattatttatatgtttataaagattataaagaatattctattttattgaaaaaaaataatataataaaaaaaattaattttttggtgtaacttttagtattgtggttggaatgaaagagactataacattatatttagtgtataaggctcgagatggccttagtaattgattgtgctagggaaatttgatttactttgcttaaatgttgtgtatggtctctctttttttttttttgaaatggaaaggttattttattcaacttaaactttcatccattacaatagaaatcaattcagaaggagcattaagctcattaaaagtacaatctgacata

SEQ ID NO: 126829 - DNA, 633 bp, Cannabis sativa
atcagttatttctacaagtcaatcaatattcaatctccacaaatatagattttagatttttcaatccaatttaatctgcaaaagggatatccaaactttacagattgaatcgtgcggattggattgaatattttatgaacattcctacatttttaatctgttttgaagtttagaatagaaattcaatctaattttttttataattttttttgaattatttataatttttaaaaattttaaataatttagacaatggaaataaaaaattcaaacaatatgtacatattagaaaatcaatcgcccttaatttaaaatcttagtagtattgccacaaattatgaaaaaaaaaattattcactaacaaaaacacatacattattgtgaacccacattaacttggtgggaaagaatgaaaagagaactcaatattattaaattgcaggtatcaaagagactttcagttagatataaaaaataataaattaatggttagtgatagtgctagagatgaattgtttaatggcagttgagaaaatttgtagttaggttataattaactgtttttttggattaattgttaaggactctagacatttgtttaattgtttgagtgaagttttttttttttttttt

SEQ ID NO: 126830 - DNA, 607 bp, Cannabis sativa
  modified_base (454)..(456): a, c, t, g, unknown or other
ccagaaggaaactgctaaattgaaagagaaaaaactgttaactgccacagagcaccaaagttgggcagacgctcatataggttaattaagcatatttatttttagaatattatttttgtctactctcgaattataataaactagtctcaaaacactcttacatcataaaattattaataaaaatgaacgaaatataacaggagaggcaaatttataattatttcaattgtttgaaggaaatttttacaagatcctataaatgttataatttggtaggtaaaaatcttatttatttaaaaaaatatgcttattgcaaatgaatatattaaaaaatggtatatttagatttattgaaagaaaataagcactaaaaatataaaatgattattattattactattttatgtaggggaattggggtttagaatttcttaaaaatgaaaaaaaaaaaaannnaaaattattttaaaatgtaaaacttaaaaaaccgcttttatttacgaatgaaaagttatataaaatgatcttcaaaaaaaaaaaaagaaaatcaaaaaacgaaaccctgtgtctgtcaaatatcgcaaatacagttccttcttccactttc

SEQ ID NO: 126831 - DNA, 954 bp, Cannabis sativa
atggctataaatactatcttagttttgttgatgattacacaagatttttttagctttacccaatgcaaacaaaatctgaagttacagaactgtttactcattttaaaaactttgttgaaagaatgtttgacactaagatcaagaacgtgcaaactgatttaggcaaagaataattacccttatataacctgtttaatgaacttggcatcaagctaagcaatcttgtgcccacacacatcaacaacaaggtcgtgttgagagaaaacacctccatgttgtttatatgggtctcacattgttggctcaagctcaaatgcctttgagcttctggtgagaagcttatacttctgctgtatacaccataaataggctccccactcccatattaaataatgtctcaccatttgaaaaattgtacaatcgaaaacctgactacactttccttaaggttttcggtcaggttttcgactgtgcttgttttcctctgttaactccttacaacacacacaaggttgcatttagatcaagcaaatgtttatttttagggtataataatacacagaaaggataccgatgcttgcatccaagtggccaagtttatgttgctaagagcgtcaattttaatgaaaatgaatttccccataatgagttattttctgtgtcaacttctcctaaagctacctctatcattgttaaaacagaatgcttcaaagttcccaactttcaaaacaatcagtttgtcactcatcctaccactcatcctgataactctacatctttacaagcatcaaataacacaatttcaggatcacagtcaccaaaccaattggtcactccctcacacagatctcctactacataatctagcttaagtcacaacctgtccacagactcttctcttccctatcctcttattgtagacagaactgagtcatctcagaccattgccaccca

SEQ ID NO: 126832 - DNA, 2081 bp, Cannabis sativa
ttcaaagtaaaatctctatgtcatcttcttttggtcttttagtgcatgatgttcgtgtgttgcttttatctttaaaaatattgatttgtgttttgtcaaatgatctgcaaacaagctggttcactgcttagccaaagactcttgtttctctccaggtcgtgtgctttagttggaggattgttcctctgaagcacgttctattgcttttaacaatttaattagttaatgaagatactgattttattttaaaaatatatatacatgtaaaaatttgttaaatgaaaaattaaattataattttaaaattccaatcaaataaattaaagagctatcacagtacataaaataaattttttaatttctacaaataaataaatatattttgtagatgaatagaagtgggaaatacctaaaacctactatcttaaaatcaagcaaaaaaaagaaatctgactttgttttgattttgatacactctggtaataagaatgaatatatggtcttggagtcgctacgtagagccaatgcaatgacatgtgtttatttagatttattttttataaagaaaattaagtatggctgtttttcattaaaaaaatcatgatagtcttcaactctagaaaaattctagtagtgcgaataattaatggcttattcatgtacttaatttccaattatcaatttctatttggtgtattattactttttaatggggtttggatccctcaatttctaaaataaagccctaattccaagactaatactaattaatagtgatttggttcctagtgttaaagcttacaaaaagcttatttcttcttctgccactgtctactcagactttgttttacctaagccaagtactttcaaattgaatttagatgacttatagatccgttcagaaagaggattaagtttggggctgcaatcactaactctgcacgggatgtaatcgctggatgctattcttctaggcagcttgagacttcatcattgtttgctgaggctcttgctttgcatacaactttgacctggtgtgctactgttaaattgtcgatcagtctagtggaatatgattgtagagtcctagtggagaaagttaaacataaaaggagagatagatactactaaaaaacccagaattcccgatggttttacaccgtcgagtaaagaattctcgacggtctataaaattgttgcctatacgagcatggcgaatactgggtagaataggcgactgatgaaaaatgtcagggaaaagatttcctgatggttgagaaccgtcagctatagtcgatactataggacacagtttaacaccgtcggctatactatagccaacatttttaaactgtggcctatagtatagccgatgattaatttaaaccgtcgctatagtgaattccttcaaaaaaaatcatcgtcttcatcgtcctcgaaaccaagatgggagttttgagtgtttgaaaccgtcgggaatacccaaatttttccaacaattttaaacactcatttaatttttttggcgactgtccccaaaaaaaatgtttttaagttcgtcgagaatagtggtttttgtagtagtgagatcatctctgtctgatgtaattagtaaaattgattatccctattttctcatgtttccttttcttttgtttctagaaaaaaaatgtttgttctcatgattgaggcaggatagcattaggaacagatcacgaggttgtttggaatggtttagttccaactctttgtaatttgtaactggagcttattgttcaaatctcaatgaagttacaagacggtcaatgcctttgatcgatttggaagacaaaagagcatgtataacaacatcaacaggaagcggccaactgatatacacatcaccacacatgatgtgtgtagggtcgaatttgacacccttgttgctttggttatcattactccatagccaatagagtgtgagtaagatctagagcagtgttctcctctcacagatcgagtcaaggctttggagatcccctctaagttcagaaatctagtgtggcatccatacactggcaaagaagaccctctctctcaca

SEQ ID NO: 126833 - DNA, 1588 bp, Cannabis sativa
agtgttaccaaacgccaccatagcaaatggttccaaattataagattatgttagtaaattttctcatttcaaaacttgtagagaaatgattctattagactatttattatttatattgtcttttgtcacatgaaaaaattaatatttttttttcatatttttttagaattagaagtaaattatttagaaattatggtatatttatattagttttgttaaaaaaaattctatttgaaagttctgtcgatttttttattttcttataagttgttgtgggttgttagtatatagattttgttgtacagtatatttctgttttgttctataatatatattattcttagatgatatttatttgtttattttactatgtataatagtggtatatatttttttagtataacacaaattttctaatgtatttgtagacgcgatttttcgtcaactgatctaagaagatcgtaaaaatataaaggactacgataaattaattttgactaatgaagttgcaataaataaattggtgctttcattaagagtgctgcggtgaaaatttgactgttttctctttggagaactcaccaatttactttttttcacaatgctattgagtacgaggaggactagttacgaggaggatgctaaagtcccaaggggggagttaatcaaccccaaagtaaaggaacctttgtccttccacaaccacatggagagggaacctctaggcatcgggaaaagcgtcccatgctacctatgccagaagatgagggacaagtctaagattgtgagagttcctcatctccatctaaggagcgcccaccagtcaggtccatacctgtccatgaagtgtttcaagagaatgaaactctgtgtgtcgagatagtagaaagcttacgccacaacagagagctccaagagcaagcctaaaggcatggggaccaacctcctgtaccgagagattcttctccatctaggagaagaagggggcgcccaacgagagaacatgcccccatgaataacccaacaaggaggggggaccaccaaccttttccaaatgttggagtccatgcaagacctgcacaagaaaccatgtatcattacatggaaatggtcattaagcccatgggacccaaactgttcctccaaggcctaactgtgagaataatatcatgggtcgagaagaaaggagagagcaaccttctccgattcgagcaccaccatcacttataaggtaccccgatccgtcaattggtaccacttcgcaagaaccaaggcgatccacctctcatggtaatgcgccacatgctcaaccacctagggggcttaggcgacacactacccctcgcaaagatcgttctcgtcagaggccaacatattgtggacaaaaacaaaggatgccccaggtgccaacttgccccaaaaaatagctgtgtctaaatcagacaatactttgacaccatactccgagccatactctgagcagcccccactctctcctcatcatccacaaaacaaagaacaatgagctttgctaaggatagtgggtggtctgattctaaaagctgctccattagtgttcataataatg

SEQ ID NO: 126834 - DNA, 837 bp, Cannabis sativa
tatatatatatatatatacttttcccttaaatttaacacccttaatgttcttttcatctttattgatagcaagcccatcataagccaatagtttacatgttagttgctcgagctaggaatttcattggttttttttttttttttgtcttaagaatgcatccacattctccataattttattgaaaccatttaaagcaatgatatatatttttttcatattttgctgactttgttgatacttgtgtttgccttctacacatttttatagcgcaatcccaatatatccttatgattctcaaaattgataggctacaatgtgtttgctttgacatttgcatgctttgtcctttgtaatgcatatctatcaggaatttttgaattattatttgtagaaaaaactttcaaagtatgtgcgcataaaattcttccaaactcaaacttcttacaattgtacacccaagtgtgccattaacaaaaattattcagccatataatcaattgactctccatgaggagtgactttgtattttgtcgatattgtcgtttcatcaaaaatatacaaagcacaatcataagcattgcatatctcaatttgaaacaatttgaatataattggaatgtatatctttgcttcatgtttcagtatttcagcaggaaatgacaataataagttattgtgagatgtcttaaaaccagcttgtagctcttcgtaacgacgatcatcaataagcctattaaaatcactactacaatactagcctttagaggcagttttttcaaccctatttataaaaagggaagctaaagggtgtgaaaatacccggtatgttcgaaatt

SEQ ID NO: 126835 - DNA, 1094 bp, Cannabis sativa
cataagtattttggatagcgtgcctaattatttagggcgttacaactaactttagacaattataactataaacatatataattagaacaatttgaaattatgttttaatctttcatgttttattattttaatttattttaataaataattaataaaattttaaattaaataatatcaattataaattaatctaaattacaaaattgtaaaagttagacttttcccagcgcgttaatgcgctagtaaaagtaaaactttttccagcgcattaatgtactcgtaaaagtaaaactttttcccacacacatttgcgctgagaagaatctagcttttaccagtgtatttacgcactaagaaaagttatttttataagtgcttttcgttttgcgctatcaaaagttccaataccaacatggatttgcgaaccttcttttttgctagtgtacgctggcaaaagtaaattctattttgccagtacaatacctaacactagcataaaaatgtactggcaaaaatctcatttttttgtagtaatattaattatgtccctccataaatattgtgatgttatattcctctctcattatttacatgaaaatagtaataataactaaaaaaaagtaatgcgtgaattgtacatgatcaaaggaatttttttaaaaataataaaagataatttctaaaggtctcattgactgatcaagattttaatttgatcgatttctcattaatttggacaagttcagtccctcttaatcaacttcaacacacatatgaaaacttcacaattcacgtaataattttttccaatttaatttactttgagatcttcaattgcaagagaatcgattttatgttaatttaaagtaacaagagttgaattgttaaaagaaaaattaaaataacaagagttaaagataaaacaataaaaaaaaaatcataataaccatgcatgcatgtacgtaatacagaatttatatacatataaaaacaatttcaaataggtatagccaattcattcacatttacaatcgtagtatacacataaatctatatctattctatataaagtgtgcctacataaaagaattctt

SEQ ID NO: 126836 - DNA, 655 bp, Cannabis sativa
  modified_base (599)..(600): a, c, t, g, unknown or other
gttgcattttgattttctttaaaatccactgttgtatttaaattattttttttatcttttcaaattatgcatgaaaatagtatttttgtaaaataaggcaaaatatcggggcgttagataaccaataaaagtaaaataagtggagagaagagtatagtataaaaataagtggagatataatacaaacaaattataagtggagagagagtatagtattttttttttttgagtgtagcataattgtatttaatacattaatagcttgtagtttaaaggtcttgggttcgaacccataacctctcccttttcccatccctccctcaccactaagctagccttagcttggagagagagtatagtatagtataacagaaatatagataaaagcttctaatcatgcagagaagcacaaaatagtaaaaagataataaacccgttgcaacaatatttttgtaatagttatgtaaattttagtgtttaatgtaaaattattttaaaatattagatcacgtttgattagaatgaataaaaataggagataattacataaggtattattttttgtaaaaaaattacacttttacgtttaaagaattttnnttacatttttacagtttttcataaaaattaaacaaaaacaaccaaaaaaacaaca

SEQ ID NO: 126837 - DNA, 2310 bp, Cannabis sativa
ttgtgagtagatctatgatcctggtaaaataaattccaacatattgttatctggtcatgtcgttcagattaaagaacttaggagaaacataccaacaattagtgaaccacatgttttgaaactagttgggtcacaaaagggaagtctttgtagaagacatgttagtcaaatgtaaaacttccaaggatcatgaaaatgacctcaaggagtgttttgtggtagtacagaagcatgggatgaagcttaacacaaagaagtttacttttggggtaaaatctaaaaagtttttaggattcattgtcagtcagtgaggtataaaggcctatcctaaaaagataaaacctttgttgtacacgccttcccctaggaagcataaagatgtacaaagtgtcattaggatagtggcagccctgagttgcttcatatctaggtcaactgacaagtgtgtcctgttcttcaacattctgagaaagtgtcaaaactttgaatgaacggacgagtgcaaaattgcattccgaaacctaaaagtgcatatgtccaaggctctaattttatctaaacctgtggaaggagaagatctatatctatacatggcagtttcagaacatgctattaccgcaaccttggtccgagaggaagcaaggtccagcaccccgtgtattacattagaaaaaggatggtaggggctgagattcgctacccatagaccaaaaatttagcctattgcatactcatctcctcccaaaaactacgaccatacttccaaactcttgcaatcaaagtgtacaccaaccacccgctctggcaggtactttagaagcttgaatcctctagttgtctcctcaaataggctatgaagttgagtcagtttgacattcattatgttcctcgcgtctcgatcaaagggcaagcccaggcggacttcaatgttgaatgtaacgaggaaaacaaggattttgatgttggaaaagaaaccttgcctatttagaaagtgtatatggacggcgccgccaatgagaacagatcaggagtcagagttatactgatatccccagaaggcttaaggctttaaagtgcattacagttcaagctcaatgcgtgcaataatgaggcagaatatgaagccttgctagctgggttgagactttccaaggtggcagggaccacgcacattgaaatatgcagtgactcccaactgatagtcaatcaagtaaaaggagaatattaggctcgctgagagcatatggcttcctatgtctcgaccgtctgggacctactccaagaattcaaggggtataattatgaatattataaatgagagaaaaacatgatcaaaatatgaatatggtggatttatcatggatttggggggttttatgaaatattgaatgaaaaattcaagttttggatgctcaacacgctctggttgtgtttgggaatgaaatttgaggcttcaagctaatttttgactatgatccgttcacttttaggaaaaacactttgaataaaggttctacatctctctttcaaatttttgaaacatctttgaattatccaattatgagcaatatcgagagagttatggccaaagaactatcagtcattgcagtgggaaattttctaaaaaaaaaaagataaaaggcttgcaaaaaaaaaaagagagccttttcaagtggagctgcggctaaacacgaattttatttttttatgtttaaattttaaatcttttcattatatttaggtaactttgttggcctatataaacacattattattagtatttttagtacgttttcagatctcaaaaaactcattatctcttcattagcaactacttagtatgtttcatcatcatcttcttcttctctttctttaattttatttatgttcttagtttttattatgaatgcaatggtgatgaagatgattttcatgcactaattttctaatttatgggttaataaagtcactataatttctattttattttgctatgatgttctattggtttcttcctctttaatttaatctatataatttatgcttaatgcttgtgaatacttgatcactatttgcatgtttttatgatatcaattcgaaattcgagagatgagagttgaatatgttacagctatatagacataggttatatattggacaagagtcctcaaataacttatgtagcaaatagggttttcatacttaatgccttttatatgttgaaatttatcatatacgtagaaaatttgcatatagattgtgttggacaccacaacactgttgggttttatgccataaataaaactcatt

SEQ ID NO: 126838 - DNA, 1600 bp, Cannabis sativa
aaaaaaaaaaaaaaacttatgtatgtgtttatcctacattactgatgtatgaataatgtgttgtttttatattacatttagtagttacaaccttatgatagggttttaaaatttttgtgtgattttattatcaaaagaaaaaattacattaaaatatataaaaaaattattattatatagataaaatattaaataataaaaaaatataataaatattatttagtatagtagtaaagagtattactataagctaagagatcaagagattaatataaatatgttaatatgaagggttgaatctttaaactcttaagagtttttataagttttattattacaataaagcactagaattatcgataataattaaactatatatgtaagactctaaaatttaattttatcttaagcttcctatatctttcaatatttttgttagaaaaaacacttagctacaaacttgggcaacaaaaacactacttgagaaagcaagcaaattgacatgcttttctttttttaataaaccaaattgacatattttgattatttgtggaatctattaattcatgtatatgcctcaatcatggttcatgatagggaatttatttagctaacatatagatttcgaattatataataaatctttgtcaatatacgtttggttcatcgatcgaatatgtgacgcacatgattattgaatgagaagattattagtacataaagttaaccgcccttgttagctctttgaatacatatgtattcattttcaaaagaaacaaagaatatatgcccctaactaactacttagaatctattaaagaacattttcttctttcatttctcctcaaactgctcatttcatatcaaatcatcatgttaattatgattattaccacattatttcagtgatgaataaattaaagatttgacatattttgagtagttctcgatgtatgggtgactaatacttatgaggaaatattttactgtctaataattgaattttagtggtccatttcacacttttcgacctatcctaaaagtcatataagagggtcatcatttacacaatattatataaaacctaattttattatcagttatttttgcataataatgtagaataatataaaaatgagttccacacatataaaaaagataggcgctggtataattattgtacaatactgtcactgacacgtggattaaaaataaaataaatttaaccatatataagaatttaaattactttattactaattacttttgagatgaattccttataatttttataatatcagagtcatattcctagtggactattgatcaacaccctatccaggtagtaaagccagccgcacgagatccgcatagtgcaaagacactagagattcgaacaaaataaacgagtaaatagcacaacttgtgacataataattcaaaattagtgagcaaaaaataccatcttaacgggagatattagataacattgtacatgaattaaatatgaaaatattaagctatatataagaacatagattactccactcatcaccaattgattttgagatagaacttataattttattttgggtaaata

SEQ ID NO: 126839 - DNA, 2090 bp, Cannabis sativa
aaaaaaaaaaaaaaatttacaatacgcattccaatctatttcgatatttgcgaaaaaaatttactccaattttttttatggccatgtatttgtagttatttaagatactcagtaaatttttgaagaattctaaaaaatttaacacgccaaatatatgatttaaatagtctctattgcacgcgtgatttttttattttatacgcatgtaaaatagactttttgaacattaattttatactataaattatttcaagtttctcaaaattttgcaaaataactgttgactcagaaatttaaactagacttctaagccacattcgcttgctagattgacgagaatgaataagtagttaagtaattataagagacacacaacaaatttatagtattttactccctgtattgcaacattaatagagctacttctagtttttatttctcacgagatggtaattatagaaaaagactaagtgtcggaagctccaatttctagagagagaaagctctgaccttgtgtgttattttctgaacttgaaaaataagcttatggagctctccttttataggtgaatgaggcccaaaaaaaaggaaaaaatacaaataaaaatatttttgaccgttgatgatgatctaacagtaaaaattagttcttggtggtaatgatcattttttagagcccggcagctgcgggtgactcggagcttatttttgtaacttccatgggagtgaattttgacgacgatagcttcagaattacgattgaattgtgagacatgacttgatagagcactgattagcttcgaaacgcaagttgaatcacgtcaagcagataaaaattaagtgagctgtggttgttaaactgaaggcagttcatgacccaacgcccaggttgacacgtgacatcacctcagacgatgggtaagtgtaaaaatgtcaaagggatgtactttaagatgcctaagtgatattttgatatcacttaatcagttttatgttttggcaaagctggtcaacaattctcggagatgtcgttgttgttttacggaaatgagagacttgaaactcttcatttccgagtgagtcgaaaatgagaaatgcaaagtctcgaatttgacttctctcacttgatagatctttgttattgtgaaacactagacggacggtcgaaacgagatcaaaattgtataagcagaacccagcgcaccaggccatttatcaacctagacgctgagtacttactcccgagctcttgagatctcatttttgatactttcaaggcttttgaacttgagaatgagttaacctattttaccattccaaattcaatggctgcatcaaatttgggcatttgaacaattgaaggcagcatcctaggttgattgtacacctgggcgctaggcctatttccaagggctcgagttgtaattttctccccgagtttgtttgaatcttcattattttttatgatgaaaaaaattcctaaaacactttttgatgaacttaatcaaaacaacccaggttggcaatacgtcaacctaggcgttaggtcctagttttgtccattcgaaaattccatttggtcctcgaaaatagtttaatctcattattttttatttttggagagtatgctcaaaaaaaatcttagaacacaccatcgaaaatggcccaggttaacaaaatgtcaacctaggtgtaattaggccaacctcaagtgttaccctaaccaatggaacttgttttttgcacctaagaagtgttgtttcttctttgaaaggacatattaccccgttttttatgaagacaaagaagatgcaagtcaaatctttgatatgatatttggaaggtgcccaaattgacaacttaggtgttgggtgctcggggtcctgggtgctaaaaaatgagccttctccaattctaattctgatgcctcaaatacgtcagtagtatgctagtcccagtgcaggctttaacccttttgcactaagatactcctagaaattgaaaccctagttggatatgtcaacctgggcgccgagtgaaaccctaggtgcccaggttggcttttaggttgtagattcgtgtaatttcag

SEQ ID NO: 126840 - DNA, 2028 bp, Cannabis sativa
  modified_base (26)..(38): a, c, t, g, unknown or other
ataaaatgatttctgatctttattannnnnnnnnnnnnattatattgaaatggttttatttagggcacaaaacccaacagttaagtcctccaagaatgccacaagttgatttccaatgggtatattattattaaaaattattaaaataattttaaaatgaaaaataaacaaaataaaatatttttttttctttctttcttctctctcttctccgtctcttcaatcttctccttctcgacttcccactcgcccaacttctgaccagcccagggctctctccggccaccgacaacccaaacggaggccacttcttgcttctttgattcccaaatgtcccagccccaagcctcaccctgtcgatcacctcagtcggcgtccatgggattcacccgtcgatcgacccagattggccccgttcacccatggcatacttatcgagcttccttccatgacctttcttttcaaacagctccaatctggtaaactcgtttgcaattctcctataatccttggaaatctctgacaccacgaaatctttgacataataactggtgaaaaactgatcaagatgcttccacgcaatgccaggatggtatgcaataaaagcgtcagtaacatctctgccagcgaaacttagtagaggcgcatccccaccagggttatccttaacccattctgatacataataaaccataccctaaatagagatccacagatcccttgccttgttgtgatccttcagttcctcagtggtaatgtacttcttctcgacttccattctgagtaaagaaaaagaaaaaacacagtaatcctagatagatattcagaatatcgtgtattaaacacgtctttaatagttgaatgtggagatgtctcgacagaaacgtgattgtattgatcccaatggcaagctggaaccatccttttttccgaggtctacttgatatgtgttacgtcgattgcagatatatggaaatcttctgacttaccagggttatgagtctcgcttccgttagttggatgaaactataagaagtttactcatagcgagatggtcatctcacattcttgtactccgagccggtccgacttttacacttaatttgcttattgtaagctaaggtatgtattattcttctctactgcctcgctattctcctttagcgatatatggtttcttgttaatacactaagtaccagttcgtacattgattcctcgcctaagaccgtacaatcagcgtgttgtaatatactctagtggttacacaattgatgagttattccataaaaagatttggcaccgattcacatttcctttatcttgatacttgtcctctagccgaatttcgggcataacaatttttacaatatcaaattaaataaataaactttttacctaaaccaaaatcttattcaaaaaacttttctccaaataatttttacacattaaatttttacaataacaactaacttgataaaacattatattctttaaaacacatgaaattcttacacattaaatttatacaataacaactaactttaaattaagtaattaatttttttcttaaatattaacataaaaaaatatacatacatacattcaacttttaaaaacaaatacatatatataaaaatatataaatatatatttaaataataaataaaataaataaataaatattaatttataccttagaagaccggcaggaggtggtggtggtgctttaacgtcactgtggtggggatgagggagcaatgagagcagcttcgatggaggacgaagcaatgacagagatggctggtttcgatgtgggtttgtgggttttgcaaagggttcgagagagggaagcgcgatgatagagatggccaatattaggggcagcttcgatggaggatggagcaatggttaactggccaagagagagggaggacagagcgatggagttatgatgttggttcgtgggttttccaacgggttcgagagagatgatagagagggaggcactgttgggaattattttacca

SEQ ID NO: 126841 - DNA, 1953 bp, Cannabis sativa
ggcggagctacaaaaatgtcacccaaaaaagtagcaaaccgggaaaaatggttttgtgtaggttgttctcctcgacaagctgagtttagtggttaaaacatctcgtcaaacggacgccggacgtgaccggaaaatccgttcaaagttcgaaacgccaaactttgacttgcgatcccgagctaatggcggcgagagaagcggtgccgcttggggggtgaggttgccggcacttgggctttcgatttttccggcgcatggggcttgtcgaaggccggaggtgggtcgccggagagtggtggttatggaggtttgtgggtttcctttcttgtgttttgaagagagagaaaaatggaaagatagatagagagagagagagggacgattatggggtactgttattgtatatatatattatattatttattatatatataatactttttttgacccggtcaaactgaggtcttacaaatagcataagcaaaactctaatagaattatggaatgggacaaaacccagtttgaaacatttttgcatttgaggttgtcctgctcatatttgtaaactaaatattgggaacttgctcccataactaaagtctgtatgtttgtaagatattcagaggaaactcgaggtgcctatttctatagtcatctagaaaacaaagtatttatattgacaaaaactacatttcttgaacatgactatatgaaaagtcataaatcatgtagtcaagtggttatcgaggaaataaaaaatgagcaaatttctgaactgtccactttcgtaccattatttgaatgaccaatagtggttaccacagttcttgaaaagaaaccccagtacatcgttatagtgggaggattgtgagacaacctatctgatatgaatttgaagcacatgttcttatctccgatacatacaaggacgatccattatctaacaaagaagcaatagaagtcctaaatcaaacaaatggaacaatgccatggatcaagaaatgtatttcatgcacaccaataaagtctgggaatatgaaactctacttaaggacattcactactacaaaaagcgctttttgcttcagtttttaagtgacatataaagaatttgcttcagttggtgtaaccaacgctataaccgtagacgcaaatagtgatattttttacttcagttatgaaccaacgctaattgattatttttataaccgaagcaaattgtttttttgcttctgtgcataactgaagaaaaaactagtgcaccgacgctaattgttttttgcttcggttataatttgtttgagtgctctggttagcacaattaggaaactaattatggttgataaagtaacaagggagaaatctatgattaaatttgctagggtcttggttgaaatggacataacatatgacccccatttgttatacattttgaaaatgaaaaaggttagattcaagagcagtttgttgagtacgaatggctccccattaggtgtaacaactgtaaaggatatggccataacatggcggagtgtaggaagactggtccgaaggtctgggccaagaaaagccagcaacatgtgaagaattttaaagacaaagattagcctactagtgtggaaaaatcaagggggacaatttggtttctgttgaagctaatgacacgattggaaatatgaagaaggtagattctaaggaagagaaaacttgtgcagagtctagaattactactccagaatgagaatgtatggaagggtggaagaccctaaaaagagtaggcaattcaaaggtgaaaaagatctcttggagtggttgagcaagcttcgattcaaaacactttcaagattttgcaagaacaaagaaaggatgttgaaaagtgtaacctatctatcgagggtgaagatggattgcaccaacatacttagttggaatgtgttgggttttatgccttaa

SEQ ID NO: 126842 - DNA, 1040 bp, Cannabis sativa
ctctctctctctctcaaaaataaataaataaataaataaatatccatctctatccactaaatcgttagttagcatttaatattctaaaaaagaaatcatgatagtcatctctctctctatatcgtattttatactctgttgaagttgaagcctaagtcgtagtcgcccactcgctatcgaaactccccactcgaagaagacgtagccgttagccgtagccgtaacctaacccgaagaagacggaaattccccactcgctatcgatgacgatcgaagaaaacggaaactccccactcgtagatgattaaagatagcaaaccacaacaactcatgataaatattttactcatttggtcattgatactataaaggtaaaattaaacaaaaagtaattttacacataaaaattactaaaaaaaagtagaagactgccggagtgagaaattttttataatagtgagtgtgaccaatttgctaaatgagattgatacatgaattcttaatagaaagggaaaatgcggaatggaagtcaggagataatggaatcatattagatagattgatactgtaattggcaaaaatcataatcattgttgatacaaattacaaaccctttagagagtacattctttcttctagaaattcataggttggatcaataaaaatctaatttaattttagtaaagataatatacctctctttctattgtatattgttaccagtattgatatgcttaggaaaatttgattttttatgcttacatttggttaaaaaaaaattcctaaacaaataataactaatatttgtaggatatgacaatttttatgatattcctaaaatactcccatttacatcacccccatttacacaatcggactcccatcggaccccacatcggacacaatcggaccccatatctgaccaccatcggatccatcggaccatatctgctactaatttgtttttttaatacataaaaaaatagcatcaggtgaccatcggaccaccatcggaccccatcggaccagatctgctacca

SEQ ID NO: 126843 - DNA, 3078 bp, Cannabis sativa
  modified_base (610)..(610): a, c, t, g, unknown or other
ttcccgaaggcagattggcgcaaatagttttaccggcgcacctattgtgccgacaaaatatttgcgccaatctgagaaaagtcacaaaccttttagtgttatgttttgccgacgcagtaatgcaccggtaaaacattttttttttaaaaaataataaattaactataataattataattgtaataataaattaattatattatattttatattaaaaaaacacaaacataatttacattgataattaagaatttttgcaatcaaactaatacattaaaagtgttgtactaaaattagtaagtaatgtaaataaacaaaatattaaaagatgttcgattgaaaaaaaaaagtgaagttataattggtatataaaatatgtaatgttctgtagacgagtaatgtcatcgacgttgtttctctgagtctcgggaggctgcgatgacgatccagcactaggagcaggcgatgacgatccagcaccaggagcagtggggaatggtggaagatccatgggaggcaagttgaaacccggcacagctcgagaaagatactcaaactgatcttggaaccgtcacctatagtatagggcacagtttaaaaccgtcgcctntaccctgttataggcgacggttttgaaccgtcgggaagtccacattagcgacagtttttgaccgtcgcctatttttcctgttttacgacggtagtataggagacggttttagaaaccgacgagaatactttaaacgactgtttaaaaacgtcgaaaaaaccatttttgtagtagtggatcctaattaaaatcacacacactagaagtatagtgtatagtaaaccgtacttagcagttccatattaaagattctcaatactttaatacattaccgaattgttttattcatatcttataatcttaattctcttacatccttacaagattataccttctccatatgaataaggaatctttagatatttaataattataatcttataattaatatatcttttatcttataattgtatttcatatattctctaatatcttatctattaattacttgcttttagggcataaatcacaataaggcaatgcaatgtaacttaaaaatatacatatcactactacaaatagggcctttatctttgggtttttcgctggtctatgttcggttaaaataaatcacgctactgaagagtattaaggcaaagtcgtaactcctgaaaataagacatacgggggacctatgtcttcagctatttcattataataactaaagatgtatgtattttttatatcataattttaaaattaataatgtttaacacagtgataattgttgaaattttaaagcataatagggtggtcattcttaggaattaaagaatgcatttataaactgtggtacaacaggcaatcggcctaaaatcaacagctttagtagggtggtcattcttaggaattaaagaaattgtagcatcatggaattcatgaggcatattacccgatctgaagaaacctgaaatagcgtcgcaaatttctgctccaatgtctttccaagtagctctaaaaaaaccagaaccatacccatgcatcgggcccaggcgacttcgttttcgggatactaaaaaacgctctcttgatttctttcctcgtaaaaggtttgatgagaagatgaacttgctgctctaagtttagacgatgtccctgatcaatacactccttgttcaacttcaaattagtgatacttttgctgcccatgtacccacggaagtgttccatgaaatgagtaaccacatcaaggaactcttcaataacattacaacaaattgtgatttttgtgactaatacttttagccacagaccttttaatcataatattggaatgataatttataattagttacaattttttttacttttagttacaagttttgttgtcactaaaaataatatttttttgtaatactaatttagttaattgtgagatcgaagtcgcgaacaaaaggatactcatataacataatcatatccttcacatttagccccaatatttatttattcatttcaaatcaacaaaaaggagtcttttagtttttatggacttgtaattttggttttcgttgacatgatatgaactatagtaaacctaagtgaagttaaaatttttttaaaaaaacaaagtaaaagagtctttttacttggtttatgtggaagaaccgaagtccctctttactttgtcttttataactggaataaatataaatcgaagtaaaaacctcttgttcttataatacaattatatcagataatcgaaccaactgtcatgatatttttacatatttatattattttttttttggtaagattattgcattattcattaagttagcaaattttcaactcagttacaaagacttaaaacttgatattacccattttcccattttctagctctggactagtcacttctgatcaacttttacattagtgtgttccccatcttaattggcaagatgatctaagaataatactgttgccacttaaaagtatcgtcctcttaaagcaagacaaaaacacatagatccaacttagagcaaaagctattcgataaagaaccaaataatcatcattattatttctcgttgaaaatttaatatgataccagaagaggaaaaattaaaatatcacaacgtggcatccgagtgtccagaataatattttgaaggaactgcatatgtgataaccatatggtccatatgttagctaaattgactacatgaaaagatagatacaaagtttcattttctataccctaatggcgataggacttcataattcataccattaatgtctttgaagaaatgaataaggatcaagtgatcagataataaaagagtgaacaaagagaccaaaaaaccacttatatatatctattctatgtaacaaaatttttgggaatattatattatattttatgtgatattgttatgtaaaattatatgttgtattgactttatatgggtagataaatatataatattttagtataaataaaaatttaatataatattatataa

SEQ ID NO: 126844 - DNA, 1219 bp, Cannabis sativa
tatatatatatatgtgttaaattttcaaatcgtttttcacgatatttttttgctgggatgactggtcattgaaatgaaaaaatatatacatatatcgatcggattcatgaagattgtacgtaaaaaaaataattgacagaatctatatatatagagattatattccatgataattataaatcatctcaaggaaaacaatcaagataattcacaaaaataaatagattcaataactccggcatctgcgctcaaaaaatcttggaataacaaataataacatatatagttaataattttacaatagactctcctaaaaaaaatgtagtgtatgagagtactattttttgtatgttgtatttatttaagacatcgggtaaattttaagtaattcaaaaaaatttaacacgtaaaaaatataattacacgcgttttattttatatgtgtgcgaaaatactattttttatattttaaattattcaaaatttctcaaaattttataaaatctcttgaataattaaactaaaatattttcctaagcttatgtttggtgggagggagggagagtaagatggatggagaggtgacagagaggatggggagtaagagggatagagagttaatctcctttgtattgtttgatattaggtgtaaggtggaaaggatggagaaaaaattaattagcaaaattacaaaattgtcttttcatttaaaaataaaattttattattttttttaagagtaattattgtattatgcaaaatatattgtctttttttacaatccttccaaatttgaagggattaaattttgaaggtttggagggagacattctccctccatctctctcttgctaaacaagtgatttagtcttttcttccactcctctctatccgcctatctcctcctcctaccaaacatagtgtaaatatcaaaataaataaaaaatacatcaatgaacctcattttgaaggatccattatagaatcatcctatagcatttgacttaaccatattttaaatttttgtttaccgtacccgaaattttaaagtcttacgtataaattacgtttcatactacaacatattaaaatttctaataaaaaaattaagaaacaaaaaaaaaatctatacatagtgtaatttttactaaataaaaattaaagtaatttgtggtataaatatttaagttcagttgcaaattgtgacagtcagtagtcc

SEQ ID NO: 126845 - DNA, 749 bp, Cannabis sativa
ccccaaccacgtaaaaatcttcatctcaccttcttacagctctctaatataatcatattctaatagttgccgaaaatctcggtcaacagttttaattacatttattttgtaattaaaaaaattagaaaacaaaagtgttaccgaaagacacctaaaataagctaagttatatgccttttttgtagtagtgtaaaaaatagataagtattatatcacataaaaattctctaaattatttatgtagtgtccaaattatattttattaaactatttatatacatatcacgagaagtactttttataaagttttaattaattttcttttattgtagaatttcccccatattatttatgtagtttaataagtttcaattaatttgtaattatttatgtaatattttttatttttatttatgcagtttcgaaattaagtttcgttttttataggatttttttatttttacatttaaaaagtattttttatatatatttttatggaaatttatataacaactgacataacaatcaatgaagcaacctaaatcgcaactaaaatccacacatagcaacccacacataaactataagagcaaccaacgaagcaacccaattatgtgaatgtgatgtttcagttattgttgttagacggtctgcaaatagagttgttcattctttggctagagcatcctatttttattagaatattttatttatggaaattattttctaattaaggaaatgattttcta

SEQ ID NO: 126846 - DNA, 750 bp, Cannabis sativa
aaaaaaaaaaaacccttaccaatgacaacgtattatatgaagttactctatcgacaacatgtgaaacaataactttgatccccaacctcctttaaagtttcattttatcctaagactttctttatttttgatgctcgtgcctaaaactaacatatttgtgttacaattaattatttattattgactacaatgtaaagtattactaaaattaataactttattaagtaccttttatttgttagtgttatagtaagcattgcaatctttccaaacctctcagttactctgttcggatgtaacatgtctatcctctcttgtccaagcgatccttaatattttcgatccattttttcttacaatcggaccgccaatcacacaaaccctttgagtatatctcgtactcatgagttaccatagtccacaaatgcaagaatatttcgcgtgagcactaactttgcctgtaaaaaagttacacatgcacattagtacatcaataattagaaatttaagaataatacatgaaattataaatttaaaaataaattacctcaaatctatcccattatgcattgatttcatctctggaaacatcttcccatttgaatttatttatggggatggacatgcggaccatctatttacacatgttattgattttttttttttttatttttgctgactaaggtgcccgtttctttatggaattgaatatgtagtttggcagtgtaacgtccccgcttcaagcctcca

SEQ ID NO: 126847 - DNA, 920 bp, Cannabis sativa
ttaaataaaactaacactacgtggcttggcacgtaacaataacctagtatatatatagttgtctaactaattaaatatttaattcatttcaacaaattaaaagaatatatttaattactttttcaataataaagaataattaaattatgaaatgtaccaatcttaaagatatttatatcctatacatgtaaaagaaaaataaactaaataaatttataaaaagaaagtagtaacaaaaataaggatatgttacatttgacactgatttggcatctaattttcaaaaatgacttaatcatctagttttaacttttattaatgttttgacatgtttaattacctttgttttgacattaatgacttttatgactgtctttctttttaaaaataactttttgtcacgtcattattagattgaacctattaaaaatatcattgtaatctactattcaatataataaaagaaaccatatagtaaataagttaattttatttcatcaagaacctgtacatcagaacaaaattacatctacatattcagttaaacaaaaagaactaaaactcacaaaatcccactaattcctttgacttagattttcaaaccatattctgcccgtctctcctatttttaatatgtttagactataaattttggtaattacaatatgtttaacatcttggataaaactaattgttgtttgcacttttttgtcccaaagtgctttgtttctagttctccaaattatattaatagtaaaagtattttgaaaaaatactttaaaaaaataaatatccaatgtagtattttaaaaataaattagatataatttttagaaaataattatattttttaataaatattaatagtaaaagtataaaatatgatatttaaaaaatatatttaagatctttttgttaaa

SEQ ID NO: 126848 - DNA, 639 bp, Cannabis sativa
ggtttggattagccacaaaatatgcaagggccccaacaaatggggcattgatataagttgtaggctcggacttcctaaaatcagcgcgatcgtcctcatacacatcatccttccccggaccccctactatagctccaaccaacacattaggattagcatcagacgaattgaagtaagttgagccttccttacaggcaatagcctgaggatgttccttcaccgagggcaaagatgagcctcggtgatggacccttttagggtatcggtcgctgtaccctaccatgtaggacatacccatagggttgtcgcctaaaatgtaatcgacttgttttttggcttgttggcgaagccaagtcggactaacgtttatgttaccacaatttagggtttgggatgttttggccaagtagttggcatagacaagcatgagaaatgtgattgtggttgagtgttgcaaattgctgccaccgggcttgtatatgaggccaccgggtgtgtactcaatgtgtgaggatgatgactccggaactaaggtgcacatgaagctgtctgccgaggctttgtacgattcaagattgtacatgttgccttctagtacttcctaaaaaaagaaagaaaaaaaaaatagatcaaaatttg

SEQ ID NO: 126849 - DNA, 1239 bp, Cannabis sativa
accactaaaactctactttctctaactcaattttatagcagacttttacattacacatacatcaacttctgtatcttttctctatttcttctctatatcatttaaataatatatttttaatatgtatataatacttattaataaaattagagtaaaatataattttaatactattaaaacatttttagaggaggaatagtgcttctccacatgtggagaagactttgaagaaaatagagatcctttaaaatagagaacccgtttagtttacttcatttgttctaagatgatttttccatggttctttaatttttttttgaagaatctctattttaaaggagctattgggagtgctcaattattgtggattatacatgatttgatggaaatactaatttctttaggctttcattatctggtaatattcttaaatttgagaactatactaggagtaaatggtagttggtcgacatattttcaacattctacattttatcataagtatcttgactgttgtatatctttattgctttcattttaaatgtgacatggtttttgacaattctgatttgaattcctgatataaatcttctaatgacatgcaggcagacattaatatgcaccaattctttactgggtatttagaaggccggtttgattataaaaagtggcctcaaatactgaagctgaaagattggcctccaaatagcttatttgaagagcgtctaccccgtcataacgaggagtttatatgttgcttgccatttaaggcatacacgcatcctcatcattatggttgtctaaacttggcagtgaaactgcccaagaagggtataaagcctgacatggggccgaagacttccattgcttacggtgttcagcaagagcttggacgaggagattctgtaaccaaacttcattgtgacatgtctgatgtggtatgttgccatccttaaaatgcatatttgatcttagtcatagaacttttgttgagtatatgtagctttgtcctatttcctgacttacttgcaaaattagtggtgatttaatgattcagaatggtaggacagaaaaatggatgggtgacttcttgactttaaagaatttcattttcctttaggccctgtgtttctttctctcactctctcttaggggtgagcaacggtcggtttggtcggttttttacacaaaaaaatccgaaattcggttttcggttttcatggttataatccgaaaacc

SEQ ID NO: 126850 - DNA, 680 bp, Cannabis sativa
cgatcgatgattagggccgatttctactccgtttaatgctccgttcattattattattgatttttattaatattttatatgcatgcaaatatatataaaggggaagagataatgtataggtatatataagtacaccatcaaaaggaccacattatcttctttttgaccctagtacactccctagctatctaattctaattaattccgtaattaatttggactttatatatgcatgtatatatatacacctaaactatatttcataatttattatcaaatacatatttatatccgttatttccttacgtatatttagatgttgcctataagtaaaaaatgaaaaagccattatatttgttaattaatatacattaaatttattgataacgtaagaatttggagagcatgtcatatatttataattaacacaaaattaattgagagaaagaagagggaattaattaatgtaatgagctattatttactattagttattattagagaaatgttaaagggcaccagtggtgcctagcaccttcttatctgtcagtatcgctattagtctaactaagtatcgggtcccacatagtttaatataataacttttagggattatcgctatccaatcgcaacgtaatatatcaagaagatactaaacaccactagtacctaatagcaat

SEQ ID NO: 126851 - DNA, 710 bp, Cannabis sativa
atacacacattaaaatattacatttcaaactatatcacttaatcatttaaaaaaaatactaaaatagggtccaacccgcgcgaagcgcggcttagttccctagttataaataaaataatactaaaaagattacaaaaaaaaaatatacattggcttaagaatattatagaatgcaatgcttatagaagatcattacatatttggattgtatttgacttaatttttataaggttttctttagcttttagaattaaaaaagtatatgagtgtttaaattaaaaataaaaaatatatattttaatttaaaagtctttttaaaagaagctagaatttgtagcttctccaaaaaaaatatttttgagaaattattttaaaaattaaaataagttactcataaaatatctttttttttaatgatattactttaaaaaatacttttcattaaaaaaattcatataatagttattcaaatagtaagaataagacaaaatttacacttatcttatacttctaactataaataaaagtacggaactatataacaacactataattaaaaccagagattataaatagtttggaaccaatctaacttatattaacttaaaattctgtcacaatagtagcacttaatttcccaagaaatgagattactaattgaaattccgtattctaatattcccagtttgattatttaattaaatgattaa

SEQ ID NO: 126852 - DNA, 588 bp, Cannabis sativa
tgaatattatagtcctccctcgtcatcttctaaagattatggtaaccttctcaagtgggagttttttctcccattttcatttatttactttctttgagtgctaatgaacttctcttgcctcgcagatatggatgtggatttggagagcgtgttcaagagtcctcccttagtcgataagaagtctacgaagagatttgcccaagctggtaaggttttgggttctaccaaagaacccaaagggaccaaaactactgccaacaagaagaagtcctcaaactagcttaccatcgagccatccaagtctgcagagaaagagaatgaggtctttgctggagggaatgccatcgagcaactaactgggtcagtgcaccaggtgaaactctctagttctcatccaaagatgattctcctcgagccctcctgtcccgtaccccccaaggttgggactaaaggctcgtaactctgctctaagcatgctaccaacggttggcgtaacatcttgactcttgggtccggtgactgggatcttctcatgcgaggcacttctgagaatttggccaaaaggagttatgaacttctgcatcagat

SEQ ID NO: 126853 - DNA, 826 bp, Cannabis sativa
ttaagtcatggtttctactcggtgcgtagtgaatacaagttgatacaagctcaaaaaggaaattggattacagttgactcttctgagttctggtgcaagctctggaatttaagagtaccaccaaaagatctcaatttggtatggtgggctgcttcaaattgttttcccaccttgacttaattaagtggtaagagggtcccagttcaactcatgtgcccgatttgtcaaatggttaggaaactattttccatgcgcttatttcatgctcaagcactgctcaatattggcaaatgattttgggtggggttaggccgattgttactgctaatttttacagctggtttgatcaaattttgcaaaggtgcagtaaggacaagtgtggggaggctattagctgtgctgggggctatggaaggctcggaacgagttggtttggagccaaaagtatggtggttagttttcttatctcatctatgagttgtcttgcgcaatggaagtcagcccaaaatagtagttcaaaggcttcttttccagtttttaaagctagtgatggagctgaattttgggttaagccacaggagaatacaatcgaaaggtagttgttgatgttgtcatttttcgtaatcgagtagcgtttggttatggcatagtcgctcgagactctcaagggaaagtagtgatggctaagtcgggtagctttacaagtatagccgctctggatttggctgaaggaatcggtataaaagaagcgctaagctgtattaaaactcaaccatggcagaaagtggagttggagtcagattgcttggtagcagtccaagctatt

SEQ ID NO: 126854 - DNA, 1199 bp, Cannabis sativa
ttttgtagtgtaaataaacatatcaataattttatatattttaaccttaataaatcaaaaaaataaaaaaaacgatccttacctttaataagtcgacactgccgatggagaaactgttagatttataattactgcatataattatgtaaaattatttttttgtatgcacacgtatattgtactagtatatatatattttttctgaatatatataatgtatatatatatatatatatattatggtacattctatacgagtacagactacaaaatagtgtatttaatttgttgaattaatgcgtgcatgtgtttgctctgtttacctaacaacatataagacaatcaatattattatatttatgtaccaagcaaccaggcaatcatatttaattaattatctatacgtacttttgttctttctactgtcccatatatttcattgtttctttttttaaatatatatataagagttattttcatggacacatctagtaactatagttaatttaaacacggtactcttaacaatgacaggatatatttattctatacactcaaaatgtatgatatatataaaatatattttttttagaataaatgtacaatgaattattatcatgtatttttctacattatcttctttgatcatattatatgttattattatttgaagaattcgatctgttttcttatataattattttgggacatatatatatgttcccattattttattacacaaatgacaagacaaacaactgtaaaggaataaaagaattcaatctctcaaatgatctctccctctctccctctatgctaaaaggcaccagtggtgtctagcaccctattatgtgtcaatattgttattggtctaactaagtatcggtcctatataatttaatataatagtttttagggagtattattaaccaatcgcaacgcactatctcaactaggcactactgtctaataataatactttatatataaatatatcagtgatgacgtggcaattaatgccgaagctgttgttgtagattgctactttgtctaattaatagatcttttcatttaatgactacttgcagtacgtatatatctaattcttataatagcattgctattgggcaccagtggtggctagcaccttctaaatgtgtcgacttgcaattggctagcgatactctataaaaattatt

SEQ ID NO: 126855 - DNA, 1765 bp, Cannabis sativa
  modified_base (35)..(37): a, c, t, g, unknown or other
ggccttaaaaaaatgggggccttgtgcaatggccnnngctgcccaatgcttgggccggccctgctcagggtcaaacaatatatttggttatataatggtcattatataaggagaaatttcttccaactaaaaagtctcgttttctatctgtagtacatatcttgctaacttatgtgttgcattattaccattttgcattacatgaagaagacatgcatctgaaaagacagataataatgacctaataaatctaacaatacaactctatcgaaaaacatattttaaaaaagagttgactgaattgacaatgatttcagcatcactctctacaaaagaaatcaaaaatcctaattctaaatatcattttaaagtataagaaataacaaatacttcaacttctttaagaaaaaaaaaccagagatttaacaaaacatcccaacgaaaacaattaaaacaaaaataattgagacactattaattaataaataataagaaataagaaagaaggtgttgtttcttaaaaataaataaaaaagtaaagagggatgtggtggtaagtgagtttgactggtccatgggggtttgggttgtagtgagtagaatagaagtagggggtgtgtgagtgtgaggaggtcggcaaccgcctcttcttgggatggtgacgtgtccgtacatgtgatggacacatctgatcccacatcagaaagcgacagctctaccaatcatatatcatcaaactccatcgggtccttcatttccacgttacaccacacgtgtattctttttttctccagccgccctcttcatcaatactttggataagactaaatctgccaactcattattattattattattattaaaaaaaattaagtcaagcctagttttaaaataatctttgaagattgtgcatatttgactttttcttattttatttttactttttaaataataaataaaatcttattcttttattattattactcttataaactcatcattaatcatcttaaaattacaactaaattacttaaattttatagttcttacgagtataaaaatttaatataaattagttctaagttataagaaaatatataattaactttaatctaatatttaatataatttttttaatttttcagtccgtttattttatttaatttttaaaaacaattcatttgtaaagtaattattcgtaaactatattacatttagtagttatcaaattaaaaaaaatagtaattaaataaataatatatttagtgtttttttttataacaaaatatatttattcttttaaatttatattttttaatgaaaaaaaaaccttgaatttctttccgtatggaaagaaaaagcatggacaataaaacacaatttgtttttcattttttcttttacatttatgaagtttagcgttctattatatatttttatagaaatattcttttttttaaaaaaatttttattcaactcttatatttatatatattgtaagaatttaactcttattatattatgcatgcacaaataagaaaaaaaagacaaacatttttgtagaaatagattagaaccatatgttatagatagaatggaaaactacagtagatataaaaaaattgtttattttgaattataaatttacttttacatgtaattttatggcccgtttggtacgcaggattggactagattggactaaaaaggattggactggactggacaagattagattatgctgaaagtaatcctgtgtttggtt

SEQ ID NO: 126856 - DNA, 573 bp, Cannabis sativa
ctttattgatgttgaataaaatggattacattgaattggagttttatttagggcataaaacccaacaatttcaagggcgaccttttgtatgttgcatctatatgagctataagtacgtgcatgccgtgttggcctgacctgtatttttgtgtgcttttcaaaatagggtcgtgttgtcagaccatgaaaaaatatagattgtgtcgtgccgggacataaaagaaacatgggtagtgtcgtgtcgtaccaactattttatataggataagcctaacacaagccgtaggtctgatatttttgtgtcatgttttatttgggtcgactcgtctttttttttttatatataaaccagtccattttcttatacgagcttgaatttgtgctctttgatttcatatttttattataattaatgagataattactaaaatatacatatgaataattcaattattttttcataatttttttaacaataactacacacaattatataaaaataagagcattgctattaggcaccagtggtgcctagcaccttctcgacatgtcgcgttgcgattggctagcgat

SEQ ID NO: 126857 - DNA, 1115 bp, Cannabis sativa
gtatgacattgtttaatgtatatttatcagcctattccaaattttatttctttatcaaccactctcccttactctctttctaccaatttatctcttttatggcaacatcgttttacttctatatttgttttttcgaatctcttttcttagtattaattttatatttctttcattcaaattcatatttacatgaatatccttaagcatttatttgtgtttatacttctatatttgtgttcaaatcactttccttagtattgatttgtgtttacaattgaagctaactctctctttctttgcgcctcggtctccaaacactccggccccaaaattatagaagaaaaaattattttaagccataaggttaaggaatcaattcccaatatttactttttttaatatttgttctatgtcagcatatatcaagctttttatttgttaattcttttttatattatctccttaattctcttatttttatattttttaataaataatattcatatacttataccataaattcttcaattttatattttttctaatattttaaattaatgattattaattttctattttttctaagatttcaaattaatgattattaatagtaatgtggaagtcttaaaaaatatctataatatataatctatctcactaccaaatctcatgcttgagtgaaaacaaaagagaaagctcttttcgtccaaaaaagaaggaagctctcccaaaagtgatgctagagggattcacatgtatgtgtattactttgttatttatttttctatagcgctttctctattgcctattgtcatatatatttggtttcatttatagcatatcaatgcattatctattcctatatttattggcgggattctaagtttcatttaaggaatttttatcattgcatattaactatttatgtggtttttttaattattattttctctttttgtttaacttggaaattatttggatgactctatatctattctatataaagaatagatatattttaatttttatttaataaaataataaaatattatttatctataataaaataataataaatatcctaaattaaatatttgaattaaatatttaaattt

SEQ ID NO: 126858 - DNA, 1231 bp, Cannabis sativa
ttctctaattttcttacagctctataaacttataatatttattggttgccgaaaacttcggtcaacagatactataggctacagtagttttaaatcgtggcttatatatagtatagctgacgatttcaaaccgtcgctatagtggattgccccaaaaaatcatcatcttcatcctcctcgaaacgacttctcgcatatgttgcagccgctccaaaacctttacaagcttcatcatcatctactgttgttgcactcgctttcatcctcctcaaaattttcttttacaagcttcaaattatttttcacttgacgatcctcaaaattttttcgaattgcaagcttcaactttcttttgcacgcatacagattaagatcaacaaatcaaatcatggttaatagaaatttaaacaacaaataagagaatgttgtgcttacctttgtgctaccacaagagagtgaaagaaagggacacagcgaaagagagtggaggagagggatggcacgactcgtggtcgcggaggataaagagccaggaaaatgaaacaaaatttacaaataactttgaaaaaatgagatttaattttttttaggggggttatatcttaaaaggcaggaaataaaatttaaagttaaagatgcggagttatgaaattttaaatctgaaatgcgttaaatttaagcatgggaattgccgacggttttaaaccgttaacaattctcatttaaaaatacacgggattttttaggcaaatttaaaaaccgtcgcctatacctcttgacaatttaaaatcgtctagaatatcttatttttcctgatagttttaaacactagcttaatttttttaaacggttctctaaaaaaaatgtatttttaggaccgtcgcgaatatcctttttttatagtagtgtacaaataatgtaaatgagttttctattttatccaaactctttttcacatgtagagaaacattattcctattaaaatatttgaatagtatttaaattatattttattgtaaattatatgtattatgtgcctattaaaaaatatatattatttaattaataaaatagagaaattgatgtttgatatatagggatagaaattggatgattaatgtagagaatgcattccaactaggggtgttcacaaagtattcgatccaatccaatctgcacgatccaattcaatccaatccgcaaaatgcggatatccgcacttgtgcagatt

SEQ ID NO: 126859 - DNA, 1268 bp, Cannabis sativa
taaactaatgccccattcgggccacagaaaaaacaaatgtcggggaggttttcatatttcagctctagccaaacgactttatttatacccgagaagtggataggtatgccacgggggagaggttgcgccacatcaaacatgactcggagcctaaaatagggtccccatgtctcccgaagagatggcttatagagctccaacatgtgaccgagagaagaagatactagggccgccaattcttcagagcgtttgaggaaaggggtgttgaacacttgaacccaaagaggtattttgagcagactatccccattgaggacatccaaagagttccgaatatccataaggatagcttggttgagataagtccaaggttgttgcaacaaaacccgacgcctatctccatcgcaacctaactcaacaaggaaaagaccatgagggcgctcggtgataatcacagggctccgagagatatggttccaattctttgtcattttttctataaaattctttcggttgaaagacttgacagtgtgcactttaacaacaaggaagaggggggcttgttgtgtctcggtttcaggagtatttacaggagtgagttcgtgaagtgtttgaacagtacactcggtttttgtgaggttgagagcaacagagagagaatttgttagatcatccatagagtagatagctaaagggcagtaagaagcaaagagcaagaagggaccaggcagagtttgaaggataaagagtgaccgagtggtggttagaaaacacaggtattttgctggggtaatggataggagatgctttggagattggttgacagcaaggttgtacaggaaagtagaaaaactggatagggagagttggtatgggagaaccacggcttcaaggataaggccaaagctaaaccaatacacccaatacacactacaagcaaatgaaaaggagttgaccaatatgcaacacttactagagatcgatgtattatggtaaaataaaaacacaactgaacaaacagaccaagattggaaaataatactagaagacacaaagatatatatcagtggggacaatcggttggaactcatagaggggaaaataggaggagtagaaaggaataaccaactgtttgtatagcaaaaccataagtacaataagctttgcaaggaggggaaaaagtatatagctaaatcgcatatagcaaggtttctcctagacttgctataaatagataaacactcacggtattgttgggttttatgccc

SEQ ID NO: 126860 - DNA, 794 bp, Cannabis sativa
caatcaaatttagctttgttaaggagtacttagctgcacaatagagatttaagtaataaattatcattttaaaaagatgttaattagaaagcaaaaaatttatattatattgttcagttaattctacgagggaaagaccacatgtgaattaatacaaagtaaccgaatgaaatataatcttttaaatacttcaaaaaaaaaatcatatagaaaattactttcatgaaatcaaactactaaacagaagacaattattattattaaaaaaaaaaaaataacaattctttgtttctgcgtataactgagcaaattagtacatggcaagaatatctatgtatgcaggttaagaaactccaaagtttagtcctattattgtatacatatgtagttagtttaccatatattctaacagaaacattgtaatatatcctagattccacaaagaaaaatagagatccactgctaaaactctgttttgaatttgttttgttttgatttgatttaattaccactcctcatacatctaaatcgtgatacctaattgcatagtagggaatagtattacattttcttgaggtacagaactactacatatcatgaataattattcgaaattctgtagtcaaatatagatctaccaatgtcattcacaaaagttaacctggttgatattaaatattttaccaaaatatacattttttctcatacattttttttggttggatttgcttacatatatatggtgaaattctgtattttaatattcccaattttattatttaattaaatactta

SEQ ID NO: 126861 - DNA, 1209 bp, Cannabis sativa
  modified_base (71)..(102): a, c, t, g, unknown or other
atgtaaggtgtcctaaactttatatgtgtttatttcatcgttttacaatgttcatatttagggtgttaatnnnnnnnnnnnnnnnnnnnnnnnnnnnnnnnntaaaataatttccaacagtttataactcatgggggaattcaaattgatccagtcgacccaatggtgacagatcaaagtgtgcaaactcctaaaaatgcaagggatccactagggtcaaaccctaaacaagttaatatacaactagaaacggtgggccatggaatgatttcccctctagtcgggttcactccaggcacacaagaaacatgaaatatcagtacaacagtcgaagacacaacttctagtgttatcttgtttttcttgcaactagatgtggcgatgagaatggatgacatgtgtcccacatttcagctgcctatgtggtgggaattattcttagaggcccactaatggttaatctttatatctgtgacactcagaactccaaatgggatagtcaagaagatgtacgaccaagatgcagacataactatgccgaacaaagcatgtaagttggtaattctagagatcagtctcgtcgcttccaagacacgaagacaatcccttttatcgtgggattgagtcagagaatagaggcaatacactttagttttccattctttacattgtaattatagaattaatgtagtttcctattttatttattatagattaagggaaaccattcttcatgtattaagcccctataaatagtgacataatctcactattgagggggatgagagaattaatttgggaacacattaagagagaatagttatctaagagagaaaataacttggagatccattgcaagagatttagagagagagaacactttattccttctcttaagtcaatacaaatacaaagggagtaggctattaccattctcacaaggttggacctctttaagattcggtgtcctcgttacttattatttttgtttaatattatttatcttatttaatcgctttattttgactcactgtcgttggctagaagcgaggtaaatattttggggctttcattgagagcaaaaacatcagcttttgtcttagttttgataggataacaggatggttgtacaaactcgaaggggaggccttactgatcaaggcaatcctatggtgatagatccaaacgtgcaaactcctggaaacacga

SEQ ID NO: 126862 - DNA, 930 bp, Cannabis sativa
tttattttcagtgtgtttaatataaaagtttaaattctgcgctattttaattagtaatccagattaggggattagggttcataatcagttttgggtagcgtgcctaattatttagggcgttacatatgcactctaatagtagaaccattttgaagagtaatagtatgggcaataatattcttatgcacagtaaaaaaataaagaaatatcacaatatatgtggcgtgaagcaccaccatcaacaatccataagcaattatgagaggattttctagaaacatgagatgcaaaaggtttagaggcatctataacaggtgttggctgtagcttctgtatgagcaataaaattatggcctgaatatcttcttgcttcgtaagattagcaagaacaccatattggtcgactcaagtggaggcattatggacagaaggttggttagatttcttcttttcaccataatcaggaggaaaaccgattaagaaattttttttttcttttaaatggcctggtttgtgacaattagagtagtagggtctcaactttttattgggacgaggattagtagatgttgcagaagctgatggattttgagcaagagcggtagggggttgagtggattcttggacagaggccataagtgggagttgaggatttttgagttttctttgtctttcttcatggacaaccatggagaaagctttagacaaagatggaaagagatcaataagaagaatttgtgcacaaacaataaaaaaagattcatttaaccatgtgagaaatcggagaacctgttcttgattgaggaaagccaaattatcaacagaggcagcacaagtacaatgaatccgtggtctcaattcctgaatttcatcccacatacacttaagttttgtaaaatatgaactaacagaatcatcgccttgtcgaag

SEQ ID NO: 126863 - DNA, 1707 bp, Cannabis sativa
gtgttctagaactggagtagagtcatagatcacatcgttctatagaacttgaactaattggtgttgattttattattttcttgctttattttgtttctagttttaattgctttgttcatctctgttatttctttgtttcttgagttgcgatttcgttagtcttattatttttaattgtttcgtgattcaatcttagttgttttgattcttcacattaattgtaatttttccacaaattagagcttggtaatcgatcaagaacacagaatcaagattctttccgctgcattcttgaagaaacaattaaagttgtcaataatgattggaattggagaattttgatggaacatgagatttcacactatggacgaaaagtttgaaagggatcctagtgcaccagaaggtctccaaagttcttgaagatgagaaattattggcagagaaaaaactagacgagatagccaaaatagaggagatagcttattatagatcatcatgtacctttccaacaatgtgaggagaaagcttgtcacagaaaagacggctaaagaaatttggaacaagcttgaagaattatacatgaagtcatcaattgctagtaagattaatttgctaaaatgttatttggttttaggataattttttctctctttagatgataatattgataggtttcatgagattattgtaggattggcatatataaatcataaagttgatgaagaaaaccaggccatcattttgttgagatctctcctaatcgcgtatcaagaagtcaaggttgccatcaaatattgtagagatgtaattgctttagaggatgttcttgtcgcactcatatctatggattttgaattacaattaaaaaagaaattcaagaaggaagaagtgtatttagaaagaaggagatcacccaagaaaaaaaaagttcaaagagtaaacaccatcactctcaatcaagatcaaaatccaagaaaaaagagactcaaaagtattacctttatggaagatcccgacacttgcaaagattttgcaagaagtacaaggagtaacaaggcttcaacaaatctcataatggagataggaagggcaacatacatcatcaccacaagaaagactcggcttcattcgtggaggatagtgatgactgctcaacagatggagaattatttccatctcaaaatcctcaatgaacagggagtggattcttgactccgaatgtacttatcacatgtttttgagtcgagaattattgtttgattataaatcagttggtggaggtaaggttctaatgggaaatgactattcatgcagggtcattagaatcgaaaagattaccatcaaatagtatgatggtggaatcaaagtgctgactaggggtgttcaacaaaatttacaaaccgcccaacctgagtaaaccgcccaacctgagtaaaccgtccaaaccaaaccgaataaactgacaaaaaatacaacctgaaataatacaatgaaaatccaaactgcccaatgaatatattgggtggtttacaaaattattctaaaccgcccaattaacccgaataaaccgaattaaacagatttatatatttttaaagaagtgtatatattatatcacataaattgcatttattagttaaactattttgtatttaaagtttatacattttaatgtttaacttaaaacttatactttatagttaataa

SEQ ID NO: 126864 - DNA, 1286 bp, Cannabis sativa
ttaagaatgaggactttatgttttcacttaaataaaagtttggagactaatttaccaaagaataaaatttgaggatcagcttgccaaaacgtatatagtttagggacctacggtacaaataaacttttattttattgttgtctgtatttctctaatgttatatatcctttaagaatgctaaaaatctccagatcatgcaaaaatataatattttattttatctctcttccacattatttttagcactcttacttttaaaaatactccaatgaaatagcacttttcaaaaatactataattatgatctcacacattattatttagtatatattctaatttttagcaacaataactttttagctttaatattttattaaaaaaaaataaatggcatcaatgctactatatagcattcatgtaaatttttaaaatatgaactagcccaagtcatgcattattaaatacaaagtacttttttaaggagcaattgttatacctaaattttcgttagcaataagaaattgacacgtgtaccatggctagaatatgaaccaactcaagtcgtgcattattaattgcacattaaataactcgccttgggaattacagttaataaaaaatttgaactcgccaccatataggcgatagcgagatgtgaataataactattaaatgagattggcgatacaacaagtccttctcaggataaacagaatacacaatgaaagttgctcaaaacgagtaaacaaagagtttgcagcttatcgatccacatactcgtgagtaaaagcttgcagctcattgatccacatactcatgagtaagaacttacagctcattgatccacatactcatgagtatgttaaggagtggaaacaacttcaataattactcacctcgcttttgacatatggaagtaactacctcgctaatgccattcaaacgacaaaggagaatcatgagatgcattgcatcttaacacttaatattttttctacaaagacagttaagaaagagaacatgcacttggcgagaaccgtccaatacagtcagcataaccatctatggataaagacaaagagcggttgaatagttatttaatattatctcatgtgcacaaagataaaacgtgagaaatatccacatttcatgagcggttatgaatgagtagatcccaagagaataattgtcttctcgtacatctataaatagtgaagaaccttgggcaaaaagggacagccaatttttagaattactaaattacaccattatattctgtattcaaa

SEQ ID NO: 126865 - DNA, 547 bp, Cannabis sativa
agtctggctctggccactatactatagagttagagtcctgccaggtaaaggtaatcctaatcctgcctggccgccatagacctacaggggaggtctggccacccaaggtgtacaggatccgacaggttaaggcttgtaggatctggcaggccaaggtttgtaggacttggcatgtcactatagcttcgccaagaggaggctagacttatggcgcttgttgtggtgacaagactcatcacatatgtagtgttcatggagattccacttgtgacgggaacctgagtatctggatctgaaatctatgggttttgaaggagacttgaagatacgtatagtatgataagagttcttcttgtgttcaccatggagtttgatcagatatgatatccacaatctcaatgaaagcaccaaattgttgacctcaaaagtgatcagctgacagcagagtcgtatggatctgatgcttgccatgtgttacacaaacaaaatgaaaaagtataaacacaaagatttgttatagagattcgacccccatgtgatagcgggt

SEQ ID NO: 126866 - DNA, 642 bp, Cannabis sativa
aaaaagtatgaacacaaagaattttttacgtggttttgtagttaaaattttgcatagtccacgagtcaatcttattagatttctgatattgttctaggactctttttctcttataaattttccgtccctttttcaatctaactggcctttatttataatcgcatagtcaggcagttaattacatggttgactcagatctttacaataattatccccttaaatcgtggggtttaattcaatatcacgtaaaataaatgagattaatatttgaatatcacacagctgtgattagtctgcttttactgggtcaaagtaatcgtgtattaaacacgttataaatcttaacgctctgggatgtctcgataagaacccagtaccaatgcctttgatagcgagctagagcttttcccatatcttttcgaggttgataatgtaaatctcgtcgctcctgtgctgaagacataatgctccatctgacaattgcaattctcggcgacaaggtgaacttctacagtcatgtgcttgtcttcctatggagagatggatgcctcgctatcatttgcttggatttactcgtctgttatacttagtttgtatattatatgctaagtgtcttcacagtcattatatcttgcttacgtc

SEQ ID NO: 126867 - DNA, 2120 bp, Cannabis sativa
tattataagtttaggaattttttttttaaatatatgtaagcataaaaaaaatcaaaattttcttttattatttctctttggcaaatttgagaaaccatgattaaatgtgttggatggtctcataatattccacccctttaaacattacattaaatatgctacttacaattttcaattccaattataccctcaataataaaactaaaccttattctttcttcccctctctcactcttgtctctctctcactctagaaagacacacacacacacatacacaccctttgctggagtccatcaacttagcttgacagctaagtgtgcaacccaaactccctcaccaacataaatcttgaaaaaaataatcgctatgtaatttatttagtaattattgttagatttagttatatttagttgtatttaggttgatatgaatacatctacacattattcttttattttttgttgtttcgttcatggaactcgaacgggtcggattctgtgtattctatttttttttttagttttagcgatgttagcgatgccattatcgatatctagcaacattggtgtgtgctggaggttagggatgactttttttcgataaatgaaaatatttgctttccacttacaatttttgcaatgtctatcaacattgtttctgatatgtctcgatagttttagaaatagtgttcaggagccatctttgtaaaatttaagacaaaaaaaagaacatattaaaacacataaaaacgtgtcgctaaacgtcgcaaaataaattgcaacatatcacgaacaaaatcgccacatatcgatagtaattgttaaaacatacatataattgtgaaaagaaatctccaaggcatatgtcacgacatgtcgacaaatgtgtcaccacatgttgctaactacaacaagggagagcaaacaaccaaaataacatcaaattcgtaaatgatgtcgacaacatatcgctacatgtcgctaagagtttcaacttccaattcaatcatagctaatatcgtgagatgtcgcaaactatgccgactaacatcgctaactataacaacttcttagcctaaagttaatcgtatcgacaaaagtcgctaatatgttgagaaacatcgctaactatgttcggtttcctaacctaaggttgatgatatcaatagacgttgctaatatgttgagaaacatcgataaattgtaaaaaaaactcagaaatcaaacacaaacacacaactttaacataaaatcaaaaaaaatctcttaaatttttgattgagcttttagattctcgggtcttccaatgtacgtggactccctcgctaaaataccaagcccttttaaaattttagggtgctgggttttagtgccgagtggtattcgggacggttcatgggtttcaaatgaagaaagctataagagggggagacaggggcggttcgattgtattggatgttgtggatggtggtagatgcggtggttaatggtgatggatgttgttgtggtgagtgagagggagcaaaagagattctaatggagagagtgtgaaagttaggtgaatttgagtgggaggggtattttggggtcaagtaaaattaaggtgtattcagaaattattttgtaaagtgatatattaagagtacctaaacccactttaagaataaattgtcaaatttcccacctctttttgattgtaatctcaacaaattattttttactctcacatgttcccaaaaaatttatacttttctcttatagaaatatattttttgaattaattaataagctacagaaaagaaaattatttacctcccaagaccatctctaatgataatgtaaattttgttctaaatttaactcaaaaataaataaatattatatttggcctaaattttacaattatactccaatccactataagagtaaaataaactttatttaatagaaatttgtaaaaaaaatcaatcaattaaaacattaaatttttattaaaaatatattaaaactatattaaatatgtaaataaaagtattaaaaaattattaattatattaatgagtaacaaaagagtaaataaaaaagtgatatttattatgcaaaaaactgaaacttact

SEQ ID NO: 126868 - DNA, 2403 bp, Cannabis sativa
aagcagggaagtcactaacagtccccaataacacgaccttcaatttgaacatttctttcttaagaccatcatatgtctcaacaccattctcatacaactcttttagatcatcaattattggtgccaagtatacgtctaattatgccctggttggtttggtcctgagatcatgagcgaaagcatattaaatttccttttcatcaccaaccaaggaggaagattgtacataacaaggaagacaggccacgaactatgcttactactcagtgatctatgtgtgtttactgcatcttcagattgaccaagacgaagacgtcttggttctaacttgaattctacattcaagtaatctacttttttccatgcttgcgaatttgcaggatgcctaagtttatcgtctctcactctcttagtatcatgccatatcaagttttcagagtgctccgagctacgatataatcgtttgagatgaggaatcaaaggcaagtaccacatcactttttgaagaataagtttccttttctcctcactcttgttcgttttgtggcggggttaaccacaggttgggcaactatccatgtctgcatattccttccgataaaaaatacaatcgttcggacatgcatggatcttttcatacttcaatcctatcgcatttaaagttttttcacttcatatgtcgacaccgagaaattattatcaacaggaaaaatctctttaaaagcagctaagaactgactaaaacccttatcgctcaccccattttcatctttaatgttgtaaaactttaccaatgttggtaatcttagttttttacaaccatcaaacaagggtttttctgcataactaaccaagttttgtaattttcaggatcatcaagaaactcctcttgtgcttcatcaatcaattccataggatatcatcaacatcattaaacttgaaatcatctaaccctcgcttccctaaccgatttgggtcactagttgatcgctctccgtgccaataccatgtagtgtagcttctattgaaaccacgacaaattacgtgatcctttatcatcgtaatattcccttttgttctgttacaacaatctacacacagataagaaattcgttcgtgattactagaattttttagggcaaatgctagaaatttgttgaaccaatctataaattgcggtgtttctctcctcttaagcatccacgatttatccataccgcaaatttaaaacaaaatcctaacaagtagatttaaaataacttaaattaaaatatttatccaaattctaccaaaaatttggcaacataacaactaaaaatcgaacgttccaaaaaaaaggaacaatccacccatccgaccgcagttcatgtactcgcagaacctacttcactacagatgaatatttaagatattcaaactcctctaacatgtttattaattaataattaattaaaagatagaaaaattatacctttagctcaacatttggaaaaaatcgtgttctcccgtcaatttagatccttgattcttaacgacaaaacctacaaacaaatacaattattaaaaaaattcatagaaaagaaattgttactagttagaaaattcatgtatatctactatacattttgtatttaaaattagtccaacataataatttaattataaatttatgtatattacatatagtacagactattacggtactacctaacaaatttaaacatagaaactaattttaatttacagactggttgtgctttttgacataatagttttcaatagttttggtattcatcccaagctgtgcaatcccacattgcctgggaaggtcaagtgggatgattctgagactgtgtaggtaagggactgcacatttgaagagagcttaagtggattgattagtactacctatatcaacaaggtgcatcttgttttctggtagcctatctcgaaagaactccacagttaagcgtgcttaaattggggcgattttagaatgggtgatctcctaggaagttttcataggaagcatgcaagtgaggacaaagcacgttgtttatactcgtgttggtttgtagggtcagtcgtcaatccaagaaggagctagagttgtgtactcgtgtatactcgtgtataagcgtgtataagaacgtgtataagaaccattatttccattatttcgtgggtgatttcgtgggtgtattcgtgggtgtaagggcctaatggaggcttgaagcggagacattacaaatggtatcagagccttgacctagccgaaagtgtggtcgaggaggacgtcgaaccccgtacggggggtgattgtgatagtcagggtaagctgtgcaatcccacatcgcctgggaaggtcaagtgggatgattctgagactatgtatgtatggga

SEQ ID NO: 126869 - DNA, 607 bp, Cannabis sativa
tgcaaggtttatggctactcggaggtcttcctgatcaagatgcaaagtgttattatgatcttgtatgagcccaagtgcctcttacagattttggagttcattgtcgtctccaacttgtctttgagtattagtagtggatggaacttcaatgcttggagtggattgatcgcctgctaaactggtttttctagtctcttgtacacatggtgtgatcccaacgagaggggatgtcactctgtggcctacagtaggaggttgtgtattaacctactcgaggtttgtccctggtggtcgtctcatgtccccaggattttgcacattgggatctgtctccattgggccatcctaatcagcaaggcctccccttgagtttgtactaccatcttgtttatctgtcaaaacttaagacaaatgcttgtgtttttgctctcaatgaaagcaccaaaatattgacctcacttctagccaacgacagtgagtcaaaaataaagcgattagataagagaaataaaagaaaacaaaaagtataataaaataaagtgaccactagattttaaagaggtttggccccgtaagtgtaaagcccgcttagctaatttggaaatta

SEQ ID NO: 126870 - DNA, 762 bp, Cannabis sativa
  modified_base (184)..(195): a, c, t, g, unknown or other
  modified_base (323)..(323): a, c, t, g, unknown or other
ttctttttaacaaacctgttggactactctgtattgaatgatcttaggatctgttgcaagtttagctagcatgacagcgaacgaatttttatcttttggaccttggaggatgttataacttttgaatccttaccacactgatattcttatttattgtgttgtcaacacaatggaaagtaatcannnnnnnnnnnntaattcctatgatttattagtagagggtttaactgatatgataattagtttaaggtttttcataccttttatgtgtttattttcatcgttttaaagattcatatttaggatgttaaaaatatacttgntagtaaatctagatcctcgtaaaagatattccaacagaatcaatgtgtacttacatctgttgggctcctacttccttagctaacattaagcctgctagcatagcttcatgtccagctagtgcccttgtggggaaataagaatgaccccaacttcagctccctttttgttggaatctctatctacgtagaccttccaggtgggtagctctaggattgggtctttcggaagatcatttaagctcaaatgctctactatgaagtcggcaagggcttgaccctttatacatacccgtggttggtagtggatatcgaaatggctaagttccatggcttattttagcaacctaccagaagactctgacttctaaaacacttgacagagtggatgattcatgagtacttttatggtatgggcttggaagtatggcctcagcttcct

SEQ ID NO: 126871 - DNA, 1151 bp, Cannabis sativa
aattcatggctaatgcgcaaggcataattaaccttgaggatgcctctatccaagctttagagtccctcctgtaccaacacctactacaactgctccaagctttgcatcccaaactcctgccccatctttgtcccttctaggaccctagttctctccaactgtgtatgaacctactgcatctgatctcgtccctacgcagacccatttctttgggtacgagactgggtccagcatggctcccgaacaatccaaagctaaagtcctagattctagtacggggcattcacatggtaagagtcacagtcgtaatgattcagtaaagaaattgagagtacgatccaaagtacaccgagtacaaaagtttgatagatactcaggagaatgtttataaggaaacatgtaacatggtccattatcgaaagctcccgcacatgttaaatggcaagagaaaccagcgagattagaacaagaaatgtgaataccatggagacaagggccacaccacaaatgaatgtgaatatttgaaagatgagattaaaatgtttgtttgagtggggcatctagggcagtgggtctgcatcctaattatttatcttagacaaggggtagtctaggggcacttgatgcttctcagacaataaggtggcgtaaatcccagaaaggggttgtgccccctccagctctcaaaacatcattacttgctcttccttctctgccagctctggctagggtggctttgcttgctctaggaccaggaactccatatcctcctggaactgctttgccacctgtggacgggcatgttgtaacaatttgggtggaccccacctcaccggaagtactcgtaacacactatagagatatctaaaagaggtggaggagggaaaaatgtgtgcaccggtacagtctctcgcacagcacccaaggatgatgaatctcctgattaccttcattgaggaggatgctaagaatgtacattttccttaaaatgaccctttattaaatgacgcatagattgccaacaagcgagtctccagggtcttgatcgacaacagaagttttgtcaacattttgttcaagttcgcattccaagatgttatccacattttcataagcatgacacgtgaattttaatcaagaaaagtcaagaa

SEQ ID NO: 126872 - DNA, 1006 bp, Cannabis sativa
ttaattgtgaagaaaagagattgtagggtttatttgttaattaagagactttgttgagtctaattaataaatatgttaaatggcaagacactcccataaaattttcaacctaatgtaggttagccttagcaaacaacaatgtgtcatcaacatacatcagatgagtaatcgcagggccttgacgagaaatctgaatcccttctaaaagcccagccacctccttgttatataaaagtctagagagaacctcataacaaaaatataaagagacagcgggtcgccttgtctaatacccctataaggatggaaggtcttagtcggacctccattaagaaggatttggaactttaccgatctgatgcagaacttgataagctcgataaaaaagagtcaaagccattagctcgcaacacaacttcaatgaaacaccattctaaccgatcatatgccttagacatataacatttcaccccgataaaagctttccttcctttcttcctccgaaagtcatgattcacctcttgagcaataatagagttctctgcaatccacctacccttaacgaaggccgattgatttggagaaattaatttacttaataccttttcgagtctattaatcaaaagcttagagacgatcttatagcaagaattatagaagctaataggacactaattgtcaagacagcagcagcatattggagccaatacatcactttgacttttggtatttatgaaatattgccttagaaataaaacacaccttggagccaaaccaatagcaatatattttttaccataccctgcctaaactcgtattaaaataataataataatactaataataaataacaacccaaataataagcaaattgtaaaaaccccgcccaacttttattttataagcctcccaatcccaattctcaaaggaaaatttgattttttatacttacatatacttaatattttatccctaaactaatacattgttggaaatattttaccag

SEQ ID NO: 126873 - DNA, 928 bp, Cannabis sativa
  modified_base (148)..(152): a, c, t, g, unknown or other
cacacacacacacacacgcccactgctcttctctaacttgagatttgccaactctgattcctacattgtaatcttaagagagctacttcagatcctatcattatagtgatctaagtattattatctctcggtatcaatacaactaaannnnnagtaggtcattacccgctaactaggaggccgaacctctataaattcctatgtctatttattttattattctaattgtgtaacacgtggcaagcatcaacattaaattcgatttcgatgtcggttggccaaatctgaggtcaacacacaccatccaatccaatccaatccgtaaagtggattggattgaaaaatctataatctgcacttggggattggatgttaattgacatgtaaaagtaatcgatccaattcaattcacacatttatatataattaatattttaatataaaaaatagtaacttaaaaattttatacatataatacaaatatattttgaaatatagtagatgaattgtatattcatttcatattaataaggaaaatataatgtaaaaaaaattaaatattttttatacatacaatttttttttattgttttgaatttgttatttttttttttgttttatttattttaatgttgttggagacatatttgttttattttgcatgaaaaaaaaataatttttttaataaatattaaataatctaatattaaaaagtaataaatttaaaataatcgatccaatccacacttttgcacattggaatagatttgagtttttatatgaattggtttgattgaatttcaaatatgaaagttgtacttagtgttgatcgaatgtactatgaacaaaatagtgcagattagatcagatgaacaccccaacttgtttgttataataaatattcacacgtagtttttttttttttttt

SEQ ID NO: 126874 - DNA, 1219 bp, Cannabis sativa
aaaagtaatgttatattgatatatttttgagtgacctctttaaaaaaaaaatgaacctgatgtctatgtgttctggtatctaaaataattttgcagtctattttttttttcatatgcttatatgttatagttatttaagataagagtcttcgcataatccgcaatttgtgattttaaactccaattaatttagaccaaactatttgaaacttgactaaatgaacatggtgtaaatgatttgatcaaattggatcgtttaaaattttttggttaggtcacgattttagaaatttcgaagcagttcaaactaaactaatttgtataattattatatatatacttaatatatattttttggacaaaatattaatatttggaacaattttaagtataatattgatattgagtttatattgttacgataataattttgtattgttacttaggcattataaatttatttacagtaaaacaaatactgaaaaaaatgaacaattattgtaaaaaaaattagaactataaaatgcaaactatggtttgcatcaaaccaatttgtttttgagtggttcggtttatttgttttgatcattttattggtcttgtttggttttgaatttttaaaaaatcgtaatagtggtttggtttgaaaaaattaaaaatcagaccaaatctatttgtgaagacttttaatttaaaatattttacaatattttgagaaattcagaataatttaaaatataaattgtagtgttcaaataatttattttacaagcatataaaataaaataatcacgtgtgcaataaaatgtttgaattttattttcggtgtgttaaattttttgaatttattaaaattttgcagggtgttttaaataactataatgtatataactataagtaaaaatttgattaaaagattattttgaataccaaaatagatagagatgcatcaatatattcttttttaagagagtgcgttgtaaaattttcttatattttttataaaataaaataatattaatggtagggacacctccattttgcacacatacgtatgtcatgtcatgtcacttattttttaaataattttattaatattaatttcatccattatttatatttttataaaaatatttaggttagatctgatttgccctatctatatatttatataatgctgttgtttggacagatgacgtggcggcatatatgaactctc

SEQ ID NO: 126875 - DNA, 947 bp, Cannabis sativa
gtgtgttttgtgggatgcccaataatggcagtgattggatttgtgtagtcttctcatttactgagcgctttacacagtgcatgaaatgatggaagacaactgttaataggtgagataccctctcagcttcccacttatccaaccgtcgaatgtcccttggacaaacgagtcgaactgttaacttctcgtggaaggtgcctcttcctggtacccaataaataccttcagcgactattccacatttcacatttttttctatctgccatttcagagttcttttgttccagtttttctcctatcttcgagaccttttcaacacctttatagttagacactaattcatccgacaaggacactacccgaaggtcactagcctcatatttctcttaataactagtaagtttaattttctatttacttgttgtagagtttttgagggagttgtgagggtgcatttattttaggaacattggttctgtgtttgccattttcgagaatttcgaggtcatgtgatgacccttttttggtattgtgtcgacttctggcaagtgtatcaaatctgaatcatggagagaattggctcttccaaagcaacaggtggtagttcaactaggaagaagtagagggtcgagatacctgcttctaggatgagggcccacccctaggccaagatccttaattgaggctgggccagcctcgaccgtctcgtcctttggtcatgctaaaaatacccccggtggggttcactttcccgaggaagagtgttcctcttaatcatgtcgacgtgtagagggagagggaagtgaacagggctctgaaggggcacttggaggtagaatagctacaagttcgcaagaaagtggtcgtactatcagcggtctgaaaggcaaaagtatcatatttgttaattatgatactttgtatgttcaattaataaatatgataaa

SEQ ID NO: 126876 - DNA, 591 bp, Cannabis sativa
  modified_base (548)..(553): a, c, t, g, unknown or other
tttttttactgtttttgaaaaataccatatttttttctaaataagggcccaaaataattttttttttctatggcccactaaaaatcagggccggccctgcccagaccctaaccctagacccaacctcgacccgaaccctcgacttggaccccaaaccccgacctggacacctgcctagcctcaaacgcggatgcagacttggccccgaccccgaccctaggccccagacccagactcaaccttaggcttcgtacctaacctcgagtcgagctctagacccgacttaaataaaatcaacaaatgaaaataaatataaaatttacaaaatttatttctgtaatttaaaaaaattaaaataaaattattactaaacacgcacgcaagagaataataaactagttgagattttagagagtgaaacaccacacatataaattagttaaaaagaatactaaatttattcttattcattgggtgatataacattggactaaatatgtattttgactttaaaatattttcaaccaatattagtttttttttttttnnnnnnttttttaattttttttttataaatcattaaaaaaaaaa

SEQ ID NO: 126877 - DNA, 530 bp, Cannabis sativa
  modified_base (449)..(458): a, c, t, g, unknown or other
tgaaaaatatttcaattgatttttaccacgtttaaatttttttattaaaaaatattaattaaatttaacaaaagtttactttacgtctttttatgatatctcttacctgtccaaacacaacgttttgcagcaacaacttactataacgacaatcaaagaaaaggtgataaaaccttttccacaaacaagacaattcatagagttaatcactccgtatcatatctctaatagcaagtatgaatctgtgctttggaattgaaaatatatcccaaatgttcgcatatatatttccattttttcttagcaccaagctgcaacttaattagagcaaagagcagctataaaaaagtgagtaaatagcggcataagtacttaaaattttatgtttgtaagcgacataaacctgaccaatgtttatttttagcggtataagtacccaatgtttgtannnnnnnnnnttttttctaattttgtcagtacaactctattattgtcttaaatagggctatataaggcctaaattcttgatc

SEQ ID NO: 126878 - DNA, 1741 bp, Cannabis sativa
  modified_base (34)..(36): a, c, t, g, unknown or other
  modified_base (470)..(472): a, c, t, g, unknown or other
ccatacatgtgtaatacccattaagagcataccnnnatatatatatatatatatcatgggggctattacagtaggaattatgtattttatctatcaatagggatagtaatttatagcctttgatttaatttaatggttcaaattaattcttgaaaactacactataattaatatttttttatttataattaatcttgaatattattagttataagttcaactaacaaactccaaacctaactccaaacgtaatttttattttatgtctatttaaattttagttcaattatatatttttaatttcaaattcacataatagatatttaaattgatttttaaaacaataattatacttatagattataacatatttaacttataataattttataataatcactcttaaaataattaagatagcattagtttaataatttagaagtaatattttcttttcttttctttacttnnntttaatttaagattttaattaatttaataatttcaaaataaaatcatacaatatattaattaattttatttttcatattttttgattcaatccaatcttcataataacttaaatctaatccaatctataaaagtgcatattaaatcggttatcttgaattgattactttttaatattgaatgacttaaaaaatttaattatttttcacataactaacaataaaataaaataaattattattattttatgtctctgttatactcatatttcaagcaacattatgttgttgaaacgtataaagaatccagctcgtgttataaaataatttcattcaatagacttgcctcaaaaaatacatatagtagaaatattcaaactcaccctattaaagataagggcaagctatgaataataactaccgattgataagattggtgagatgaacgatcaacttagaaggttcatctcgaaaaatacagaatacacaatggaatgacaatgcttggaaatgatagataataaattatttacagtgtttatagctcattgatttacatactcgtgagtatgctaagagactacgggtcacattcccagcataacttgaatattttatgcttttctattgcaaagagactaaggtctgccaacataactgaatcatattgtaaaaaagtatacttatcaaatttgaatgaaatcaacggtaaatatctatattcaagttattcttattattgtaaaaaatttcatctatttattatacatatttttctttgacaaaatgccataattttttatttgaatgtcatttattaatgcatgtgttattttattgttcactgttataattcatgtaatataactgtcaatatatatattaataatacaaaatataagactttttaccacaataattataatcttaaaatttttatagtatagttgttctatatattattgcttaaaacaagaatattaaattattaaattaatttaaaagttaaattaataataaataaaatacattatgtctttacaggggtagcaatttaatcgtttatagtacatttaaagcacttcataattatccaaagttgtcatagactattgaattaagatgagatcgacggtaaatcgagatcgctcagatatttttttgagtgaaaattttttcatctatttattatatatattttttatttgatcaaaatttattattcaatttttcaaatattattattattattattattattattgcatgtg

SEQ ID NO: 126879 - DNA, 1396 bp, Cannabis sativa
  modified_base (41)..(45): a, c, t, g, unknown or other
  modified_base (1366)..(1371): a, c, t, g, unknown or other
aagttcatatttagggttttaaacaacatacttgtgagtannnnnaagatcctggtaaaataaattccgacactgggacccagacccagacatagaccgggatccaagacctaaccaagatcgagacccaaacctggaatcagacttggaccaaaataaggacctaacctaaaccaagacccaagacccagattcggaccttgacctagacttagattggggaccataacccagacccggaccagacccaaacctagacctaggacttagaaccggaactagactagggcactggacccaaaccagcaccaggacttagaccagaaccaaaacctcgaccaggataaagacctagacactaactcgaactaggatctagaccaagacccaaactcggacttggagctggattgggatccgagacccacacttgaactaagacccaaaccggaactaaggtttagagtatagggtttagggtataggattagggttttgggtttagtattttacgatttagggattttagggtttaggtttagggtataggacttaagggtttagggtttatggtttagggtttaaggttaagggttaaaggtttagggtttagggtttagggttttaggtttatggtttagggttaagggtttatggtttagtgtttgcgatttagggtttagagtttagagtttagggtttagggtttaggatttatggtttacggtttagggtttagggcttagggcttagggtttataagtaaccaaagcttatagagcccatgatctccttcatagaagaagacgttgctcgggttagtttctcgcataatgacccctagtcatcactgcataaatcaagaacatgactgtagcaagatgcatggtggacaatggagcctcctccaacattctttttaagttaacatatgaaaatatggggctccaactcaccgacctagcaccctacaatcaaatgatgtatgccaggccattgcacctgttaggtatatcaaactacccctcacagtcagagaaaattcaaccaccagaaccctgatggtgtagttcgttgtaattgatgttccatcagccttcaactgttgggattttatgtcctaaataaaactcatttcaataaaatcttatttgttattaataaaaattagaaatcatttatgtttgcatgtatttttaaagtttaaggtttaatatacaagttctgttaaatccagaacatatagttattcacaattaaagtgatgtcaacacattggaaggtaattatgattatatgcttcaaaagactatgtcccatgatttttcgctgatgtgatagtcatcgataaagtttacttacaccnnnnnnaagtgttatgttctttccaggacat

SEQ ID NO: 126880 - DNA, 1264 bp, Cannabis sativa
ttggaagtgcaaagattgtcccattttttccaatgaatcttatggctctagccaagggacccccaccagaatttagacattaatctgttgtagtgtttgcaaagagagacagggaggcgaaagcaggacatagcataagagggaatagcttgaataactgcttttaaaagaatttctttgtccgctctagagaaaagattttgattccaaactgacagcttagagctagctttttgaagaaggaacaggaaggaggaattttttgacctagagaaacattgagggacaccgaggtatttatcaatgaaaggcttatcgtccaaattgagggtagttctgaaattgtgacagtcaggggaagtggtattaggagagaaaaggatagaggatttgtggaaattgaccgattggccagtagcgtggtgatatagggtaagaatatccttaatttcagtggacgaagagggagaaaccttggtgaaaagaagactgtcgtcagcaaaaagaaggtgagaaatggacggagcagaacgagaaatggaaatgccatggaaagagttggaatgcatcttagcattgataatcccagaaagaccttcagcgacgaggagaaaaagataaggggagagagggtcaccctgacggatactgcgagtgggaagaattttgtgagaggggcaattattaatgcggagacgaaaagagacagaggaaagacagttaagaatgagggaaataaagggataggggaaaccaaaatgctgaaggatgtgctcaatataagcccattcaactttgtcaaaggccttttccatatccagcttcaaagctgcccatccgactttccaatgcttacggttattgatcgcatgaataacttcgttcgcaataataatgttgtcaaaaatgatgcgatcagagagaaaagcgccctggttatgggaaataagatccgggagagaagatttgaggtggtttgcaatagttttagagacgaccttgtagagagtggaacagagactgataggacgaaaatccttaacccgagaagcatttttaactttgggaatgagaacaaaaatagtttcattgaccgggctaagatcagcattggtggtgagagcgtataaagccgcgcggcagagatctctaccagcagagtcccaatttttttgaaagaaactaggattaaatccatcgggaccaggggctttatcaccagcaagctggaaaagagcaactttgacttcatcaaaagtgaaag

SEQ ID NO: 126881 - DNA, 659 bp, Cannabis sativa
tattatgtattttaatattttatattagagtaagttagccgaccctatcgaccacttttctgatcttatgacctttcggcctgagatttgaaccaaagtaattaattaaggtggaggttggtcgtattgaatgaaaatataaaaatagaaatgaagataaaaaaaaaaattaaaattagaaatgaaatagaataaaatttaaaatttatgaaaaaaatcattaattttaatttttttatgttatattagaatagtcttaactttcatttcaaaatggaataatcatttcactaaaatagtagaaatgtcattccattataatgacattctaatactttaatatgcagctaaataatagaatagaatgaagattgtttcctttccattctatttcattttattatctctaactaaacgctatctaatttcaattattcgcgcctttgataattaattaatatataatatagtaagagtttttagcagctaaatatatactttcaattatcattttactttcaattaaccctccaagcttaacttttggtggtaaaccatccaaactattgaactattaataaatttaaagtgtcatctgattaattgtcaccatagactgtttatgtgtacactcgtgtacacatgacatgtttatattg

SEQ ID NO: 126882 - DNA, 974 bp, Cannabis sativa
  modified_base (587)..(588): a, c, t, g, unknown or other
tttatgttaattttaatacttattttaattttatttttataattttttttttaaattaagtatatatttattttaattgttttattataatatttgaaatataatttatttttatttgataggtatatttttgaagaatatgaattgaaaaaaaaaattataaaaatctaatataattaaatatatattatataaataaaaattattaaaacgaggtgcatttaaaaatttttagggtacaaataaaattctttttgtattattgatttggggaaaggattgagttgattctcaaaggatattgaggcaactttcttaagagcttaacttcctttggaagaggagtgtggaagctattcttctcgggcattagcttaccatttattactagttagtttctaagattatttgttgtcaggaccgatcctgagcataagtgggttacgcccgcgcttagggcctactcattttaggggctcgaataaaaaaattacctatttaaaaaatataaatattttttagtaacttttaaaaataccatttctctttatattaaggcctcgatttttttttttttttttgcctanncccatttcaactcaaggtcggccctgtctgctgcttcactgttttaacttaaatatcttgggctcttctgtgtgagagttctcgagtgtgtgggtaatggctgacaccacactaaatgacttgtttgaagctcaattgggtcttaacatctcatggccgaccagcatgcatcctgcaggtgaatggccgaccagtttttggtcttacaagattttggtgcacagcttcacacgtgaatagcaagcttgactgcgaattgggctttaacaacccacgaaagcagagagaaaatatctattttcaaggggcattttagtcatttatattttactaatggggagttatatttgcaccccttaaatttataaatacaccccattattaaa

SEQ ID NO: 126883 - DNA, 808 bp, Cannabis sativa
  modified_base (731)..(763): a, c, t, g, unknown or other
tggcgtacaggacgaacagggcagataagtacttgatgcccttggttgtgaaatgggtcagacagaggcggaactaatccgcacccctcttgaagtacgagtgcaaaggtagcatcgccccttgctgagtgtgggcacccgaccaggcacagtaccctttctttgggttagtcgctcggtgattcgaagaagggagataacactctagttcgcctagatacctagccttattcaactccctcatttggccttcagttatgttggacggaggacatacacatcttgcccctaaggcaattttcctcctgtgggggaccgcctcggtaaactcctcggtgacatagtctgccccttcaaccaagacgtcaccttgctcgaatactggctccctggcctcattatatcctccaaagtgtggaagcccgaccactccttcctcctcagcttcagaagggctatcatgatggacatcatccttctcctctatctcttggacctcaatgtccccctcataatcctcctcctccacagcgggcaggtcctgctcgacacttggcagcgtggcgtgttgggccacatgagggttggatgcattaactttcttcagcgtttgctttgtgcgggccatcatctttctcttggacgaatattggtttgtatgccgcacaatagtaacaacagggaaaactattggaatgcaaaagttaccaatgttgggttttatgccctannnnnnnnnnnnnnnnnnnnnnnnnnnnnnnnntattaatatagatcagaaataataatgttgcatggttcacatgat

SEQ ID NO: 126884 - DNA, 987 bp, Cannabis sativa
  modified_base (939)..(940): a, c, t, g, unknown or other
agagagagagagagggagggaggggttggttgggagcttcagagacaagaaatgggttttctattttaatttttttagaaatgaaaatatatttcatttttactacattctggtcaaaagaccactttgccctcaaggcttaaaaatcaatacaattagcatacaagggcataaaagtcattccaaccacacacattatttcaattaaactcatatacataatttaaattattgcctttatcacataattcataaattttggactctgaacccggttcgagccaaaatacctaatcgtgaccatattaggcaaacttttcaaaaatcacatgcaataagataaaaaagaacatattatataataatatagtccattagcacaatatataataaaattctaattttgcccttctcataccataatcatgaaaatgcccctaactcacaaatggggtcttaaattcatatattccaaataatttcacataattaattatataataatataattactcatttatacttaattaatttaattatggttgctaatctatttactaatcttaagctattacaattcccatccttatagaaattttatcccaaaatttacttgaaaaactcaggatatttctacctcttatcagattctaaatcataggtttcctcttcagccttgctatttctccataacacttttactaacacaagtgtcttgttcctcaaaactttctctcttctttcgagtatctctactggttgttcatcatacagaaaagatctagctaaagatccaaagcatataactcaaaatatgagatgagtttgacacatacttccaaagcattgagatatgtaacacattatgtacagatgctagcgctggggacatagccaacctgtatgccacttgcccttgttgggaatattttaccaggnnctagatttactaacaagtatgtctcattcacatcctaaatatgaatt

SEQ ID NO: 126885 - DNA, 1117 bp, Cannabis sativa
tctttaatccctaggggcttgtcaaaagataaataaaaatattacaagtataaaagcaccgtggttagggcaaaactgattgtctccgcgactcttctcttctagaaattcaaagaattccaactgctcatggccccacatattgttactagaacggatgaaggctgaaagcctccacaactctcaaaccgtgaaggcttgtgggataaatgttatccgtgtttttgagaacatgacacgcataaagttcaacatttcaaaagatctagtctaagagcgaagttggactgaaatctatattcaacccttactctattttgtgtaaagccggacagatagatctggaaggttgatacttaaccaaattctcaagtatctgaggaagtatagacgaataccctcaggggtatcctagaagagtagtcgaagggggagttgtggagcgttgactgttcaggaccaatccgacatggcacgcttctgacaccaaatcccaaagaatcagaggtttgtcccctgtgtcaggccttgaaaggtgcacaacaaaaacacaaactaccttttatccaacgtcaactactctggcttaactatgcacggtcgacgttgcatgcccacctgtcaccatcaaatggtacggtctcatacggatgaaggttacccctcgaatttgacctcacttactcggcccaaagtcaatattataatgtattttacccccatcaatggacttacttttacatgcaaaccctaacgattcggatttactcgaaaacccaactttggcctataaatattgccctaacccttcatgcaaaagtttacgatttttggctacaaaccctagttaaaaagtttggcaagaactcttttgtgtaaaatactctatagccaaatagtttaaatatattgactcgtggattaaggttctttaacactctaaccacttaaaaatatgtcttctttatttctaattacattttctctagctcaatctatttttaattcatttttcgaaaaacttgataaagagagaaaaattaagttaagtatgtaacatacagagaagtgagggaaagaatgatagagctaaggtaaacaataaaataggtatacg

SEQ ID NO: 126886 - DNA, 1502 bp, Cannabis sativa
  modified_base (48)..(54): a, c, t, g, unknown or other
  modified_base (1420)..(1422): a, c, t, g, unknown or other
aagttcttatttaggatgttaataaacatacctgtgagtagatctaannnnnnngtaaaataatttccaacatgttgatcgagaaagctcctataaatatttctatttttcatgtatagggggagaacaattttttttttaccacagaacctctgctaaaaattcctacgagcttcttcttcttcaagaggaacgaaaggggtagagggtttaggttcatactgtaaacacttgtaatatttaacatctgactataaggctaatataacagactcatgggctatggattattaatgctcgaaccatgtaaaaaattatgtgtctattatttattattttatatctttcttaaactctaattaatcggttttttaaaaatctcagtaaatattttggtgctttctttgagagttgaggaaagatctaaacttatagtgttgttattaccacgagcctaaaaattaagaaaaagaggagctttcctaaaaaatggagaaaggtcatggcttgactacattccaggtctagagatccaaccagaagaggctatgtcgaagactcgttagttgaaggtgttattgagagtaacagagatagcccttctaatgtcgacacctctgcccgtgtgaaggtaaaaggaaggtgaacatgggcaatcttagagtcctcgctgctcccatagctctttagaaaaacatgaatctaatcggtcagccctctaagaacgtagaaggccaccggtgcttctgagcttgggtgcccttctagtcatagaggcataaccacattgaaagggaaaagtatagaaataccagagcccaaggcccaagaagacttccctattgattctgtcaaccaagacagtgggactagggaacattattccgacgacaagcagcggatggtggaccttagaaagtatcgcaatgttaagcatgacaatgctcgaaaggcgaggcaattagggaatggccaccacgcccattcaaccgacaagtttcagggaatgaatctcgtagtttgtgacacagagaggtttgaaaaatggagtgatgtcttcaccaacattgacgaggaagagctagagctttgcttcaaaaggtcacatgagttgttctcctagggaatttcagcaattagctactggttgtgggatgagcaacacatgacaagagcaaaaaccttatccgagtttgtgttaaaggcccaagaaatttttcaaattgaaagatgcatgccaacaacctgtcgaagctccttcggcaccaatgctggccctattcttgctcccaagtttgcctcatcagctcttgttcctagaaccccatgcattcgaactatttgtgaacattttgtgttaaaatctatacctacatggaaccctttctgtgggtactgtaaggaccgcttagtttaattnnnaaattagcagttaattatgatttattatggaaattatttatagatatttaaataattgttgatactgttattattgaatt

SEQ ID NO: 126887 - DNA, 960 bp, Cannabis sativa
  modified_base (895)..(902): a, c, t, g, unknown or other
taataataataatgtaccatccaaacatgaaatcaaggcctctttgtgcagcatttaggttgtgttttgagtttgaatatggcacaaaccaatgggataccaatgttattccaatcgtgcccttttgagattcctgtatttaattattagaatattattcattaattatagtaaaatattaaaaggcattagtgtacttatcactctttaatatgtaatattattattagtataattaaatatcaaatctcatataaaaaaaagtatgtatacagtaagatggcataattaattaatatattgtttggcctaacacattactattagctagctaatcaaattcatgtattataggtcatgaaatatgtgatgcatagcataacaatttacaaatattgcttttgcttttggattaattttgtttttcctttgattaatttcgttataattaatccaataatcacataattcatcactataggccatatattaaggtgcatatagtgtagttgtgcattaatcgtgtgttgttcactactaaattaattagaattaatacttaattaaataattatataattacttgatatttgtctttgtagagtttgacggcagcagcatgagaaagaatttgatagtgagaaaccaaatagggctcagttccagaatctccaccagtgcagttgagtttttgccaagaagagcatcgaccaggggcaaacgttccactcgaatatccgcccatactgtaagtccatggctcattcagtgttatccagtgcttcactctgtctccaaattctttaaagcaaacctccgcatactctttaaaatgttccctaaatgtttgtatacaagtagcagtgtcaaggtacactataagaaatgtcacttnnnnnnnnacatttttgtgctggcaaaagttagtattacgctggtaaaatagaatttacctatgat

SEQ ID NO: 126888 - DNA, 863 bp, Cannabis sativa
ccccaccaccaaccaaagactacaacaagcagaaacaatccgggaaagaaggagagaaaagaaaagtcaaccaaatttccgaaagacaaacacacattggctgtcaaactactttttttcccgataaacaaaagaaaaatgaagaacgggcgaagaagaagatgaaaatgtatgtactaccttcacgggagagcagaaaatggacgccggagaaagagcattagccgaagccattcaaagcgatgaagaacgaagtggttatcgaggtgagtgaagagtgaggagtttgcttatctgagtttttctttggagaaaatgcggataaggaaagctagtatttgttagggttaagttttatgtttggtgaaaggaaattccagaacgttcttttttatatatttatttctctagaatgaaccggtaagtccggcctagaggccttaaccttacctgggccctattgtagtacttgcggccctcgtagaaattaaaattgtgaaaatgtctatttttttttaataataccaaaaatataaaatacgaaaaaaaatatataaaaatatagaagaacgtaatcataaacacaatagataaactttgtgggaactttttattgggagcaaaaggaaacactagtgagatgtaccttgcttcatggacctggagtggtgtgtagatcgagaaaatatgagcggtaggagaggatctgtctaagcatatgatagcttggccttgggtcgcattatgctttttatattagatttttctttatcatccattttatatatgtatgtatacatcgttagaattaatatcttggactaatataattataagcttaataccataaacacaatcattaa

SEQ ID NO: 126889 - DNA, 802 bp, Cannabis sativa
aatagaaattaggtttctagagagattaggcacatacctcactgctgttagggttcttattatcccattatacattttgaatctgattgatcctaaccctttaatctcataagtattgttccctaggaccacattttgaatctgattgatcctaaccctttactccaaaaaagttgaaggaaatagatgttagatggtttgagcaattgtaattttttagttagatgtatagaatgacttaaggtctttttaaggtgctgatagattgtatatgatatgttagttgaatgtactaaactgaagctgatttattaaaaaaaatcattttattctttccatataaaatcatgatctgagtacaaatatatacttgaataatacaccatcgtgcttcaaaaacaaaaaacaatcagacaataatgaaaaataattctgaaaagaaaagttgaaatttgttcaaaaaacctataactttgttggaacagaatcaaatcaggactaattttccttaaataaataaagaaacgaaattctcatttactttgcatgacatacacggtttttagacaataaattagaccaaaaatttcaaactaaataaataaaattttcctgaatataaatatcaagatattatattcttatagaaaaatcaatttatttattaacataaataggatattctgatttaaaaactttttcacaccaaaataaggtcttaactttatttcaaaaataacacacataattaattttatcatctttatcaaatatgccaactaaagactttacaataatatta

SEQ ID NO: 126890 - DNA, 570 bp, Cannabis sativa
aattgagaaaaataaaaattaaaaaaaaaaagtttttaaaaaaccaaacataaataaaaatgtaaataagatgctaaatttgacatttagtgtaaaaattctttgtttttaattgggtagaatcaccattttttatgtcagcaaattgactttataaagttgttagaaacttgttatagcaagttactcattttaccacgtcatcaatatgataatattttatgggttaaaaagtaatccatatccaatggtatttaacatctaaaaaaacttcaaataaaaagcatctcaagccaaaatatcacaagtaccgtctcgtcgcgtcgatggtgtgggctacatttacaactaatccatatttaaatagtttaaaattgttaatgttgacggtgcacttttttcaaatgagaggagttatggtattggcttggtggctcgggatggtaatggtatgtttatccaagcaaaaacattgaagaaggctggtgatttacaacctcatgaagttgaagccattggaataaaagaggctttgagttggattaaagataacgaatggtctagtgtgat

SEQ ID NO: 126891 - DNA, 925 bp, Cannabis sativa
aactagatagccaataggctatgtatacacacaagtaacagcaaaggcacataactaacataactgtcaaaacagttatgtcagttggtgtccaaggaacaaggaaagggtaaattgggtaggcacaccaaaattaacaagtaatatatagagttccactgaataccaatagatatatgtttggcatagtactgattgacactatcacatcggtacaactagagtaccgagtataggataatattctggtcaatattctcgtagtgatgttatttgctgatattcttgtaatttagtttgagtctttctttcattgatttattcgtacattacaatggggtttgatatcttgtgattctatctttgcttttcaatattattttcttggttgttttgaattttatttgtagtttacatatctagttgatttgcatattttatttgatatcatcttgtttttccattattttctcgaactaatttttctaatgagaaaattagatttttataatcttaaattttaaaattttataaaactgttaataaaaatttaaatcataaaactccaaataaaagataagtaagtaaatatttacgaaaaaattctaaaaattaatgtttctcaatatatatggtcaacaaatgctgtatttttgtattttatgctacatatgccgtataaaacaaaatttcaaagattaattcgttaaaaaaatatttgtttttttgtattcattaatcataaacacctttacgttatattttataaaaatatacctacttttttgtatgagttgcctaatataatggcactctttatttaaagggaaacttaaaaaaatactggaatttaggttaacttttacaaaaatacggtcacacgaaaaagttttcaaaaatgctatgtttttataaaataccagaa

SEQ ID NO: 126892 - DNA, 1187 bp, Cannabis sativa
  modified_base (1143)..(1162): a, c, t, g, unknown or other
ttgattttctaagcatagaaaatcaaatttccctaataataattagggatttttacataaacattttattttaatgatgtgtgccctcctattaagtatagaaaagattaagtttttcttttatttaaccttaataagaaattcctttttatttttatttaaaaaattttgattttttgtgatttcagttcaagacggtgatataagtttgtgactcataaataacacaaaattagttaatttaaatttaatataagtacatacatgttagtagatataattaaatttcgagtaagaatttaataaattgacccatttaataggattaagcaaaatttataagcaaataattaatctaaagttatttcatttataagcctatttacatcatttagtacacttatttataaatattattttggactattgttttacaaaaaagtattaattggatattctattttattaaatgataatttagatcttgtacttttttaactaaaaaaaagtatatcctaagctaactttgcgtcaaaaataaaactttaaaataacctgacctaatgggtgttatgaccaaactagaatcacattatttgtatttatttgtgttagaaattggctttgaactagttatattaaaaataaaagacgaaaattgagtttaatgtattattttgtattattttagaaaatacaatgttcaatctatcatttaataatatatagagtgtgattgataatttttacaaaatacgaggtctaaaatgatatttattgtttgatgactctaatatttttgggtggtttgattatttattttaaaaatttaattattatgcatattaatttgagctcattacatagattaacatgtttaaccaatttttatcaattttatttacatgggttaaaattaaatgagagtaataaagaaattcaaaatatgagcatatgtgtaattaaggttaatacaattttaattaatataatctatgtatatatataatttgaaactcaaacccaagacttttaatacacacgcatctttctatggcatgatcacttgagctagcctgtctatgtatctttatatattaaaagtgcctatctaacgctatttcttggtttaacagaatatannnnnnnnnnnnnnnnnnnnctgttaaatttaacgattaggtttg

SEQ ID NO: 126893 - DNA, 648 bp, Cannabis sativa
taattttttaatcacattttttttaaaataaatcaacccctttgaatgaaaataaataaataaataaataaaatcgagggtgtatattggttggattgatattttgacaaaaaataattgataattttactatttgaattttctgacaatcgataatactgattctctcttaaaatataagcttgttaaaaatcccttaaacttttacatttataaaaactagtaaacaggccgcgcttcgcgtgcggcaatcaaattattatataaataggtattaaataattttaaattatgtatattttattaaaaaaaaataaaaatttatatagaaaactttatagaattctaaaaaagaaaaaatatcatacagtttcttatataaataaaaaagcacataattttttttaaatgtatattatagtgaaaaaaattagaaagtgaacaataaatctatagaaaactcatcatataattttaaaacaactattatcaccgtatctcatttttaggtaccattgcatttaaagtttcttacataaataaaaaaaagcacataatattttttaaatgtatattataggaaaaaaaaaattagaaactgaacaataaatctatagaaaactcatcatataattttaaaacaactat

SEQ ID NO: 126894 - DNA, 738 bp, Cannabis sativa
agtaaacatcataataaaatattgtttccgattattttctattttaaaccgatacatttctcccattgattattctgattccaattacagtttagtgatttataccaaatatggtaatgcattctcttttgcgaaaatatcatattttttatcttcttcatgatgatcaatgccaacaatagcatttagaattttacactaaaaataataaaagtgatgttgtgaacaaaggcaagaaccttggctaagaacaaacacaagaacctctcaatagtattaatgtgtatatatatttatatatatggtgaggagtatatgaatgaaatagtaatcccacaaatacaagaatgttagcaaattgaaagaaaaaaaatattaatcacacaaaattatgcaatgttgatggataaaaaaatattaaaagaaccttataactaaggaaagcttcctccttcgattttctagagaattcaatttcatatacaaattccaagtgaaagcaaataaaaaattgctagaacaaaactatgagtatttacaaactcctcatctgtgtatatatataacccatttgccattacacataccgaaacacaaatcaaaatattactacacactccaacaaatatatgtacatatataggcatttgaaagtagaatcataactgaaatgccataaaaaaaccaaaagttgtaactgattttttgttgtcattattaatgttataaaaactaaaa

SEQ ID NO: 126895 - DNA, 880 bp, Cannabis sativa
  modified_base (819)..(838): a, c, t, g, unknown or other
tatatatatatatattaattagcttattattatcattatcattatcattctgtcttgactgaataagaaggttcttaagaaattaatttgaaataataatagagatggcattgtattaattaaaagaaatatataatagaaatgaattacttttgctgcctcttgttcatgaaggtgaatataccagatgggcttgaaaattcagaaataaatgagaagctttctccaatgacaggccaccccaatctaccaggaatgccttccatatcttttggtgttgcccaaaacaaaatttggaacacaaacaaaattgaaaccaaaactgtggatattacacccataatcatcaacatgctcacctccatttttggacacttaatttgatcaagtcatgtattttcttttataaataaatatatatatatgtgtgtgttttcttaataattaattaattattttaggtgttcttcttgtatatatagtaaacaacgttaattattagaattgtcaaacgggttatttgctttcttgttttttttcttggttcttgtgtgtcccattgatgtatacaaagatggaaaaatacatagagctaatatagttttatatatatatatatgtatttttgtttaattatttaattatatattggcttttgatttttgttgttgatattaatcatgatacgaaattataaacaatattgccggctcttcaccttgtttatttctgatttgatgataataataatttggagaagaattgtatagagtggttgctctgtatactacaaaattttttacttttagtcacaataannnnnnnnnnnnnnnnnnnnaaagttgtgactaattataaaacaacattcttatgttgtgac

SEQ ID NO: 126896 - DNA, 845 bp, Cannabis sativa
ttcaagagtaaggtcttcaaaaagctccatcatctccacttccatattactatcccgttgcataatgttacttatgcccgagtcgatagtgtcaacttccacagtcgtttccctagtgcaaacttccttcatgatgaccataatagattagggttctaagaaatagaggcagaaggagcacgaacaccttgcaatactcaccgagtaggcaaagaagtctaccgcgagactagactcaacaaggagccattttttgtgctcttgtttaactctagcattttaacggaaaaagttgcttctccaaatattgttcaattgaagctaaaatgataatctcaattcggcaatattgtgcaatatcaaacaaaatgagaaaagaaagatataaacacagaaaagtgatgcgtgtagtatgtcaattggctgattttttatttatattaaaaataaaatagtgtatgagaaattcatggatcattttttatttatatataataaaataaatcttattaaattaaaaaaaaataagattctagattttttttaattacgctatttctaaccctatttaattatttatatctcttctataaatcctatttgattaaaggtaagattataagattaattcaaattattgttcatatattgattaatctcattaataaaaaataatttaatatatgaaccctatttgattaatcctattattaagtcttttccctttaattttccttttgttgatcatgataatttattcatattaaggtagtgttctactaggggatctaacgagtttcgccccttcgctaatggcctctaagagttcaaattccagtattgta

SEQ ID NO: 126897 - DNA, 883 bp, Cannabis sativa
attgatgttgaataaaatagattacattgaaattgagttttatttaggacataaaacccaacattaactagtgggaccctccctgatgacaaaaagaaagcaagaaaattgttatacaaggtcttaaggttcaccctattagatggaagggctatatagaagagactattccatgcctttattgaaatgcctgacaatggaagagtcaaaaatcatcctcaaagaaatacatgaagggttttgtggggaccacgctgggggataaagccttgccaagaaggtgatttgctaaggatattattggcccactataaaccaagactcctccaacaatgtacagaaatatgacaagtgccaaagctttttgaaattccacggactccacccattgaattgacatcaatgacttcaccatggccctttactatttgggggatagatttaattggatctcttccacaaggaaaaggagaggtaaaatatgcagtggccgcggcaaactatttcaccaagtggactaaagttgaacccttagccacaattatagaaaaaaagaccatggattttactatgaaaaaaattgtgtgttacttcagtataccccaaaaattagtgtcaaataatggcacacagttcaaaagtaatctcatttctgatttttgcgagaaaaatggaatcatacagagctttgcattggtcgctcgtcctcaagcaaatggacaagttaaggatgtgaacaaaactttgaaagacaccttgaaaaagagactcgaagcgggaaaagggtgttgggctttgtgccctaaataaaaatctatttcaatgtaatatcttttctattcaattatcaataaagaatcaaatttatttttcattacttatt

SEQ ID NO: 126898 - DNA, 1224 bp, Cannabis sativa
attattattaataaaaatgttatacgatactaatatatcaataagtaaaagaaaaaaattagaacaatattagagttagtaaactattcttctcatagttaattggttttgagaaggaacctcatgcatcataattacatcttagctactttcactttatctaatggtatcagagtcgcttgtgatgcgttgtgagcccaaagtgtcgttgttcaaaaacacaagccataaaagagtcatttgtaattcgttgtgaaaataacgtcggtcaaaaaaaaaaaaaaacgagccaaacttaaaaacttttgttgtacctttcgaccaatgtgtgccaattttcagcgtttgggtcttttacttatttcaaaataatccacaaatatcttgacgtgtacacctaaaaatttggtctttttaaaatcgttcgttatacccacactttccaggcacaaacgtgagaaagatgtattagagttagtctcacgttattaatatttaaaaataaaatactataaaataagctactcatctcattatctattgattaaatattttattaaagtttcctaaataattatatgtagttatatgtaagaagacttaaagctcaaaatcgagacacattatttttgtccaaagaggaatatgaattcagatttcaaaattggtgttgatgtatttttgtaatatttttcctaattttttcgcttaatgctactcttaaaaagaaatgctactgttaaatttaattcccttgtatattccaaataatctctcaaactttatgcaagtaaactctagtgcttcaacaacattcaaagcgatttaaaaggatgttgaagaacaaagatgaattcaactaatatttctatggttgaattgctattgttgacaattaaactaaaatatgacaaaacagattgcatccgtacagctctattagagactccattataaaaaattttaaaatttatcttaaaaaaaaaaattaatatcacatgaaattttttactttttttttttggaattttctcaaaaatactatttagtttttatactgtgtactgttttaaatttctttggttgttctattgttatttttaattaatctcttttgtattttactgttattttattttatagaaagattgtatttttaaaaaaaattctgtgtagaaatatttttataaaaattaacttaaattctagtacttttgtaagttt

SEQ ID NO: 126899 - DNA, 769 bp, Cannabis sativa
ttttggaaatggatctttattcattttttaaggtatataattaaatagagaatgttaagggacattttatggtgtgaagcatcataagatgtagcatattgttattggtctaaatcattatcggatttcatacaataggctaaatcagaatgattttggacaccatatatggtacctataataccaattaatgctcatataattaatcctttttaatcgcaaaactaagaattggtcaattatatgtaacgttacggcactctagcaaacaaaatatatataacgttacttgattttttacacaaacgcgatacgtacaaaccgtacgagcaatagcagcctacgccatactattgattgtatattcattaatcaaagtctaaaaccatatgtttgttaaaaaaagaagtctaaaaccacatgtgggtatgaccaaattatgtaaatatatatacgcactcaaatatgtacatgtcacatatgttagagatattattacaatggaagataaactaagatatatacaactcaattgtaaaaataatacaaggataataaaaaagattgattaaatatatattacacaatacacatatatacactacatatattggcatatacatatgaaaggtagaaagggaagattacaatacatgtaatataatatgaagaagaaaaagatcactcacttacaaccttgagtgtaaaatagtagggatcatcacgatttgaacaaggtattacacctttgtccaaaagcttatttccc

SEQ ID NO: 126900 - DNA, 1104 bp, Cannabis sativa
tagaaattgataatagggagataaccatattaggccataatcaatagaaataattgaagttgaagccctagtttttattaactgttaattttcttattagtttaattggttatacttgcattgttttaattttctaattttaatctcttcttaattttttattcaaccaaatagaagtagaattttaattttaacgtacttaactacaatccttgtgggatcgacctcactcttggtgagtttattacgtgtaacgatgcgtgcacttgcatgtgcaaaatatcacaacagatccacttccttgtcttccaccaattgtcatgcttttacacttaatctgttttaaatgtgcctgttatgaaaaaagaatttaataagtgtgtctaagctaacccatgacaataatgtgtatcttgaatttcataagaattgttgttttgtcaaggacaaactcactagagctattcttctcaaaggaccaggtaaagatgggctctatgtgcttggtgattccagtcaaccctcacatacccttcaatgtaatctcaccacaatgtctcagttcaccaatgtccctactgtttatagttgttataactgttgtaataacctcactgttaattcagtgaactcttgtactatgtccaatattaataaagaaactacttttgtctattcttcacagtgttctccatctgtttctttaactacttttaatcaagacattaatatttggcataaaaaattggggcatccttcctctgctactttaagcagaattttaaaaaccataccacatttaggcactttaaaagatttgcaattttgtgttgcctgttaaaaaggtaaaagtcacaaacaaccttattccctgtccaccagccatgcttcacaatccctcaagttaattcacattgatttatgtggtccctttcatgtctcatctaaagaaggctatcgatattatattcactttatagatgatcacaccaggtatactgggatatatcccttaacacttaaatctcaagcctttgatgtcattctaaagttcaaaagcatggttgaaaaacagtttaatttgcctattaaaagtgttcagtc

SEQ ID NO: 126901 - DNA, 1219 bp, Cannabis sativa
tggtgatggaggagggtgtggctatggtgaagttgggcggcagcagaggagcttccggctactaggttggaaatggagaagatgggatgtgaggaagaagttgcgggggtatctgatagggatttaatatattttccttttatttatttatgtaaacataatataatattttttttaaaaaaagtagaaattaatgtaatatttgatatatatatatataagtaaaaatattgtaatatgtggatacttcatctcgtacagtaagccaaattacgcctgctgtggtaaattttccacaaaaattcagccaaaatcttactgagtgctcttttaacatgtacctcttatgctaaaattttgctaaaaatgctgtagcaggcaaaggttctccaaatgaacaaaaaattccttagtgctaaaaaaaatatgctgcagcaaaattcaatcaaaaatctagcaaaacctttagactcttaaatcacctccaaaactccaaattgtgctccaaaaatacctgaaacatcaaaccaagtgtaaaatccacccaaacacttaaaataaaaatgaacatacaataaaataaaataaaaataaaaattaaaatctaatctaattatacaataaatttttaatttaatttttttctattttttttctttttgtttacaaaaatatttacaatacttattcttcttccaacattgggttgcctcaaaaacgaattaacaatccaagcacaaggcaacccaaccaccttttgctttatgcatcttccaaagtgatcgaggtctttcctcgatcgacctcaccacccaaataatgcttgagacgctgcccattaactttaaattcctttcggattgctcattacaaacatccatagttcggtggggataaactttggttatggtgaatgggactggccaatgggactttaatttaccatgaaacaacttcaaccgcgagttaaagagtaaaacttgctgccccttcccaaacactcaaggttgaattcttttgtcatgccacttcctggtatttttctttatagagcttagaattttcatacgaaaacaacctcatttcctcaagctcatttaattgttacttttgagcttcccttgctgcttggagatccatattcaacttcttcgtagcccaataagctttgtgttccaattcaacgggcaaatgacaagccttaccataaactaaacgg

SEQ ID NO: 126902 - DNA, 506 bp, Cannabis sativa
tttttattatttttaaatattttttttgtttattgatatacttttatttaattttaaaataaattttgaaataataatattagatatattaacataaacgtgtgtataaaaatatacatataagtagtttatagtaacagttaactggatgacaacttaaatttcttaattagttcagtaatttaaaaaaatttaccacttaaatttgagtatgaaagattaaatatcattgaaataatgactgtaagtatttagtcgacaaaaatgtaaatataatatacaaatgcaattaaaagtacataatatttagaatgaactgactcctattttatcctacataattactttttttttttaattttaaattgtgtacattagatttttcaacaatgagggaggcacatggagactatggggcctagcctagccctcccttaaatttttgtttttatatattttcatgtataataattatatattattaacaattagcccccccccccccc

SEQ ID NO: 126903 - DNA, 859 bp, Cannabis sativa
  modified_base (32)..(61): a, c, t, g, unknown or other
tttagaaagttcttatttaggatgttaataannnnnnnnnnnnnnnnnnnnnnnnnnnnnntaaaataatttccaacaactactcaaatatttatttaaaaaattattgcatatttataacaatacgtacttagggtaatcaccctaagtcatgatttcacaataacaattaaatatcatattgcgccaccgcactatattctatgtacttagttcgttgtcttactagatttctaatatgtggagaaatcttaatgcaccggtaattctgaccaagtgccgataattctagtcacaattctcgagtctacaaactagggtttatcctaaaattatatgtcataatatatacatttaagactccaatactagaccaaatagtagagctcgaaatgagctttccaacgatattaagaacgtccaaatcggagttcggagtcaatagttatgaccaaaataagttcctggaaatcataaatgctctctacaagatttggtcgcagctactgggtttgaaaaatccagaaatctaattttaaagctccgaaaaggcacaaactcaacccaaacttcacctaaatcatcaacaacaaaattcatgacaaattaagatgttttttaggtatttgcacttcacatggacatgcttgaatgacaaaaataaccaacaaagttcaattaacaccaaagcatgctttaagaactcaagaacacaaaaactaaaattctcatgctcaactcctcaaacaaacacaactactaaatctaataaaaccttcatgttccatacaaaactaagcttaaacaatcaactgttgggttttatgctctaaataaaactctttacaatctgattagt

SEQ ID NO: 126904 - DNA, 1410 bp, Cannabis sativa
agccgaaacacaaaaagagtgaaaactaactgaaaatatgacccgaaacttagactaattttagcctaacactataaagacaaccttttggcattgtaaaataagatagaaaaattacattttatcattctttgattctcttttattattattttaatttacttattttagtaacaaaaataaattaattagaatgatagtattggtgagattaaaatttagctattatacattttattcccaatatttttaataattcttttgtgcctccacaactcatttattaaattaatttctaaatttaatagtatcttctaaatcaaacactttggaaagtacacattcacacattatgtatatgaaaagaaattattacatgttgttaagcatgcacttttctaccaaataaataaaagaacaaaaagaagtaggcaatgccatttttttcttttttccttttttcttcttttgagggcacaaaagttccaatgccatttgaatacaaaggaaaaatgttcttttagtttcatgcgcgaccatctctatttctccctctctgcgtttatttttttcttcctttttttggggctagttatgtgctgttccaatgacaactgcacagattagttccttattatttcagcaaaaacaaacaagcaaacaaaaaagtaaatcatagttcaaagaaggcttaggcaaattgtttttggtaaacatctatttctacattattttctgggcacacatcaacaatttcagagatcaatgtttggactttatgctgtggacataatgcaatctattgcctccttgcagataccagtcattgtggcttctggtccataaacctgaaaagaccaagaagaaaaacacaatgaaaaaaaggacaaaatgaagagcgcctaagggaacttcaatcttcagaagagcaggaaatttgacaatggaatgcagtttctagttttcgattaatataaaatatttaaactctacaaatttgaggattatggttgagtttgaagctaatgtcttagttagccatgtgcttctgcatgtgtatgtattgtcatttcatacctcaaggggtactccaagttcttcacccaaagctcgcatctttgccaaaccggtctgataattaggaccgcctcttcgtacatagatgtgcattcttgctgccttcagcttggattcctaaaagtaaatgaaaatgaggaacacacatgcattaagggaaagacaggaaagaggccgggaaatgtagaaaacagacaaaaatattaaatatgtagtaagtggctgataggaatttcctatcatctcggtacaacagtagcaaaagaagagaaaatagagctgatatattgatattagaatgaaaagataacaagttgctgggtattcgagaga

SEQ ID NO: 126905 - DNA, 612 bp, Cannabis sativa
ctccactgttggagcttatggagccataccagcagctcctctcatgccattcagctccttttttgggttaggagtagagcaattcacctccttagttggagccaatcaactcccttgcttttttgtggactaaagaggtcctttgacttgaggggtttgagcacacagatatttttttatatgtaagaacccaataaagaattattaattctaatttttcatagtggaactttgataaactaaaaaataaattacttttcttgataaaattcatttagcttagttaattacacttagatttattctaattcaatttaacaaaattagatttttctaatttgatttaatcaaatttagtttgcacccaacttttgtaattgaatttgttttatctaatttttttattaactagcttgaataatttatctaatgaatttagcttattaacttatttttgggttacctcattctacacatgttggtagatgcatgctcatgatcactggagatgtgacaactattggaaatattttaccaggatctagatttactaccaattatatttcattaacatcctaatatgaataacaaaacaatgaaataaacacatat

SEQ ID NO: 126906 - DNA, 726 bp, Cannabis sativa
  modified_base (28)..(28): a, c, t, g, unknown or other
tttttccataacaattcttcttttcttnttatttttaatttttaattgtaatcaaaattagttacccaactcaggaattgtcccatactgttccatatttcattcaatagttggaacaaattttatgtcataatcatcttttactgttctgcagggaacacttgaagatggaagaacagtagccataaagcaattgtcagtgtcatcccatcaagggaaaagtcagtttatagatgagattgctacaatatctgctgtgcagcatcgtcatctagtgaaattgtatggttgctgccttgaaggagataaacgacttcttgtatacgagtacttggagaacaaaagtctcgatcgagcactatttggtatgagatttgtatccatctttcaaattaacagaagacaaataacaatttacgaaatgaatgatcaaatctgatatgcttattatggctgacacttgaggcagaccacagtttgaagctggattggtcaacacgtttcaacatttgcttaggagtagcgagaggtctaacttatcttcatgaggaatcacacattagaattgttcacagagatataaaggccagtaacattctgcttgactctaatctgatccccaaaatataactactatttcttagtccccatcaaattaaattcttgcataatatataaactatcataaaacgataatgcaactataaggcaactatttgcacttgc

SEQ ID NO: 126907 - DNA, 876 bp, Cannabis sativa
tttggagttttgaaaaaagtgtcatattttttgtagtgtaaaatgtattggtttaaaagaaaaattttaaaattttttaagtataaaaaatcaaatttcccttactacattattggaaaattatttagattgatcatgcagaagtcataaaatgctatgagaatagtatataataatttcacactaatttttttgttcaagactcatatatttgtctatagaaagtcaagtcaatgtaaatgtataataataatatataacttattagttatatgtgtaatttttttaaagctatttaattatgtgtattatataaaatatcatatatatatatattatattatgaatgaattattgtataatttaattgtagattcaatattattctaatgttgaaagtaaatattcacaaaaagattattcaaacatttgatagtgtgagtgtttcttttttcaaaaaagattataggttcacttaggtatatcagtgatgatattaactttcaatacaaaatatgtgatgacagcaataatgaaatcataaaatgaattttacatagatttatcaattgtctttttgatagatctctatttttcttaagagttctttaatatttattttttttcttctattataatgtttgtataaaagtgagtatttcattcattgtttgattaaattattttatgtataacaaaggtgttgagaatgatagtgatcactacaagtaagatataatgatgacattgactttgaatataatagtgactagaagtgagatgtggtgatgacgacggttttgaaatcataagataattttttttacataaatttattaatgggcaattttcatttatgtacaagtaaatatacaa

SEQ ID NO: 126908 - DNA, 754 bp, Cannabis sativa
ggtaaaataatttcctacactatcgtcttgagaatgaaacggtgttgcattgtttggtaacatgtgaggtgatcaagatggtgtggcacagggtagggatcgacattcgggtggaggaggggtctggttttttggactagtgcagggagatttttcgacaccagaacagtgagaagaaagccgaagttgcggccatttgctgggctatttgggtaccaggaatggagtagtttggaacaataaaactgtcaacatttcaaacattatctcgtctgctacagcttaccttaaccaatggagttgtgctcagaactcgttaatagagtcatgaacccacggtgcaatgcctagggatggagatgagcattgggcaacacctagtcctaatagtgttaaggtcaatgtagacgctgcaatgtttgtagatacacacaattttgggttcggcatggttgctagggactgttgtggggttcttattcaagggaaaactgtatgctgccaaggtcatgtggatcctcctattactgaagcaatgggggttagggaagccctcagctggataaaaacattcccatggcaacttgtcactttggaaactgatagtcttgtggtagttcaagctttacgcagctcaatggatatgatatctctttttggtttagtcattaaggattgtaagaatttgcttgctactatgtgtaatgtttctattttctttgttaaacggtcagcgaactcagttgctcatgct

SEQ ID NO: 126909 - DNA, 1028 bp, Cannabis sativa
aaaaaaaaaaaaaaagatagttcaatcagacaaaagtaaatgtaagtaataggcaaaaagaacttatatgataagtaaaatattttaatatgcactaaacataattattggataattatgaatattcaattaattaagaattaattgaaatacatgaatatatagttaattatgaattaatttatttttaattaagaaatcgaggaatcaaaagacacatatgctctctcgatatatatgtatgcgtgtaacacaatgttcaatattactgtgggtacacacatatagttttttttttaaaaaaaaaaaaaaaaaaaatttggttcaataatttacttattaaatagctagttaaataatggtttgttttaatatatgattaaaatattattattatttaataaataaaaaaattctctcatcaattaaaaagtttaattaattaattaatttatatatataaagagagaatgagatcaaaaatatatatacgatatattttttcaaatcctatctcatttgcatagtctccctaaaaaagaaaattaaggttccaaatttatcaaatctcatgttaagaatctggtaaatagaaatcttcattatgttgatctaatttgttctcttatttaatcactaaaaattaataagtattattggtgccttttagcatctttatttattaagaaatattttattagcattttgaaatgaataaaatacagggtataattaaaagaataaactccaactaataaaatttattgtcaaacttaagaacatgcaaagatgatctcagacatattctaatttcaaatacaaatacaaaaatttcagttgcctaaatttaataaaaatcattttgtaagctttacaccttgtagatttttaattaagctatataagagatataataatctaagagaaaaatgacattttatttccattccttcaattattgattgttttaaggtaataaggatgagtacctcttactccacaaattcaattgtattataaattaagaa

SEQ ID NO: 126910 - DNA, 1352 bp, Cannabis sativa
  modified_base (1286)..(1305): a, c, t, g, unknown or other
tctttctaaacccacttgcaccctatttcttgtctagcaggaggtaagggaacaagagtataggtttagtttctcataagggccaaaatttcatcatccataacacctttccactgaggcatttgaagtgcttgagcaactatagtgggaatagacgacacactgtaaaccttgggcttgtgaacaccagctttggctttggttgtcatttgatggttgttcagaattctggggatttgaggagcagaattgacctgctcttgtggggcaggttcacttgatgtggaaacagaggaatcattggaaactctaggaacattaagtggaattacatgctcaaaaccaggggtatagaaggtgtagatgactgacttctgggagaaggagagactgtaattgaaccaggtgacaaaggtgaagcatctgaggatgagataggttgaagtggggactcagtgatgttggaattatcactttggcaaggaatagattgtctaacagtgggaatttgaacaggaatgtgccaatcctaaggtgtaataggttcaggttcatgattagccttggagtatgggaattgatgctcatcaaagatgacatctcttgaaatatacatcctaccatttgaagcaaagcatttgtagcctttatgattgaggctataccctagaaaggtacatgactcagacctaaattgcattttgtgtttgttgtatggtctaatgttagggaagcattgacacccaaaggttttaaaccagatgtagtctggttgtttgtgaaatagtgtctccaagggagctttcttattgatgacaggtgtagggagtctattgtgaatgaacacatatgtcctaaatgcctcatcccaaaactttagaggcatagaggcttgagctaacaaggctaagcaattttcgactatatgcctatgccttctttcagctaggccattttgctcatgggtagtttggcaagggtgtctatgttggatcccaaactgttgaaaaaacttaagaaagaatctaaactccctaccccagtctgtttgaatcattttaatttgagttcataattccaactctgcttcagctttaaacatttgaaacacttttaatgtctcagatttatctttgagcgtgtagatccagatgaacctggaatagacttttataaaatggatgtagtatctataaccactgttagggagagtatgggaaggtccccatagatcagaaacaactaactgcaaaggagcagtataaacatgttgggttttatgcccnnnnnnnnnnnnnnnnnnnntaatcagatttacttattaataacgatcagaaataacattttatgtt

SEQ ID NO: 126911 - DNA, 1620 bp, Cannabis sativa
gactcgaacccgaacccaaacccagactcgaactcggacctggactcggacccgagactcatacctgaacccggaccagacccagactcggacctggacccagacccggacccgtagttggtgttgggggtcgagtgtattgaaaatatacacaatctattaatacaagtcaataccgaacatagtattgtattaaataatactaatacaatacaatgcaatataatccaacacaatacaataagagcccttaataactaataacaaaataattaagggctcgtttagtagatcgtgtaaggataaggattgtatcataataaataatgaataatattatgtttggataaaacattgaattgtgttaattaatatgaccagaaatttcaatacaattgtgaattgtattaattaatacataacaaattgcctgtattagcttgtattataatatttacaaagagtctagtgttgggaacctcgaccccgatcctgaacttggactggaccccaacctcggactcgaacctggatcagaatctcgaacccaaacccagacctagaccctcacttgaacccaaactctggacccggacggggtccagagtgagtttgaaaaatcatcatctgatccaatccaattagacctcaaaatccaatccaatccaatcaaattactaattggattgaatcggttttttaatattaacttaaaaacatgaagaaaaatacataaaaactaagtatcaccttttatttaagtttaatacttcataagcatattatcgttacaagtgtaatgtaatcaaaaattttaaataataaaaacaacaatatttttaagtaataaaatagaacaaaacatcattaaaataaatacacaaaacaaccaagtgttacaaatttaacacgcacaaaaaatcgaataaataaatattatattttttaatattatttattctataaatagttttttaacatatataaatgtaattggattggatcggtttttaattgaattttaagattgacatccaataactgatccaatccaattagaatctaacttttatcatccaatccaatccaattgtaattgaatatccaactatttgtaattggattgaattggatcagttcggtttaattagattggattgaatgatacccacccctaccaaacgagtcctaaatatctaatttaattatcaaaaaaaaaaaaaacaaatgaaaagtaaaaaacaagtaatttcataaatcagtcccttttcaaattcaaatcatttgagaaatttagatagttaaaactaaaaagttcaacaaattaaataccaacctatgcaacaaagtgacatttttgacaataaagattaaaatgcaacagtttattttaatatatactaaatactcatttgatttagttaatctcttttaggtatgtaaaaggctttttaataccagatcaagaaagcactctaacaaaagttagtcagttagaataatttacaaatgttggtatttaaaaataaaatacaaaaatgatacttttcaactaaatttaaattataaaaaggttaatttgtcaacaataaaaaaataaggaatttttacaccacatac

SEQ ID NO: 126912 - DNA, 1177 bp, Cannabis sativa
  modified_base (1119)..(1143): a, c, t, g, unknown or other
gaataagactcaactaataacgatttctttctcaacggtacaattctcatccactagcattaaattgagtttttgaaatggaaaaaaataaggggtgagcttataaagtacagtagaaaaataactaatatcaaaagatccttaatttaataaaacccttgcttggatagattttggaaataaaaagtatctaatagttattgtcacgtataaacaaaaagaaggtaagaccataataatcacataatcaaactttaaatgcatatcacatcatctactagacccctagctctaaatacgagtcatacaaaatgacatcataatccaggtcgtcacgcctgataaccattgaaatactaaggctcaaattcaattcacttcctgtaaatattctacttcttacacctataggtgggtgcacacttgatctacctatgatgacacagagactaagtcgtgatacaacaatatacataagccatgataaatatgactctcatcagtaaaaataaatataggtaacaagagtaacaaaagtacatactctttattttagaaaattcgacagcataatgattatttgataaaacccaaaaatcataaccttcatagatatatgtaaaaacatatatttggcactgagtgcctccagaatagtccaaaaaaacatgcgaattaagttcttagttatatttcaaaaaatttataaataaataaattagaatatgtcatgatattcatcacaataaaattaagtgcaataattaagttgagtccccacctctccaaagtcgttaaactttatccaaaaagacgatcataagctctcaagtcctgagcttcaattggttagtctaatcctagacatcactttctcctatgaccatgaaatgagtaaaagattatcaccattgcattctacatttaaaaacgagtccaacaacatagagcataactaaatataaattttggattctgaaacctcacttcagcgtgcacaacaataatcggtgacagtagaaatcagtgtactagaaaatcaccaaaaataggagtagtatatatcaaaacaataatcttgacgagtagatcacgcccatgttgggttttatgccctannnnnnnnnnnnnnnnnnnnnnnnnatttacttattaataaagatcaggaataacattt

SEQ ID NO: 126913 - DNA, 672 bp, Cannabis sativa
cagccgtatcactacagacaccaataacatgactcaaaggactgattacaatggtgaggaaactcttacagttggcaatggtaaccatttaaaaattgctcacattggtactagctctctaatctctcttgataataagtctctggttttgaaaaatgtcttacatgtgcctaacatcactaaaaatttgttgagcatatctcagttgacatctgaaaataatgtgtttgttgaattttttgccaaacaatgttttgtgaaggatctggacacaaagaaggtgcttctccaagggacacttagagatggcttgtaccagattgttggccagcaaggaaactccatcatcaacccacacgagtctttaaatttcctgtctgttaaaccctttactggtgtagtttttaaatcaaaagatcagcaagttgctgaatctcagtctagttccctaaaggataagtggcacaagagattgggtcacccttccagtcgtgtaatgagtcaagtattgagtatactcaatgtaaaaccagctatcaatgaaaaagaaaagttctgtgaagcttgccaatacggcaaatcccatgctcttccatttaatatcaatccaaatcgtgctaagaatcctttagaattaatacacacagacctatggggtcctgcaccagtcac

SEQ ID NO: 126914 - DNA, 1345 bp, Cannabis sativa
  modified_base (1233)..(1251): a, c, t, g, unknown or other
  modified_base (1307)..(1314): a, c, t, g, unknown or other
aagtctatgcatactatccactttttgtttggtttgggcactaggacagggttggatacccaaagtgaatagaatgctttggttatgaagtcatggacctgtagcctctcaacttcatctatgagcgcttgggcgcgttctttgtccgacaacctccttttctgttgtacaagttggaagtttggattgatgttgagggcatgggtcatcatagaggggtctattccgaccatgtctccatgtgaccatgcaaagaggtccaggtttgcccttagaaaatttatcaacactaattttattttcagcgctaaaccctcccgatcttcagtcttctagctggagaagtgggatcaacctccacttcctccagctcttctaaaggtccaaagctacctacacaatccctaaaacgaggatctatgtctatgtacctgctttgggctggacttcattaccctttgctgggcttttcttcaaagcttttggcgggcatcttctctttcttaactttggacaaagccaagttgtaacaatgacaggaagacttttggtctcccctcaaacatcctacccatcccttgttgggaattttaggaagaggtggtagatgggtgtcactgtctttaggccgtacagggctggtcgacctgtcatggcattgaaatctgagagaacatcgataaaactgtgccatcagagttctggtaggtggattttctccaatagtgaggggcgatctgatgtaccccataagtccaatgacttggccaaagaagacataaattatttgagtgtagggtgccaaatcagttaactagaccccatctttttgtatgttgatttgaaaagaatgttagaggaggctccattctccaccatgaatcttgccacagtcatattcctaatttgtgtagttattaccaggggtcattgtgtgggaaactaacttaagcggtatctccttcagtgaaagagatagtaagctctccaagctttggttgcttagagcctctttcttcgacggccaggatgtcactgttgggctaatgatatcagcagcgctccctagctttgctggtctcacctacaaaatggtgtccaccgataatgacccctaagtgacccgtaacaggagctggcatagggtctctattctgggcaccttgtgcctgagtttagtcattttgcacaaaatgacgcaagtggggattgttcttgttgggttttatgccnnnnnnnnnnnnnnnnnnnatataatcagatttacttattaagatagatgaaaaataacatttaatgttgcatgnnnnnnnngatttatttcatgattatatgaacataatgt

SEQ ID NO: 126915 - DNA, 557 bp, Cannabis sativa
ttgattctttctatacaaatgtattctttagatctatggttatacacttaaaattatatgtaatatatttattgatggagttgaatattgttattgcatattttatgagtgataaagaattttatatatattctttttataaattatatgctaccaaaatttattggttgagtatatattacattttcttgaaggattaaatggtccatatataagttttggttagctgttatttttttttttggacttttccgtttagtgcatcaatgtgctatgaatttatatacatcttcaatattcagataaagtcattgattcatacagtatatgctttaatttttggactttgatatttatgatactctctcttttatgatactattggaagaagctatgttataaaataatatgtattttttaatttatttgatttatatatattgaagcttttggataaatatagatgtgctatgaaaatttaaccatcgttataatctcaataatcaaagatcatttatagatgatttatatcgagtagggaaaaatttaccgtttca

SEQ ID NO: 126916 - DNA, 658 bp, Cannabis sativa
tgatgtactcctacctgtttcggtgttcgagagatttttttagtctatttttttatagttgcgtacattatagttatttaaagatcctgcaaaacttcgaaaaattcaaaaaaatttaacacgctaagaataaagttcaaattgtctgttgtaagcgtgacttttttatttggaggggtacattaatgtaaaaccacttttaaatttattgtatgtaaatttattaaaaaattaatataataataaagaatattttttaatgtaattttttggtgttatggttagagtggaaatagtttttgacactaaatttagcaatactgtaacaccaaatttagtgtactactcggagagatgctcttaagtttcttatcactacaacaaagtcaattattgctttaaggtattatatatattaggctaattaagaattttgccctctgaactttgacatgtaccaaatcatgccccctgaactattgagattgttggatttaaagacttttttccaattttagtaaaaaaatctaacatggatgaaagttcaggggccataatttagtacatgtcgaaatttgagagaattgatttggtatatatcaaagtctgtgaagcatgatttagtacataaacaatcactgaaatagtaaaattgaat

SEQ ID NO: 126917 - DNA, 800 bp, Cannabis sativa
ataggccatcatccaaggacaaagagacaaaatctaggtcaaagctaagtataaacaaatgatcacaaacatgtaatctaattaatatatgataagaaacaaacaaacaaaaacctaattaattaatcttcattttttgttctaagtatacttacttaggtgctaggccctcttggaaattggagcttaaaaattaatttaattattaccatttttttaatttcacacaatctcacacctatctaccttttttctgtccttgatctaaggcttgatatcaaatcataaaagttttatttataattttttagtaattattattattatttttttttttttttacagtttgagttgtttggcaattgctcaaatggtttttatgtgggttttcagttgttttattagttgctatgtgaatttttcgtaaaaatacaaaaaagaaaaaaaaagctactttcaagtgtaaaaattaaaaataaaatcctaattttttaataaagaaaaaatatttatcatatatattaaatttcaaagatttactcacatatttaacaaaatttaaaatatttttcgaagtacatattatattaatttccagatttgatagataatgtgaaaataatagtaattttcttattaagtgtttttagaattaataaattaattatatattttaaataatatcatattattaaattaagtgtacatattgtttataaattttaagtgtaaaatttactaaattaatgtgaaatattaaaattaataaaaataatctcacttaatttattctatacaat

SEQ ID NO: 126918 - DNA, 541 bp, Cannabis sativa
aataataataataagcttgtttttgtattacaaagtttatttcttacaaaatttgataacttgattatgtttttgtactattacagcttcataaatctctagaataaaatgaatgattaaatttataatgaaataataaaaaaattccaaaaaaaattatatgaaaaaaaggaaaagcataaaaaattatttatttgttaattatggtgtaagatataaataaataattttctacaatttgccttctttttcatataattttaattaaatatatttaaaattattttttacataaaaataattaaaaaatttataatttattaatatattattttttattataaaaatatgaatcctcaaagatatttgttcctttttatacttttggtgatatatgagcattaattccttaaaaatatgtcatatagtttagaaattattgtgaaggttaaatttatagattatatatcttttattattctttgtcttaaattaatatcatttatttttgggaattaccttatatactattttttaattt

SEQ ID NO: 126919 - DNA, 835 bp, Cannabis sativa
  modified_base (769)..(769): a, c, t, g, unknown or other
agtataccaaaactatgatatattattttcaagcatttcttatgaattatatttgtaaaatattataaatatttttatgaattttagagatattatttcatgttttatgtaggacaatagctatttgtatatctatcgctcttgtatattttaaataaagtgtagaacaattttgttctagactttatttgtaaatatacaaaagctatagtatatttttaaatataacatagctatggtatatattaataagtacaccatatattcttttcaaccatttcctattaactatataagtaaaatattataaatatgttataaattacacatatattatttcatgcttaatttaagtataataataatattattaaaattaaaaaatacctctatttaacttttcaatttttactatttatgttatttatttttaatttatttaaaaaatgacaaattactaaacttattttctaaaattaaataaatataatttaattattttttttgtaaaattattattatttaaaaatttatattacttattaaaatataaactaattttttttatttaattcatgaaattaaaaatttatatttataaaaaattttatattaaattatacttttttttattattctcaatttttaatgataataaaattttaacaatattacatcttcaacatacccaataaaattagttaattcaaataaaatttgtaataaaacaaaaaaatacatatttataaaaagagtaatttgcggcatnaatacctaagttttatgccgagtagcatataaatacttaagtcctatttttggcggtaaaaatacc

SEQ ID NO: 126920 - DNA, 756 bp, Cannabis sativa
tgttattcttaatacaaatattttggattctgtttaggcacacgtgtagacctcctagatggtctatcatactagcataattaaagttgctcacacattatgattggtaatattactatcaattcataatgggattagacataactcaaaagctcattaagacactcttaacgtctttaggccagtccattaaatgaagacatctctctctttgggtatttaagctcaataaacccattatttctcataaaataaagtacaatccctttcattatacgtgtaaaataaaatagtgatggtagaaaatggagacaatggtcatgttcaccggtatccaggtatttttttttttcttgtttcttgtgtaaaggttgtggagagctcaaaataaaggctctcaacatcaactattcgaagtatgtatccattatataatattaaattggtacattttaattcctacaacttatgtgttttgttgttggatttaatgagaaataattgatatattatatactcattattacttaataatttttatagttaggtattaatttaataaagtgactagccatgaccttattggagaaaaatttataaataagacacagggccgtcttaaacattttggaggccctgttccaaccttaaattttaggcccataaaaaaaaactattttattataataattgttatttatttcattacaactttaagtaagtatcaaccttctatttaaaaaaggccattcttcg

SEQ ID NO: 126921 - DNA, 767 bp, Cannabis sativa
  modified_base (47)..(66): a, c, t, g, unknown or other
tttcatcgttttagaaagttcacatttagggtgttaatcaacatacnnnnnnnnnnnnnnnnnnnnctggtaaaataatatccaacaccacttcagtggtcagctatatgcttcagatttctgtaacacctatcataatggctagttggtgtacatcgtttagggagtttttgttggagagtaaagcatgtgtacttctcctccttctccctttgattttatggtgtaagggaatcgtttaatttcccttttttccattatttcagccggagccattgttactgcgtttgcctccattatttttaatgttggagggatggctgatattgcatgtactagctggtgtgttgaacaatacttggggctttatgacaccttgtgtctgtccaacactgccttgtcatcttttttgggcttgctggacaacttctttcaattttatgaagccatcagctcattggaggaattctttcatgttgtttgttgagatctttctgatatcattccagaatttactcaacggcaagatgcctcaaagtatggtcgtatgttggccttcttttgataggcctttgacattggtggcctcgaccacgaacctttgatgtagtatttcaaaggctaaccttgcttttgctttattttggcaaggtcatctagttctgaaggtcatcaagaatacaatacagttacattttcacaagtgtttaataaccattttctatcattggtttcaaactgtgtggaatatgagtttaatattctgt

SEQ ID NO: 126922 - DNA, 832 bp, Cannabis sativa
cacgtaggtctatgtcaaatagacgataggtgcagtggcatcaataattatgtgatttttgattattatgcatattgttatttatattgtctagctagctaggccttggctcacaagtgctctacagtgcaggaaagggtaaatctgttgttgatcagtcatgagatcgagggctttgcggtgtattatacatgtttaggccaagctagaccatgagggttgggtctaccaggaaaaaatgttgtaatatttgcttttgccgcttaggtcagtgtgtactaataacttgtaatattttgaaaagtttttatgggatcccaaaacgaaatgttgtctttttggatgtttataaagtttagtaattacaagttataattttattctgtatttgttttaaagtttaatttccgctcttagccctagtaatcccagtttagcgggattagcgtttgtttattcgttgttcgtggcgtgccatagtgccatacaattacttagactaatataaatgtaaatttatttaatttgtcaatttaatttttagttatgctatgtataatttatacttagttcaaatatattattattaataataaatatatataaaaaatattaaaataaaaattttaaaaaatcgaatattacacgaaatggtaaagatgtatgaaagtcatatcataggaggctacggttgttaacccccttttagctacccctaaaatggcaacagttaggagtgttcattggatcacatctaatatttttatgcctatccacatccgatccaattatatattggatgttaaattttaccatctgatctgatctaatt

SEQ ID NO: 126923 - DNA, 2621 bp, Cannabis sativa
tggtaaaatattcccaacaatgtctctctcaccaactcagaaatacccctatggaaagtagttccacgattagagcgataagcttctctaatctgttgagacaagttagctctccattattcctgctcaacacgctggctttcaatgttcttccaattttccacgaaccagtgttaaaaccattcatgttgcttatcgagagagtctcccaactgttgttgcaagtcagccacaatttggctgagctgagctacctgaggttcagtctcctcaacgtcttctatctccacatgtggctcctcaggtgggatctactccttgatgccagtctcaagagctgctagtggtggccttggaggacgagttgatgagctagttttgaggcctgctcttggcacctgaggctcagaagtagtcccagttctaacttcgtcaactggtgtgccccagtcgtttagccaactgctggagtctatctgtcggcacttgtagaatgtgtcgcaaccatcttgattagtgactttcttaagttgtggctctcaatgaaactaccaaaattttgactcaaaaatctggactacacttctaagccacacccactcgctagattggcaagaatgaagagtttgtaaaataattaatgagagacacaataatttatagtagttcacccctatatcacgatagtaatggggctacgtctacttcgagtttatatttctcatgagatgataattacaggaagtttttaaatatcagaagcttcaaattctagagagagaaagtcgagagagagagagagaagctctgaccttacgggtagttttctaaatgtgaaaaatgagctaagggagctctccttttataggtgaaggaggcccacaaaaatagtaaaaaaaatacaaatatagtgtttttcacctttcatgatgatctaattgtaaaaattagcttctggtggtaatggctaatttttggtgcctggcatgtcccgctgcgagttacccgaagcttattttcgtaactcccttggggtggattttgataatgatagattgaaaattttgactagggtgtgagacatgacttgatcgagcgcttaaatatcttgaaaacttaagttgaatcacgtcaataggataaaaattgagtgagttatggtcattttactgaaggtagttcaggtcccaacacccaggttgacaatccagtagtgtagaaacatccaagggaagtcctatgagatgcctaagagatgttttgacaccccttagtccttttatatgttttggtgaagttgatcacacgttctcagagatgttgctattttgcaaaaatggaagactcgaaacttccgatttttgagtgagtcaatttgctgaaaattgaagttgtgaatttaattgatctaacttcatggatcattgcacttgtgaaaaacttgacagatgatcaaaacatcatcagattcagataagcagaacccaacaaaccaggccatttgttgacttgggtgttggggcctttaaaccgagcatttataattatatttttgatacttccaaggcttctgaacttgaggacggagtctctccccccattttttactatggtggattcaatgtcacgtcaaatttggcatttgagtaattgaaggcagtctctcaagttgattgtcaacttgggcgctaggcccaacactaggtcaacctgggcgttgggccctgtttccaaggactcatgtttgtggttttccccctgattttacttaaatattcattattttttatggcagtgaagatgcctaaagcatttttcactgcactgaattggaaacatcacagtcctaagtgtcaaccaaggcgttgggtctcgcttctgcccctttagaagttccgtttggtccccaaaaatagttgattcacaatattttctgaagacgtagatgatgcttaaattttttttggggaaactccgttttttttgtggcccatgttggcaaattgtcaacttgggtgcagggccaaccccaggtgtcaacttgggcaccgggccctatttttttatgcctaggaactattgtttttaatttgaaaggacctacttcctatttttgatgaatacagattcatttcaaaagttagatctttaatcagacacttggaaggcacccaaattgacatattgtcgacctgggcgctaggtggtcaaggccccgaggcctcgggtgcttaaaaactaacttacttcaaatctaatttagatgccttaaacatgtccgtgggatgtctagttgaagtgccaatgcaagttttggccactttgcactaagacagccttaaaaactaaaaccccagttgagaatgtcaacctaggtgctgggtgtaaaccctaggagccccggttggcttttgggttgcgggtttgtgtaatttcagctctcaaaccttgtattaagttgctccatgtcttcatgatacagaatactaaaagattataggttggatcaagttattgaggttcaaacttccatctcaaagctctcggtgtcatcttgggcgcaaggttagggtcccctgttgggttttgtgccctaaatcaaacccatttcaatataatca

SEQ ID NO: 126924 - DNA, 997 bp, Cannabis sativa
tcatatggtacttttgaagaacttaaactcctaactgatgcagttaaaaggtttgatacatatttattttatcataagagtgtttcctattttttatgcatgacattattgtttattgcagtttacaataggtgtcatgtttgttttcaagaaattctgaatattttacaatgtagaaaataatgtttaatataactgaatttcgagtaccgcaaatatttagaatttcttaaaaataggaaagatgcttatatatagtgcataatgtacaccatcctattaacagataagttaataaataaaaagaaattgcccatacgataagagcaaagcttgtagtactcttatcaaagaatttacacatatatacatattgtcatatctctatatatatatatactaattagttctaattaagtatatgtgttttattaggtgggacataaatgagattgataaactcaatccaggatgttttcaagtgttttataaagaacttttgatttgttatgaagaatttgagcaagggcttacaaaggaagaaacttacagagttcactacgcaaaagaagaggtatgtaataattaaatatctcaacttaattatatataaacattaccgaaaaaatatactatttattagtaacattttagtcaaaaaaaaaaaaaattactcgtgtaactaaaaaagagttttagagatacaaaatttcactaatttaatttttagttaaaacaagcattaattgtaccaaaaatacattaattaattaacaataatatacttttaaccacaagttttagcgataacatcataatattgttgtattaacttatataatatttttatttgttgtgattaaaagtaagattttattagtagtgaaatggatttatatatatatatatatggattatttcttaatgggtaatacccattaatgggtactaaaaaaattgatgaggtggcaatttagtgacttgctagagtaggtta

SEQ ID NO: 126925 - DNA, 825 bp, Cannabis sativa
  modified_base (700)..(720): a, c, t, g, unknown or other
tgttaaacaacatacttattagtaaatctaagatcctggtaaaatatttccaacaggtatattctcctgaacaaaagtacgtaagagaattcaaaccctaatccatgatattagttgggtatttatagtggttggagaattacattaaagttttctctttttcttctattgggaagtttacaactgaacaatctccatgggctcactcatgaagtccagcccatgaaatatacgatctgctgactaagcgaattgagcttgagttgatcaggtcaagaccatatctagttatcatggaaaaatactctgaaataacggccttaggcttgttatgggaagtttcctctttaatcgcgatatgatattatttcccaatccgccagctgttgtttccttatttataggagggaacaaatagggaaactagaagagtcttccaggaatgatgcatcttcccccttggggctcacaactccaaactgtcttttgggctcgatctgtggaaagcagaaggtatcgcgagcatgaaaccaagataactctcgaaaggacacatctggaggggcttgacccacttttccattaatgagggtcccactgatgggtctggaatgctgatatggaatccatgtgtaccattccagaaacgcagataacatttacaccaagctttcaggatgttgttggaattattttaccnnnnnnnnnnnnnnnnnnnnngtatgtttcattaacatcctaattgaattctctaaaacaatgaaataaacacataaaagttatgagaaaccttacagtgggtgcagtggaattaaatgactcatt

SEQ ID NO: 126926 - DNA, 583 bp, Cannabis sativa
aaaaaaaaaaaaaaaaaaacgctactgttattagaaatggccggtgtcaccgaatatataaaggtaagatatgagcattaaaaataaaataatatgaagttttcctttaactgactgaccttatcagatttacgttacaaagttcatttatttattttagtggttagaggtatcaataattgttacatttgttaagatttgtccattagcattgaataatatttagaaagctaccaaaagtaattaaggtaaggaaacagtactgtcgggtcaatctttcacccatacttgtcgttgaccttgacccctactatctctatataatatattactttacaacaatacatacaacaataattatagtaatataattttcttttttaaaaaaaaaaaaaaaaaattggtctcgttagaatctcttgagtaaactgagtggaaaaactagagacaaaaagaagagatattattaatcaataactttcccattgcaaagcaacattctgttatagtgagatttctctcacctagaaattcgagaccagactccttttcaaaggacacgtgtattcagatttccaataaa

SEQ ID NO: 126927 - DNA, 889 bp, Cannabis sativa
ccaacttttcttgggtctcatgcaactgctttttatactcaagccaccttagggtcttggtcataatgatacccatctttattgtacctgtctttgacatatccattgtcaccttcctcatcaccttcagcctcgcggtctttttcaacttgtttatggagttggtctatgtcgccctctcagaggttagctttcgatgtatccccttctctcacattgctcagctaagcgtgttctggagagagagaggaggtttacatctctgatgacgatgtttaggttgccttaaggagtcttcttcgtgactatttttcaactgaataccaatgttgtagtagcaccgtggatttagtctttctataactctcaatgaaagaacccaaatatttatcgagttttcggactctaataaaaagagcttaagaaataattagaataaaataataaacaagataaggatttttacgtggtttaggcattagtgagccttagtccatgattcagtctattggccttaagaggcttgtataatgtgtttacagtagggtttcttagaaaccctaactcgacccttcttgtttctcttgcagaagaagaagaaagcttatagtaaattcgacaaagcttcggctatcttgttttgaatccccccttcgtatggaaatataagggtatttataggataaaaagcgtgcatggacatgcccacgacctgcctagggtttattgaaataagcccactattgggataaaatacatgtaaagagttgattatttggtcacaaagaaggtttttgcttgtttaaagaggcagttgtacaatggggaccattgtgtgtaatggacatgtgtcacgtgtaaagaaaatgcctggactaactgtcaggaa

SEQ ID NO: 126928 - DNA, 885 bp, Cannabis sativa
aatagagttttgtctcattatgtaataacatcataacaatgtaattgagggtaattgaaggttctaattatattatccaatttttatagtctccaagaaaattaaatataaatacactgtataattactaaaaaaatttcattctaaacattaattactaaaaaaatatcattttcttataaaattcttagctattttacttaataagacactaagaaatcatattattaaaaaaaatactaagggacaccaaacatcataagagatgacatatagtatataattattgatttaatttaacatcaagtctcatatatttttatttaataaataatataaaaaactgctaactactacggttcaataacaatgctttatttaaaaatataatataattaacaatctatataattattaccttaataattatgaatatcaattggattgattttcctccaatccaattggatttttcttttcttcctttgcacaatacttgtttatttatttattttttttattttataattacttgaaaataataaataaataaagggtaattggcaccagcttgaatttcaatccccattgctccttccttggatatttggtttgggtgttttgggataagctttgtcgattgggttagttggtgttattatttatttatgagtaatttacggtataaccttcttaagtggccatgtttttacaattaaccccaaattttaaatatttggtggtaaaacctcctaaactcaagttttgttagcacttagccctttccatcatataaattctgatagggaaatttacaaaaatactgaaattttggttaactttcacaaaaatactgtcacacgaaaaagttttcaaaaatactgt

SEQ ID NO: 126929 - DNA, 854 bp, Cannabis sativa
ttaaagccccaaccacgtaaaaatctctctcttaattccttaaagctttcttaattattattattatattagttgccgaaaacctcggtcaacacatgtggcaaacaaattaatgatatgattgttaagccagttgccgcgttagtgccatgttaatactacgtgtgtaattaatttgaaaaaaataatttatgttttttaaatttagttttatgtaattttattaaacattgattgatttttaatttaatgattcttttaaaaatgcattatttttatctttttaatgttaaattatacaagtggtgttgatgtaacaattagctaaacagctatgtcatgaacaatttatttatcatgtttaacaaaacttgacatattaaccaatatacaatactgtgaataattcaagtaccatttataacggctgaaaagttcaaaggcagaataatgcatatatcatagtttgagtgacaaaaatcctaattaaatagcctatatataatgtgtaataaacaaattaaggctaatcaagataagggtagattaaaagatatagggtaagtctttcggttaacccattgtctcttttggtatttaaaagagtcttttagtctttttttatgatcgtgtatgttttaactatttaggatcatttgtaaatttttaaaaaattctgaatagtttacaatgtcaaaaacttgtaagtattatacgtgtagtaagtaactttataaattttatattcggcactgtaaattatatattcagaattttttaaaaatttataaatattttaaataactaatgtgataataaaagggaaatttgattttctatacttagaaaatcaa

SEQ ID NO: 126930 - DNA, 1765 bp, Cannabis sativa
gtacccgaaccaccacctatagataaagctcgaggagaaaaatgaggaacaaaggagtcagaagcttgaatcccttttcccttgtcaatatgaatagtagtggatggctcattcaaagaagcttgagaaacagcacaaagaagactctgaagaccactaaactgagagtcagaagtcactacttcctgagaggaagtaggagacgaggagtgaacctggttatcggcaggagccaaagtaatgggagtatccagagaactgggtagacttgcttgaggaagaaactgattaacaacatcttgaagatcatgattttgagccaaagatcgaagattcatctcctcaaacggaatagagtttgccaaatcaaaagggtcacgcttaaactatgatttgagaggagctctaatgttctccttgaaaggcagaacagaagggtaacaaccctcatcacagcgttgcagaaaagagccacatttagagaaaatatggtcaaattttccacaaaaatagcaataattctgaagaccctcatatttaaacaaaagccatttggtcctacccagacttcgaaagaacacctgcatcccccttcgaataggcttagaaacatctaagagaacccaaattcccaggaaaggtccacagatttccattagagtagttttatggatttcgatgagatctccaatatcattttagcaagactaggagacctaaatccaaaagcaatatagtggattagcatccagaagggaacgaacctaagctgttttggttgaagaagattaagaccctcaaggttagcaaaaaccatcagacaatggtcaaaatgccatgggtggttctcaataaccatacgcctgtctccatcacacccaaaatgagcaagaaagagaccagaatggtattcagtaaagttgacaggatatcttaaggtctaagcttccctcatagctttgtcaagccaatcaggttaattgcttttcagagagaggatcttaacaactaagcagtaagactcagaagaagggccactacccaaagaaactccatcaaagttatgaataagagcttcctcgtcattcaaagcaagatgacgaggcgaacttctactggaactcgccatgacacagtaggaaaggattttgcagacagaggaaataggacagacagataaagaaatacccagagaaacacttagtaaattaagcaacacatagaaagatatatatagaaaaggaaaatacttgagaacaaaaaacatctgagaaggagtggaagatgccgaatccatctcaacattaattagaaactggcgtgatccctcaatataagaggtaataatcaccaaaatcccccgagttcttctactgacggtgcgctgagcagagagaaggaagaaaaacaaaagagatttaaataaggtctgcaagagtattaaatagaaatagatctttttagattcactgaggtgcattaaatgcctaaacctaattagaaatgatgagaaagaaacaaaactagagagggaaacaaaacgacggttacacatcatcacatggaagaagagttggaaaaatccagaagaaaagggaaaaaccctaagagagcattccagagctttttttttcttgtttttttactagaatcaacacatgatatggagtatacattggaagggaccgatattgatcttagaaaagatatcttaaacttaccgttatatctttctaagtcaataacaatggttgatcttaggtct

SEQ ID NO: 126931 - DNA, 1850 bp, Cannabis sativa
aaataaaaaataagaaatttaaatattttttccttcgaaaaaagatatttttattttttgtaatatattataaataattaaatatatttttagaacaaaataatttattatactcttttaatcaaagatccagttgcaagacatgaaacacgagccagaaggggcagactgcagatgctaggagtacactataataggaggcgagggaggttgaggtggaggatcgcaaaggtgtaagcatgttaggttttgtgaccaagtcagatggaggaacaagagacgtgtcagaacatgtgtcactcgcagaagatgtgatagactatctaataaatcatcatcattcccttgatgagtagcagtaggtgaagacgaaagtaaggtacattttccaaaaaaaagtaacatcgatagaaacatgatatttgttaagatttcacatgaagaacagaagttggcatgcacttaatcaaaaacatgcagtagaaacaacatcaacctaaaacggtttaagaacatgcgtttgaaataagagagctctatctatttcaaggagatgtctattttttcgttctgctatacaattttaagatagagtatcaacacaagaagtttcatgaaacatgctattttgaaccatataagattgaaataaagcatatttacactctttggcattatcacttctcaatgtacaaatagacatattaaattgattttgaattttagcacaaaaggcataaaaaatagagaacaattcagaacgattcttcatcaaaaacagccaagtgacacgagaataatcatccacaaaagtaacaaaatgacgaaaaaccaagattagacaaaataggagaaggaccccaaatatcagaatggactaattctaaatgaacactagcccgtttattgactctaggacttgaataaagactatgatgtttagtgaactggtatgattcacaatctaacgaagacacttactttattgtggacaaaactttttaagcagacgaagaaatggctgatgacccaacctacaatgtgtcgcgaagggggcttgtacaccaaaacaagcaactgatttagatattggtgtatcaagaatgtagaggcgtccagattcatgtcctctaccaataatttgtttcgtcataagatcctgaaataagcaatgatcaggaaaaaaaaaagaaatacaacagttaagatcaagtaagttgaccgacagagatcaaattaaaagaaaaattaggtaaatgtcagacagacgacagaggaagcattggagtaggataattgtaccagactcaagaatacgagatggtaacccatcgactaaggtaacaatagaagtgaaagcgtgaggttaaatattagaaaagaatctagaattatctatcatatggtccgtagcaccagaattaatgaaccgtttggaagaagaggaaagaagacatgaatttgctttagttgaataaacaatagtagtgatagaagaagatgaatacttaagagactcttgatactgtaagaatttggcatattcatttgcagaaacaagaactgatcttccagaagccattacaaatatgtttgtcccaccaactaattcaaacaacaaaccaaccaacaaatccgataaaggagcaaacaaattgaaacaaaaagttgggaacaaaatgagataccgagccagcaatccaaatctcacaatccgaatccaataggagaataaaaaggagagaaggattagggggtgggcatcatccaatccaatccaattgaaccgaaccgatccaatccaattacaaaaagttggatatccaattacaatttgattggattggatg

SEQ ID NO: 126932 - DNA, 879 bp, Cannabis sativa
taggtttgtaaggttgggaagtcaactttggagtttgtttgggttaaagttggatagagctgacttgtcgaagttgtgcaagaaggagaacggaagagaaagggagtgtggtgaaaattagggtgacatggagaaaaatataaaggaaagagaagaagagggaaaaaaatatttttaattattttcataatttttaaattattttttaaaatacttaaacaattaaaattatatggactactaagtacactctgtacactgtgacatgtccaccatggtacttaacaaagttttttggacgagaggggtattatgtggaccactaagtacacttgtgtacattgtggcatgttcaccatggtacttaacaaagttttttagacgtaaatagataatagaagtgaggtttggagagttttaccaccaaaaaattgtttatgtgattaaatgtcactaatcatagaattcaaatagttttgccgtcaatatcccccactaataatttgtcatgtgtacatttgtagtatgtccatcgtggcactttaaagtttgtagtatgtcccccactttactttatttgttttaattttaatttttattttcatattctttaataaatattcaattttatagataaagtctctattataccttttagattaatgtaaattatgtgatacaattaagtggagggtgagagtataccgtattttggataaataattaagttaatgatttttcaacttatcctctaaaaaaattggtttgtgtaaataagtgttattaatcatagagtttagatgattttcccgtcaatatccatttataaattaaaacgtcaagggattaaaagggaaaattttaaaaataattaatatt

SEQ ID NO: 126933 - DNA, 635 bp, Cannabis sativa
aaaaaaaaaaaaaaactgtttataatttttactgaagatatatttttataaaaaaaaaatttaagtgaaaaaataaaataaaaaaatatataatttaaaattgaaataaaaatagtgttagaaaaacataaattgaaatagcatgttctttgtgcatgcgaattttctgctcgaactttaatatagtttggtagataatttttttattagtgcattaatataatttttttattagtgcaataatatagatctccatagaataaacaaacataaaaattaatctaccaaattttctgcacttcaaaaaaaaaaaaaaaactaaaataaataataatcaatatgaaactttttccaattcaaaataaataaaacccgttaataacatgtttatatataatcctactaaatatacaagcacttctataagttaataactaataatatataattatattgatctattgtggtgatgtccaaaattaatattttctaaaaaaaaaaagagaaaagtaacgggtattgtatgtattaaattttgggataattgcggcaaaagtccccaaaagcttgaggttgatgccgattagtcctcaacctcaaaaattggcggtgaaaatacctaaggtcccaatttt

SEQ ID NO: 126934 - DNA, 1651 bp, Cannabis sativa
  modified_base (818)..(834): a, c, t, g, unknown or other
aataaaactaacactacgtggcttgccacgtaacaatcacctagtatatatataaatatatttattttttcaaatttaattttacattttaataaattgtgatagtgagacaaatatatagtttaaattcagaagttcaaattaactgccatttgataatcataatttaaactttatatttttctattatgtatataaattatattatttataataaaaaataatgaaaataatctcttaattgggttggttgggtacattagtttggatttatttaggaaattagatttatcttcaacacgctcaatatatagattggacgagttatgtttttttagatttttttaatttgtattttttgtctagtttttcaatttaatttgtgtagattattcgagttggacaatttacattagtttatggataatgttaattttactagtaagggagaattttgtgatagaaaaagttgagagaccaaattctacaaaaatacttatttattgaggataaatcctaattatttattataataataatatattaatttttttttaaaaaaatactaattcagaaaagaaaaacagaaaaaaaagaataaaaatttatgaaattcataatttttattttaaaaagaggtattacaaaaaagtaaaaaagtatagggtgattctataatgcactcctttaaaagggatgtaatgatgcaccttctacttgtttcggcatccaaaaaaaaaaatttagtctaattttttttttttatatttaactacgttatagctatttaagatatcctacaaaattttaagaaattnnnnnnnnnnnnnnnnntagaaaataatgttcaaatagtctattttacacgcgaataaaataaaataatcacgcgcgcaacacactgtttcaacgcaattttcagcgtgttaaacttttctgaattttttaaaaatttgcaggatgtcttaaataagtataatttacatgaccatgaaaaaaaaaattaactaaaaaattatttcggatactaaaacagatagagatgtatcagtatatcccttttaagggagtgcgttatagaatttctcaaaagtatataatagccgaacaacaattaatattttagggtgatttctaaaatgtacccacctttaaaaagaaatgtactgatacaccctctacttgtttcggtatctaaaaaaattttagtttaatttttttttccatgtacgttatagctatttaagttatcctacaaaattttaagaaattcggaataatttgaaatatagaaaataatgttcaaatagtctattttacatgcgtataaaataaaatagtcacgcgtgcaacatactgcttgaacacaatttttggcatgtttaactcttctgaattttttaacattttacagaatgtcttaaataagtataatttacatgaccatgagaaaaaaaattgacttttcggatactaaaatagatagagatgtatcagtatatcccttttaagggggtgcattatagaatttctcaatattttaatctattacaaaaacaaaaataaaacactatatctactagtgggtgattctacgatgcacctccttaaaagggatgtactgatgcacccctacttgtttcggcatcta

SEQ ID NO: 126935 - DNA, 997 bp, Cannabis sativa
gtcgggcccagccttaggtcaacctgggcgctaggccctatttcttgggactcgggattgtgattttctctccgagatttcttgaatcttcgtgatttctaattacggaaaaaatgctcggaacattttgttggacttgatcagaaacagcccaagttgacaatatgtcagcctgggtgcaaggcccagccccaagtgtcaacctacgcactgggtccccctttttgcccttttggaaatttcgtttcatccccaaaaatagttgaatctcaacattttttaaaaacaaagaagatgctctaaagaattcctgaaaactctatttaaaatggcccaagttgacaaaatgtcaacctaggcgtagggccagccccaagtattaatgtgggtattgggccctgatatttatacccaagaattgttgttttcctccgaaaagacatatttccccgcttttaatgaagacgaagaagatgcaaaagtaagatctacgatagatacttggaaggtgcccaaattaacagattgttaaccttggcactaggagcctaggaccctaggcccctggacgctcaaaaattaactttctttgaatatgattctaatgcctcaaatatgtccgtggtatgtctagctgatgtgccaatgcaagttttgacccttttgcactaagatagtctcaaaaactaaaaccccagttgaggatgtcaacttgggcgctgggtgaaaccctaggtgcccaggttggattttgggttacaagtttgtgtaatttcagctcttgggacttggattagattgctccatgtcttcatggtacaaaatactaaaagatagtgggctggattcaagttattaaagtctgaagtttcatcctagagattttaaagttaacttgggcgcaaggctacggtcccctctaaggtcgactgctatgactcgggtctactcaactccgtgatgtcatccttcgtgtcacatgtcaaacattgatgtc

SEQ ID NO: 126936 - DNA, 1440 bp, Cannabis sativa
tgtgagttcaaaatccctctggagtaactatgatgagtccaacactagaactttgctcattggaggatccatctacaaagagtttatagggatgtccagtgtcctcctgagctacagtctcaagtgtgtggacttgatcttcacaaatcatggaattgtcttcttcaaggccaatacattcggcaatgaagtctactagtgcttgccctttagttattgttcgagggtggtagggaatttcaaactgacccaattcaactacctaattgagtaggtgccctgatgcttctgacttcatcagaacttgcctaagtggttgtcaattaacacattgattatgtgagcttagaagtaaggccttaattttcagaggccaataccaagtagtagactaggttctaaatgaggggatacctcaactcagccctaatgagacgcttattgatgtagtagactgggtgttgtatcccttcttcctcatgcaccagagcatcactgactacatgctcggtgatggccacgtacatgaatagttcttcaccatctattggtttggataggatggatggcctagctagatgatgtttgagatcttagaaggcttgctcacatttattagtccattcaaaccccttgttgcttcctttaagtaaattaaagaaggaacacacttgtcggttgacttggagaggaacttgctaagtgcagcaatttgtctggttagactttgcacgtcttttatatgtgacggtgacttgattttttgtaaggccttgatcttttctagatttgcttcaatcactcttaagttgactataaatctaagaaacttctttgattggacgccgaaggcacattttagaaggttgagcttcattcgatattcctgcaggatgtcgaagcactcttctagatctttgatgtggtcttcaaattttatcgacttaaccatcatatcattgacatagacctccatattatttttgatttggctgtggaacatatggttgactagtctttgataagtaatacatgcattcttgagtccgaagcgcattactttgtagcaatagtgtaatatccatattcttagggacgccacgtgtgtgcatttataaactagcagtttagataaattgtgatttataaaaattttaacaactaatttaaattatgaaatcatggcatagcccttttttacgattggggatctcttatttaaaatattacaagacatgccattatagtattattataaaatacatttaaaagttacgaacatttgaaatacagttcttgacaacttagcactacttgcaagataagctgatatgtacatttgccggagaaaattcctaactcatggttgtccaaatatctctacctattacctgcaccacatagcacccgtgaatcataaagatgttgggttttatgccc

SEQ ID NO: 126937 - DNA, 1074 bp, Cannabis sativa
aaaaaaaaaaaaagaaaattattgggcgccaagctaaaagcgatgacacgatccttttaaaatcatttttttttagttttaaattttttaaagaaaaacaccaaaaagtaaatgtcatatttgtagtaatggtacttgtttttacaaaataagaagctagatccacaactacaatattattagattttagctttggagttttccaaaaataataataaaaaaaaaaaaaaaattgaatgcatagctttccagtagagtgttatatgataataggaaatgtgaatcagaacacgaaaaagaataaatgaataaaatttaaaatgcataaaatttttgataaaacaattattaaattttcttatcatgcattggcaatagtcttttcttacatttaaaaatagaatcgtcattccactaaaatggtaaaaaagccaatctattaaaatgacattccaatactttattatgtaaccaaacaaaaaaaataaaataaaaattatttcatttttattccattctatgtaattatctccaaccaaacaccaaataaatgtcatcattgaaagaagagagaattgctgagatcataatagttacaatgagatggtggaatgccagaagaagcttcaacaagatccttcatgtggtgacttaattgaacaagaaatcaaagctcggcaagattacagtgaagtgcataaagctctaatttcagtcttacgtcataaagcaaagattcattggttgaagaatggtgatgaaaaaatacatccctgtttcatgctagcgagcaagaaggatagtcaacataatttattctgttactgacatgacaggtagatgggttgatgatccgaatgaggttaaagaggtattcctgacgtactttaagaaccttcttggaactaatatagcttagaggagatcgatcaagaatagtatcataaagctcgggtcgattcaagaagtgggccagaacaaaagattgtcaatgaagttttgcaaagaatatgtgaagaaagcagtatttgagatataagaatatttttatttaaggaaatatatttctattta

SEQ ID NO: 126938 - DNA, 948 bp, Cannabis sativa
acaacacaaacaacgacagtaatattaataaaggaaaaatctaaaacaaaatataaaaatatagccacagatggtatttatcggttaaatatcatatggtggctttggcaatatgtgcctattatatggccttcatgataccgatgataaatttgaggctatgtgacactaaaacaatccaattacacttacgtatatgtgacactaaaacaatccaattacataagaggatttcgttgctgcaaattacctttgttttttatgacattcttacaaaaatacatatacattaaaaaaacaattaaaaaaaatcttattagaataaaataaataacataatatattgttaaaaaaacacaaaattacattaaaaaaattattatgagtgaatttcaaaatttcatttaaattaattttgcttttaagaataaattactaaatttttattgttagattacttataatgttttgaaaaacttgcacgaatttattttcacatttaggagaattttttagtttgatgtttttcatagttgtgtacactgtaattatttaagatattatgtaaaattttgagaaatttaaaaaaatttaacacactgaaagaaaggttcaaacaatacattgcacatatgatactttattttatacgcatggaaaatagactatttaaacactactttctatattataatttattatgaatttatcaaaattttgcaaaatttaaataacctacatgaccataaacaaaacaaattgagtaattttttttttacgataaaaaaagtaggaatatatcagtttatcttttttggggtgcattatataagaaaaactagaaagaagaaagaaaaatgaaaagaaaaattgtattggtaccatataaaattataagtgcaccacaatattaaaaaatatgtaacttaaattaatttttaaaaatta

SEQ ID NO: 126939 - DNA, 1564 bp, Cannabis sativa
  modified_base (1495)..(1504): a, c, t, g, unknown or other
tatgtcaaagtttggaaaaaaatactaattagcctataatataatttttcattaatacataattaatttagttatgattgctaattcggttcttaaaccttaaggtattatgtcacctctaaaagtaaaattcagaaattcatagattatattttttgtcgcccataattacaggtgacttttttatcgtcccaaatcatatttttagacgcaaattattaaaagcgactttttaaggacaacttaatacagtggtatttatattgttacagattcaatgaaactaaagactaacttaaaactaacaacttataacaagctcaacagctggaaatggaaatgtggccaacagcaaagctgacggcgcaatcggcaagcaaagtaagaaaatgaggaaccaattggagatgtatttttagaagggggcaaccacaatccaaaatgcatgtaagagcatctccaatgctaatattttggagaatgcttgatgaggtggaaagcttatgtggcaaaatatagagatactataccattggagataaaagaatgctattcttgaaatttgcattgatgccacacaatggcattgatgccacacaatggcatggatgccacacaatgggattgatgctatgtcttttttatacaataaaatattaaaagtgcaatatatataatagtttaataaagaaaaaaacttatatacataataatatgtgatatcataattatagtatttttaaaaagtattatactattggagtgattttaaaagtaaaagtgccaaaaataatgtataagaaaaataaaataaaatattatattttggatgatgtggagatatagagcatcttcaaagaatgctactattggagatgctctaatgccacgctaaaaggaatgatccctctaatgtttcactccttccatacctctcgaacactgtttggaattggggtaactatttttttcgatctcctaagctaaattttaaataaaaatgtgcctaactttcattattagtccaaaaaaaaaaaatatttaatctaataataatatgtttttttgaatattacaatgaaaataaattttaagaaatatggctgaccaattataaagttatacctatagaaagtgttgagcaccaatatactcaatagcaatgctcatataatatatgtatgtgggggcaaatgataaaataatgttaattaattaaaaattaatcataaagaaacatatattaatcataatatatataaaattttcatcaatttgtaattgtagttattataataagtcaaaaagaaaatattaagtatgagctgtccagagtttacatatacttcattttagttaaaaaaaaataaaaagcatgatattattattatgaatgtggcaattttgtatactttacttttgtaaggacagttttgtaatactcaaaactcaagaagtaactaattatacatatatgggtaaatactattttggnnnnnnnnnnttgcaaaagttacagattggaccctatgttttgttaaatgataaaatagaccctgtattt

SEQ ID NO: 126940 - DNA, 788 bp, Cannabis sativa
tctctttataatttagcacgtaggtatgtaattgactttttcgaaatgcattgtcagtaaatccttacatgtattattatagagcattgctttcttggtgtttcacgattggttagtgattttttttaaaagttattttcttaaattatacaagacctgatacgtaattacaccaataacgatatgatactgagaagggtactaagcattaatggtgcttttttgtttgaacaaatcttttttttttatttcactaaacatcatcatttgaatttttgttctactattttttattaatcccataaaaaaaaaaggtatatctccatataagggataatcttactgactagtgagttccatagaggttctaacaagaacattttgcatcaacgggtagctcaaatggtgaggtacttgggtatctatggtgattggcatagtcttatgtctagaccaaaatacctagtaaataaatggacatgttagtggctgtatggcaatggcacgaagatgcctaacatgtccttggtcccgttgctatagagtcactaacatatgtcctatctgttgttggtgactttacagctttgaaattctaaacttataattgtgaaacagtttcatgcgacatttacatactactaacttattgtaaggtttgttttgtgaagttctcattttttaattcaagtaatgtataatatatgatttttttttagaataaaagtatcataaataacaatgtcaagatacaatagttaaataggggagagggagtatcctcccac

SEQ ID NO: 126941 - DNA, 1694 bp, Cannabis sativa
  modified_base (651)..(654): a, c, t, g, unknown or other
  modified_base (1401)..(1407): a, c, t, g, unknown or other
  modified_base (1655)..(1658): a, c, t, g, unknown or other
tactgctactgctactgctactgctactgctactgctactgctactgctactgctattgctactgctacgactgctattactgctgctactattgctactactgctactgctactactactactacttagttacaaaaaaggcttatttattggttaacaaaaatcggtgttaacagtttggtgctttcactgagagacttgtaataaaaactcaaaaaatactctccttagaaacaaattcacaccaacaatccatggcacgcgatactccttgaaacgaagagaattcaactcggagagacaactgaacgtcctagaaaagagcatcagacttctcacagaagtacaaatgcaactgagactccttgctctgggagaaatatggtacaatttgaacaaactagggatgaaatcctagaaagacgaagtgaggatctctgtgatcccacaagatatgttctattagtggaactagaaatagcaaccttcaacaccgactggctgagtcaaatcaaagaaatgtagaactagagcgtgaggcagcggctggaagggctaacgcagtcatgcccttccaaactaacccaacaccttgctagaatatattttaccaggatctagattcactaacaagtatgttgattaacatnnnnaatatgaatttctaaaacaatagaatttaaacacatataaagttaagaaaccttatattgattgcagcagaataatatatctcctctcacttagatatctaacccttgttcctttttatcgcagagtattataaagatctgagcccgattctccttcaggttgttagattcttcatagtcttacacactatgattgagtactagacttgctatgggtgggcatgcactcaatcactataggctagaaattcagtaaagaacaatgaaagagatttagaaatagaagaaagaagaaggaggtctcaagaactctagttgtctaacagaatgtaaactaggttatatgggattggatgagactaagaccatcgtattccttttatactatttcaccaaggattaggatttaaattatatggaataaaaaatgataatataatagcaaaaataagccttaagtagtcggccatatagatgggtcccactagttattactttgctattttttcaaccatttatctttatttcacaaatgccatattttccaattttaatcctataaatgccaaaattatttatttaataattatagttaattatcaaataaaattgtcatttatattatttattaattagaccccacaaagtctcttaattaataaataaaccctaaaacctaactttttcacaattaagtcattgtttagtgaaaattcataaacaagatatagtctaattttagaattnnnnnnnattaattaaaaccaattaactgaagtttacaagtagcattgtttcaactagtgtggggccatgggcctatataatcaagcttccaatagatttataattacactcttaattatatagaatactctatatgttccatgatatagatacactatgaattatctattgttataatcctaataattaatgatcctttatagatgatctgcatagaatagggacaaatataccgttacacccttcaatgtatnnnntccttaaaatatttagctacctataaataatatttc

SEQ ID NO: 126942 - DNA, 895 bp, Cannabis sativa
  modified_base (826)..(834): a, c, t, g, unknown or other
ggatcaccctaatggtggtgacttgcattttccaaaaagcaattacactttcaaaaaaaaaatataacaattaattagctttctttattcttgaaataggcgtaaaggtaaaagcttaaccctagttatgttttccctttcatctctctcccctatatttttgctcaaaggcggcacagagacaccagccacaatcgcaaggcaacgacagatcgacattcaagatgagctcacggcaagggggcgtcggcactgttcaaggctttcttggtcgagcacaacagaaagattggcccagatgatggttgggtcttcggcgggcgttatacgacttcaatggagcaggaagctgaggtttttgccccaaaaataatcaggtacccgcttcctctttttcttcatcttctttttctgattctttttcaaatagattttacttttctcttctcaactttcattttattactgtgtttaaaatagaactctgttatatggtgttctctctctcttgttgaatctatgtctaattttttctctacagatgatggaggatccgtattgattcggactcaaaaatggacgggtttcagttagtcagggaaggagattaaaacttgaattaatgggactaagtttttttttttttttgattttttattcaaatgctcatacccataattttaggtttacattgttgtattttcttttaaacaattacgtattctttttgctggttttgtatttgtgtttgttcatgtggtgtgaaaatcttctgagtattttaattatgtaatctttaaaaataatatcaatcaatatatatatnnnnnnnnntatatataaaggaaagcattaaggagttgaggtggcaatttgtatgagtttttcaccctct

SEQ ID NO: 126943 - DNA, 702 bp, Cannabis sativa
ctctgggttcaggttcacttcatcccttttgggtccagatcctatggtctggctcaatttgttgccgatgccattggtgacctcatagaggtccacctcatctccctttatgactctgtcaccccttttatgcgagttcgtgttcttttggacactacgaagcccctccaccgtggaatgaatgttcgttttaggaagctttcccttaccaaatggctcaaattcctttacgagggaattcagaactattgctaccattgtggcaaacttgatcacactttcaacaagtgtgacaagtttcttcaccactgtgaccacaacccttttccccctagtttaagctacaaggacgtccttagagcccctgccaaatccatctataagaagagtatcttcgaattgtccaactccattccctttgaggaacagccatccctaaccaacctcgaccaccataactcccaggaccaaactaacacttttcttgtgaccaccactctccctgccactgttgcaaccactaccttcactcactgcaccaccgatcccaaccccaacgttactcacccccaccaacctcaaacgttcaataccaccatccactgcagccttccaaatctgcccatcatgaccaccaccaccctcccaaccacttccaaaggcaaggcaccaatgtacccacaaccatcccaggtttctctg

SEQ ID NO: 126944 - DNA, 1402 bp, Cannabis sativa
taatggggaagatgcagtggctgctgaagtctttgcttggtacattgctttgcagtgggctaaaagcaacaactaggacgatgtggttatcatctcagactcctcggtggtattgagtgctttcaagaatgagaaacatcccaactggcattgtatctcttggttctccactgctttaaagataaagaaaagtctcactgatgtaacaatgcaacacactaatcgcacttatttagcttttgtcgatagtctagctaagagtgctcgcttatctgagagcgattttccttgctgtaaaggggagggatttccccctgtggatcctattttctcagtagttaatgaagtttgaactgaggttcttttttttaaaaaaaaaaagttataaatatttattgtgtataatatacttaattttatttaaacaaaaacttaatcagactttttattttttattttgagcctcaaaaaagtatagacttaattatacccctacctagcttatatctagggtcagctctgaatatataatattttgaacttattacctcttttatgtggataaaatttgtaagataaattaatgctatttaaaattttcacctctaaaattatattaccattactaatttgtacttcttgattatttttttgttcgtttttttaattatttaccctagtaattaaatatagaatttttgttatatttacatatagtaaaaaaatattagtgtaattggtgtatcattgatgtgaataactttaatatattaatatattaatatattaattatttccccaatagagtaatggaatattaatattcattatatattttttctaatatacacaaatttttattatatttttccttgcagcgtcaaataaaaaattagttatatatatattaatgattaataacaactagcatttgttcttatctttttcttgacaacatgtgtatatttatttttattaatttttggatataataatgtccatatatatcctaggtaggaccctaattgtatatataatatacaaattcatgtatatacttttccaacttgacaaaaaaaagaaaataatcatatatttttactaaggaattaaaaatatttttcatttggaatacttgtaacatgcaaaccattatttagttacgtacatagctcaaaagatgcttagtgacgtcactcttaatttttgtgttgactgatttgacgtaagaaaatcttttagtttggccagaaaaattcatagatagaaaaaaaaaagggaaagaggacagaaattacatagaaagcccataaatatatattaaagtatatactatcttatttttaattttttattaaattaaaataaataagattccatattaaattagactaataataat

SEQ ID NO: 126945 - DNA, 828 bp, Cannabis sativa
taattattgggtttatttgttaacgggagatcaaacaagaaataccaaatttattattaattgtaacagtttaggtggattaattatatttaggtttaagtaactattgttattttttttattattaattgcaatactttaggtgaattaatatttaataatttgttatttttttattattttttatatagaatagatatatatttttttcattttagagggccacgtacatgtatcatatttatttttttcttaaaaaatacattaaatataaagttgtctccctaactccgtcaactcttaataatatatcatataagtacgacataatcatataataaacctcggaagtgaattaaattattagaaagaaaagaaacatatgtttttgttaatcacaataaaaagacctccaattttatggtaaatactgttaaaaatttatatagtagagtaaatttcttaaaaaattactctagtagattcttttctgttttggtatctaaagaaaaaaattgtctaattgattttatgattgcgtacgtagtattatttataattctttttagaaaattctaaattatttacaatgctatgaaaaaaatttataagatcaaaaaaaaaaagtttcaacagttacttattatggtagtaagagaaaatagttgtgcgcacaataaaaaatttacatgtaatcttaaataattatgatatacacgatcttaataaaaaattagactaattttttttttgaaatttttacatgaaaaatctattttacacaatttattacacaattactcatacacgcctatgtctacattttta

SEQ ID NO: 126946 - DNA, 1585 bp, Cannabis sativa
  modified_base (210)..(210): a, c, t, g, unknown or other
ttttttttaattttaccgtaaacttatacatacatcacatatcactataattttacctttttttttttttttcaaattttaatataatttattaatatttacatatatcactatataaaaaataaaattaaaatctcaaataaataataaaaaagtaaattacggcataaatacttaagtttaacttttagttataaataaatacttaantttaatttttagcggtaataatatctaaattatatttttaaaattctgtaggtacttaactattaaataataagtcattatccacttatcattttcttatttgtatatttaaattaattttttagaaaaataaaaatttaatgacttggaccaatcaggaattaccacatgacaatttatttaacacttacctacaaaggttccagaattgtaacttaagtattattagaactgtgagataaacttaaatatttatactgcaaattacttttaataaaatatatttagaacaatgaataatattctataaatgtatagtaagagttgtaatttaaagaaattttaaaataaagaaaaatttagaacaagcttattttaatttagttttgtaaatattttaaaaattctaaactttaaataaaattactcatcacaaatttagcgttgaatagaataattaataaatgtaagagcattttcttctgattttttttctttcaatttattagtattaatactattattgttttaaaagaagccttttcctttgttacaaaggtttattaggtgcttttaaaaagttattaaaaagaagcccctttattcaatccgatccgagagaagcagctcttacgaatgacaactaataagtaataacaacctttgttctccaatatctttacttttttcatacaatgttattttaataataataattacagtacgaggttttttcttgagatttatatagaacgagagaaagaaagacaaatgtttctaaaaaaaatattggtgtcggttgagacttgagttgggttgggttatgtgaacgtgattagattaaagagtaaagagattagagattaataagaaagattatcaagtaaacaagattagtaccaaatgtatggacaaaaagctttagtgattagtgaacaggacatgattagttgtcaactgacacacccattacctcatctcattaaactattcactatctactccattattaattctctctctcctccacacaaataaaaaggaaactattaatatatatatttgggtaggcgtaatttctatttgggttctttttaaattattattattattatttcgtgggttatatataaagatatgatgtataattagaagtagtaatttgatttgttttcctttttttttttgtttggaatatgtttttggaatcgtgctagtcattgtagttcatatataataatatatcatcaagataaggtcatattttgtttgattaaatatatgttctacagaactagagaaagtaaataattaggggagttttatttacacccacaaaatgataagtacaccttattattaaaaaaaatataaa

SEQ ID NO: 126947 - DNA, 1021 bp, Cannabis sativa
tttgttcaattagctggccaaaatcattgcctccatagacactcacggttcaattttttttttttttaaaaaatctggcttgatgatcctgaggccacgaagttgattcaacttaatttgaagaaacaccttactagttcagcaatagaaaatttctgcaataatattcaagcttgcaagagctctgttcaaaagtggcataatcagaaatatggcaacatgaaacaaaagatctgaaaggctacaaatgcactatctaatctaaacaatattgttgttagattagatgctacaatggctgagctgaaaaaaaaatgaggacattttggacgaactactagcacaggaagagacttattggcaacaaaggtcaagggtaaattggttacaaagtggtgatgaaaatacaaaattattttatgcttatgcctcttctagaaagtcaaataacaccattaactccttacaaaatcgatcgggtgttgaagcaacttcaaaggaagaaatgactgagattatttattcttattttggtgatttctaactcaaaatcacctcatattcaacaagtaaactacgaaactagtaccataagtacccaaaaatagttttatgaagtcataatccccataactactctaaatcacaaagtcaatatataaaaccaatcattttcaacttaaaacgaaatcaatccttaccttaaactttcattcttcaatgatttaccatcccactactaccggagcttgaattactaggttcgagttgaaaattaaagaaaattaattaagagaaaaagggtttcgtcgcaccataaaagagagttttgttcatttttctgtttacgtttttaaaataaaacttaatatatattctcataaagtttaaaaaataaattttattattaataatattaatattatatatattaataataattattttattatttcttatccacttaaaaatctctacttctaggacactatctgttgcgaatattttaccaggatctaga

SEQ ID NO: 126948 - DNA, 627 bp, Cannabis sativa
  modified_base (561)..(582): a, c, t, g, unknown or other
attaaaaagtaaaaaaagatatttgctttattattttaaaaaaatgacattaactatctatagagttagaaatagggtcatttacttacatttctcaatattttaactttcatattttagcatttctatatatgttaaatattaaagctaggtaaacaatgtagtacttactcttaaaaaaaaaatagtttttggatacacatcttatttattttaatattcaggagagttttttattcatctatttttttatgatcatataagttgtaattatttataatcacatataatttttctataaaattttaaagagtttatagtgtcgaaaatagaattaaaaattatttaccctacatgtattagaaaaactaatcacatataataaaatatttaaatattacttttagcattataaattattcaaaaaatttaaaaaaatttcaaatagtcttaaatatttataatttatacgtccataaaataaataattggactaaaaactcttcggcataatattgtaatagatatggtggtatattatgggaaatttacaaaaatacnnnnnnnnnnnnnnnnnnnnnnaaaaatactgtcacacggaaatattttcaaaaatactgtgttttt

SEQ ID NO: 126949 - DNA, 1033 bp, Cannabis sativa
tctaatttaataagtgcttaagaaatagtaaatgcagtaataatgaagacaaggatttttacgtagtccaggcgttaatgagccttagtccacgagtcagtttattaaccttaagaagcttgtataatacttttacaatagtatttgcaagaaaccctaactctaccctcttggtttctctagaaaaagaagaaaacttagagaaaatttaggagaggttcgactatcttgtttttcgaccccccattttttatgaaaatcaaggggtatttatagactaaagtgcgagtatggacacacctaagactcgcctagggttttcgcaataagcccactattggagtaaaaatacatgtaataatctcactattggccgccttcactaaactgtttttgaatacctatgggactagttttgatgtttacttgttgaatttgagtaagaagccgagttttgaactttttaaagcttaagtctgaatattaatggtgtatactgtttaaggactcaattttaattgttacgtaaggattgttatgtttatgatatatatgtgccctataaagtttagaatgatttagataggttttggtggtgtttagaagagtgcaaaatttgggattttttacccctgctacgaaacggtccgtgatttggtgcaaacggttaaccatttcgtgttaggaaacggttaactgttttacaaaacagtttgagtttctggaaattataggaaaatcgaaaatcgtatttttgtcataacttttcacttgggtgtccgttttagatgttctatataccatttcaaagattgagacaagctttagaatatggtgtatattttagagccaaaatataagttttacttgacagtaattttaccgcagggtttggtagaaaatcctagattatcttatgcaaaattaaccattattttgggatagacactgattggtttactgttgttacaacatagggcacgggatcgtcgatcgtactccaagcaagtcgaccagcatactgttggatttt

SEQ ID NO: 126950 - DNA, 720 bp, Cannabis sativa
aaaaaaaaaaaaaaattgcaatacaggtataaatataatttcagatttaaaattctgaaaactggctgatcttttagcgaaataatgctacaatgatgttctaacaatgtttttgcgatacttaacgatgatgtcctcacctattcttcggataggaagtggattttttttttcttaaagaaagtggaaatcttttgatattctaaaatcatatgaaaagtctaaaatcgttttaaattgttttctatcctctaaaactactgccaacaccctttgaaaattcatcaaatcattgtgccacttctgttaacaccgttattgaaactcagattattttcagatcagaagaaatacacacatgttgataatcatcatcatggcctaactgagaataacaacagtacactgtacatgtacataatctttcttgccaaatgaaagaaatgtcaagaaataattattaaaaataagaattaattttactaaaaaaaaataagaattaattgactagaagaaatagtctaaatatttaggccatggttagcataaaaacaaaggagaagaaagaaacaaaacaataattaggtcccaacaaaaaaaaaaaaaacaataattgggcccattacaaaaaaaagggaaatttacaaaaatactggaatttggattaacttttacaaaaatactgtcacatggaaatttttttaaaaataatatttttat

SEQ ID NO: 126951 - DNA, 924 bp, Cannabis sativa
gaggaaacactttaccagtccacaacagatggaaagaagtttgttgattgtttgaaggatgagaatattgtccctgggatcaaagttgataaggtgtgatgttgtttccacttttattgatttttatgtgaatatcccctttgttgttatgttaatgttcttagttttattgcattgtttgtgtttcagggtttggttccattgccagggtcgaacaatgagtcttggtgccaaggtttagatgggttggcttcaagatctgctgagtactacaagcagggtgctcgatttgctaaatggtaagtcattttaagtgtattctatatgtgtgagtagcttatattcaaacagcaaagaagtttatgcctttgtcttttttgttgttgttaaataggcgaaccgttgttagcattccttgtggtccttctgctctagctgtgaaggaagctgcttggggactcgcccgctatgctgctatttctcaggtaaataaaatctcttgtttaacttttgctcagaatttctgcaagcttgatcgagctataacatttttgttatctcgtcgatacaggacaatggtcttgtgcccattgttgagcctgagattcttctcgacggtgaccacccaattgagaggaccttagaagtggctgagaaggtctggtctgaagttttcttctacttggcccaaaacaacgttgtctttgaaggaattcttcttaagcccagcatggttacccccggtgctgagcacaagaataaggctgaccccgagacaatcgccaaatacactctcacaatgcttaagaggagagttcctccagctgttccaggaatcatggtaagccaaatttcgtataaatattcaatgcaaatttattgtatgtttggcatcataactaaaaaattattttttgaaaacaa

SEQ ID NO: 126952 - DNA, 675 bp, Cannabis sativa
acaaaaaccacacacaagaaaactaatatttacgtggcttgccacgtaactctatctagtatatagttagatatatatttgattaaatgttgtattcgatattttttttttttgattaaatgttgtattcgatttgagaagtactattcagaaggtcggactaatggtaggttgtataagagatactaaataagaaaaatatattatgtttggttaaaattttgtattaaattaattattaggtaccagaaattttaatataatacaaaaattatattataaaattatttgtattaatttgtattgtaatatttatatacactattatcctactagttcacagtagtctttgtgtatggtgctagaagataaggtatgagttttgttatcaccgtgtcaagaaaacaacatacaaaaagaatcgagaatatcctgataggcttcgagaggtaactgttcttttacctacctacctacctaatttagtaccataaaactaaaaattggtaccagagcagttctattatttatatatatattaaatgttgtgtgagtttttatgtatttagatatgggagctaatacaataggtattgtgatttttacctatcaatagggatagtaatttatagcctttgatttaattaaatggctcaaattaacccttgaaaacta

SEQ ID NO: 126953 - DNA, 558 bp, Cannabis sativa
  modified_base (514)..(514): a, c, t, g, unknown or other
aaaaaaaaaaaaaaagagaaataacatactgaaaatattttttttattattattttacatactaaaagtattttttttatttatattggaaagttaatttaggctataataaggcattaatatactaattgttttctttttaatattatctcttatatattttttgttacggtaattatctattttttttttatagtaatttctgttttctttaccttcaaacatatttaaaaatttaattagttataataaaatataaatataacttattattgtttgtttctaaaaaaataaaataggtctaatttattcttttattttaaagtaactcattttatttggtttctttaattttaagtaacaagtgaattgacctattgaattttattttttaaaaaaaagttaattaatgttttttttgacaaaataaaaaatgaaactaaaagtttataattttaattacaaacatctaattcaattcagtgatgatcttgttgggttttatgtcctaaanaaaactctatttcaatgtaatcaagattattcaatatcaataaa

SEQ ID NO: 126954 - DNA, 1184 bp, Cannabis sativa
tagtagttttacacatttcttcgcaaataagaggtctcaaagctaaattaaaaaaataaaacattttttttctaagaaaaaataattaaatggtattgtattgttataagtaactaagatattacttttgaaaacccaaaaacatagaaaactaggaaaccaaccgcgcttcgcgtgcggttgtgtttgagatattaattaatttttttttaataatatgagtaactattctactaaatttttttatattttttttactcaaaaaaataaagtaaatatggtaaaaaaatccataacaactgaaaaagaaaatagataaatctatagaaaactgatcatatgatttcaaaattgttgtcatcaccatcttgtagttgccactacattcaaaatttttgttatcaccgtatctcacttatagttgtcattatattcacagtcactgttgtcataccgtgtcgcaccactatatttaaacccgttaatttttttgtcgtatctcacttacgcatccaatttaacataaataattaagaaagtaaagtctacttaagaaattagattgcaagtgaaacaatagttgggagggtttaaccgccaaatataaaagctatggaggttgtttaattaagtttaggtttgtaaatatttttgtattttcttttaaatttaaataattattaattgtgagaattaaggtttaaaaagatagaataatttgtttgttataataaaaaaaaatatttttaaggtatttaaaatatttagtgttttttatatttatatattaaatattataagaaaaaaaaatatttcatatatataatacgctaataaaaaaaagttaaaattacatacctacaaaataaatagtcttttgagtttgtgtgagttactgcttttagtttcacaatgtttttttatgtagattgagcaaaataaaatatcatgcatttatcaattagatatttcattgaaatattttgtgtttcattagtatcatacatggtaagactttataagatcacattcatagctttttttaactaaaactgagcatttattatacacataatgaaaagaaaaaatcaaatactaaaggtatttttagaagtaactgtgtaattactagggtagtaattacacagtttagtaaatacactatattttaaaatgcaaggtgt

SEQ ID NO: 126955 - DNA, 2029 bp, Cannabis sativa
ataaagtaactaacgtttttctaataaaaatgataatttactataatgacactcatatatactcatatacttaactttaagagtaaaatagtcattttctaaatttctcacttaaacatttactttctaattgtccataaaaattcttggcacacctataaaatactaaattataccactttgacaatttatcaaatccatcgatcattattgccaaatgataaacataataaatacatattatatacatacgacgcacacaattcaataaaatatcgataattgagtaataagattatatttttctatttttttaataataggtctttatttctaaatgcacatattattttataatttaatataatattaattaattactaatttttcatgtctatgcaattgttacaattgtattttaagttaaataattaaaactataaaatatatgtatcatcctaaattaattataaattaaaatataaaatatttaatacaaataataagtgaatatttttttattataagaattagaataattagtggatttacctcctcacttttgtcactagtattagtttgctctctcattttttatatggcattgtttttcccttatatgaaaaaattagtattattttacctctcgctttaacattgtttaaattaaacatcaaattaatatttttatggacataataatctcttactatagttattctcttaaccattttgtaacctataacaaaaaaaaaaataacgaccaacgaatgtatgaacgaaaaggtaaaaaagagaacaccacactgttatagtagtttattccccgtgacacaatagtaatggagctacgtcaacatagagcttttattatcacaaaatctaatttccttataagagaactcaggacaaaatgattaagtctagcttcacttcacaatttatatagagaaagtgtgaagagagaaaaactctgacaaatgtgtgaaaagagacacactaggtgtcaaaattgtggcaacggtttgagacacacttaaactcgtcttgaaaagagctttcatatgcaactttaatcgcatcaagggagctaatcttgctcaagttcaaaacatgggatcatccaatggcaggggtcagtcttcctcatgaggaaactatcatggtcatggtcaaccttcaaatctaggcaatacaattggtccctcttgtggtgcttcaaatggacgtggtcgaggaaatcgtcttgtgtgtcaactctgtggcaagattgggcatctcgcttacatatgttacacagatatgaccctgaacctacaaatctaacttcagacctagtttctaacaataataatccccaagttctgctgtctaattccactctctcaattaatgataatgactggtatgttgatagtggagccacacatcatatgacttcggacatgcagcagcttttaacaactacagattacaaaggcaaagccaaaatcacagttggtaatggatctactccctatccctaaaatttgttccacttcaattccaacaaatgtttttaataattctttagtcttaaaagacattctttatgtccctgcaattacaaaaattttgttaagcatttcaaaaatcacaacaaataataacataacatttcttttttgattctgattcatgtcttatcaaggacaagactatgggccaagtacttctacggagtactcttaaagggtcgtataacttggatctctttaaagtcttgcctgatactactacttctgcaaattctcaatttcttagcacacccggagctttcaattgcaccaagaacacacaaactgctaccaataactctaggctttgacattggagacttggtcacccctcatctagagtcctaaaaattgttgtagttaggcttagtcctcaaataaaattttttgacatttctttttttgaagcttatcaaattggcaaacttcataatatgtcttttccaagttctataccaaagacaaattctatt

SEQ ID NO: 126956 - DNA, 975 bp, Cannabis sativa
attcttggatagaggttctactatagtataaatagtactccgagctcaatttttttttaatttttttaaacataaccaacataatgtaagtttctagtacaaagagatgtaaataatgtaattagtttagttatagatacctctaagtaagttattattgagctttattttcatgaaaattgaattcataatactataagtatttattacaattttaaatatataaaatcttatttattatttaacaaaataaatttaatttggtaatgcttataaaaacacaagatcaaaataagatttattgtattttaaatatacattatcattacatcatattaaattgagagtgcatttaatttaatacttcatccgcatcaacagtgagtgttacacagtttctaattgattattctattctattattttattttcccccttcaaatacggaattatcatgaactattttgtgactattaaattattaatcattaccaattttttacacttcagaaattatttatgttttttttccttttatatgcaaactcatagatagagctaaatagtaagtacatcgaattgtacacttgcatatttaagatccatcaatatttaatacactttctcttttttttttggtaagaattatgcaatttagttagtttgaaattttaaaagagaacaaacttcattagagcacacccatcagctttttaattctattttttaaaatattttattaaaatcatactttctctaatttacatcacaccatacatcaatttttttcttctttctctatattatttaaatataatattttaaaagtaattttagttatatataagtaaattaaccatattaaaaaaaatatacaaaataaaaatataattacacaattctatacaattttataaatatttataaataatcaacatattcacattatataataaaaataaacataaatattta

SEQ ID NO: 126957 - DNA, 921 bp, Cannabis sativa
aaaaaaatcgtcagaattggcattgtcgtcggaaaaattatcagaattggcaaattgttcacaagaaggtaaaatattgggcactgacctccatggaaacttcttcacctttggggggatttttaaagtccataaccgttgccaaaaccctgtatcatcctctgaagcccgactaatgttcaacccgtcgagatatctatacacacttttcatagtatagagactcaaaccctcaaaaaaccaataccatggatcatcatgcacaaaggaagacaactgaatagagaatataagctcatgatctcgttcttcaaacaaatcacgcaccacctccgtatcccaagcacgagaatccataaaaaacagagaggccacttttgtatcccacaacccagagtgagatgaaataaaaggttagttgcatccgggagccaagggtggtgaagcacatcaatattcaaaccggccccaacacttcgacgtgcacctacaagcacaaggggttgagcctccaaaatacttcttcaaacaaaacttggatttagcgcctaatttagcattaagaaaagaaccttgaggatagtagcgcgctttaaacatacagcctactaatgaattcaggtgggtaaccagcctccagccttgcttacccaaaagggcaagattaaagtctctaatgctacgaaaacccaagccacccgcatatttgtgtttacataagcgcttccaactcatccaatggatccttttagagttagactttcctgtttgccactagtattttgccatcaatcgctccaactccttgcatgtttcaataggcagcaagaaaacactcatagtataatttggcgaagcttgagcaacagtcttcaacaaaacttctttccctgcacgagacagtgttggaaattattttac

SEQ ID NO: 126958 - DNA, 693 bp, Cannabis sativa
ttctaaatattggggtccacaattaaataaattcataaataaaaactaacagaagttagtgctaattgcctttactaattcaaattactaaagcggtcattacatgatgctacaagaccttaaaaattgacccacataaggggcgattgatctaactttagattcaatcaattcagcctcaaatgtaacattggggtttgtaggaaatttggactttcgatttttaggatccataatgtcaaattcaagatcacctggttgaaaagcaacagtgacttgaggtaaaaataatggtcttgctaaggagatttttactaaactgggtaattcagtccatgctgcttctcatagattacgatgtctaccctcaataatttcttatatatgtctcttatagcaagttgatgtttcttcttgactagctctaagggagtgtttcttaatattttcatcatttatctgaagtatggattgtgttctatgggtctgaccaatgcttggaattggggattatcaaactctacaaggtctgggtgttcataatcttgatcagaatggggcattgtcttgattactgttaggttatatttagcctatgtttcgggtctgaaaagtaagtattttctcgtctattggtgtcttttggagcggttttacgcttgatttttattgtttcaagttcccggggtatca

SEQ ID NO: 126959 - DNA, 1532 bp, Cannabis sativa
aaaatccataataacatccataatcaaaactaaaacagaaattaacatagtaattaagagtttaagaaagaactagttggtaattgcattttggatcgcaaaaattgcttcctctgcctccttcttttacttttgggtccaatttctgcctcctcttgcctctaaaatatgcaacccttatataggaattagggtttctaactcaaaatggtgaaagtaaaaaactggccaaaaatcccgtgttttgcccctggtcgcgactacataaagcctagtcgcgaccacatgcaaaatacaaaaataagctcgctgcctggcctcgtagtcgcgaccatgaaaaagggtcgcgaccatagaaaatggtggtcgcgactactgaagcaaatttgacagcttcaacatatttctgtaaaatatgcataactttcacatacaactccagatgagttaattcaagatgcgttggaaagaagaaaaagaaatctaaaacttctatgttttgaatttttccaaaatctgatcaaaatatagtcaaatttaggcttgaagtttcagctttattttcttgcagaattttctctattctatagattgttgttttctgaaattggatcaatttatacattccaagtgtgaaacctgaaaccaaagaaaacaagcgtaattccattccaaatataataacaaagaagggaaaacaactataaaaagcgacccaaaacataggctaaaaatagcctaacactactcaagactctggtagggaaagttctaacactactggtgctgataagagatctccgattgacctctgttctgaatttgagttcagacttaatggagaaatttcatgatcaaggctcctaggttcttgcacatagtgatgccttgattggtgccaaggctgagaacatcccgttgtagcagttggtcagcaccaactatctgcacatcattgttcaaagatgtttcaccgacatcttaggggaaactattttgtcttatctctttcttccttaacttttttttattttatcatcactggacactattttcttatctttaagcttgtgttggttatacctaaaccaaggataatgaaaacaagaaggtggttaagcttgctgagaagctagagattgtagaagatcgtgttgtcactgcggaagaccaggtgactaatttaaaggagaagattgagtctcttgagagtgaaatgtctaaactctgagatgtggctaatggtgccaagatttgagagagtaaactaaagaagaacttggtagctgctcggaagaagagttttggtcttaaataatcttctcgtcatgcagtggatgagcaaactactgtggctgctgatctgagagaccaagtgttatacctaaaattcagctatactcaagaagctaacatgtgtcttaccaaaaggaatatgagttctgtaaaaaaggaaattgcttaattttttctaaactatccaataaaattaattctagaaacgaaaattcaattatttttcataaaaaatt

SEQ ID NO: 126960 - DNA, 1285 bp, Cannabis sativa
  modified_base (1198)..(1210): a, c, t, g, unknown or other
tattccatattagttcctttgcatgaagaaaataaaagtatatctcgagtcttagctaaataatatccttaacttgtaacaatgccaaaatattatattgtgtaactaaagcaacttttaacttattttagagaaatagccactatactttaataattatcactactcacactttataaaaaaaataaataagacgattattttaacacgattattacctcaataaattttgaatacaaattttaatctggatattacatggctacccacacttctctgcatggctggtggagtttgtgcgttgacatagggtagatcacaccaattgttgaagttttgtggatccaaatgtctaaagtgatttatttcacttcttaaattgctgttttgggtgtttgcaaccgcttcctttccttgtcgattgaaaattgatctttgggtgactggctcccctcgaggaggaagtgctcctctctggctggccatagggacttctggaggtgtatggcttgccatgggacttatttaggtggatagaccgccatagggagtcctactggtgactgtccaaccacagggactcctactgatggctggctggccacaggatggatagggggctgttactgagtttgagatccctggtcggccccccacgccattagttgtcgggatctggctgttctcaccattagacctttgaggcaaggtttgtccttcctctagcaagggaagatctatcctagtccttgaggggccaggttggtcagcttaacgatagaccctctctgatctatcaactagtcttccttgaagtggatctcgttctgtcctcttacatcgcttctctggttgaaccaccttatcagatcattggcctttctattgtggtgatttaactctgcctagtgagatcgaatgatgtagtcttggtcacccatccatctcaggaattcgcgtctctattgagcgaatacatcgcaatcagcagtgtgtgtttctttaaggaatttgcatctctgctaagcgaatacattgcaatcagtagtgcatggttcttcaattaggccgacttggcagatggcctctctaagtctgactaactcgagatcttctcccatgtccacgtgaggctggccaatttttggtctcgtctctcctacatagtagtggggacgatgttgggttttatgccctnnnnnnnnnnnnnttcaatataatcaaatttacttatcaatatagatcagaaataacatttaatgttgcatggtttacatgatttatt

SEQ ID NO: 126961 - DNA, 2164 bp, Cannabis sativa
tgaaccatgcaacataaaagaaatttctgatcttatattaattaataaatcttattatattgaaataggtattatttagggcacaaaatccaacatatattgcatcgcctatctggacgagcctatgctaaagcctggcactaaggtagtgcatcgcctaatcaaacgagcttgtggcatagccagacactcacatgtcactgccgcatgtgcctaaacaagcatcattgacatgaatgcatcacctaaatagacgagctcgtgccatagcttgccactcacatgtcactgccgcccgtgcctaaacaagcatcgctgataggaggaaacctaataataattttagtttaaagtcatgactttatcacaatggcctcacaagaacaacccaaatatcggtatccacatatcacatttcctactcaggtaaattcgtgcaatagcctgacgttcatatatttcattacataatcaggcaagcctatggtctaggttgacatccatatgccacattgcctaatcaggaaagctcatgtcatagtctggcattcacatattgcattgctaatcaggcaagcctatggtctagcttggaatccagatgccgcattgcctaatcaggcaagctcatgtcatggtctggcattcatatactgtattgcctaatcaggcaagcctatgccatagcgtagcatccatatatcacatcacctaatcaggtgagcttgtatatcacattgcctaatcaggcaatcctatgccataacttggcacccatatatcacatcacctaatcaagtgagcttgtatatcacattcacattatcattgcctaattagacaatcgacagtcatgaaacttgttatgccatgttgtacattatacttttcttacctcaagttttagttcaggtatgttggccgaccttcttggagaacgatcgataatcccgagccctatatcataattatggtaaaccaataattgtcaatcctaaaatactgcttaatattcgcataagacaatctaggattttttaccaaataccgcagtataaatacactaaaataaaacttacattttggctctaaagtatacactatattatagagctcattgtaagcttcaaaacggtatatagaacatccaaaacaagcactcgagtaaaaagttatgataaaaatacaatttatgatcttcttaaaatttccaaaaacggcagaccgttttggtaaaaacagccgactgttttctggcatgaaaattccaaatttcacactcttcgaaacactaccaaaaattatccatatcattctaaatttcacaagacacatatataccatatatataacaatccttatgtaagagaaattagaatcgagcccttaaacagaaaacgccattaaagcttggacttaaactttaaaatttctaaactcgattcctaactcacaatcacctcaaattcaacaagtaaatatcaaaactattcctatagctaccaaagaataattttatgaagtcagaatctccataactactttaaatcacaaagtcactgtataaaactaattattttcaaattaaaacgaaaccaacactacaataaaaaggggtttttgcatcggtcaatgcatctggtcaaacttattaaataacgcaaaagtcaacccacacttttttgcctcagttatccactgacataaataattattaattagcgtcaattatatatccaacactaaaataaaaactgaagcaaaagatgaaatataaaaaaaaatatatatatatatatacactattaccgttggtctacaaccaacgtaaaaagtcattatatacactattggcatcggtgctcaaccgacacaaaaaggcattaaaaaatttagttatgggcttcagcccatttttttaaaaaatcttaccctaaaatataaaactaacttctaaccctaattttcttctcaaccgtccctctctcatttatctctctctaacctaattccctttcttcacccatcatcaccttcatcttcttcccatttttctcaacccaacccaaagcacgaatctctcaaactctaactctctctttctcatttttttgctggtggcattggagctcatcgtcggccatcatggagcacgggaccatct

SEQ ID NO: 126962 - DNA, 645 bp, Cannabis sativa
atttttaagagtaccaaacaaagcttttcattcaatttcaatgatggtaataataactagagaggtgtcattaggagagggtccggggcttataaatagaggaaacattaaaacagcctgactgaatcaattacaatttttatggctagttaggtgaaagtaatatcagtaggtaccaaatataccaaatcctaataacaaaatttcatgtaaagatagagattaatgggtgtaagtagttagtagtgggagtagactagtagtagtagtctttgcttagttactatatagtactatatgggacctactaccagtacatttgtatctatatatatagatttatagtaattatgatttttggctcttgaatttggacatctatcaaattatgtctcttgaatttttatggtcgttaagaattactttaattattgagattattgaatttatagacttttgtctaattttaataaagaaagtctaacatgcataaaagttacatgattctgtaaattcgaggggtataatttgataaatattaaatattagggagcaatttagcacgtaaacaatcattaaactagtaaaattgaataaaatttgacaaaaattattaaatccaacaagggaaatttgattttttat

SEQ ID NO: 126963 - DNA, 562 bp, Cannabis sativa
tcatgttcattagtttttaatgctcttgtcttacatgctggcatgtaggacatctaatcatgaatccaatttcaaccttctgcatacttatccatcccttacataatcattgtaccattttacaattgactcgagatgcatctagtatggtgtagtttgtgcttctgtcattctcttgatcttaagttattgcagtacattttctccttgccttcgtgcagcaacactaacatagttgctttctcagttacaaattttggtcatatcttttgtttcatacgctctttgaggtttgtcaaagtgtaggctactacatattaggccaagaaatctttcagtctcttttaggtctttatgcaccgataactcttgaatactatcattgcttgtaggatcaagtacaagttcagtattaagaaataggcattttttgaaagccagctctttgaaccaatagttttgatctctgaatccttaggttcaatcgagtctcagtttagtgtcgtatttaggaattcttaacatccttccactagttggagtacgaaaaatataaacagtt

SEQ ID NO: 126964 - DNA, 543 bp, Cannabis sativa
ttttttttaaaaaaaagaatatttatgtagttagatgtcttgttcttgaaaatgtaacaataaaagatgataaaaaagtttaatttaattgcatactttattatgattttaggattttttggttacagaccctaaaatcaattatatagacttttttttaatatttaattttttattttattaatacttatgtgtagtgtatattgcaatgcactttaatatctgggtgatttttgatttgatttagtataatgtaatagcaattatagtggcaatggtaatgtagtgaaataaaaatggttataaaaattcattaaaatatttgatttattattggaatgaatattgaaataagtgataaacttgtaaaattatttttgtattactttatatatttatattgagagtagtattaaagtcattttaattttactagtttttgtgatgtaattcttctattatagttaaaaggctaattagtaatttttcccctcgaactttgacacgtactaaattatgccccctgaacttttttggctgtta

SEQ ID NO: 126965 - DNA, 847 bp, Cannabis sativa
ctagggccagccccaggtgttaacatggtcactgggccctgttgtttataccttagaattgttattttgttgaactttctgggcccagcccctggtgtcaacctgggcgctggatcccccttttacccctccataaattccatttggtcctcaaaaatagttgaattttagtattttctgaaaatggagaagatgcttaaaagaattcctgaaaagctccatttgaaatggcccaggttgataaaatgtcagcctgggcgcagagccaaccctacgtattaacttgggcgctgggtcctatttttagtacccaagaattgttgtttttcctccaagatgacctatttcccaatttttaatgaagagaaagaacatgtaaaagttggatctgcgatctgatactttgaaggctcctagattgactgattgtcaacctaggcgctgggtgctcggggccttggggcccgggtgatcaaaaatcaacttgcttcaaatcttactccgatgccttaaatatgttggtggtatgtctttttgatgtcccaatgcatgttttacccttttacactaaaatggttttggaaactaaaaccctagttgaggatgtcaacttgggctctgggtggaaccctaggtgcccaggttggctttcgggttgtaggtttgtgtaatttcatctttgaaggcttggattaggttgcttcatgtcttcatggtacaaaataacgaaagataatgggttaaattcaatttattgaagtttgaacttccatcccgaagatcctaaagtcaacctaggcatagagctagggtcgcctcctaagtcgactgttgtgacttgggtcta

SEQ ID NO: 126966 - DNA, 3179 bp, Cannabis sativa
taaacaacaggatttgttatagagcttcgccccccttgtgataacgggtaataacctactccccttttagttgtattatactgagggaattactatccatatcgctataggtgagatctgttatagtaccctttaggattacaatgtatgaatcggtgtttggcagaactcaagtgttggacagtgcctagggtgtgcagcctaggcttgggcttgtgaaagagagtgaggaagagagagagtgtgtggcacttagagagtttgagatttctagcgtagaggaggattaggcaacttattaggttttcagctagaggttaaggcctttatataggaggcctaaaccctagggttacaactcaaatcccttaaaaatacgatagttagctaaatatttacaaaagaccaaaaagcctttagattctagatactttttagcctctctgttgggtttttggggcccgattcacagcccattcttgctgtgcacgtgtaggagagtcttgtgggacctaaagtgcaatccttggccggccatggccttgtgttggccaggatggccgaccattatgttttttcctagcttggctagccataaggtcggtcaggggttgttagctagctcctgagagcaagttggactgtcatttgatccctgttagagtgtcgaggtcatcgttggctcagatgctgacttggccttctttttaatgagttgtactaccacgtggcgcaggttcttccacgtatgtatgccacgtcatgaggacaaaattgggataatatttgccccctaagtccctatgcagatgtctgaacggataatgactttaccagcaagaatgatgttgtcgagactgcagttacttttgctaaaataaaagtggtgttgaagtattttgtcttgattgtttgttcttattgcaatagagaaataactcatttatgtgcctatatgatgagtcggtcaagtgagaaaaatgggggcccacatgtacataagtgagtttagggggaaacccttttttcacttttacattctctcacttgaatttagctcttgaaaaagctcctccttctctctagttggtcgaacctctaggctttaatccccttcaaatttttgtgttttttcaacgatccaagcttcccatcttcgtctacattggaatctagttgccggtaagctttctattccctctccttcacttgatttaaatgatttttccatgaatgcatgaccattattccttattttgaacatgctttgattcttacgtaagattgtaatccatttggtattttcatatgcatgatagccataagatgaacaatatgtgatttatatatgaaaaagaatcgaatctgatcttcattgtgattcttggctctttgagtcacgaagaacatgtttgagttcttgaaaatcacgtgttttgatccatgcacatgttggccggccaaggaggctttgtttgaagcctggtcggccatgggtggtttccatggggtctggccagccacggggactgtgtccctaagttggctggcctatgcctggaactagggttcctagccggcctctaggacttggaaccttggccaacgaaggccaaggctccaagcgagcagccagttttctccctctttggaccacagttagggtcttgtggtggccttggaggcatatacaactgtggccttatgcgtggtttcttttggaaaatctgtataaggctagataataagtccattatggttaattgtacaacattagacttacgaattgtcttagtcattgagtctaagacgatacttggtcgttggtcaacctcgtacccttagttttacctggaagatgtcgttgagtgttgttgacttgaatatatttgtagctttgtcatgttgctcacctccctttatttcttccatgcaggtagtgcttggtgttgaactcaagaggtgatagttgtgtaggtcttctgttcacctcgtatttatggcaaggataaaaaaaactttgcgcaaggcaccccaaatatgatcctcatgtggccatggtggctacaaggggtcagattatagaggaggaggagcctgctcggcctcctatcaaagctgagtcagaggtggactcggagactaggagctctgatgcagagttcaagttgaaggaggtcgctacagtgatggggaggagatataggacatgttttatcctccctaactgtcctttgggcaattatgacgcccgaggcaatccgctgaattaggttggcgtgcctacagtactaggacaagatcatgtcctagaatagtctcctgtgccgaagatattagatttaaaaccacctaagacaaggtgggttttgccagcttccgctctctctaatgaggcctttgataaggtcatggctaacgacctagtagggggtgttcattacgagattcctcgtaggaattatagagcgcataggcctcctttaagatgattggcatggttaaggtgccacattgaaatggggcgtgttgccgcttcatcaatactttctagatatcgaagcttactttgggttgtgcccgacacagcaaatgccaaagagtattaaatatctatcggtgatgtttatcttgtacaaggagctcggttagcctctgcctaccccttacgagattgatactattttgagttgaagtctgagccaaaacagagtaggactggctattttacttcagccagcttagtcattaatggctgggcgacaccaattgcaaggccatgtcaaaagtttgaaagtatgccaaaaaatactttatggcacaaggctttcgcgaaattgtgcaccatgagtttcagttggttccgctcctcggacgctccatccctaccttggaaataagggatagagaaaatcatatcctttctttgtcggttgaaaagagaaatattatctggttgaccagtgtggacaacttttggatgcatggcttgtatccccctattcttggggttgtgagaataccagctgctggtgtggcttgctctagagatgagcaaggccttgacttggatgatgaagaagcacctttgtcttgtattgtacagaatttggagaggagagagagggatctccgtaggcacctggcccaagggggtcaagttggtgacgcctctcttc

SEQ ID NO: 126967 - DNA, 1314 bp, Cannabis sativa
aataaaaataaaaataaaaatgtatataatatatcaaacaccatgatgtatataatatatgaacaccatgctttgtggtgaagatcctgaaagctcggttaacacatgtgggttgggctcttcttcatatgtgattgtttgtgatctacaatgaatgaaagtaaggggaaaaaaaagataagtaatatataccaaaaaatgaaaacgctatttagtaagtagtatatgtatacaaaaagttgaaaagcttgagattttggccccattttgactatgcatattagcacatatatatatatacatatatatataaagataaaaaaaaaaactaaaattgaaaaccttctaaatattaaaattgtccggtcaaatctaatagagaagagacaaagagagtactcttggtcttggttttgtcatatatggccagaaaatgatgggtttgagggagagaaataagatattgggattgggatcttttgtaggcttattaaattagtaataacttagatacgtcacatgtgtacaagtactactactcagttttaagaaagaatatgggccatcgtatttccatttcatacagtgttttctctctatatattgtaactcaggtcagtgctgtgttacccatctcggtgatctcacaataccagctacaaataatgataagataagatcaatgcatcttccttaaagactaactgatcaggatcatgatatactatatagtataaaatattatgggctttaaatttggcaatgttatatcttattttaaactaatagatattcgtttcgggcctttgtataaaatattttaaattatataaaaaaataaattatatattttaattaataataattacttagtaaaattattttaaaattttaactttattattaaaatatttgtgacataaatatttaaaatattaaatttattgctaataaataccgaaattcgaaaaataggagcataaattctcaaatgtctaaacttcacagttttataattttattgctacccaatttaatggtcttgaatggagactaagtcaaagaataagaaaaagacagattaaaatttgggtttgattcatttaattatgatttaatttttattctgatgtgtgtgttaagttctgaattcgaattttattgtgtgtatttttaatgtttgagatttagtgttttaccggagttttactgtttgagtttgcgtttatgagatctgtttttatttatttatttatttttatagattttgagaacttgaaatttgatgtcgtttctattgattattgggattga

SEQ ID NO: 126968 - DNA, 928 bp, Cannabis sativa
ctggttggagagatcgatccggattgccacaagccgctcttgaagtctcctcctttgtttctagggctccgattctgaatcccattaactttgcatggattcccatttaattaaaccaatccttctctttaaaatttgtcaaattacgaaatttcccaaaaatcccgtcattaaggcttcgctgcggtgaaggttttcaacaaatttgcaaaactttctgcctactcccttcgtggcgaagctttttcaccatcgctgcgggattaggcagaaaagtttcttgtttgttttctcctcaattcattcatctcttgtcctcaattcttgtaaatactttctttaaatatctggggacctgaaacaaaagaatgaagcgtaaaatagccctaaaactagaaccaaagagcgaaaactacccgaaaatacatcctaaaacttagactaaaattagcctatcagccattacctagaaacgctgaccattgcttgatgtgcaacctgcaggctggttggcaccttatgtgcaacctacagaacctagcaggcacatgactggccagactctggtagaaatatggtcggccagcctttgtcttggtaggatttttgtgagcaactttcatttatggacagcaagtcaaaccacaaattgggccttaacaacccacaaaagtagagggaaaatatcaataaattttctattttcaatgggcaatttagttatttgtattttattaatttaatatgtaagtaagaactttataaacctatttttaagggatattaggaatgtaagctctactataaaaggagcagcttaaccctaattctctaagtcctaagcttctaaactctaagtctgaaaccctaattctctcttctcatctcttctacacgccaccagggccttctctctctctctctctct

SEQ ID NO: 126969 - DNA, 765 bp, Cannabis sativa
  modified_base (726)..(739): a, c, t, g, unknown or other
ctactattaatcatctctatgatatgaattaggcccttatagtaaacgttaagtttgataaaggtagctttattcatgtcggtccttgtcatacataatttctattaaataaaacatcttcacttagatgtcatgctacatcagtaatctgaatcgagattacttgcaccaaataataggcatcaatgaaccgcactagcaactattgattaaagattcctaaaatttattagctgttgtgtattttattcatgtctgagtgatcttaattctccttacaatacaagtcacggcctcatgtacgaataaggaattttttgatatttatatataaattattcaatattaaatattattaatttaatattcatgcatatatcaaaatattcaactcttattaacaatcaaaaatgtccttacagaaatttcagggcataaaccctaacaatctcccacttgtcctaaaagcaaattggcatctcccttagtcccatattagttatatgacccgtaaaaaattacgctagtagtgtctttgtgaatggatttgctaggttatgttccaatgtaatctttaagaccgttaaatcacctctctctactgtatctctttgtagatggtgctttctctcaatatgcttgccttccttgtggcttcttggttccttagagttggccaccgctccactattgtcactgtagagttgttggaaatattttaccagnnnnnnnnnnnnnnaccaagtatgtttgattaacatccta

SEQ ID NO: 126970 - DNA, 663 bp, Cannabis sativa
  modified_base (594)..(606): a, c, t, g, unknown or other
aataattagttataaaaccaataatattgtcagtctataattgctgctatagttaaatcgtcaatttataattgacactagaggaaccaatcttgttcatacataaaattaataagtgttttatacatgtaataaaataattatacgcataaataaaatttaacatataaataatatatataagtcatataaggattaacatgtactaactaattttcgttataaattcgttagatcataatatttgaacagatgtttgtcttaatttatttttgaatattgactgaagagcagaaagtatattactcttagagaaaatacgaccagcccaaaaataagaatcgcgagttagacaatgtgcagatttgtttgcagatcgtttaacatgacaaactttaacattatttaaagaaaaaaggagattttcgcactctgtttaaaatattgaacttgatttgagagtttcattttttgacctcagatggagtaggtttgtctagtcacctcccgatgtagttaaatttcagttaactaacttgggtaccttttatattgagttgcttttgcttatataatgtgacagtcagtagtccnnnnnnnnnnnnngggaaataccgggtaagctgtacaatctcacaccgcctggggaaggtcaagtgggat

SEQ ID NO: 126971 - DNA, 1129 bp, Cannabis sativa
aatatttacaaactagtctattgataaaaggagaatatgaatatgaatgagaatgtgtaggaatttctatagatgcaactagtatctattgcaatccaactctaaaacttaacacaaatacaactaaacgaacataaatcaaacaactaaataacataagttaactgcaagaaaccataacaaatacaatatttatactcgttcgaaatcaaagttatatcagctttgttcttattctagttttagaaccatcatctctttctctttattggtccaaggtggagtgttaccatcaactttgtatcatagtttttcagacaattttcgtgcccgaaaatacatatcgaaatatatattttttaatttttttactgcggtgttcattatagttacaatattattcttataaatttttaaaaaatttcgaataacttacaaatgttgaaaataggtctgaatttttttgaacacgcatgataaacaggaatattaggaattttattttcggtattgtgaattattcagaatttttcaaaaatttacagtgttgatattgtaactataataggtattgctatatatatatatataaaacagcatgtgatttcaaacgcagaaatcgactaagaggttgtaattcacattcttcttcattcaaataatcttaaaatatattatcacagttcaacaatataagatcaaacaacactacactcaatcacaagtgttttacactctctcagaccctaaggttaaatttggttgaaggaaaaatataggaatatgaatgagaataagaatacgaatagaaatggaatggaatgaagttgaaatacataaaagtacttagataaaaaaaattcaaattttttctcatcattccactaaaatagtggaaaagtcattctatttgaatgacattccaatacattacaatgcaacaaataaagaaacggaataaaattgattcatttctatttcattatctccaaccaaatgtcatctgagttaaactctttcaaatgttgagtgaactcaatacaaaacccgttcccaaaagaaatatctctgtaaaaaccttttttggcaagttaggtgacaaaataatttttccatttatggtaagatt

SEQ ID NO: 126972 - DNA, 526 bp, Cannabis sativa
  modified_base (469)..(487): a, c, t, g, unknown or other
aatattccaattagttattactctggcagttaatatagaaaagccacaaaagaaaatcaaacacctttggtacccctacttgccatatataatgaccacaaatcccctaaatttgaaacttcaataagtggaaaacttcatacatgatgctgcctactctagttagtcctgattttccacttgcagatacagtcaaaaaataaaactcacattaaaactaataaaaaactacattcaaataagttaaaatcttacaaagtgacagatatatatactagcacttatcttagctaacaacattaactaaatctacataatctggaatatttatgaattgataaattgatcattgtttgtaaacactaaccatttatatatacctattaatttcacctaaataaaattaaaagtgattgagataataagaaagagataaagagctcggttggaacgccgtattaggtcgtannnnnnnnnnnnnnnnnnnattgtattgtattgtattgaattggattatatatcatat

SEQ ID NO: 126973 - DNA, 1027 bp, Cannabis sativa
cagctaaacccaaaaagcttctattcctctttggattcgtttacatgatctaggtctccaatactggggaaacaaaagccttaatgctttagttagtactgttgggaaccaatcatggtagaccaacatactaaagatcgtactagggttcaatttgctcgaatccttgtagagatggatatctcagatgatcccctaaaatccctgtaatatgtcaatgagtttgggcagcttatggaacaatctattgactatgagtggctacctgttaaatgtaaaaattgtactgggtttggccatattacagctgattgtcgaaaggatactctgaagaaaaaagccttgaatcctaacaaacaacaacctaatctgcaacaagttgcagcaactaaattaggggaagttcagatggatgcgagttctaaggagccttcccaggttcctaaaagtgttgatattaacatagacaaatcttggcagaccccaaagaagattgaacaggggaaagtgattggtaagtagagctctaatctagttgaagttcaagctggaataattttagtgccctgtaggaacaaaatgatggtgaggttttagatctggttcaagaagattagaacaaaaaagtttaggttttatctcatttaccttatggatagttgcaatatttctagttggaatgttagatgtattaataataaagataagcaagatgtcgttgctcaattttgccaagttaataagataggagtagaagctttgttggaaattaagcttaaaggaaataagatcaaagagatgtttgattctaaaatgtcaaattggaactactatactagtgacacgattgaaggtagattattgatatactggaggaagaactatgctagagtgatagtcactactgaatcccccaagtttgtgttgggaatattaaaccaggatctaaatttactagcaagtatgttggttaacatcctaaatatgaattctctaaaacaatgaaataagcacataagggtttaag

SEQ ID NO: 126974 - DNA, 808 bp, Cannabis sativa
acacattaaataagtaatgaaaatcaatctgtttttttattgataattgaatagaaaagattacattgaaatacagttttatatatgtagggcacaaagcccaaaactcaagaatttaagtaatgaattaagcagtaagacaaaaaagaataacactaaatttaacaaattcgagccatatatgtgcaatactctacatctcggttgtaacagcaacaatcatttttatatttttttataggtatattctcattttttttctcactcataaaaatatttttcaatcattttgagaattatagtaaaaaaaattgatgcagttttattaatttgtttttttttttctatagattttgatcatgtttgatcaatttttaatatggtgatgacattaatttttaatatagtgataattacaagtaaaatataatattacatcagattttgaatggatttgcgactatatgtgagacatagtgatagataataattttgaatatagtatcgaccataagtgagataagttgatgataacaactttaaatataatggtgattacaagtaagatacagtcatgacaataactttaaacgtttttctctttaaatttacatagctaaattataatttttgaattaattatattgtgacttttttagtcatactccataaattatggtatatagtatttaagatatttttaagaaaccacatcaaagaatcgtgattttttttgttagccaactataaagttttttaatttatatatttaagggataattttacaaatgcacaaaaacaacaaaaa

SEQ ID NO: 126975 - DNA, 953 bp, Cannabis sativa
ttcgaacatcttgaacaataagaccaaactgtgaaggcatcaaaataccgctctgaattgcttggacacacaccaaactatctgttaaagaaccgctttcactaacttattccaaaccatatctaagttaaacttttcaaaattactcaaaatattatggttttataaattaatttttgtaattaattttgaaaaaaccttacttaattatattattcagagattaaaatactaagtgtattttctataatgaactttaatttaaatttaaatatttaatatacttatttaacatagattttaaattattttctttagttttggaaacttagagttaataagttaaataatttgattgaaacttattacaaattcttgattgtatcttaataatctgaaaattttgataaattttgatatcaaatagtttatactaacgtagaattattcttggaataatttggttaacctaagcattcataaatactatttaaaaagaatattatggatcttttatccacagttgatttaacataggaaaagtttagtataaatatcattacaatattaaatttttaattgtagatgcatgtcttaaaaattcatctctacgatgactactaagacttaagttaagtgtacaattattaaaccgtgagaattattttataaaactataaaagtcttttttaataggataaatatcattttggattatatgttttagaattagattatatgttttgttaaatgatttggtttgttcccaatattttctaaaatgtgtacaaaataataccttatgctcaatttttattaattttatttaggaagttttatttgtgcaccccaaaaatctataaaaacactccatgtaattatttttattttgtataaaaaagtagggaaaaaaacaaaaaaatacaaaaaaggaaaaaaaattacaaaaatac

SEQ ID NO: 126976 - DNA, 812 bp, Cannabis sativa
  modified_base (743)..(760): a, c, t, g, unknown or other
tatcatcaaatttttaactaaaaggacattttattaatttgtttaaaaaagagacatttattaacttaattgttagatttaggactattttgcatcttgacccaaaaaaaatggtttatttagaaaaaaaaaatagcatgtaatttatatatatatatatatattgttatttcatttttttgtccatttaacgtagcatattcacataggtaaaagtgagacaatgtggaatacaacctaccgataggtgagcaaagttaccctgcataacacgtcaattaacaagagttccaaataattgggcaagaccaaaattgaaggaaatgcccaggcaagaggttctggacggaccataccctggctggccaatggaacctatgtgtcggccgccaggctctaagaataaggcagacaggttacaacttgatttcagctactagacaactccaaccatccaaaaagataggaattctcccttaaattatttacatattctttaggaatattagttatcttttttatgatttaatataccagataaataagttattttttctattttagaggaatattatcctatttatataatgatattttgtaagccctaaattatataaaggaccttaggtaagtagaaaagggacctaaattctaagtcctccaagctctattgctctctcactctctcactcacgccacatctccctcattggacacttaattgttgggttttgtaccctaannnnnnnnnnnnnnnnnntgattagttatcaatttaagagttttgaagtgattatgttaacatgtatttt

SEQ ID NO: 126977 - DNA, 772 bp, Cannabis sativa
  modified_base (706)..(732): a, c, t, g, unknown or other
aatatttgcgtacaaataacattatttaaattttaaatacaacctatgcatggtaaattaattagctataataaactatacaattctattttcttaagaatatatatggatgaaaaatagtgtgtgactaaaattctctaaaaaaaccatttaaaaaaaaaatctctagaaaaacaaaaatacataaaacttgttcattcataaattaaatattgaataataggagataatctatggcacataaataataaaataaatgaaaaataagaagtggatgataatgaaataagaaattgcaccgccctttagtttgcatccaatcacacattgaaaatgaaattaaaaaaaaataataaataaataaaatgagatattgaacaccaaatacttctatcttaattactcatccaattttcagctactacaatccacatatgttgtcataaaatcttaatttaattacaatatacacatacatatgtgtatattttttattatatttgttattacaccaaaatctaatactattagaagtgaagttttataaatatattgttagtaattttttataataattatcaaattgtatatagatttgttatttattttatgttaattaggattttttttacatgtacaaaatcatgtctcctggacttttttagctgttaaaaattctttctgagattgttagatttaaggactnnnnnnnnnnnnnnnnnnnnnnnnnnntaacatggatgaaagttcaggggcataatttagtacatat

SEQ ID NO: 126978 - DNA, 514 bp, Cannabis sativa
tcttcttcttcttcttctatatcaactcaggaatggattgtttctcactaaggcccaaactctgaagaagaagaagaagaaggtgaactgaagtggtttagactttacagggaaccaaaacaaaaatcaaacaatcaattcaagtcaagtttgtgggtatacataccttaaaccatccaaacttacagcttcattacttcgtaattactaattaaagaaaaaaaaaaaaaaaggggccagggttggcggcgatgagagtggcagagacgagattactctgcaatggttttttattttattttattttttttatttttttctagaatgagaaatggtgaaactgaaacctaggttttattattgggcctgtgtattgggcttctttttttttttcaaggattaattcagaaagggaaatttacaaaaatactgtaatttgggttattttttacaaaaatactgtcacaaggaaattttttcaaaatactgtgtttttataaaacaccagtaaaac

SEQ ID NO: 126979 - DNA, 1094 bp, Cannabis sativa
ataatatcacatatgtatatatatatacataattaataatcaagtatgtatatatatttatttttcattgttttacttacaatggataaagaagcattgttcctggtctgcaccacaagttcaaaacaagaggaaaatgtatttaattaataataaaacacatataataaattagtaattattatatatatgtacacaaataaataaatatacccgataattgtatccaaatgtttagctattgcaccaagaacacccatggctaaatattgatcaagtaatttagatagaaaatagttgtagtttcttaattataatattaaacttaattattatagaacaataatggatggattgtgtgatatgatgatcgatgatgcatgattatatatatatatatatatgtaagattggagaagtgttggaaggggtttaatttgatggcatatcatatggatggggttattaagcgacaagtaaagaattttggttgttgatgagatcaaaattcttcttttctcttggtagaagatatatgaaggaacagttctactactactacagcatcaatcaatgaatgaatgaatatgcgttttttttaaaggaaaaaaaattaaaagtaagaataagggaaagggaaaggaataataataaggtatataattagtacgtatacatctgcccatgtctgccttttacaaacttcctgggtcccaccatatatattaattaattaattaatgtcaaaatatattaacattcctttcttttattttactttttttccttctattctgatattttttagatattaaattaagattaataattaagttgattttattatagatacttaattatttttatttttatgcttctcaattagaaaaagacagagaaaagaaagcttttgtaatgaaattttatgcttctcaattaaagagctatttggtaattatagagttagctttacaataattgattatcaagaattaaacaacttagaaaaagaaactaacactatatacttgtaacatccccgtttcaagcttttattgggtccttacactcacggaatgaatggctcttataca

SEQ ID NO: 126980 - DNA, 1885 bp, Cannabis sativa
  modified_base (797)..(800): a, c, t, g, unknown or other
ttatttaaataaggcaaatgagccttcacagttggagttgttcatgtgagagagggttgggttcagtatgtcgtacccactactataagccctctaactctcacacaagacgtaaaagagatgaatttaacctttcatcaaataattattattaattgaataagctcaatactaattgcgcctaaataaaactatcatggtaatattttattttagcaaccgagttaatttaaatatctaaaactaaatggacttcctatatgcatctaagtccaaaagcaaatatataggctcacacaagtcaaattgattttgacgggccccatcatgtttcgagatttatcacagattaaagaaactacaaaatttacctgttacaaattatttatatgatctattgacaattcgactatgattaaaattagatcattaaatctgtaaacaagttaatcatagcaatttagattaaataaataataggtttgttgaaaaaaatgtttttgaataaacaatttaaataaacaaacaatacccatgtaacaatatgtgaaattaagatatttattacttatataattaaattatcatttcaataaccaacttattttgaaaatttagggttgttaaaacaacctaaaatgtcttttcaaatttcaaatttaaactaattttaaaatatttaggttttatttgaattattttatcaaattaaattaaatatctaataggatacatgatataaagataatcaattagatattttcaatatcgatttttgatcttataatttaataaannnnaaataacaaaataaactaattttagaataaatattgttaggaaattattattttaagaataaaataataaaagaaatgataattattttaatttatatgtcaaaattttcaaattaagcgtttttcaaatttctacagaaatatttaggttatttaaatatttatgatattatttataatttttttataagtaaaatgatattttatagccataaatattatttctctaacttataatttatgaacaactaaatatttcacaaaataaactatttattaatttaaaaaatattatggctaggatatctataaaaatatgtaggtcaatttcatatttattattatttaatttttcatataagataattttaatataatatttcaaattaaaaagataatgctatcatttaatttaaatatgtccaacattaaatatctaactttataattaaataatctgtaaatttaaaaaaattaagaaatttttcaaatctaaccataatttaaaatttaaaataactaatttttaaatttaaacttcaaaatatcataataatctattaaaaaattaaaaattattaatttaaaattttgatatttaagtttaaatattaaaaatttattagggtttgaattcaaaaaattcaaaatttggtgaaaaatcacccaaaaaatagattttaggtgcaaagcccccttgttgccgagggataggctgcacgcaaccctatccaggcgcgcacgaaggaggcagcagggtcaatagccgaagtttctcggcatcttacagggtcgtcttggcgcttcaagtctgaaggaagggacttgaccgagcatcagacacagttttgtccgagtcaagcacgcagacaaggtgtcttgtccaagttcctggtgcgcgtgagcacccattctcgacaccttagcacccgaaatttcaaatcaacatatctttctaaatttgtatcagaatcaagttccgtaaatattaaaattacttaagttttcacaaggaatccaaataaattattttcagaatgaaaataaaattatttttatggaaagattgttgggttttatgccct

SEQ ID NO: 126981 - DNA, 947 bp, Cannabis sativa
ggagtacagggtaatcagtcatcacaactcaagttcaagtcttagttattaaataactttctacgagaaatttaagaaaaaaagggcaatttggtaaattaataatgtgtagcgccagatcccctttcagaaagattcaaatccaaatggcagtctcttaactttattaacaaacccaacaataatttattaatttttaattttataaacactaaaatataatttcaaatttttcaaaaaaaaaaaaatacaaaaatatttattatagtatttagtatttattatccttaattttattttaattaaaaagaatggctttcatccaatccatcttcctgcccgttaaagcaacggctgagatatacagttagctttgaacacaattcatggccccaccccaacctttctactaatcttctcttctcttcttcaaatggcttccaattaacattactagcctccacttttacaaacagcttcaaccccatcaactactctcatttctaaactgggtttccttcttcttcttcttctcaacgttactgggtaccttctgagtttctcatttggggtcttgtttctgtgatttttttgcataactctgttcttctcttacttgggtttttttggtgatgaagtgagtttgaaaagaaagtaaaaagacaaggaaagccaaaataaaaagaactaagatttggaaggtgtgaccataaaaatggttggtacagctactaatggaagaggccggcactcgtttccttacattaatggaggatatgatatgagtccgggtagtgctccggcgagcaatgccggttctgagtgtggtggcattgagtttacaagagaagatgttgaagctttgttgagggaaaagcctaaaaggaaggacaagtttaatctcaaggtctgagatttttgactgattggtcttttttttttttttt

SEQ ID NO: 126982 - DNA, 818 bp, Cannabis sativa
  modified_base (476)..(485): a, c, t, g, unknown or other
  modified_base (527)..(527): a, c, t, g, unknown or other
  modified_base (779)..(780): a, c, t, g, unknown or other
agctgtcattttttcaattagaaccacacattcttgctttgaaatttttttagcacatatggggacaccaaggtacctgaatggagtgttttgccttgagaaacctgacacttctagcactcggttaacttcataatcttccatatcaaaaattaatttatttttgatatgtttagtatttaatttattaaaaaaattgagaaatcagaagacacatatgtcttcctaatcctaagttatacatatgcatgtaatacagtgcacaaacacggtgtgttacagaaatataactccttaaaatggaaaattttatttaacaatttaattattaaatataaagttaaataatggcttattgtaatatatgattaaaatattatttaatatataaatatattctctcattttaaggtttaattaatatattaatttacttatatctattctatataaaatgtgcctatataacagaattnnnnnnnnnngagaaattcatgagtcacttttatatatatataataaaatanataaaataaatctcattaaatctaaaaaaaaaaatacgattaagtttttgctgttgtacatctacgataagattttctaaatatacttatgttatttagttggattttattctaaataagaatttactactatttacatattatatatacatattgctaaagaattttttaatttgtttttgttttttggctcgatcaggttataattgtttctctccacatttattcagaatttttggtttatgagaaatnnttgggtgactttttttttaaataaaaaaaaataacaaa

SEQ ID NO: 126983 - DNA, 1065 bp, Cannabis sativa
taacaaaatgatgcaagtggcaagtgttaagaatgatgccaagtgtttgtgtttcttgttgactctccccaagtctataaaagattggtggaaaaggttaactcctgaatctgtgcactcctgtaaggacttactatctatgttctaaaagcaatttgtagatgctcgtgagtacgatttagaaatggagtctatcaccaatatcaagcaataaggaggacaaaccctaaaatgttttatccagcaaatggtggaagcagccgctaaaaccaaagtaactgatgattagaagcttgtggggagaaatccagaggaaaagggatgaatccctctctaaatttctagccaaggctcaaggcttcattagcttagaggatgcttaccagcaagcctttgggatccctttagcaccaacctccgtaacctctgtccccaccttgactttgtttgttgttgctcttagaatgctatatactcccacgatatacagactttctgtgtatgtttcacagctacacaaacctatttctctaggtaaagagtggcacaaactagatgcagtgtggcaccctaatcattgaaagtgggggtaccagagtaagaaaggaataattcccagagcaaaagagggggaagaggtccaggacgaggagaagcctcaaagaaatataaaaaagagtatgatccaaagtacatcgaatactccagtctcttagacactcatgagaacgtatacaaggcaacatataacatggtgcatcataggaagcccctagaatgtcgtacaattcattgaactagcacaaagaacttatggagagaaattttaactcttagaacaggctactgaatctgcctctaattcgtgtgggcatacattggcttgacaaagtaaatccaaacctttacacgtaaaggccataataagatagccaggacaatcataagtcaatcatagatggctttaaagctaaataatagtagtgttcaaaaatagagggcctataggccacagtaagaacatgaaagccttaaggctggatatgaaatcagttcacatgcatg

SEQ ID NO: 126984 - DNA, 609 bp, Cannabis sativa
cacgagccttgacttgtatctgaccttgccagttccattgtcactctctttttctctgaatatccatttacagcctataactctctgcccttttggtcttttcacaacaatccatgtcttattcttgatcagtgagtccatttcttcattgatagccattaaccacttctctcttgctttgctttgaactacttctgtatagctgatgggttctgcattatcaatttcttctgcagcaggaaaagcaaaagcagtacattctgatgctgagtaatctgcatagtcaagtctgtcaggggcctttgtttgtcttctttctctgtcccttgtaagttggtagcttctcaagttttcttgattggtatgtgtttcatcatcagactcgatctctacttctccagtttctggcagaggtgcttctggtgtgtcaatgtcttgacttgcttcatttggatccacctgaacttgtaccctttcattcaaagttgaattctgtccaggtttcattgccatttcattcttcttgaacacttcatctctactaataatgcacttcttataaccatcctctaagcaccaaagcttatagcctttcacaccatcaggata

SEQ ID NO: 126985 - DNA, 1148 bp, Cannabis sativa
atatatatattaatctcaattattaatatataatggtctgaaagctcaaggcactaattgggtcactcacactagtatatattagagaattggccaatagtggggccaaatcaaacttttcccatcctataaaaacctcattcccttcaagccaccctcctcgttctataacaccaaacaaaattaatataacaaaaaacaaaatcccttttagtaagaaaaactattctctcttttctttttgtaatggaaagttttcattctggtgagatttcaagcctccatttccttgttccttcttcaaacccttctcctaattattatcctcatcatgaccaattcagcatcatgaataataatagtaatgacattattattgataaccttgatgatcatcatcatcatcagctgatcaacagatcattctctagtactactacaactccattgtttaacaactttaatattgttccacaatcatcctgtttcagtaataactcatctacctcagatgaagctgaggatcagcatcagcaactgagtctgatcaacgagagaaagcaaagaagaatgatttcgaaccgcgagtcagctcgtcggtctcgaatgaggaagcagaaacaccttgatgaactgtggtcacaggtggtgtggttgaggaatgagaaccaccaactcattgataagctcaatcatgtctctgaaagtcatgacaaagttgttcaagaaaatgttcagttgaaagaagaagccactgagcttagacaaatgctctctgatctccaaatcacaaccccttttcctcccaacacttccttcagagatgtcttagatgatttgccatgtaacacagcttatctcagagctgagtcttcttcaaataatcagtccaccatcacaacttctatggatttacttggttaattaattaatatattatatatataaagaggcaaaattaaattatatatagcccttttttttttttaatttctttattataatagtattgtgtttcctagatttttacattttccaactagggacatctaattaattgctttctttctatatagaaattattagaaagccaattaattaaacaggtctttgcctcagtactactatatagatatgtatgagatgcc

SEQ ID NO: 126986 - DNA, 1063 bp, Cannabis sativa
atggtagattactacattatttaaattcatattatgttattaagttgttagttttatgtaattatttttaatataatatatccttgatatactaataaatactaacgtttagttattatttatgaatatattatgtgtgtttttgcttttagtatttgataaccttatacaatctagtttattcttgtcattctatgtactcacgtcatggacgtacattaatcaaatattaaaagagttaataaatctctctttctgcaataattgcctatttttctttttttttttttaagtcttatctttatggcttcaattattaatatgttctacgtagtacgtactgatagactttttgtttaatatgtacatttaaattttctaccaaaaaaaaaaaactaatcttgtgttaccacttttggaaatatctaggtttcatgttactatgtaattttcatttatatgaaaataataatactagataaaaaaaaaaaaaaaatcaaccaatataagcttataccaacaattttcaaatatcaattaagaaaaaaggctaatagaaatttcagctaagagttcaatatataatgtacttcaagcaaagaagattttaggggttgatgaagagtttgtgtggaatggtagaatttcacacatctttagattgtaaaactaatttttctctggacaggaacaaagaacaaatcaactccctaactataattactacacaataatctctgaacaaaatataaatatttatttaatttgattgtaagaattaagaaatattaaattttttgggaataaatgaaaacaaatcttccaaaaagaaaagtacagtatgttattttcttgagacatcataaacatttaatttttttcatggaggagaaaaataagatgtgtatatgctgaagaaaataacttagcaataaattcaatggaccactcactaagtgcttccactcaacagtctttttcttaaaaaaaaaaaaaaagaatagaaataagagcaatttgcggcgaaacccccttatgttttgatttttatacacttaacccc

SEQ ID NO: 126987 - DNA, 1138 bp, Cannabis sativa
  modified_base (1030)..(1042): a, c, t, g, unknown or other
aatccaaaatgttggccacctaataaaggagctcgtgagacttgctacatgaccaataacgtaaaggaggatatgaagccgtattttggcatcaagatgaattatgaaaaaagttagagatgcagagaaaagacgtcaatagaagaaataaaacaaaaatgagtatttagaaacaatggagttgtttggcttcttaaattaaaaattattttcagttagtaggagttgtttggcaaaattttttttaaaaacaatcttttaaaaataatttttttgtctacatattatattttatatttttgctcacatactcggattctagactcgtacccgaatgggttcatatcatggtatggtgaaaatattgttttttttagtaagaaaaaaatcaaaaatagttttaaaaaacttgtaccaaacacaattaaatttttaaaatgacaaaaaattattttctattctcacttttaaaaacataattctaaaaactgaaaacacaaccaaacaagctcaatattattaagagccccatcttgtcatccctaataacttgttattaacagttgctaataattgccttctaaaattttactctttttaaaaacttaggggccacatttactattattaggggtgatagactaatactattataaagtggtgttttataattagtgagtaattttttttaatatttattaaaataaaataggtaagatttaatattaaattacaccacaaatagtatactttagacgaatttgtattatatataaaaatcctaacttaaagaatatatatctctcttatattaaatgtgactgtctaaatgaacactacataaaatcttacttttaatcacaataaaacttgtgactaaagataaaaaagttgtggctaattataaaatatcattattgtgttgtgactaaaatactaaaaatattagtcacaaaattataatttgttgtgactaaatgtgtttttagtcaaaatagttgttgtattaaaactaaattagtgacaactnnnnnnnnnnnnntatgttttagtcataagtaacttagttacatttagtcacaaaaaaattatgttgtgactaaaagattgtcactgaaggtagttttttttttttttt

SEQ ID NO: 126988 - DNA, 1697 bp, Cannabis sativa
  modified_base (1181)..(1184): a, c, t, g, unknown or other
ccaggtcggcatcttgaacttttggggcagctctagaacattgatctctggaaaaaaaggggatccacgtgctcggtccaactcaagatcattttgcttttgatcgaacaggccttacaacatatttctcagctcatcaaactgggcctgcacggatggatgaacttgttcggtctcttggccgaccagaatcacatcgagatctctttgagctagatcttgagcgcgggccccgggctgagcggctggtggtttggccgagcacttggccagaactgctagtctgggtggagttattaggtataacccctcctgacgaattaccagatatggcctacttggcccacaggtggaacctgtggttgggaataggacagctgaccatttagagtttgggaagtattttcagctggattttcattcaagccacccagcagaatgctggatgcaggttgctgattagcaacttgataggctcttcggattagcacggtagcttgtcttgttcggtcgtcgatggctgcttgctgagccttcaacatttccatatctttatccctccattcagcaaactgacgcgtttgctcttcaaacgtaaggttcactactgcgcggagctcttcttgatcatgatgcatagtattagtatgtccttgcataagcccaagagcattacggaggttctagatatcagtgtcattttttatggttgtctgggcatttgtcgctgaaggaatcccagtgctggggatatttagatcgtctactgaacttgtgtttctagtctcttgcacaccagatataattccagccaaaggagacatcacaccttgacccacagttggtggttgcgtgtttggttgttcaggatttgtggctggtaggacccttccattcccaggagtttgcaaagcgggatctactgctggtggatctacctgatcgaccacgcctctgcgagtttgtaccaccatcatgtttatgattaaacttgaaatcaagagcaaatttacgatccacactctcaatgaaagcaccaaaatgttgacctcgcttttagtcaacgacaacgagtcttaattgtaagcgatgagtgatataacttagatataatatgaaaagataaataaagaacacaaagtttttgaagaggttcggccccgagcagttcggtaatagcnnnntccccttgatttgtattgacttaaaaaacaaagagtgcagtgattcctttcttacagcttttacaatgatatctctgagtatgttctcctagataattctctcgacccccctttctagtgagaatggatcactatttatagggctacatgcttgagggaaggttttcctttttcttacaatgtctataattggtaagattacatattacatatatagagtacactgattatgggatttggatagcttgccatatctctgtgatagatcccaaatttatagggattgctcttatgctttatgatgcaaatgctgaaattgctaagtgttgatatgttgttcggattatccactgctcgtctaggaggaccttgtccgtgcagatatatgcggtgttctactcagaacatctcttctgggacgatatggagaatcaattccacgtgtcaccagcatgtgatgccacttcagagtgcaaaaattgggatatcaattatatatgtgatatgttattt

SEQ ID NO: 126989 - DNA, 929 bp, Cannabis sativa
taaaatatttccaacaaaaacttgcttctattttttggggcaatgtcatgaagtaccgagattttacaatattggtggtgggggatgccttaccggtgacaggattctttgcctttgtggtccattttcaccataaggtgtgatggatgtagttaccctatcttagcatgtgtttttcggattatcgtcacgatgatagtctcctcctcttgtctatggtatttggctgttctagccaatttcttcaatagtaggtgttggtgtctctcttttggaggcggctagttagtattatctagacgaatctcgacgccctgaagatgacgggagcatctaggcatcttgtaacaatagaaagcgaggaaacaacgtagcttgtgcttgtcgtttccacaaatgacgctaaactattaatagtggaaagtcttcaactaacttatgactgaaaaatcactgaaaaatcaagattcaaattcaaaacttagcatgaatatgaagatgaaaataacaatgtgtattcaaagcaaaatacagagaaaagtatctttgtatttccttaaatcaggtgttacaaaattattttttaatcccctctcacatttgggaattgggtatttataggctctaatggcctagaacacacttgtggtccctaagggacaagctgacgtcatggtgttgcgaattgtaggtgcaggagttggtcttgcaccttctacgtttctctggtgtcagatggtcctcagttgcagaagtggtggttgttgtgtatcctttatcaggatgtcagggcttacaacagtgcctccactactcatacctcctttcgtcaataggccatgcagaataggaattttgtgacttgtgatcaataatatttgacggctcaaaaaaaaaaaaactcaaggatagtttaatgtgacttattt

SEQ ID NO: 126990 - DNA, 1297 bp, Cannabis sativa
  modified_base (45)..(85): a, c, t, g, unknown or other
atactttatatgtgtttaattttataattgttttagaagttcatnnnnnnnnnnnnnnnnnnnnnnnnnnnnnnnnnnnnnnnnntcctggtaaaataatttcgaacagcagcggactattggtgtgaggatttcaccaaattggaaactgttgtagggtacaaaaaaggcatgcttgagggatcaggggaagatgagcgattcgagtaatttgactctgaggcctttacctagctgtagaaaacaccctatgaccaagatagatagtaggagaagagatgatgggatcatagcaagtttgatggctgacattgggcccacacgtgaccaaatggtggatagaccacatgaggatatttgtaagtctagagtaccccaccattatcctgagcccacttacattacttggcccactgatacaaaccttgaagaagtaattgaacaagtcttaagtccggcccaaggtggaaaagggcctactcaagttgttgtgtcccatgactacatggagttatcttcttgtggcccttctttctctggttcgaaaaagaggaaagcctgtgttaatgttgtacctgtgattgcttcagaagaaaccatagttaccctgggcgataaaacccctttgtcactggttactctgcttcctactctggaagttaataccttcaaccctggtagttgcagtcgggatggtgatagctccaatagaaaaaatcattctcgtgcccgtgggaggggctcgattggcagtagaagaggagccaagtaggggaccagaagtggtgggagtcatatggtggattctgggaatacgttgaatacaggtacgagtagtttaaatttggattgcaatttagtgaacgttacaatccttgagacgcaaaatgtattgtcgggcggggaggcagcccttatcaagccccccgtccccatgaggcttctatcgtggaattatcggggtgttcgtagaaccccggcaacccgagcacttaggtcttgggttaggcgtcataaacaggagtgtctttttttaatggaaacaaagactaacgaggatgggattcatgaagcggcaaggctattgggttatcaattttcttcaattatccccgccttggctattgggggaggttttgctctgatgtggaatgatggtgtagacttggaagtggtaaaagctagtaatgggatatttgaagtggcaattaaagaacctatgatgaagttacaattgttgggttttatgccataaataaaactccattttcaatgtaatccattttattcaatatca

SEQ ID NO: 126991 - DNA, 1501 bp, Cannabis sativa
aaaaattaatttagatcttaaaatttacttttgaatgattaagaaaattattaaaattttaaaactaaataagaaatctaaaaaattatttaatttttatcaaaaaattcatttaagtataaaaaatatattaaaatttagtttttgtaagaactaaattttatgtttgagtaaaatataaaaatgaaaaagattcaatatttgttgagtaaatttaaaaaattaatttagatcttaatttttttttgaatgattaagaaaattattaaaattttaaaactaaataagagatctaaaaaattatttactttttattaaaaaattcatttaagtatacaaaatatattaaaatttaatttttgtaagaactaaattttatgtttgagtaaacataaagtttttattttttttaaaaataattttatatttttattaaattttaattattttttaatatatgagttcataaacattaataaaacttgatattttctttaaaaaaaaaatcttagtttatttagctatttattggattttcaattagttttgtttgattttttaagatacgtgattataagtaaaataactttaaaaatatttttttgaaataatttaagtttctttaaataaatttaatatttttatcaagttttttttttaataatatttattaatattttcagaagtaataacattataatatttaaaattatttttttttagagggacaaagttttatatcagtcaaagttgaaaagtaaaaataccaatttttaaacagtaaaagaacgaaaacctaacaaaaggagataattatgtaactgttatattttaaggggtatgatcatgtagtgtcgaaagttcaaagaacaaaaatactaattattcttgtttagtaaattgcatttgaaaataagttggtcatattaatagtgacacgttcatattctgaaatccatagacacaaaatttgtgtacacatgtatcattaatcgttatcaccctgtattcttgtacttagataaaaattgtctctccaagtgaaaagaataaacctcaagaactggtaaaatttgtataagttatttgcaaaggaaaagcattggtttgtttatttagagacaaaactaacctcaataactgttgtacaaagcagttcaaacttcaaactacctcaataactgttgtgtgcacgtaggcctttactgttgggaacttagtggcgtttggttggaggtaatgaaataaaatagaatggaaaagaaacaatcttcattccattcatttgtttggttgcatattaaagtattggaatgtcattccaatagaatgacctttttattattttggtggaatgactattctattttgaaataaaaggaaagacgattccaatgcacgatgagaaaccttcggacagcacgcgtttagacacggtttcgtgtctgaaatccagcttccgcgcgcggaaatcctactggacaccccctgcgccgagaaa

SEQ ID NO: 126992 - DNA, 518 bp, Cannabis sativa
  modified_base (480)..(492): a, c, t, g, unknown or other
atttagcaccaaagaaaacatggggcaacagggggtgcaccctctcctttaaagtatttagcatcttggctaggactcttagcactcttggctaaaccatcaagataggcattaatcttcctgctaatataaattaacctacaattggaaaaagactgaaacagatctaaaacttgaagggatacactcttaaacctccagtctgatggggcaaacttaaaagtattaactactagctgagcatcaaaaaaaatagtaatatcctcaaatccttcctctttagcctaaagcaatgccattaaaattgccttggtttcagcttccataaccgagtctgcatccttcttacaagacttcacttcccattttgcttgaaatctgttaactaacagaactgctacacctactacattgctaccccatgatgcatctgagattatatagtgttgggttttgtgccctaaataaaatctatttcannnnnnnnnnnnntactaattaataaagattagaaataa

SEQ ID NO: 126993 - DNA, 838 bp, Cannabis sativa
tggtgtcaccatgtgatttcattttgctctgtctaatttcatgtagaatttcttaacaaataaattttctctcgggaataatgttcagattcatgtttctttagtcctaggatattatatattaacattagcgttttcaacatgattggtggtgttttaatgtatggagattaataaaagagttattaagattgttgccaccaatttttaccaatatacatgaacatacatggcctattggaacaaagccacgtggcttgtgggacactgattgataggaaacaagaattaatcattagaccttagttaggtatcacttccagaagaatattagtttttatagtttatatcagagttataaaagcgaaagtgtgatttgataaaaatagtttttacataatatgaactataagcttaaggatctcaacataatatatatatatagattaaaaatctaaactattaatagaaagattatatctcttaaagcttatcagggtatccttgtttcttttcgtataattatcaaatatctaatccaataactttgttgaagaattcacaccttgatcttccaagccagtctcaacacacagaaatagagtaggttattagatcttattggataaataaatttaggtattacagtatgtactcaactcatgagacaatgagttaggattttgatcttacacacgcactatttattaactgttaattggcttattaactgttatttatttatttatgatactatatatcttatatatagtgttataaataaatcgttttaatcatttatttaaaataaaagtaaatatctaatttgaattgaatt

SEQ ID NO: 126994 - DNA, 574 bp, Cannabis sativa
tggggcttttgttaaaaataaacttttggcccacaatattctaatattttaagatcttcttaaaggatatacaaggaagaatgtgtttactcattgtataatgaaaatagacttgagtaaggcgtatgatacagtagattagaaatttgtggaagatctcctaaacaatttttctttccctcgagatttattcaatggatccttgtctgcttaagaggtactaagtactttctgttacttaatggaagattacaaggctcttttaaaggggaaaaaagtcttcggtaaggtggccctatatctcctcttttatttgttttaataatagaatacctttctagattgttagctcattattcgaacaaaaaacgatttggattttatcctttttgtaagaatatgagattaaccgatctttgctttatcgatctcatgattttttgcaagggaaatgtgaactccgtgaaattagtttttgaagctcttcaagagttttgtaatgcaacaggtcttgctgccaataaaaagaaatctcacatcttttggggggggggggaggtttaagaggagagta

SEQ ID NO: 126995 - DNA, 583 bp, Cannabis sativa
  modified_base (514)..(538): a, c, t, g, unknown or other
ttagcaatttacaattttcatctaaatttagctgttaaatgccacattggattgtccacgtagatatagtgtacacgtggtacatttttattggttcatataaataattttaaaaaaattaaaaaaaaaatcataaaaaaaatatttttttttcctgttcttttttttttctcctttttctttctttttctttttcaattcctcgattacctatcttctcgctctctcttgaatggatgtaggtactaggtatggtcgccattgccgaggaccatcgagtcgtcgccattatagaggaccaccaagccagcacagttgcaaaggatcaccaacccagatgcagccaccgagaaccacaacttagaacatctgtaagtatcgatcgcctctctctctccctctatctctcagccctgatctcttctctttctcttattcctaatcattcttagctagttatccttgattctctctctctctctcagccacaatcgatctcctctctctctctctnnnnnnnnnnnnnnnnnnnnnnnnnctctctcccaaattgctcacctttctctctctctctctctatctc

SEQ ID NO: 126996 - DNA, 1130 bp, Cannabis sativa
gagccatcagggcacatgagtgatcaaattttgtttttggcacgaggcaaactgatgaaaataatcagtgtttttatcaccgagtttaagcaggtgattcgagagcattactgccaatactcttcttccttatagagaagcctatcaagatcaccttgaagttggcaagaaagaagaagctaagaattggaaggttgagaatgacattgggcagcctgaagttgagattgaatattttttatttgctgaggaagaggaggcccaatctgtaataccctagaattatgaaatagattagcaaaatcctaactagataattatgaataattgagaaattatattattatataatttaatatatgggaattaatatgatttatactatgttaagaccccgttggtgagccatgggaattttggtaattttgacccgagaagggtaaaacagtgaaattaatttatttacgtgcttatgggactatattattatatagtatgcctgtgttgtctttatcaggtgtgttctgacaggttcgcacggtatagtcacaaccaggtgcttcgagcctgaaatgcaattggaattgatttagtggcattttaaatattggtgaataatttgaaaatatatttggatgtatgtgtatgtgaaatgatatttctacccttgtatgtgtgtgggtgagttattaagtcataggggcaaaatggtcttttgacctattgatttacatttaattaaagaggttaattttaagaaaatcaaggtgattttttttgttttaagccctcatacccgaacccctctttatatctcaaccctctttgattttcattttttgatttggtgaatattggcttggattgaagctttgaagttgaggatctttgagtttgttcttaaattgagcttgaggtaatcttctatgattttaatctctgttttattgctgaaaatttattgttggagagcatgaaaatgtgttgtggttgtataaatggattagagatgcatgttcttgttgttgagttgtcttatgcatgcttggagctttaattcttgagtttgtttgggttaagtttggacagaaaattagaggattttatttgtgtatgttgctgttcttaag

SEQ ID NO: 126997 - DNA, 1401 bp, Cannabis sativa
tgtgtggtttgctgacagtggtgctagcaatcacatcacctcagatggtactgctttaaaccagaaacaaccttatgttggtaaggaatctgtcattgtgggtgatggtaacaaaattagaatttcccatattggtaatggtgttcttgatactaatgatgggaagcaattgcagctaaaagaaatgctacttgttcctcaaatagctaaaaatttaattagtgtctctaaactcaccaatgataacaatgttctaatcgagtttcactctaatgtttgtttggtgaaggacaaggcaactcagaaggtggtgcttcgaggagtgcttaaagatggactttacaggctggaaacaccctcatacacttcatccttcacaggttcaactcaaccacatctcacaaataaaaatcaactagagtcatcgtgtctgtctgcttgttttcctgccagtactgatgtaaaccagcataatgctgatgaaaattccgtgtctaagttggatgtttggcataggcgtttaggccatccatctcctaggattttaaagcttgttctagagtcaaacaatgtaagaaatttcaagaatgaaatacaaaagttctgtgatgcatgtcaatatggtaaatcgcatgctcttccacacaaactgtccacaaaccgagccaatactgtattagaacttgtacatactgacctatgggggccagctcccattgcatccaacatcaatcacaagtactacatacagttccttgatgaccatagcagatttgcttggttatacccactcaaagctaaatccgaggcacttaatgcattcatacaatttaaaaatctggtggaaaataagtttgaaaagaaaatcaaaagccttagaactgattggggtggtgagtaccaatccttcactgatctggttcaccaacatggcattgagtttcaacatccttgtactcatgattctgcccaaaatggtcgtgctgagcgcaaacataggcacattgttgaaatgggccttactttgcttgctcaagcacaaatgccactcaaatattggagtgatgcatttgacactgctgtctatctcataaatagacttcctacaccattattagaccacaagtcaccctatgaagtcatctataatcaaaaacctgattataatttcctcaaaacctttggagttgcttgttttccttgcataaggccataccaaacacataagtttcagtttcactcactgaaatgtgttaatcttggttacagcaactcccacaaagggtacaagtacctcactcccacaggtcgtgtctacatttccaaaaatgttgtgttcaatgaacttgagtttcccttcaaaaagggcttcctcaacaactaccaaacaccccaacctgt

SEQ ID NO: 126998 - DNA, 554 bp, Cannabis sativa
  modified_base (326)..(326): a, c, t, g, unknown or other
  modified_base (511)..(517): a, c, t, g, unknown or other
ctagcatggttgacaccttgaagacaaggttttctaacactctcacgactgcagaaatcatgaaccagttaactgagctattcgggatggcatcaattcaagttctctttgaggggactatgaatttcatcaacgcatggatgaaaccttatcagagtgtgcgtgatcacttctacagatgactagttacttccaggaagctgagaatcatggagctattatagatcagacaactcaagcgagtttgatcttaaacattctgactctagcctttctgcccttcacttcaaactatgccatgaacaagttggagcttgactttcacnagttaatcaacaaccttcaaacatttgaaaatttgattggaggaccgcagaaaagaggatctaaagctcctagttctagcaatgctaatggggtggctaaggcagaggcaaacaatgctgtacttccaaacccaaccacaagaagaagttgaagaatagtaagaaaaaggtgttggaaattattnnnnnnngatctatttactatcatgtatgttggattaacaacct

SEQ ID NO: 126999 - DNA, 955 bp, Cannabis sativa
ctttctttttcatttaatgaagtgaacatacaccattttaattcgtactgtgtgtcgcatgtgttttgatcctctattattaacaatatatatactattaataaatgcacttcactagatttggatgagaaaaaaatttaaatcgttttttttttgtctttttttttggggggggattatagactataagatctgctcgtttttaatccctttcaaacttaattgaactgatttttagattagaaattaattcccaatcaaaatctataaaaaatcttgtcgtttcgctcatctcttggccagaatttcactcaagcctgactagcctttaatcgggtcacgcgacccgcctccatcccagctggaggaagaagaagactagctagttgcgaagcccactctcgcttgaggcgcgtggggggcatatgtggctgctcctgacgtcgtttttcgacatttactttttgcaacgtgcttagaatttaatttctgattttttcatgttttttaattaattttttgactctgtttaataattattgtttttttaatgatatttatgcacttaataaattattaaaaataatttttgaaaatttttcgaaatatgtaaatcatagaaaatattttgggtttctttccgttctgtttaacataaccactttcttattttgatttatcttaactatgtgatcttcacctatattctaatttttacatctttcaattatttgttgttttaaaactgtaaaacttaatttttttatacaaaaataatgtgttatagtgaacacttttattttttttattatcaatatattagaagcaattaatatatctctttttcaaaatttagctgaagacttttatatgttgtagaaaatattatttattttagttgtctatatgtgtaattacttgtccaaaactagtatttacatatattagttcacat

SEQ ID NO: 127000 - DNA, 706 bp, Cannabis sativa
aatattcctaattattttttataaagtgttcctaattaatgtactgttctgaatttatttttaataaattattcattatcgaaaaaaaaaagttgtatccattattaatatgatcgaatatatatttatataaatgaatcatttccaagggatcgagttaaagctaaaaaacacgtcacttcaaactgcaaaaattttaaataattttaaacgttttgaaagaaattttttcatatatatgcaaaaaaaaaaaaaaaaagttgtcttaataaaaatactcatattttctttcttttaattattgtgtaaaatgtagatcattatctttgtggcaagatatatacgatctttttgtacaatactacagcgcgtgcaaaatatattatattgtgtttctttccttcattaattaatattatatactatatatattgatatatatcttttttttttattgtattattccaataatctataacatgtcataattttccatgaaaaataaaatatgatattggaaaaataagtagtgtcagtagtaattaactttcatttttggaatatttgatattaaataatatcatgctcaatatgaagaatgatagttactggatacagtagtactgccatgattatctaataatatacatatatttcacaaatttctatatattattgatattattttaataaaagaagcagtata

SEQ ID NO: 127001 - DNA, 964 bp, Cannabis sativa
aattacttctaattacacagttactatgtaattacgtggccacacaaacacgttaaactgtgtaattacctccaattacatccaattccaattcccaggtgactttccaaacgcgccctaaatttgcaaagaaaagtaaacttaagggggttttgccaccaaaataaaagataaggggtttaagtgtattaaaactaaaacacagaggggttttgccactaaaaaataaagaaggggtttaaatgtattaaaactaaaacataaaaaggttttgctacaaaaaaaataagagagttaagtatataaaaattaaaatataaacgaattttaccgcaaattactcgtcattaataaaattaaccaattgtatcatcaattcatcactggttagtgggttaccaaaatttaatcatcacaaaagctaggagattttggtcaactggtactactaattatatatatagggatatgattttgtcccgtgatgtactttcacgcaatgtattctgtggtacattaaatgtgtctcagggtatattaaatgagtgtcaaggtacgtttctactttttaaccctaattacccctaaatcaatctcagccgtcagacaaaataattctcttatctgacggctgtcatacatcacggattacaatccgcgaaagtacaataacaggacaaaatcatatccctatatatatgtttttgaaagatatatatatatatatatatatatagtgtcgacacatacacatatatgtattaatgttggtaggagaatttaattaatagtggttttaaaagcatatacataaattacttattatatggacgtatatattatataatatttaatatgatatttaatagttagtgataacattattaatattttgtttatataattccaaagtaataataagggtaaattgcggcataaatacttaatgtttcagattttatac

SEQ ID NO: 127002 - DNA, 1319 bp, Cannabis sativa
  modified_base (1281)..(1294): a, c, t, g, unknown or other
gtggttcgacctcacttgcgtgaactactacttgattgcgtatacttgcgtagtgtttataaatttcagcaagaattataaatattgcttctggttattctttatttattctgttacctttctccattacgttaacctgattctgaatactctgtagtaaacgtgcagagtatctccaacctatacattaaatttggtgtcacactattactaaatttagcgtcaaaaattctttatactctaaacacaacactaaacattacactaaaaataattttttttcattatcatattattttttaataaaatataatataaaaaacagtattcaaataatttattatccacacgtatcaaagatttacgtgtacaatagattgtttgaattatatttttggcgtattatatttctaaatttattaaagttttgtgaaatgtgttaaataactataatgtacacaaccgtaaaaaataaattattttttttagaataccgaaataaataggagtgtatcaatatactattttctaaaataattataaaagaaagtaaatgtcgtgcactgtaacacactgtaaaatggtgtgttatatggagctatatttgagactttatgaactggaaaatgaaaaaatgcagtctccttaaaactgctctaatatataacaaaatttaccaatttaccacaaattttaaattgaaaacgcatatagagatggagtgactctcatatagtataatagtaacatgataaatcactcaatacataataaacttaaaagtgaatatgttcatttaatagatttgagtgaagattcacttatttgttagttttcataaaaaagaaattgatggagtgggtttctctctccgcggttccacctctatttcactcaataattataaatgtgttgggcaaaaggcaagaaataaaagagaggtaataataaacacagcacaatcccctcacaatggccaagatagattctatatttctttcattctcactttacaaaacaagtttaactactcctactcccactactacatcaacatgcacgtttgcacagtacaataacacgtaaaagacaccaaaactttctacttttctttttaatttaaaaaataaaaaaaattaaaactccttttctctctaaatgatgttaataaatagatgaatttttctctctctagggaaaccaccacgtcatgactcgccctttatccaaccaccgtttgccgtcccccacaacccaaataatctctctctctctctctcnnnnnnnnnnnnnntctctctatatatatatgtatgtat

SEQ ID NO: 127003 - DNA, 1009 bp, Cannabis sativa
  modified_base (946)..(956): a, c, t, g, unknown or other
gtcttttatagcagctgtaatgggaaagatggggttcagtattcattggattactcttatcttgaattttttacaaactactcaactttcttttattatcaatggtgcaattacgggcaatgtgaaacctcaacgtggactccgataaggagatcctttatctccttatttgttcttgatctgttcagaaggattgtctcgcttgttacaatatgaagagtccattggctgcttaaaaggattagctatctcaagacactctccatctatctctcacttgctctttgctgatgatagtttgttgttttgtgaggcggatgatagatcttgtggcgcaattaaaagagttttggatacttatcacagagcttctggtcaacaattgaacactggtaaatctgtcatgtctttttcaccaaatacacctaaggctggtaaacactccttccgaaatattcttggtatgcctatatgtgattgtcatgaatcttaccttggtttaccagcttattctgaacgagataagaaccaattgtttaatcaaatcaaggagcgtatttggaagttattacatgcctggactgataagatattttcagctagtggtaaggaagttctactaaaggcagtcattcaatccattcccacatacgcaatgagttgcttcaaacttcctgttaaattttgtcgagagattgagagtgtgatgtctaattattggtggggcttcacttcgaataagaagaaaatccattggaaataatggaagtttctgtgtaaatccaaaatggaaggtggtctaggattccgcaactttacccatttcaatcaagctcttctagctaaacaaacttggaggttattccaaaatcataactctcttctataccatgtactcaagggtcgatattgttgggtttggtgccctaaataaaacccattacannnnnnnnnnntatcaatttaagagatttgaagtaatttatatttacatgtattttacatgctt

SEQ ID NO: 127004 - DNA, 554 bp, Cannabis sativa
gatcctttctttggacgtttttcctgtgattgactttaacttttaggctgtgtcatagaatgttttgatttacttttctttgtttgagcatatagttttttctcatagaatgtcgtcggaatttcattatctttaggcaataaatcttttaaaaaactcagtaaacctgtcaaacttcggtcactcaatccgtgtcttgccttcaaattgtacaatactagtagcgttgataattttgtaaaacttttacaaccagggtaaatcggtttctcagcatcactaagaagtgcctcaaacttgtctggttctatctgggttccaaattgtgcatcatcaatcatttcatctaatggatcccagttcactttttctctattcttccttactttactaatcatagtaggggaatcatctaaatttatgagtttctctccatgattataccaaacaatataacttttatcgatcccattgaaaaatagggaattaaacttttgaacatataatcatgattatagtccactgtactgacgacactataatcataaacaaat

SEQ ID NO: 127005 - DNA, 1227 bp, Cannabis sativa
ataccattcaaagatggtcaaagatcttaccttagccacagacagtgaccatttctgttggccaaaaatagtgttacaagaacaatgactaatcttgatatagcatatattaaaatgaccatcttgacgagttgatcatgaatgtacaacccattagctcaaaaaagcatcgaccttgccaaaaaaaatgcttccaatggacggagatacccaaaatctcatcacaaaatagtagtgagttgacaaaaatgacttagtgggcgatcctcttctagtgacgctgattctaatggtaccaaccattcatcaaatggttgccaagttttgctaaaaagtcacctcaaatttttgatgtcaaaacctcgctccacccgtacaagtgcatcttagctctaattgtcaccaaagttaaggtgtttcatccttgttggctagtggttgtgtacccctggtggatttcgaaaatgatggaccaattgtggttggatctgggcttggccatgttaccccacaagatatgttttcaagaaggggggtgaattgaaaatttaaaataattttggtaatttaaaacttaatgcacaaaatcatgcagttagtcaaattaattaagtaaatgaaaatagtatggaaagctaatatatatagcaaataattaaacttgtaaagtaaagagtttgacaggtaagaagttgcaaactctcaatttttacaaggtttggtagacaaggccacctacgttcttggtttttaaagctatgagcctagctttgagttccactatcaagccaagttaacgggcttgactaatacttacaatcaggaatttcttactaatgtgtttaaaaacctcttacaatagttttcactgccaaagactatcaacctcaatcttaaattattatagtaccaatctcactctaatcgaattgtttacaatagcggtgccaacctcacctgaacaaaatatgaaaatgtgtttatgattacaagcaaattcactctagcaatgtaatgacacaataaagaacctagggagattagcaagcatacttagaagaagtaaatacaaattttagttcaaagtgtgtaagaagtattttgttagattttaaactaggaagctcttgaaatcacttaaaagaatttggtatatgtaataaatgttatatatttgttatttaacaaatatataatgaagattaaaatgtggcatattatatatta

SEQ ID NO: 127006 - DNA, 539 bp, Cannabis sativa
aaaaaaaaaaaaaaaaatcatacttgagtttgactgaacatatccgattctcaaaataattttcaaccatagtcatatatatacaattaaaataaataaataatcactagaaagataaataaataaataaattattttattgttaaaataaaagtgccaaattatagtaaatatatcccaattattggaatctaaatttgagaagaaaaaaaattaagtattttttgaaataaaaatgatgtaactttgttttgttttatttttttaaatgagatattaaatttataatggtactgttaaattatatttaaaatcatatatataacagtatcacgtaattttatttttttaaaatgagatattaaatttataatattattatgaaatttagctttatataaaatatgattttttttgtgaaaatttaaaaagaaaatagataaataatttttgagagattttatatatatacatatatatatatataaaaattctatataaagtatacttatataactgaaattcttggtttttgagaa

SEQ ID NO: 127007 - DNA, 555 bp, Cannabis sativa
aaaaacatagatcatttttgtattattcttgactaataatttatgattatttgaaaattctcagctaaatataaaaggtaaaactgtaaaagcatattattcaatgtgaaatataacatattacacaattttattaagagcatagacattattaataatgaaaaaaagcatagctactagacattacatttggtagtaaccatatatatatatatatatatatatagtaatgcttcctgaataataatatgaaaacattatcttaataatatataaacccaagtacgtagtactctaaatatttatagtttcatagaatcaaggtaactttttccttgcagctcactcgaaaaaaaatccttgaaatattctttattggacaatgttttgtataaggcaggattttttggagtgatcaaggtgttggctggggctatgacagaatctatacttaaattatggaatgtggcaattgagagtctttcttgtgtagagtttattgtcactctgtgctcaatactacgatatattccatttgtcaaaatctgcaaaaaa

SEQ ID NO: 127008 - DNA, 1264 bp, Cannabis sativa
  modified_base (816)..(816): a, c, t, g, unknown or other
acctcacttgcgtgagtttactacttgattgtgtgtacttgcgtattgtctataaatttcgtaacagcttggtagcttttgtttggtagagagacaccttcagaagaacgcaatacctaaaagtatgttcagagtgaaagtctggaaggctatgtatgtctgaatgttacatttggtagtgtttccccatcatgagcttcctttagcaaaacctcttctagagcctgatgagtgttaagttgttggtccttagaatgttcactctgactttgtaaaaccccgcaacctcgaccaataaaggaatataaaaggaacagtacaaagaccttaataattggtgtttaacatgttaaggtatttgcatttcccattttttattgccaccaatttttcccattaatatttaaattctatgaatatctgtacataagtttgttgtagagttttcatccctaaaatatataaatatagaaatactaatcacaagtctaccattaattcaaaccaaaagacgactttaaagaagatatataaatatgatgaatttataagcaaaattgaattgacaaaaagtgttctatttttcttccttttctattacatcttcgtagctttttaaatagaatttgctattatgtcccgtataatttacgcagaagacgatgacttggacttggtctaaccctaattaatgtttgtaacaaatattatacataattatatagaagaagagtgctacatctaacttaatgttataatttcttagtcaatctccacgctcgaaaatatacgtcggaatattttttttcaattttnttttttttcacggcggtgttcgttatgcttacaacatcatctctgtaaaatttttaaaaaaatttgaatagtttacaatgtcaaaaatacgtttgaagttttttgaacccgcgtggtaaactagaatatcaagaactctatttttggtactataaactatttggaattttttaaaatttacgagaatgatactgtaactataacgaataccgctatgaaaaataaaattaaaaaaaatatttccacatgtaatttcgaacgtaaaagttaactgaaaaattgtaataagaagctgtagtatatattatatataatttttctttaatggtaacagtaccataccacgcgtatatatatactaggtgaatgtacgtgccgagccacgtattgctagttttatttaagattttggtctttttaagattttgaatgtattttatttttaaag

SEQ ID NO: 127009 - DNA, 1234 bp, Cannabis sativa
ttaacaaaacaagggtaactttttttacaaaacacagagtctaaaatagtatttaccttaattctaaatatgtattaaataaaaaatagaaaaattgaataaatataatttattgactaaattaacacaaactaggaaaataatcaatatttcaaattaataaaatttttataaaaaattcaaaaaaaatttctatttttttttaaaaagcactgccataaacaacaagttgtttttcaaccgaagggctgctcaagacaaggaaaaacaacacgtcatttgggagcttcttcaacctttagtcgggtagaaaataacctgatttcagtcacgtgggttcgacgaacccgacccaaacttgatcgaaattttcaatttcgacgaccaaaatagcccaaattaattctaaatgaatctaaatgcaaaaattaagacattcatatagatttcatgcatcgaaaatacgtaaaacaaagactttaaaattaaaaaaaaaaaatcgagtccgaacgatatttccagaaaattcttgagatttttttgttttttaaattggtttttcatgcttaaaatgatctataatactatatgaatgtattgatgtatatagaaattcaagtaaacatcgaaaaatgaaaactcaaattggagcaaacggactgaaaactaaacttttatgtatatatatactcgtacacaatgtatataccatataagatcatcataaatgtatggaaagagagtattacatacaattttatatttaatgtaaaatatatatataaatatataacgaaaaagatacatatacaaccatatataaatgtgtatattatatgtgtatatatatgaacaaaataaaattctaaatataattatatatatgataatatgaatggacataaatatgaaagtatatatacatgaaaaaaatatattggtacaatcgaatatatatatatatgtatatatgaaaatcctagatataatcaaggcagagataaaaacggttatgatactaactgttagactataatataatataaaaaataaaacatatactaacgatatgtaatgcggaataactacaaacatattaaaaatatatatgcgatgaaaggaccaaaatacctccagctattgatgtttgagcttcaatccctagaatagcttcagtatgagaattcaggtttcctcgctctctcaactctatttagatagaattttgatgttt

SEQ ID NO: 127010 - DNA, 684 bp, Cannabis sativa
gttctcatgtcaaacgtacaactaatatagctgctcacgagttggcaaaatttgctttaggggtggatgaagctttctttcgatcagattgtattcccccgtataaactttgttgttgtaaaatgatgtactatcttaatttataatagcaaattttattcttaaaaaaaaaaaaaaaatccttcctatatgtatggcttcacctttgatattataaagcatgaaaaaatgggcatgtgggaaagagttgtgcttgtaataagttataacaacatattaatccaaaaaattggcattgataaagcttaattttacaacaacaaaaataacagaaaacaaaaacacatccaatactatcacacaaattaagatagctaattcatgacaaaataatcaagcaaaaggtaattaataatttaatgcttcaattattatgatatatatgcatatgactacatgatagaacaaccatgagggttttcatcactaaaagccgcaccagtttggtggccaaagatagcagtagtggaggcagatccgcgggcaggattatagtagtgagtgcggtcatgatgattatcgtagccatgtttgtagtagttgtaagaagaagaaggctgtggtgcgtagtgtgggactgggccagtgatttggtgttgattgataatactgtaatcatcaggg

SEQ ID NO: 127011 - DNA, 2181 bp, Cannabis sativa
ccaagaatagcctctaaaaatacagttattcctgttcatccacacattgtaaatcactgcagctaagattaccatatggatcctgtgcagcttgttccttctgtcaagaatcaaccaattgttccagccatgatactcgaccggccaagacttcttccccaaccaatccccgatctgctctagcaccatttgagagtacctgcactcgaaaaaaagatgttggtttgtctcgattgtatcaccacaaaccgggcaatcagtattgtccaacacgatgtgaaactgttggaacttgtctcgagtgagtagctgagtatttaacgcttgccataggataaacctgtgttttggcatgatgaaagagcaccaaacactcctgctataatcccaagttacctgcggcaatttgctattatatagcagatttgttttgaactttccattagcacctgcattaacaatatcagatctagaaaatttatcccgaacatgacaaattttcttccaataccaactcgaatcagtcttgagatcataggaccaaatggaattatttttgagataaatatcattgatccatttcacccaaagcaagtcacttttggatgaaatggcccaaaggtatttagctatgatagcttcattccatttagtcccctctttgaaccccagacctccataatgtttaggcaagcaaactttctcccagctaaccacatggagcttacttctattcccattccaaccccaaaggaaccctctacaaagcttttctatctctttggtgatgctttgaggcaagataaaaatactcatccagtaattccgaagcccaagaagaactgaatgaattagttgtgctcttcctgcaaaagaaaggtgtctagttgcccaacaaagaagtctttgtttgatcttcttgattatcacactacaatcttcagctttccatttagtcggcctcaaaggaactcccaggtactttaggggaaaagtaccctcagttagattcaattctctcattatagcctgcttgctctcttctccaacccctccaaaatacatctgagatttacctgtgtttatagcaagccctgatatatctttgaactcctccagacacttctttataacctggatcgattgcatatttcccttacaaaataatatgagatcatcagcaaaacataagtttatgatgttgagattcttacacatggggtggaatctaaaatctgacttcttggctgccatttgcaacttcctcgttaagaactccattatcaaaacaaatagaagatgagaaaggggatccccttgtctcaaacctttattcccattgaaactgccttgaactcttccattcataagaattgaataagttgtggctctcacacaagtcattatccaattgatgaatctagctggaaatttataggcattaagaagctcctccagaaaatcccaatttaccgtatcatacgctttgctgatgtcaactttgatagtacatctaggagacacgttcttcctgttgtaattctttaagatatcttgaagaatcatgatattgtgcgcaatcatcgatctccccttaacaaaagctccttgattctgattaacaagaatgggcaacacctgagcaagcctggaacacaacaatttagaaatgcatttgtagaccgtagagcaacaagcaattggtctataatccactgctttagtgggattctcgatcttaggaatgagagtaatcattgttgcatgaagctcctttggcatgaccccattgttgaaaaaaatttcaatagctttgatgaaatcagttcccaaatccgcccacatcttcttgaaaaagccagctccatacccatcaggtctcggggcttttgagtccggtatactgaagaaagcttttcttatctcttttgctgtgaaaggtttaatcatgttcagctgttgatcaacattcagccgattgccttgctcaatacaatctttcctgagactctgagaagtgaggctggaagtccccataaaaccctgaaagtgattcataaaatgtttcaccacttcaggaaacttctcaatgatatctccatgatcattggtgtaagaaactatactattctccatccttctttttttcaaaaaggcatggaaaaaagcattattctcatc

SEQ ID NO: 127012 - DNA, 675 bp, Cannabis sativa
ttcacttttccaacaactccaagtctagatattcaaagagatgaagtctcgttcacatggtatggataagctaaataaagttgaaggacaaaagtaatattgggaatgaatactatcatcggttatctaagagcagaagctaaagcgattatctaaagggtctagctttctagatactgcttacgtacgtggtacatctctggcactatcctgagaaatttagcaacttgtctcctctatagaccttagaaatgtgcacgacaaaaaggagatgacctttttagagggacatccattatcctgacattctttttttttcaacgacgacacacacctcaatatgtcattgtcaatggtacgtatcgtacggaagacaactctttagaattgggcatcacctaccaagtccaataactcaaattataatattaaattatgtatttttactccatcaatgggcttttattgcacgaaaccctaacgagtcccgaataagcacatatgcctataaatatgacactatatcttcatgcaaatgattcaaaatcttttggtaatacattaaagagttgtaaaaatactatatccaagtgcttataaaattgtctcgtgaattatagttcattaacacctaaactacataaaaattgtatctcattttcttcttaatcttag

SEQ ID NO: 127013 - DNA, 1241 bp, Cannabis sativa
ttcatattgaggatgttaatcaacatacttgtgagcagatctaagatcctggtaaaataaattccaacacagactttcattctaacggtcatgaccgcccattatgattaacggtcaccccaactgtcatgactttacatattcttcattaattcaggctcagtatttttgggccacgtgtcattattcttgccacgccgtcgtcgttaaaattttggtaaacatttaccccccaagtttctagcgatatgactagacagtagaaactttcttgtgcagtccatgccttggtttagttattgacgacttagtgatacggtactgagaatactacgcctatactagaatcacatgctacatgtgaaaatactgggattttggtaagcttaaaagactttagaattgctcataacactcctgcaactctctactgcgacaatgatgctgcaattcacattattatctgaaaactcagtcttccgtgaacgcactaaacacgttgatattgatcgtcacattgttagaaaaaaagttcaacaagggaaactcaagattatgcacgtttcttccaacaacaatctaactgacatcttcacaaagccattatttctagcttctttcaaagatattatcttcaagatgggtgtcaaggacctctacacttcaccttgagggggctattagatacttgagatggtaattaaataggtttagttagttggacacatgtcctttttgtcagtgagtttgttggattttgtaacatagttataacaaaatcccaactccctcttctacccttgtatcaagagcttagctctatatatattttaatcgtgttctatctttaataaattagaataatgcaattactttgttctgcaattctcttaactaaaattatcaaaaagtgagttgtttgtaagttcataaatgaagataacatatgaaaattcatgaatggtcaggccttcaaatgtcatcgaatgggaattagctataacttgtggggcatgaggtcaatcagggactgcatattttttgagcatggagcaactatccacaatggaattgtccttgaggactatcttgtaacattagcaactcttttcctattagaaatcaagatttctattcttgaacccaataaaaagttctataagtcctaaaaatgatcacaatgaaaaaaattaagagcatgtcataattgttggaattaattttactaggatcttagatct

SEQ ID NO: 127014 - DNA, 715 bp, Cannabis sativa
agtaacatttttttgttgaaaaaaagttagaaagtatttgataaattttgttaggaaatcaccgtgtatatgggttttctctttaaattctttcttttacgactttaatatatttttaaattttcatactttatattttttaaattcatttgtgtgataatatgttgtggtatagttcttctaaatgtaaggatctcctaaagttgttctagtaatgaaaagttagatgacatctggaagggcattctcggaataagttgtccatcggaagaaatcttgtggaatggtagatgtcattcgaaagagcgttcccaaatgtctatcatgtccacctcgaaggagtcttcaagaaagctagtcctcctctagaaaagagttccagatggctagttgttctctccttgaagagagtcccgtatggtcgactccaactatccatttattatccaggaagacctttcaacatgtgcttcagttcatagtctcagaagcttcgcttcatccaagaacactataacttaagctaacatggagattctgttacgagaagttcattaagtttcttaagttgtaacaaacttaacaacttagcacttccaaccatcgactttgtgatccatatccctaatctataaataccactaacacttatcattttggagagacgtgattaacaaaagagttttaagagaggtgatcttgagaaagaaagatt

SEQ ID NO: 127015 - DNA, 1165 bp, Cannabis sativa
  modified_base (1008)..(1018): a, c, t, g, unknown or other
aagcacgatatatcataaaattataatttttacccctctcgggtcaaaattataaaaatgccactgacacaccaacagagtcttaaaatgcaatttatcaaacatgcacttatgaccttaagacaacccaagtttccatcggtctctcattatttttgctagtagctattcggaattacttgtttgaagtttttagggattttccaagttcatgactttttttaaacctccaatttgggaattccattgctaaaatgaaatttcatctatttttttaaaatttgcatggtcgacacattagacatgttttttcctttcaaaaattcttacttttgtccagttcttacctctctctcttccttgttttgtagatgaacccagacgattattagggaggtaactaccaaatagataacgacctacttcatcttctttacgagaaccaaccctgacttcttatagattcatcctcatcgagtgaaaactcatctacttcaagcttcaacgagtggaaagtcacgagtgactcatcggagttcccggagcctatggtacagcacctcattaccctaaccaaatcagtacagaaggataaaatcgattcatttgggaattgaacagaggttggaggaattatctgcctgctacttggatgtacaaggtctaggctgacgtcccaaacacaatgccagaagactgatcagagcctttgaagaaaaactctgcattagtagaaatcgctattattgtagcaaagcatacttccaaaccaaatcatccacccaaacgtaaggtgatggcaaaaacaaaacaaacttataggaaagcttcggataaggacccacactttgcctaaatttttacgatggccagtgcagaactagctggacctcctaaggaggatgttgaaatagtcgttggggacattgaagtacagaaggttgaggattagggtaaggtccatgcagccacttttcctaatggtgaaggagaagaagaagaagaagnnnnnnnnnnngaagaagaagaagaagaagaggctccccaagttcttccgttcagacggtaaaatgaggtcggagagtattggaattttatgccctaaataaaatctatttcaatatgattagatttactaattaataaaagatcagaaattatttta

SEQ ID NO: 127016 - DNA, 984 bp, Cannabis sativa
ttgtaatatttcaattaattgagtaatcttttatctatattttttgttttgaagagaaatacaattttagcatatataatatttatgctttttaatatgttttgaatttaagtatacatctatattttgttaaataatgtattctttacttttcaatactcttatataatatttatagatggtttgttttctttggtgtttctatgtgtatatagattataaaagtattaaaaggagaccttagagatgtgaagctgaagactttgtaatcagatcttttctataattctgctgatgatcaacacacaattcaagccacatcatctcttttcacatttagagagttcatacgtaaattacctgtaaacgacctaagaattcttaaaggtcagttttattgggatgataatgatgatgatgaggaggacatgatgagtaagagagaagatgctcgtgatgagattatcgtaattgaggagcttatcaaatattctactcttgcaaaacatgactttgtggagtttatcttcaaagagtttcattctagctatagcaaaaagaagttgaaactaaaagggagtgatctagcattgaaaattgtggatgttgaaggttattccatgcctttaaatttgatctctgccatgaaagacttgtttcacaaacatggagacataagtacacaatcaagttattccaaagagttcaagagcatttgcttttacttaatatgtaaagtggtgaaagaatgcatactactttggtcactgacatcactaaacatcgtcttcaacaatggtatcactacataaactttgtaaaggactttacttactttgaggtggactttgtgtgggaatgtctaaagaagatcacaggagatttctattatcaacaaatgaataagctgttgtgtacagatgtcccaacaatactaaaaaagaggattgatgagttgcagaagaatataagtgagtaccagag

SEQ ID NO: 127017 - DNA, 1744 bp, Cannabis sativa
gttaccaaacgccaccatagttatacaaaattttaaatattttttacaatttttaagattttattacataaaatatgatcttttgatatctttttatttattaacgcagtttttcatcagctgatataagaagattgtaaaaataaagaggactgcgatgaattaatttgactaaataaaactgacataaataaaatagacaccatggatttatagtagttcacccccatgtcacaatggtaatggggatacgtctgcttttatttttattaatttgatctgacacactagagttatgttctcaagagtgtgtggacaataatagggttgagcataaaatccagaaaatcgaaaaaaccgttcaaactgacctaccgaacaccactggaatcgaaaccggtagaaccgaaaactgaaaaaactaccaacggtttaaaccgccaatggtcggtcagtttttatttttttttatagtaatcgatcaataaaatctaaaccgaccgaaataacttatacatatataatttttttactttatttattatactgtatacttatgataatatataatatattatttttttattaatattaaaatttacaagtataactttattaaagttgattgacttgactctttctcttcaaactctttctttctttatctcttctgatctcattttttttctgttactactactatagtttagggcttcaaactcaaagccccataatccattttctcttcttctcattttctttctttctttctgctactgctactataatttgtgctaatgtgcttataatataaatttgattatattttacacaaaaaaatcgcttttggcggtttgaaccgaccaaactgcggttcacattggtcagttttaaggatgtttttggattggtcggtcggttttcggattgaaccaatccaaaccgaaaactgaaattcagattttcatttgtaaaaaaacgaccaaaccgaccgatgctcagctctagacaataatacaacaagagatttctaggcaaaacctgtattgagacttatgaacacagagctcatgggagaccccaagattcacaaatttgataaagatggtagttgtaagattcttggaaataataaaccaataagaataaagaaagagaatggtacatattcttgaaaactgtgaatgtcaatggtgtttggtaagtgaggcttagtgtcgacaaagtgtggagagcttaggaaaaaggtgaaggaagggacataatgtttttagtagtcgtccagtaagcaagtgattcccccctttaccctagcctattacaatctctatatataggctttaggatttatcagtgatcccccacatgtcggggtgtctgataagagcctttaggctctaaaattattgattctccatagggccgacaaaacgggtcagacacgatgacacgactcgaaacccgcacaaaagttagcaggtttgagtttgccttaaatgggttcgggtcgtgttcgggttgactcgtctaacccgtttaataaatgggtcgtgttcgggttgacacggctaacacgaaattgacccgttaatgacctatttaaagttattttagtaccttaacgtgtcataaatgggttatgaacgtgtcgaatacttcataaacgtgttattggttgacatgtctaaataaaatatacttataaacgggttacacaggtcgtgtctgttgggttttatgccct

SEQ ID NO: 127018 - DNA, 691 bp, Cannabis sativa
attaattgggtttatttatgtgtgaaatgacttaattacccttatatgtgtgtgatgtgtatttttagccctaggggaaaattagtcattttgaccttaatgatatgtttgataaaagaatgatattttgagaaaatgaggattaattttttggttttatcctccttcatactcgaacccctctctctctttaaccccatttcaactttgtgttttggatggaaaattgttgaagtttagtgttggattgaagcttggtattgaggaactttgagcttggaagtgaggtagttctttctactatttttatttgaatttccttgctaaattatttggtgatgaaaagcatgaaaaggattgtgatgctttgatttgcatgtgtgtgaattttgggtttctctaagtgtttatgagcatgattttgttgggatttatgttgctaagctttggttgagattattgggtattctctaggttagaactcgtgtaatatttggtattttgcagctggaattaatagagttgattgggtttgaagctctagttcaagagcttgaaagtttgttcattagaacttgatttcatgcttgttgggcaatttgatttttggggtttaatgttggattttgatgcatgagcatgtattttaaactctctgtatgattattaaagacctatttgatggtttgga

SEQ ID NO: 127019 - DNA, 1631 bp, Cannabis sativa
accaaagattatcaacacaactaagcacaaagcatcaatattaagttaatcttccacatacatgcatacaagaactccaacaccaaaaagcatgctttaccaacttaaattctaggaataaaacttaagattaaagttgtagaaagctacctcaagtttaaagtaaagatcaaccctagcacctccaactgccaagcttgaattccaacacaaactcaagcaaaacaacaaattgaagagatggatttagagagagagagagagagagagagggggggtcgattttgagaagagaaataaaccgaaaaatacttcaatttttagccaagatttcctttttgttgaaacataaatcaatttaggcaaaattacaataatgcccctagggccatataacacacaactaagcattcaagggaaattatgtcatttccatcacatatacagtcaaataaattacagaatattcacacaccaataaaatgccattacataatcccgaaaatgaatttcggccccgaatccagttcggcccaaaatttccaattgtgactataccgccccgacctgtcagaaaacacctgaaaaagaacaaagcatgtatactatataataatatagcccataagcacatcataatataaattccacagtttttacccttctctggtaaaaattactaaaatgcccctgactcaccaaggggtcttaacatgtcatatatcaaattaattcacatataataagttatataataatataattttacaataatacacattcaactagttagggtttgctaatccattttcttaatcttagggtattacaacaaaactctaatatcaatgcattagcaaaactagcatcccagtatgatctcgacagattgaattaccagttgaagtcttgagcgacccaagtaaatgtgaaaaggaagaagtcaaaatgataaatacttcatcaacatggatgacacctatagtcaagtatctactcagcggagaacttcctgcagacaaaactaaggcacgtaaattcttgtattcaatacctcgctatataatagttgaaggcaaattatacaggaggggttattccatgcctctcttacggtgtgtgttacccgtagaagccaatgaaataattaaagaaattcatgaaggcttctgtggagaccatgcaagttggcaaagcctatcaaagaaaatcattcgtcaaagatactactagccaacaatcaacaaagacacacgtgaatttgttaagagatgcgacaaatgccaaaggttttcacatatacctcgcgtaccaccaacatatttgagaatgatgacctcgccatacccatttacaatatggggcattgatctgattggggcattacccacagggcgaggaggagtgaaatatgtagtggtggcagtcgacttcttcacaaagtggacagaagctgaacctctagtttccataacttgcaaaaaagtcctcgacttcgttatcaaaagcatcatttgcaggtttggaatcctaatcaaaatagtatctgacaatagaactcaatttgatggtgaattgttcactgagttttgtgagaggaataaaattattaaaagcttctcattagtatc

SEQ ID NO: 127020 - DNA, 750 bp, Cannabis sativa
  modified_base (699)..(714): a, c, t, g, unknown or other
tcgaaccaacagagatagtaacaaaattatctgttattacttgtgtttttagtcctaatttgtttctattatgactagaattgcaagtaataattaattgcttcatttcttgtgttgtttaaagaggtataattgataaaagatgttgaaagaattcatcaaattattataagtaaattatagtgaattggcctaccacatggaaaaaatattagtaaaattttggtgtgagtggttatcaaaaaaaacatttggtgtgagtttcattttatcattaaaaaaataatattctctacacataatttataaacatgtgatgtgcaagttgtacttgtttttacggataatgatcaaataaataaaactcatttcccacgttttattatttttgtttgaagactcaaatcaaaagtatcccaaaaaccttttcaaattagtaccaaccaactagttgaaacaatatttagatatttgcaaaagacccacattttattttcaactataataaataccaaacaaataaatgatggtattagttaggagtgtatattaatcggttaaaagatcgagttacaaaaatttaagtacaacttacttaattaagaaaaaaaaaatagtaacttactcaataaaattggtcggtttggttggattaactcattcaaactgaccactaatatattttttttaatttttttnnnnnnnnnnnnnnnntgttatattttagttaattgtaataatgagacaaat

SEQ ID NO: 127021 - DNA, 785 bp, Cannabis sativa
ctaaaatatatttatgtcagcactaattgtaacttaaaatttaaaaagaaaaggtcattaactaaatgtaattcatattcattaagcttattagttgagataagaattagattttagtgttaataattttatatcttatcttacatgtaagggtttttattatatttttcattactccattaaattcattttcattcatctatttatttttattctctacaaattcccacacatacaatccaaactcttctacttcacctgcctctcacaattgaatgtcaatatcttctctcaccgtcattctcatttctctgtacacttccaccaagtgttctcattaccaattcaccatcaccgaatgctccttcaacttttctaaagtattattaggtatcatttttttttttttcattaactttgcctctccgctcttacaaattcgagttgtttctttgcgagtcataatcaaccatgttgaatcgtgaggtgaacttttcttgacaaaattaatgagggtttgagggtttcaagttgtttatttttttttgattgtttatggaatttagtgtgggtaaatagaatttggtaactgatgattctaacttttaatgggtcatttgtagggatgcacaaggggcgggaaattagcggggagtgctctccctgttcccatcctgcttactctccttcggggatggggcgggaaatctcctattgtaaaaataaaatttattttaaaaaattaaatgtataaaattattaaattacataaaagataaaatatt

SEQ ID NO: 127022 - DNA, 1593 bp, Cannabis sativa
aaataaaatacatcttttcgctctgatctatgtctcatactatagagctcttcataagcttcaaaacggtatatcgaatgtctaaaacagacactcgagtgaaaagttatagctaaaatacgaaaatcgggattcctgaaaagttgaccatccggaattccggttggtgcagccctgtaccatccaaaattctggttcaccacagcagaaactcaaaaatttcaaatatttaaagtcccaaaacttgctccaaacctaaccaattattcccaaacttaacaaaacagttctacaacatgtatacaacatatctcaacactcaaaaccaacaattaacttaaaattacaaaaataccattgttgagtgagttcttgagttcttaaactcaactcacctaaccaaagcataatagttccctaaaacttaaaattaaaactttaaacaatctttaattaactccaagaacatgctctgaactcaacaaaatctacagatccaaaatcaagcaaaatcctcaaaaatctcaacctaaaatcctaaaaatcattaagagtaagtgaagaaagttacctcaaattttagacagctcctagtgttgattttcaacaagaaatgggctgaagttggggttggttttgccttgattctgttggattctaagggcttcgaaagggaagaagagtgtgagaaagagttatgcgacttttcttaatttttgatttttctatacttatctatctaataaattaaaaataacataaatctaaaaaaaaataatttctatttcagcctatagaagacactaaagacaaaaatactataccattctataaaagactaatatgctcctccattacatacttaaataaaataaagcctaagggtattttggtcattttctagctaatccagctctaccaccaaagcaacaagaaccaaaacaaccaaggcgcaagaaagcaaagacacaacaacaataagagcattattgaatacaaagatacaatttcaataaagaaaacactatattagattttgtaagttctaaaaatgatttcaatatttttttttaacatgaattatatcttcaaacagtattggttttgaataaaataaaaaatttcagaatatagaatttccttaaaaaataaaattacaacaataataaaatcggttatattcaacatgcacaaaaaaaaagcaatcaatgaaaatggaaccgattatattaaagatgtaccaacaaacataatcaataaaaaaaaatcgattctatataatagatgcatcgacaaacaagttaataaacaaacaaaatacatataagaccactaaaaaattaaccggttaagaaaaagaaatagcattagaaaaagaacatattaattgaaaaagaaaccggttaaatatacaaagaacctttggccagagaaggaaacataaaaaaaccggttaaaattaaagaaaacagtatataaaaaaaaacacaatgtaacaaaaacacttccaataaaaaatgtaaaaaccataaaaatatgtattacaaaaaaaaaatagaaaacgttgtaaatatatatatgttggaaattatt

SEQ ID NO: 127023 - DNA, 1873 bp, Cannabis sativa
agtcaaatccttgcatctatgatgaaaagtgaagtcggttttctgtccaattttcctcacgatccttgttaaatattccatacccagtacaaaaagcaaaggggacattggatcgccttgtctcagacctctttttgcctcaaagtagccatgtagggatccattaatcatcaatgaaaatctaggagttcgaatgcataacatcacaagttgaatgaactgatcaggaaaatgcaatccatacatttcttcaatgaagctccattcaattgtgtcataagctttttgcaaatcaagattgataacacaactagactttgtcaacttccttccataatgtcgaaccagatcctggcatatcattatattatgtgcaatgaatctcccttgaacaaaacctccctgattgtcagctaccaagtgaggtaatatgcaattgagtctcgagcatatcagtttggtggctgccttgtatatcacattgcaacaagcaataggcctgtagtctctcactgtattaggccatttcaacttaggcacaagtgttagaacagtgttgtttatttctctgagaagcttccctattttaagtaaactgatgattgctttagctacttcagtgcctgtaatattccaatttcctcgaaaaaaggagctcccaaaaccatttgatcctggagctttgttaccaggaatagcgaaaattgcctcgttaacttcctctcgagtgtaatctctcaagagaaaatcagcttgctgctgggataaaaactccccttctctaagtatgctctgctgaatcgacttcctcccttgcatactgctaccaagtaactcattataatatcgaataaaagcttcaatgttggccctcgactcttcaatccttactccttcggcattcacaatagtaattacttgattgtgtctccttctctctcggatactagtgtggaaaagagctgaattttcatcacctacctttgccgagtttagctttgctttttgctgcaaaaaagacaagtaattcttgaaaataagagcataatgagtcctgagatctttttcctgctggtgtaaaatatcattcaagggctgctgctgaagtaaagtttgacattcatcaagctttgctttagcttgagcttcctaagcacaaatatcagcaaaatgatcattattcaaagccttaagagcaactttcatactcttaagcttagaaacaacccgaaacatcagagtcccattgcattgttgctgccaaatttgctgatttcagcatatctaggatgcgattcccacatagagaaatacttaaaaggcttccttccacaaacaacattgttatgaaagttcagaactgcaggagtatggtcaaaaatactctcattcataaaaacaacttcagcagtaggatgtgcgtccgaccagtcttgattagctaatgcacggtcgatcttggagtaaattttgtcatctccaaattgcttgttgcaccatgtgtagaaactcccactgagtttaatgtcatccaatctacaatgagcaataccatcaataaattctatagaagtagagtacctcactcgcttgccaattctctcttcctttcctttgtcaaaatatcattgaaatcccccattgctatccatagcttcaaagtatatagatcttgaaggtcttgccataacttcttccttccttcttcatcattaaaagcatatatgaaagttacataaaatgactccttcatatccacagttgacataaaaatgatataaaaatagtaaaatatcatttttcaaacttataatttgtaaacaattaaatatttaacaaaataataaatatttgaatttgaaaatattatggt

SEQ ID NO: 127024 - DNA, 983 bp, Cannabis sativa
atataaaatacacaatatttaaaaaaaataatattttttttaaaaaaattctgctcactgtaaaaaataaaaagatttgaaattttattatttggtgtaaaaatccaaaaaaaagaaaaaaaaaattaacaactcataaatgtaatttgaatgggccacgggtcctcatatcgtcacggccagccttggtgttgggccaagagaataaactctccttttgtggttcaaggtcctataaacccaatttctttctgagtacttcagtgtcaatcttttgaagaaatgcagatataaaatcatatatttaataatattcatttggtctattgtaattttaaaaccatccatttgttaaaatttcttctcgaacttttacatttacattaatttaatacttctattgacttctatcccattttatcatttaaaaggtgatgcatttttataaattagtaattttcctccataaactttgacaaatgtcaagttgtaccccatttaaataaaaatgaaaaaaattcaacatatcttttttctaatataattcttgatttttttttttatttttttttaaaaaaaatcattttgaatgattaagaaaattaaaaaagaaactaaaaattataaaattaattaagtgattttagaaattaattattttttttttattaagaaggtcatttagatataaaaaaagtatattaaaaatttaatttgtgtaagaaatcaatttcgagataatgtttgagttgattttttcaagttgacatattatttttttagtttaatttacaatttttaaaaataatttttaattttaagtgacgtttggtaacacttttattttaaaaattttagggtgcatttggtaataatttttaatcagttttctgtttttttaattaaaaaagtaaaaatatttttcgaaaacatgttctataaaacagttttcactatttaatttttaattgagaataaaaatt

SEQ ID NO: 127025 - DNA, 617 bp, Cannabis sativa
tttttttaaaaaaaaaaaggtaaaaatggcccaaaaaggactaaacgcttgggtggtggatgtctatgatggttttgagggttttggtatgagatgaaaaataaagaagatgaataaatgagccttcaattagggttataaaactttatcagttatttggtaataaccatcatcgtaaatgacacacaaagctagttttaggggtagggtgggtgcttgaaaaaaatattttatttattaatataacacgataattaaatatttatttacactactaaaattacaaaatttcttcatctcaatcacatttgtctcttatagagtactcggttcccttatttaagtttgactcctattagagtctttttattttagaattattacataaaaaatataaattgacaatttatttacaaaaatacctccataaggtatgaacaacatttataccttttatttgattttaattactaaaataccaattacacaattagacgatggttccagggtacgtagttgctgcgtggttgcatcaaatgaagatttcaatcagatgatggttgctgggtggttggctgaagcctgaaggttgcattagacgaagggttcaatcagac

SEQ ID NO: 127026 - DNA, 640 bp, Cannabis sativa
tcttcttaataagatagatacttaattgactaataatactaatagcttaattgataaataataacatatatactattttgtttttattattttgttcatataaaacaaaaccctaaacgcgttttcatagaagaagccaaaaacaatattttaattaaaaacttaaaaaataaaataattaataattacatatataagtttcttaaagagaacgccaaattaattagcttggctttaataatattataattatgcatgaattaatgttatctttgaaaccctaaaaacaatgtttaactaacttaatacatttgctagccaatgaatgagtaagttctaaataatattaatcactaaaaatttatgcaagaagataatattaaaaaaaaaatgtaggttttcaaaattataagttaattaatgcaaaaatgaaaactagctagtcaaacatttttagatggtcaaattattaatgtggtgttggcctaatattattattattgaatattattttgtttctctctataaatgtgttgctcttgcattggttcctatatatctaagttaaaggatataattaattaacaccttaattagaccacaaattgtgtaagtcattaagtagtatatatatatatat

SEQ ID NO: 127027 - DNA, 855 bp, Cannabis sativa
gtctttttatttctttaaagtgtttttaccatctttctcccaatttttcttcattttagtctcacattttatccaacaaacacacctaaaaataaaaaaaataaaataaaaaattaacataatattacaattaattacaaatatcatattataacaaaataataataaaaatctataaaattacaatatagctaacagattcaaaaataattaaaaacttactaaattaattaaaaacttaagattaaaccattttaacttaaaaaatattataaaataactctaatttttagagttatgacaatccaaaataatcgatcctatccacacttttttcatattggttttaattaaatttgaactattgtgtgaatttgattggattcaatatatgaaatccgcacttacagattagatgcactatgagcaaaatagtgcgattttttttttgaataaacactcctagtatgtgtgtcctattgggtaggccatagtatccctccgtgggagggcctcgactggcaaccatcttagggattgtgtataagccttagcttacttctcggtggtctctggaattgctattaagccgaaggaatttggaatagaatgtgtaccaccaaatcctttttttaattataaaaaatttgtgcgggcttatttactagtatttttttattttattattgttattattatatatattttttaatgaaattattattgttaaaaaaatagttttagtatgatttgagaggggaaatttgacaatctatacttaattacctttaaaattatttttgtaaacctaaatactataaaattgcctatatatgacaacttttatattatgtc

SEQ ID NO: 127028 - DNA, 820 bp, Cannabis sativa
agaatattattacaaaagtttaaagtttaaacagctctctctacccttttattatagattttttttttttatggttagagtttcttttttaatctaatttttatgtctattaattttagaaaacgactttatcaatagagagtatcaagatgggagtttgctttacttggggcattgataactatgcgtatcattgtaaaatactctctaatattttaattagttgtaatttttttctttttattttaagaacttgtaactttggagctcgtagctaagtgtgcattttctaaaaatttgtccggcatagttgacctatcttctatcccaaacaatattgtttgtaatgatcatatgttttatttcttcaacctataaatttcttattaaaaaaaaaaattatagtttgagatgtcaattttgagcacgtggtgggaagcaagaggcaaaagcagtggcttataggaaagaagaggcgcgtagggtagaaagaattaaaaaatgagaaaatcattgaagaagcggataaggggtcactcacacagttgggcgttggtttgataaggcaccttccagcttactaccagctcacaatacctgtaatttctaaacaaacctaaatatcaatttttatttttctattataaaatcatcgtttcataaaaacttctatttttctatttttattcaaataatttcatagtctagcttcaatcgaacaaattcaaaccctttaagaatattttcaatgataaaattttgaacgatgttagtagaatattgagatgctatattattagagagaaaataatgttatttt

SEQ ID NO: 127029 - DNA, 1184 bp, Cannabis sativa
gaggaggtagtgtcttcaaaaactgatatcgctgttgtcattcaatcgtattttggaaatatctataatgctactgccattgacgatgcagccttgcaacacacttgaaattccattccaaccaagtcactattgatatgaatgagaagttattgcagcctttcacagagactgaagttgagattgttctacggtccatgagccctgacaagagtcctggaattgatggtatgtctgcgaggttctatcagaaaaattggcccgttgttggtgatttggtcactagagtggttttgagtgtgttcaatgatggtgcaaacctaaaagatcttaagcgaaccattatcccaaaaattaaaaaagctaaagcatgtgagtgatttttcgccccatcagcttatgcaatgtcatttcaaaattgatctctaaggtgttgatatctagatttaaacatgtgctacgtgctgtaataattgaaatccaaagtgcctttctttcaaatcgacttatacaagacaatattttggtagtatttgagttagtcaacgcaataaaacacaagatcaatggtcaaaatggaattgtagccatgaaattagacatgagcaaagcgtttgatcgtgttgaatagcgctttattgaagaagtaatgaggaaaataggatttgcaaatggatggataactcttattatgaattgtctaactacaaacagtttcacattccaattgaatggggagttaacaggctctttacagccaactagaggtcttcgtcaatggtgtcctctctcgccttaccttttcttaatttgctcgaaggtttttcaagactaatccaatatgaagagaacttgggcaatcttaatggcttttcactcacacatcgagcccccactgtctcgcatctgttctttgttgacaacagtctgcttttttgctgagcaagtgaaaactcatgccttcctattaagagggctcgagatacataccatcatgcttttggtcaagtgcttaacctggaaaagttagtcatgccttttgaaagaactctttgtcaaattttcaagattcatattaccgattgttcaatattggattgattagtttcaactcatgcattcaagaattggattgagaataaggcagtaaagcacacaatgatttacaagcttcatctacactg

SEQ ID NO: 127030 - DNA, 1978 bp, Cannabis sativa
  modified_base (315)..(316): a, c, t, g, unknown or other
acgtaaaaatctctctcttaatttcttatagctctctaaactattattatttttttggttgccgtaaacctcggtcaacagcataaactctggcctttagtgtgtaatgcatgtttgttttttgcaattctaagaaactacaccacattttattgtaaatccaaccaaatgcagcaacaaatattcataaaaattacacttaatcaacaaatgtagcaacaaattgttgtcaatttgtgtgcggcttttttaaaaaactatcttaaaaaaaataattcacttgttctatctcataaaaattacacttaatcaagnnaatcttttttcttttactaacactaaccgtgtaaaaataaggttttaataactgttgtgtatgaatctttttcaaaacaaattttaaaagtacttaaaattaataattattaactatttttatataaaatcctaatctttcgtttccacaaatgcagcaacaaatatagatgacaaacaagtttttaatatacaaattgacaacacagacttttcaaccaaatattgctcaaaccaactccatttatccaatccccaaaaaatcaaaatccaaccaacacaacaaatagattccaaaaatacctaaattacagtacaatgcaaccaactccatttaaacaatgcaactctttattgcaccaaaaatacctaaattacagtacaatgcaacgaactccatttaaataatgcaactctttattgcaccaaaaatacctaaatcgaaatacaaaatgactgattcaaaaaaaactaaaacgaaaaacccaaaacaaattacagtacaatgcacactcagaatcggaacacatgcaccgggggggagagagagagagagaaagagagaaaaatacctcaacacaaaaatggaaactaccttcaacacctcctcgtcgacacctgagagaaaatgaaactattaagtacacgaaactggacaaaccccacattcccttcaaaaaaagattttttatttgaatacccacagtgaagaacgaaatggatgaaaagtataaccggagaaacttacttgtataacccaccgtcgacacccatgactgtaacaaccccaacaatggcagaagacgattaatgtacactacaatcaagaacgaaatgtatgaaaagtgaagaaaatgtaaaatatgagttttacctaagctgaaaataaaaaagaaaatggaaaataaaaaagaaaatggaaaatgaaaatgagagttttgccctaatagaaatgaaaatggaaaatggaaagagaaaatgaaaaatgaaaaagaaagaaagtgaagaatgaagtagaagagtggagcacagtcgatatgactcatggaggtcagtttcaactttttcaaatttaataaattttaaattcaaaaacataattagttaccattctttttaaccataattacccctagatcaaccccagcccttagatcaaataaaaaccccatccaacggcggccgtacatcacggaataaatccccctaaagtacactaacggaacaaaatcgtgtccctatatatatatttatatatacaatggttatacgtatagagctctaagtggatattttagttttttttatttaatattaattagttatagatagattgattgttttcttatagaaaaattattaaaataatagtaaaatagtaatttatagatttatgtttttttgtagaaaaattattaaaataatagaaaaatatcaatttgtagatttatgctttaataaaatattaaaattaagagaattaaggagggaagagaaaaatagttttagagtgattttagactgccacgtcaccgtctcatacttctcctttatatacatatagataattaatttaaatgataaaaattaaattatctatagttaacttgatgattgatcttattaaatatattatgttataaatattaataattatgtggat

SEQ ID NO: 127031 - DNA, 646 bp, Cannabis sativa
aatacaatacaataggacctaatacgacgttccaaatgagcccttagttttttctaaatacaaagtataatatatgaattttaaaacatagataaaaattatcatgagctattacattggtgttcatttatttattattatcatatttatattattaaaagagatattatgttccttctaaaattttaatattatgtaaactttttatttaaggatactctttggttgtacaaattgaatattggagtaatgaaacatcatcttatccataaaaaaaaatactatgtagactttttaattatttagttcaaaataattaagaaatatgacattctataatattaattattttttattttatggttaataaataaaaatgaaaattatttatattattaaaaaattaaatcattattttttaagaaattcaacacaattttataacttaaatatatttaaacaatatacaatttaaaattttcaaaaacaactgcacgcgaagcgcgggtcgttttctgacaaaaaaaattttttttgtaagaagattaataataaactttgattttcgattcaaatgctattttttaattctatttttatatatttaaaattctcattccacaaattttctactaatatttttcaa

SEQ ID NO: 127032 - DNA, 631 bp, Cannabis sativa
ggtgctagacactagtggtacctaatagcaatactcttttgttttctattgtattgcctttgataatgaattttgtccatcgcgaacaagatggcaataattgccacgcacgtgtggaggaaagcgtgtgagaataatttaaggaactaattacatacacctctttcttttactttttttttttcttcttttaattatcattattttcggcataacaaaagtttacaccatcaataataaaattattgatagtaaatttagtcataacttccattaaaaaaattaatcataacttatccttatatctttattagttggatgggtcctacttaaggatttttttttttaaaaaaaaaatatagcagaacaagtttcacttttttcaataacatgattgaaaggacatgctattgaaaaacaagaccttaattcagtttttataaatatattgtttagtattattcaatttaatatgaaattttctgaggagactattttttttttttaatttccttttatttttagcatattaagcactaagggtgttcaataaaatttacaaaccgtcaaattcgaataaaccgtccaaactaaatcgaataaatcgataaaaaatacaacctgaaataat

SEQ ID NO: 127033 - DNA, 1256 bp, Cannabis sativa
aaaaaaaaaaaaaaaaacaggtacatcaaaaggagctaaatcgatgaacagaagtatccatatttactcatacataaaccgacattttaaataataggtgctaatccatttcctttggagagaaaaacctactagattttgttcataacagtgaccacaaaaattgtagacacaagcagtgatcatcagataccaatatgataatctcaatcaaaaacaagcccacttcaatgcagttgtacagtaactttgaagcatcaactaacttttaattcatgagtcaattccataaaaacaatcacaattaaagggactcacttcctctttgttccagctattccatattacaacataccaaaaacaaaaccaagttaacgaacagaacacatgaagttaattagggattaatatggcaaattcacagagcttaattagttcttaaaaccataattgttagaaatcaataactataaaaatgttaacttcaccaacaacttcatctattctagattcaccaatcagaatttcaaaaacacaatacttcaacaatctcacatttattatacattcgaatctttgaagatattgaatgcagaaaccgagtctgaaattccacaaaacgcttctattggggactgaaataatcagtagagcatcggttttgggtttgagcagcaggtaatcaatggaaatagggggaggattcctggaaaagttggcgggaaagcgaagcggtccctaaaagttgaaatttagggatgtgagattgttgagcattagaggcggacttcaaagattattagcggcggaatggtccgccggtaatagtcattttgtatatagataaaattgggttcatcttcttcatttggttgcgaatctcctccactctccgccctcaaaatcataaaaccctagaatatcattaccggtgttaaggtcggcctcggccgcctctctcagcctatcacacaggtaatgtcattttgagatatatacaatcatttttaatagcttaataggttttggttcaaacatgacttcattaaaataaatcttattacttgtatatgtttgtgtttgtgtagatttgtgtatacattaggatgtctttattttatttaaaattttttgaatgaaagggatgagtttatgtttagtactaaagaggaataataatgaaattttttgtagttgattccctataaggttgttcgtgtaaattttttatctatttcggtatttagaaaaaaaaa

SEQ ID NO: 127034 - DNA, 1148 bp, Cannabis sativa
  modified_base (50)..(56): a, c, t, g, unknown or other
gttcagacattgtctaaacttgctaaatgttaatggctactgaacacttnnnnnnncaagccactaacctctgctgagttcaatcttgtcttccttatcaaagtgatcaaaacaaggtggaattgttagtgttttaaccactttgaatagtaataacagaattaactgttattcttgacaactcagcattcggttggaaacttgtccaactgtctcaactatataaacccccacttccaactcaacaatcgagacactgagaacaatgccaacactggactaagttagttgtgttcaagattgagaaagagagaaactctgagcaaggaaagaaaaccagaaagcctaagaagacaccatttctctaagctgaattttacaactgttcttgagtggattgagggttgtaaatggagattgctcactcttgaagtgacttctctcagtgtgagatttcatttgtaattctttgattcaacattggtgattacaagttgtattctttctcttctcagatattaaattcagttctatgtttttgttaaatctttagactttagctcaaatggttcattaagttttggttctgcattagatgtttgtgtcactgtcattgttgtccttaagtttgatgttaatggtgatcttgatcaggtctattaatccgcaacacagtgttttcaaaatacaacaatcatgagttttgtaaattagatgccaaataaatatcaaatgtaaaatactctaaatattatctattttgatctttttattcaattattattcatctaataattataatatcttttatttatattttagttttaataaattatttcaatctttacttattagataatattgtcttattaatgtaaatatattaaaccatatataatagcatcatcagacttttaggggtgttcataaaatagttgatctaattcaatatctacgttccaatctaatataattcacaaagtagatatttacacctgtgcggattgaaaaattcaaaatctgcacttgtgcggattgaatgttaattaatacgtaaaagtaaccgatccaatctaattcacatatatttataaaaaaaaaattaaaaattatatatacaaataatattttaatgtaaagaaaataat

SEQ ID NO: 127035 - DNA, 1763 bp, Cannabis sativa
ttgttatctctcatgttaagagaattgctaaccaagctgctcatgggttagccaaacatgctcttgggttggatgttgacacttgttggatgggagaaattctttattatattttctctattgttgtaagagattgtggtttataataacagtgaaactttctcaaaaaaaaaaaacataaataccaatttcattactaaacattatcttaaattaaataaaagttaaaaaataattttttattaaaaaaataaattttatgtgttcataaatacaggttagtaattttacatttttgtacggtgagaaccgtgagtattattagaccatctttaaaaggaaatgtaaaatttgtactatatttggcacaaaaagtaattttgtggtagatttacattaaatttaagcattgtactctaatacacacttacaaaactttgatgtaaaatttaatatctaattaatgtcttcattaaaaaaataaaactaataattttattattattttaatatgtaagataataaaaaaataatataaatgctttacaatttaatgttatagttaattatattaataaaataatacaaataacataaatataaataaaaaagtagtgtatttattgtgatgtaaactttacatcataataaatattatgtcaaatttaatatttactatgtgctaaatttatatcattttttggcatagtattagaatacactttttcttaaataagcaatattttagctttctaatgatatgaaccaaaattctctgttagaaaattatatacgatagtatgttaaactaattaaatttggccaactcaattaatttaattttatattaaatatgctgctattttattaaactcggttaacaatacacagttttctctttttttttgtcaactaattaacttttaaatttagtaggtcccacatttattacattattattattttacttggtaggttcctgatttattaaactattatagtaaatagaaacgatttgaacaatttttccaaaaataaaaaaataatcatcaatcaatatatcaatatcaatatatatatataaaggaaagtttaaagagagatgatgtggcattccatgtgagttttctttgagtttctttttttttctcattttttcatattttttaatatttttgtatacttttgttaatatgagagtcatgttaaaaaagtctcacatggtttaaaaatcattgtaagtggtatacttttacattatatatatcactattcttttgttttgatttatcttggtaattggtataaatttaatcttgtgcccacccaattaattatttataattaatttttttttaaagtaaatacaaaatatattttgtatttttcaatcactattattttgctttgatttgtttcaaagttaatattatttagtttttatgtgggtgattgagaaatttaatcttgcccaattagttataatttttttaaagtaaatacaaaaaatatatttgtatttttcaatatttgtcaagtttaaataattattaataaaatcatatacttatttttttatatcaaagttattttcttataattatttatttaaataattaaaattatattaatttagtttttatgtttgtgattgataaatttaatcttgctcaattagttataatttcatgtaataataaattagtatagttttaattatttaaataaataattatcaaaaaataatttttatatgaaaattt

SEQ ID NO: 127036 - DNA, 797 bp, Cannabis sativa
taaacggtcttggaccggagtacgattcggtagtttctggcatcacctccaataatgaatcaaagagtcttgaagaaattcaagcacttttgatggcccatgaatgtcgattagaaagacatcactctgtctcagatatttctaataaaatggctgcaaaccttactgttggaaatacaagaacaggctacaacaatagcagaaatggaaatttcaggcctttcttccaacaaaatcgatccaatgaggcagcaagaaactccaaccaattccctccacgataccccaactctaactcaagaccaatttgtcaagtatgcctaaaggttggacacactgcttctatatgccattataggtttgacaagaactttgtcactccaaagaacaattcacagtctcctaaggcctaccttactgaacaagaagctgctgaaataagtgaccctcaagcatattcatctacctcagtacctgaatttggtgatgatctgaaatggtatgttgacactagggctacgaatcatgtcgctcttggtatggaacatcttgacagtgcaactccatatcaaggttcagagaccctagcagttggagatggtaagcaactcctaataacacatattggcaaaaaatatattcactctaattcttctcccccattgaaattaaattctattttaagtgttgctgccattactaaaaatttaattagtgtgtctaaactcactcatgacaataatatttttcttgagtttcacaaaaattgttgttttgtgaaggacaagtacacgggg

SEQ ID NO: 127037 - DNA, 1416 bp, Cannabis sativa
  modified_base (36)..(41): a, c, t, g, unknown or other
taataagtaaatctgattattttgaaatgagttttnnnnnnggcataaaacccaacattttcatctaaagaaaaatagactaatcaaactttaatattcataagcaatgtatttgagtgtcactaaatatgaataagccccaaatcaatcatacacaaatatatttgataaccactcactgtaaataattaacataatctatgacgaacaaaattgtaccatcatataagaataactcctaatagagaatatatttaaatgtgtactcaaattcacaaactcatttcaatacatattatatgtataaatataaaacataaacaattaattaatattattaatctgaagaaaattatttttttaattcatatattagataatagtataaaacatagttgatttcatataaattataaactttacgactctaatcaataacaataatcattttattaagactagatgaagaattttaaattttcaatctcttaggaagaaaacaaaagaataataaaacactttctcatcactattatataaaaaaataatgtaaaaatttaagtctaaatgtgtaatatagcatcgtttcgcattagtataaataaaaaattaccagaaataatagaataaataaaaaaaaatcatcattcattttatgataaaatatgaatactcaaaaagtataaaactaaagtaattatttgcaaaaaaaaaaaaaattgaataatttaaatataaaacctgatgtgcaaattgtagattgtacgttgtagggacaaaaatggtgagtcttggtcagtggtttgtccagctcgtgcttgcttagctggtagtaagaatgcaataattttttttctttataaagaatacagcagagtaaactaagtagtgttttatagttttagaaagatagtgttttttaatttttttttatattgtggaaagtaattgatataattgattagtttttttgtaaaaagtgatataaataaatattaaaataatttagttaaatttttaaattttgacttttcctattctcttcgatggttggtattctattgaaattttttaatataatatatattataatagtaatgtatagtaaatatgctgtcttttctataattaatgcattgctgtcaaagagaagtgagaagtctattcacatttttttacaaaacaataataataaaaaactcttaaatcactaattttatctatatttaggggctactctataaaataatataaaattcacatataatatttttttgttaaaaaaattaaggggggccatggccccctccaattatagtgtaaatcggtccctactcccatccccttcataacacaacaaacaaatatcttagaataataaggtgctcaaatggtatatgggggaaaattttctat

SEQ ID NO: 127038 - DNA, 1754 bp, Cannabis sativa
ttatgggggaaacgcacatttttggcatcattctcggtaaaagtgatgggcatattcatcattctagggtgctatgcaagagattgcactagcacgcacacttctccttcttctacctctctcaggtatcttttttgcgagcttctcgtgcttcctgcaagatgaggtccacctgagattgtggctacgtgtccatctactggaggtggggtgaattcgagaggatatggggttccaggtcccagtgcaagtaacgctacccaagctggcactagagaagcatggagtgcaggcaatgatgttataaaagcttgagaatgccctaccccctacagaggatttacaacattcttttgtcctagaacgatcatgttcccgtggacgaccctctatctgggataaatgatcagaattcagacccattgtcccaaatgtcttgctcggaccaaaattcaatgttgtctttcaaataatcacactcactagtggtgtgacccttctctccgtggtactcgcattctttgttctgatcatgtctattccttcctttgtgaaggttttctatagtggaccatattgcaggtcgctttgtagacattttcttgtatgtctatcacactagaatactcaaagtacttggatcatactccttccttggctttttcgaagagttgttgcagttatttcccttgccccctcttttgttccaagagtggctcacagttgattcgggaacctcagtttttgcctgtctaggagccacactgcacgcggtctgtgcagccccatacccaaaaaaatgggtatgtgtatgtgcgagatcagagggagtgggtccgtaaatagttggggaaaattgagttctgagaagagttaaagccaaagccagaactcggggtgtgaagctgggtgtagtcgtggaaggggttggagttggttgaactctaaaagattgtatgtaagcgccctcaagattaataataccttgagcctttgacataaactcacttaatgttttggctcactttctctgcaactctcctcacaacaaagaaccaacagccaatctagattagagggccatcaatttcatgtcgtcgctgaccttagtctcggcagcagcctccatcatccttcgaacaaaagcctgcaggctttctttgtttgacaaaagcctccatcatgtcgtcgttttttgacattggtaagagaactgacttccatgtccttatcacgtgcggtgataaactgtttgagaaaggccgattgtaagtccttccagctatcaatcaatcttggagccagtcgcttccaccagtcttctgtagacttggtcagtgttagggaaaaacataaacacttggcatcgtcgttgactcatgccacttgcatcatcttgttgtatttttccaagtgtgctcacaaatcggtccttccctcatacaactcaatgtggggcattttaaagttttccaaaagtggggtcttcaagatcctccttacacatggttctaggtcttcatcttccgaatccgagagggctccgctttgctttttgaccagcttggttagggcagctatctgctcctccaacctctatatgtcactttcaggaagttcacatcccctcattatatcactttggttcctgaggtcacccccacgtggcctcgctttctcacttttgtacttctcgtacttggcgtccaatcactggtggaggtctgcggtggaccagctgtcctcaaaatgcc

SEQ ID NO: 127039 - DNA, 1592 bp, Cannabis sativa
aaaatcaagcagagactgcacacttgggctagtaggcacttgtcgtttcctggtaagatgcaattaattaattcagttttgtttggtctgaggaattactgaatgaatatatttgttttacctcaaagtgtgaatgaggaaattgagagattgtgtagaggcttcctttggggcctaaatggcgatcggagtaaaattcacatggcttcttaggagaaggtgtttcttccaaaagcttatggtagattagggttcaaagaaggagctagatggaactatgccaatcgtgctaaatttttttggcctttgacttctaagaaagacataatttgggctaaatggatcaataccatttacttaaaggataaatatttttggtcctatactctaaaaccggatgtgagttggtattggtgcaagttgtgtcagataaggaagagattttctgaataggaaattagtgtagctgctacctttggtatgtttaaaaccagtagactttataattcttctctacttcatcaaccgatttcttactacaaagtagtgtggagctctttaactttgcctaagcatcaatttgtgctttggcaagtggttaattctcagcttttaacttgggaaacatggcaaagatgaatattcagttgaattctttttgctgtccggtttgtgaagagtggtttgagatgtatgagcatctgttcttcgattgctggttgtcaaggaaattttttgatctcactttcaattggttgggaaagaaattgtggccgttgattttcaaaggctggtttgttttattatctgttgttggttttagtaggctgaataagctcctgattgtggtgtttgctgcggtctgttataacatttgggtaaatagaaacaaatatatttttgaagggtactcttgtacagctgatgcaattggggataatgtaaaaaatatagtcaagtatagattacaaagtgttaagaataagagaatgactagagttgagagagcctttcttgtaaaaatgcaagtgtattaggttggctttgtggttactggtgtcttcaaggtttagttttgattccttatttactagtttgtacttggtggtttcttgattaatgaagttattctccttcttgataaaaaaaaccttaactagtaaagtgatctagaggtaaaatggtcatttccaaaacctcaagcattcccaacattcctaatgtctaactaggttgccccgctagtactaaaatactaagatgtgattctattggccaaacatcgcgttccaatgttgtcagacccaaaacatgcaaaaatgtaaaattccatatatgtcataattaatacaccttgaattcaaataaatctccattaaatgataaatcataattaatattatagtttcatagctataccctaattatatgtaattccaatttaaagctaagcagtctttacaattatccccctctgttaaaaggattttgtcctcgaaatctaacctaaacaactctagatattgagccttcatgtcagactccaactccctagtggcttcctccaccttactgtttctccagagcacctt

SEQ ID NO: 127040 - DNA, 914 bp, Cannabis sativa
aattaataacttttacaaaaaaaatagtatttaccctttttttcatttaaaaaaaaaaaaaaaaaacaatgacatgatttaatgattatgccttattgatatatataggcaaattttgtgctttatgttttggtcatttctacctaagtctagtactccattcatgtcttaaaattccatcattatctttttttcttcatgctgacaccatatctttgtctcatatcattaaattaatgttattaactaaaaagactacctactcaatagattcatgtactaaaaataattataaatatattttattttacttcattggacgaactaagcctatgacaaaatttaagatgtttgacattaaattgaatattaacaagaaaaacagagtccattctaggggcgtaaccgtagcttattttagagggttgacaatataatatttatttatttttaaagaaaaagagtattaataatttcgtagaaataattaggagttttttttttattatttttacactttaaaatagttttttattattattattatttttttttttttacagaattctatatagaaactcctattgcaactagtgatgcagcttagattgtaacaaaaaatcgtataaaaattcttattgcaattagcgctgcaaccactttagaaactttaactgtaaatttaaaaaaataataaataaagtaattctccaaataaataacaatacatgagaataaaataataaaaatactttacaattttgtatataaaatttaataaattaaaatttgagggagacatcttagggctccacctctaattcaatagccttcacttatggagccaaattacctgtcccagttcctgtcccactccctgtcccagccaataatattttgccacctcaattaaa

SEQ ID NO: 127041 - DNA, 536 bp, Cannabis sativa
aaatgggaagttcatgtaatcaattgactaaatttgtacaaattaagggagggtataaattttgatatgacttgtattattaaggccaaaaagtcaaatttcccattataaataatctatattctaatgagaacgtatagattttgaattataaggtactagcttatatttctaagacataacacacgtataatcagcattaaacgataattcaaaagctatacaagccacacaaatacgtcaaaacctatgtttatttaattagagcattttaaatactcactttttaaatttttattgaaatcataaaccatgcatagtatggttaaacaaacacatgtaatcaccgtcgtcaattctcattgaaaaatacatgcgatttgtttcggcacgtttaaaaatcgttgtctatatctctcgacagttctcaacagtttaaaattttcgggaataacttaattgtcatgacggttttaaacactcgtttaatttttttttttttttttttttttttttttttgcactttttttttttt

SEQ ID NO: 127042 - DNA, 1557 bp, Cannabis sativa
taattgtggcataacttttaaaaaatttattttacttgcatttaatttttaaaatctaaatcttgatgacaaaatctctaaaaatattgtactgttagaaaaataaatacactttcatcccattatgctgttatttgcgtacgtggcttagtccagccaatgcaaagtagactaacaaatgtcatgccattaataatttaatgacgtaacatatgagaaaattaaattaaaaaaaatatttttttttaataataacaaatttaattaaagaaacaagaaattaaattaaaagaaaaaaataaaaagaaaataaaacatgaaatgaaaaaatacaccaaaaataaaagcatgaaactaaattaaaaccaaactataaatctaaacttagaaagagataaagcaagtacgaaagggtaaagtcgaaacctagaaaattgaagtagaaattatcaccatcttcgtgaaaaattgaaggaaacccaaaaaattaaaacctaaaaagagatacagaaagtacaaagggagaaaaatcgaaacccaacaaatcgatcatcctcgtgggaaatcgaaggaaaccagaaaatttgtggaaggagaaagtttttgaaatagcgcatcgttgttgaggtgaagaagatcctcctctcgactacagtatgtactagatccatattttctaggttttttgagttttaaaaaaatattggtgttgtttgagcaaatttaaataaaataagttaactggggttatactaaattttctgtctagtagtagctttaatggtttgtggggttcggggcttgtggtccatatcgtgtaaagtggtttgatcttattaaagtgtaaggtttggaattattggtaagaacacattagttaaagagtgttggggaatcattggttgttgtctttttcaatggaaatattttcacatgttttttttattattattttatattatttcttgtttgtttgttggctttggtggttaagttaaaattttggaaaagtttaattagttttacctaggttacctgtaagattaatcatgtgcttatatattaactttgcatgttcaaatttgaataatttcattgtgaaattattccatgttggttattggttcacccaatgtgacaatatgaagtgtgaggatagtcgaatttcctactttgatttttgcagtttcaatggatttagtaggctccatcttgaagaaatggctcaagaattgggatacctattcctttttgttttttttaagcaacagggaagcacctgaatatgggatttagggttattgaggaaaatgaaattcatatggtgttagatgcttttagtggtagaaattatagggaggccaatatatatttggtgttgccatatctagtttatgtagttgaatggaggctggatgaggaggtcgtaaggcatgttcctcaaccatcatttgctaaattggacaagtgcatccttgaggtgtttccatctgacagtgatttattaacagatgttggtgtcaatctaaaagaccatcatgatcgtaatgataattt

SEQ ID NO: 127043 - DNA, 2251 bp, Cannabis sativa
  modified_base (407)..(420): a, c, t, g, unknown or other
  modified_base (508)..(511): a, c, t, g, unknown or other
taattataattattaaataaatagttttgacatttgtaggattaaaattggacaatatagcatttgtgaaataaaagataaatgcttgaaaaattggaaaaatcataactagtggggcccatttatatggccgaccattatagggttattttttatattattttatcatttttattccatataatttaaatcttaacactaggtgaaatagtatgaaaggaataggatggtctcattctcatccaaacgattcatataacctaatttacattttgttagacaactagagtttttgagagcctccattccttcttcttcatctattttgaatccttctctattgttcttcataaatttttgagcctgtagtgaatgactcatgcccacccatagcaagtcaagtactnnnnnnnnnnnnnnaagactgtgaagaatccaacacttgaaggagaattaggctcagatcttgataatactctgcgacacaaaggaacaagggttagagatnnnngtgggaggagacatattatttcgttgcaatcaatgtaaggtttcttaagtttatatgtgtttaaattgcattattttaaagaattcatatttagcatgttaatatacatacttgttagtaaatttagaacatggtaaaatatattccaacacataacatctaagaaagcgctagattttgtagtaaaaaatatcatgccggtatggacttccgcacaagattgtcctagataatgggaagcaattcgatagcccaactttcacagatttctgaaatcattaagagttcctccacagtagcacaccctcaaacaaatgggcaagtcgaggtagttcgtaagacactcaacgaaaccatgaaaaagcgacttgaagaagctaaagggaactggctggaggaacttccagaagtattgtagttttacaaaaaatagaaagggcaacaactgggcagacacaattttccatggcttatgattatgaagcaatgctgcccgtcgagttagagcatccatcccgttgaagactaactaatgatcaagaaaccaatcacaccctcctggcagaattacttgatgaatttgaagaaaaaagtgcttcaacaaacctaaagctagtggctcatcaataaaaggtagctttatacttcaacaagcaagtgagggcaaggaagttctttgtagaggatatggtccttagaagagtgttcttaaacacaaaagatagcgaaaatggcatgctcagacctaattgggaaggaccatatcatgtaacaaaagtcacatattctggagcatataaacttggtcagtataatgaaaacattgaactggttctggtaccaaggtattggagcgaggagcattgaggaaatactaccaataagtgtacaaggtctgatgacccctataaagtaaacaatgcttaaacatctactcttaagtagatggccttttgagcggaactcgctcaaaggtttggagaaaacaactagtacttaggacggatgactattcctaaattacagtatgtttagaaatcatcgctcttgaacaatgtctctcagatagactacacaattcaactattttatattttaattagctaaagattagttagatcatatgattgcttttataattgaataaatgaacgttactacggtaacaacacattcagaccaatatatgaataaagctattaattatcattctatttctgtctattgttttcttttctataacaagttatataattaccattaaaaatgtgtacaaagggtttgccagaacccaattgttgaatagaaaaaattgaacttgtgcaatgcaagtgatcaagagtgatcaagagtgataagtctgctcgctcactaggggggaaactatacacgtacaaagcatagctaaataacaagctcgaaaaacaaaaacatttgcatgtgcaattatttaaacttaagagaaaatattcatttcaaaagataacaaggcatcataacttcgggattaaaagctgcccgaccaactagttgtcttgaaataaaatgaaatattaagatagtttaaaagctgcttggtcaaccatattgtactaaaaatgggcccatgggccaaactagaaaaaaaaaagaaaaacttgaaacatttggtgtaacgccctaatctatagggacgtcacgtctgtgattttataaactaatttataatactagtagaataattaattattaaaaaccgtg

SEQ ID NO: 127044 - DNA, 748 bp, Cannabis sativa
  modified_base (56)..(56): a, c, t, g, unknown or other
aactccattcttcaaattgggaatgtaatatatcaaattttcttgggatgcaagtntgaatggttcattttggtaccatcgacaggcgaagcagacactagtgaaaaaactaacactttctgttctgcaaccgtttgcgtcccaccacttgcacctaaaataataacactacaatccttcaagtaagtgaactcatagacttctttgagtacgccataaaaaattttaccaccttctccaggcaccaaaatacaactgttttgggtattatgattgtcatcccgatcctcaactaggaatttaataccgttaaaaatacatccaagataacaatagcatgctaaattagaggaatttgcgatgatgtacaattcatatgatactttcccaaggttattcgctcagagttgattgatctataagtgattgaaaaatgtaatcaatactagtacaagaaactgtatttaaatgaaaaaattagtagaaaataatacttcctcgaaccaactaggaaacttattctctagtttataactaagcaagagattcactcatgacaattattttttattttaacagaaatttatttgatttaagtaccctgactgctctattttacatggattattcaagcaaattaaactcgaaacttcttaatgaattcataatttaactcagaacttcttaatgaattcatatataagggtgctgatctcctctggttttgcttggttaataaaatgaggca

SEQ ID NO: 127045 - DNA, 704 bp, Cannabis sativa
tgtaacatatatttaatcaatctcttattttagtctttgtattattttacaatagagttgtaatatatcttgattttcttccattgtaataatatctctaacatcctttaactgtttgtgtttgttaggtgttacagttagttagttggtcaatataatttattagttagtcaatatcagctctcttaagttcttgtatataaattgtactacttctctttcattcaataacatagatcatttttttcgtagtatcatccttattaatttttgaatagcttacaatgttaaaaatagagtttttgatatttcagtttaccacgcgcatttaaaaaacttcaaacgtattttcagcattgtaaattattcgaaaatcttcaaaaatttgcagggatgatgttgtaaatataacgaacactgtagtaaaaaaaattaaaaaaaaaaatattttggtatatattttttagacacaaagattgattaaaaaattttaataagaggttgcattcctccatttcgaatgaataaaatatattaacacttggaaaaagttaaatttgagtgatttgtatgataatggtacaatgtaaaaacattggagattaatggcacgtttactatacagtaatcagaatcggaataaattaatggagaaatgtaacggaataaatgaaaaataatcggaatcaatatttgtaatatgt

SEQ ID NO: 127046 - DNA, 828 bp, Cannabis sativa
gttttcgacccacatctaattttcccgaccctaacctataaaattcgtgtcgtgtttgtgttcgtgtgccgtgtcgaaacctgttttgccacccctacttctatggcttttgtgcttttttttttatgacttgcccataattattaaagataaatttgtaatatggtcaatgtgtacgagaagtatttcattttgtactcatgccttttacaaacgaatttttagatccggcatataagtatttcaagtcttgacattataatatcgattgttttaccatacttttcacattaactatttttcattaaattgtgtggtaatagaattttatgtattgttaatctgtaggtcaattttaggaagggtcaattgttacagagattttaccgataaattattttaaatattatttgtttgagagttgttatctttactattaaggatttattttataaggttttaatatcatcgctaggggatttttttttatcttattttgttttgtaaatgttttagggaccattcttgatatgttaatgagttggtgtgtagtattcagtgatgcaatttaaagctctagctctttgggtgtgttgtttgaggaagttataattttattattgtctcatgttgttcgctgactttaacagttcatagtttgagaaaacatacccttttgttaaacaataagctatccaggttgaacaaaattcttgcacggtttataaatgtctgcatcgtaaatttataaataattttaatcactacgtcaaaaatatatatatatatatatatactagcaaaaattacgtgcgaggcacgtatact

SEQ ID NO: 127047 - DNA, 881 bp, Cannabis sativa
aaaaaaaaaaaaagcattattatgttaataagaatagttaaaatgtagtgttggacttttcgaagtgattggtcaaacggtggacacattatgaaagggagaaacctacaagtgttggagacaacacttcaacaattactgcgctctctcttgtcgttttttgtcaccctcacgtgtaacatatccaatatacacttgcttgtctctccaatgaattttttcaattttttttttaaaacgggtctcttgaacgaattgaaacacaaaaattcactcacttatactttcaacatattttttttttctttagtaaactaatatctttaatgtagattttttaggtgacatctaacagggaaaagaattacaaagatatttaaaattaaatataacggcaactctattttgaacttaatttagagatttggcatacaagttataacgatttttataataaaaaaattatatcatgaaaatatattgtttattaatatgaaaattttcatatattttgatactacatccattctttttatttatattttgaagtgggattaataaaatgagtttataagggttatcttttcaaatttagctttcgaatatagttcttttctatgtaatagtcacaactttttgttacggattaaaatatattaaaacggcgagcttatgtgacgtttggtcggaagaaataaaaatataagaataagaatgagaataagaattggaataggaataaaataaaatttaaaatgtataaaaaaaattaataaaagaattattaatttttttcaaatctcgcattagaatggtctttctttatatttcaaaatagtagaaaagtcattccattagaatgatattctaatagttttaaa

SEQ ID NO: 127048 - DNA, 723 bp, Cannabis sativa
  modified_base (47)..(48): a, c, t, g, unknown or other
tttataatcgttttagaagttcatttttagggtgttaatcaacatanntgtgagtagatctaagatccaggtaaaataatttccaacataacacttgcctcctaaaagtatgctcataattcaataagtaatacttttgaacttcttctgagacttgcaaaataggtttaggattacctctccaatttttatttcaaatgagggaagtggccatcacatcttggcatggggacaaggtgatggcgtctctcggtcacgaacgaaatgatgtgattcacccattgtggaacaaaggtgatataaccatgtagatgatgacatggagtgaatgaggtgatgatatctcaggatgatgtgagcaataaggtccagccaccttggtacctgtttgggtggcgcggttgtgtgaccgtggttatgtcgaaacatctcaacaaggacactttgtgatttggccaagaagttgtcgaggtggagcagcttcagtcttggaggccaacgtgatttgggcattctgggtagagtcaaagaggtttagccatgaggaccactatctctcatttggccttgatgttggctccaagtaatatgtttggtcatgtgggtcaaagttccttgagcatcatgtgttaggttatatttagcctatgttttgggtctgtaaagttagcattttctcgtctattggtgtcttttggagcagttttacgcttgattttcatt

SEQ ID NO: 127049 - DNA, 536 bp, Cannabis sativa
tggtatgcgtcgtgactggctaggccgtgattacaacacacgaaaaactctctttacagctgtcaggttacctacctaattattattttaaatcatcactatatagagtataattatttatgaattaaaataattagtatttttttttcttttatttgtgaaacgactaaaacggtgaatggtagttgatagtaaatacgtgtagttctttttactttaataattaaaaaacaaaaaatacaagtataatttatttttgaaaaattagctcgtatatagtatttcttaattttttctctttcatatttacaattagggttgttatgaagatttctttgtgggttattatgtgaattttagttacaattttaggttatttcgttaattattatgtggatttctattggttactatgtgggttgcaattttttttcattattttacagaaatccacatacataacaatatagcagggccggccctgaaatgtagtgggctatagggtaaaaattattttttgggcccttatttagaaa

SEQ ID NO: 127050 - DNA, 589 bp, Cannabis sativa
ttacaggtcaaagaaaaatgtaaccatatggttataataaaaatataaccattaaatagtcacccatatatatactgcaataattattttggtcatttcatattggtaaaactctcgctgtggcctccttactaatatatacttgcttctttttgtttttagtagaagaatatctatttattcaattgtttggtgagtctctaaccttaattaacttattgtacctgatcatttaaaatattttaatctaatggtgtaaaattgatctaaaataatctagaaaaaaaatgttttttgaatgagtcctggtatatattatctctgatgctagtttaatgtagacagaaattgttttctcttacctatttatttggtttacatgacaattttttaattcttatatagggtgacattctgtaattgagtatgagaaaggatgcaactcgtgcagaagaaattgctctctttaatctaaagtaagttgctctatattagggatgcacacggggcggggaattagcggggagtgctctcaccatctccatccctgttaaggattttaatccccatccccgcttatttcccatcg

SEQ ID NO: 127051 - DNA, 959 bp, Cannabis sativa
cttgtagttttcaaattgatttggacttgtagtggaggacttattcttccacaatttacataaattattttctttgttcatgttattttgtttatcatgtttatctttcacataatttttactacttattgatgaactaaaatatttctcaaatttttattatactgttatgtatttggtcttgcaattatttctctcatctttctactattatgatgctaagactatattaatgactttttgatattatctcatctcatccaaaactagacctccagctctctatttatttgttttcattatatgtactatatgagtttcttaggtaaagtacaattatatgtatggctcttagtaattcagaagggtaatagatctgtatcacctgttattatatatataatacaagggtgacgggtttttagtcaaatgtgtgttcattattttggtagattctaaaatattggttagcaaaaagaatatatatgtatactattttgtgaatttgatcttctatttagacctataacatgtttctgccaaacagttttggcctatgtgtggttgaatagttgataccttcttatttattgcttagttttgtttaataagattttgttaatttaattacatatgtagaatagctgtaaagaggtagtcccctatttttagtagaaaaattattcttaatggtatgtgtgtatatgtgcaactattatatgtgtactttttgtatttgcttatatagcattatgtaattattttgctattaaaagatatttattttgacattgttagtttttttagctattattagtattgtacgatggttcttgggttggactagatttttgagacatgcttccatctctttttggagagtaggttgttagactatatatatagtgtatgtaatatagtatatacaatgatataaaatgcggaaaataaactgtaat

SEQ ID NO: 127052 - DNA, 1134 bp, Cannabis sativa
  modified_base (33)..(40): a, c, t, g, unknown or other
  modified_base (1085)..(1086): a, c, t, g, unknown or other
aaacatgataattcttattccgttgttgattcnnnnnnnnttaccaaacaaaagaataaaaatttcattccattccattcttattcctattcccattatcattctcattctataccctctaaatcattgtgcccaacgccttatactttttttttataccacttgagcacgcttatgtgcttacccagcgccctatactctagctatattctatggacataactaaaatagataaatcgtaaatatcaaccatttgatgctcacaaactttatccatattaattacaaattctgaatcatttttcaatgggtgatattcaaacgaggcttgaagtgtgcattgagttcttctctagagggtaatacatccttgaccacaggatgagcagcaaaatcatggctccatttacagagcttgggaaactttgtctctaccaacatctctattcccacaagctcttgtacagctggaatccattgggctacgaagtttgccgctatgtccaccattccaatgctttctcctccaaagtattttcctttcagctctttctctagaaactctagattctcacttgcttcatctaatgtttctttctgattttcttttacccataatgctttccatacagttggaatgatctgagaaaataatattcaacatcaaattgttgtgttacagattgcatataacatagtcgacgaaagttctagctaaaaaagagattacaaagaattaacattttaccttatcatcaatgaaacgagcccaaaaacgggcttgagctctttggtatggatgttgaggcaagatggggtgagtcttccatgtctcatcaatgtattcaagaatgacaagtgactctgctaagggcttttcattgtgaacaaaggtagggactttcttgtgaattgggttgtatctgaggagtgaagcactcttgttcttcagatcttcttcatagtatttgtattcaacacctttgagtttcaaagcaatgtttattctgttactaaaagtgcttgccctaacaccataaagcttcgtttcttctcccataatcctataaatatatatatatatnnatatatatatatatatattcttactaatgttagaattatttgtttgtg

SEQ ID NO: 127053 - DNA, 767 bp, Cannabis sativa
atttattggtcctcttgtaacagctgatttgctttgatttaatgattcaaaaaaaaaaaaaaaatttatcccccataatgatgtgtaacaaaagaaatgcaaaaatgtatatgttgaaataaacatatcaaatcaaatttaaatcaagttgttctatatagtgatataaatgtaatagtaataaataataatacccctttcacatcgatccaaggtgaataaatattgacaagaaatcactatctgttttgtgaatttatagtatacatatagttacccctctctatttttggttgacaccactactattttgtgaaacatatacatatatattattattacaagagggagggagacataaatttatgatgggagtgatatataattaataaaaaggttttaataatttcagccgttgttttttatttttattataatttgggttaaagttgaagtgttgaaaatagtgtggtataattatggaagctcacgtggttgaatagtatgcatttatgtaaacggcataacaaaagtgataaatatatgaataaaagaagtagggaccaataatacacaatacctcttattttcaaccacatttatttcataaatattattatatatttctttcttttcgtttttataaaaccatgaataattaagtccattcacatacaatatgctctcctcaacttccaaaaaaaaaaaaaaaagaaaagttgccgtacatgtacatggaaaattctttagtacatgatgcctttttg

SEQ ID NO: 127054 - DNA, 944 bp, Cannabis sativa
gaatttttaacgaacaaaaaagtttagggggcaggatttggtacatgtcaaagttctgggggaaaaaaattactaattagcttttttttttattaacataaaccttaaattctcaaataatcaattaaaggtggctcttgatactatttgttagaatttttcatcactcataaaatatataataacaagattcaattccataaatatatattacatataattataagtgtataactatagatctaaagaatacctttgttgattcaagaactcaaataacggaagtgtaccttaatccatggatagtgatgatcttaatcaaccttgtaaagatgatttttgttgtaattttaggtaatgatcttctaagaatacaagacttaaggtttttctaaatttctctcttaatgggtgaagatgagaatagagttactcttgttttttcgagactcctaccaatatataacctgatagctaggttataattttgagtatttttaatttagctcctcaacaaattataaatattgcttaaagtatctactcatgacactttaatgcccaatgacccataattattaaaatgatcaatttattttgggtcaaattttaaatagcaatatactaatatacatataaacccatattgatattttaatccaacatctcaatctctgaacgaaagtccacatcattaagagaattgattactacctctttctacaataacaaaattacaccccttctcagctgcagactctagagctaagcaacagcctgtagtctcaccacaaagtgcataaagaaatctaatcttgccgtaattacccaaaaatttagtgcatgtttggaatcataattaaaaaactattttttgttttggcttgtttggccttattttttaaaaacagttttcaaaaaacaaagttacaaaaaacaagaat

SEQ ID NO: 127055 - DNA, 580 bp, Cannabis sativa
ttgtcatttaacaaaacacagggtccaatctgcaacttttgcaaaactcaaggtctaaaatggtatttacccttaaaagaatataattttaaaagaaaaatataagagcaaggaacttacaaaatttaaagaatggtataacatcctataatacaatagatattctatttttttttttcttattttaaagttttttataatttactgttaatattttatatttatagaatattttaattataaatagtttaaagtaacgaaaacagaatttttaatattttaatttactacgcatgtttataaaattctaaatttattttcagtactgtgaactatttaaaatttttcaaaaattcataaaaataatattttaaatatgataaacaccactataaaaaaattaaaaaatattgcgacatgtatttttgggcacaaaaattaaaggtaatactcttcttttagcttaacatcacaataatcaatactaaagagaaaaagaaaagggaaatttgattttctatacttaaaaaactttaaaaaaaaaattaaaaccaatatattttacactacaaaaaatatg

SEQ ID NO: 127056 - DNA, 1198 bp, Cannabis sativa
  modified_base (1167)..(1168): a, c, t, g, unknown or other
tattaattaaagctgaaaaaatttataggaaatccctatggagtcggttattttataaaaactgactccatagggtccctacatagcgtccctatagcgttggttatttcataccccttcagcgtcacccgaatcagcgtcggtagtcaatttcgccaaaatcgacgctgaaaggccttaaaaaccgcatctaaagcccatatttatagtagtgtataatgttttaagaaaaaaaatacttcgagaagagctagaactacaacaagtaaaaaccgaataccaggtagcagatgtattcactaaagggctcaacactacaagctttcaaaaaataagagaccaatgaaacttaacacaaagagggaacgagttggtgctgaggggagtattgaagaatcatcaccaactctctagaattttctagagattaactagataaatgtatcattttgggtcaagcacattataataaaagtaattaaaaatggttgagtcttgtgaaatcttcaaaattattttagtaacaaaattaggtagaagtttctagaatattatagtttatttttgagtagtataaatagggacgttgggacctcgagttgtgcatctaatatgaagtgtttcaaaatgtgttcaaaagaggtagtgtaaacaaagtgtcccaaagtgtgagtcatgtattgtaaagatgttaactagtaaataaaagtgtgagtgtttgtgtgttgttgttaccataaaatatttaagtcttggtgtaattacattttgaataatagagcaattatgctttttacgtgttgtcgtgtgcaacatcttcctcttgctctttttaccttgtcttgctcaagtccatggtggatcccttcagttccttatttttgtctttattttgcggctggagaggtccttgatcaagtgaaaaatcgagagaaagaagaaaattcacttgttatttttttatatataatttatttacaaatatttcttgtttttaacattaatgaaaatgacaaggtacacatggaataaaatatgaatctctcttatgtttaacattttagtagtgacatcgaaataaccataatataacatgaagtttttaatctgaaaaaataagtatctattctatataaagtgtgcctatataacagaatttttggtttnngagaaattcatgggtgacttttttttttaa

SEQ ID NO: 127057 - DNA, 1561 bp, Cannabis sativa
aaaccctgttggggttgttggggtcgctaatagcatatgtgataggattattttgtttcgctaagactcttcgggtaatttctgaaggcatttgcaactccagatccacgtcttgttgggcgatgaggcattctttcccggagcagacagaggtaatggtggtggtggtggtgttgtggatgttcaccgagattgtatcactagctccgcattgacatgaagtcctaagcacaatcatcactacccatagtgcagtgaaaaagagatttctggatctagaatacgctttcatattacttttttttaatagtctactgcgcatgtcctgagcactattatacaatttatagctattatctaccacttgcttgcagagttgcagacaacgagataagaactgcttacgtagcaatgtttagttggttactgttgttttataagcaaattaatgacctaggttggcaattggtgctggtgctaataattgagggaaaaaaatcacatgtaccaaaccatccggtcgccctaataaatggttaccacctattttgctttttccacctcatttactaactactcaacaggccctgcttagttataaaaattttaaattgcatgtatgaaaatttattgaataataaaattgcatcaaataatttcaaatttatttttatatataattttaaaaatatatatttatcatacaatttctcatatattaaataaaatacataaaaaaaatgtcttcaaatgtatattatagtgaaaaaaaaaattaaaaagtgaataatactcacacaaaatatagatctaaaacagaaagaagaccataaatttatttaaaactcatcatataatttcaaaataactttcatcgttgtatctcacttgtagtcactactacatttaataataccatcactgtatttcacttgtagtcatatatcgttaatatcctttcaattaatttaatttgctgtatacgtaaaataaaatgattgataaatactcacttttaaacataagtgaatcatattctgttataaattttacctaaaacaatttttaactgtcacatcatagtctcattcctcaactttatatatagatatatatgaaaactaccccttgccttgaatgataaagaaataaatgagtgaaaaataataaataaaaaaatcacaaccatgaactcaaattaaatcaaattattttgaagcaaatacccataattagttatgttttggcaaagtaaatacataaatagcaataataataataaaaaagcaataaaattaaattcacatgaatcttaaatcttaaatcaaataaaaaaagtttgaatccaagagaaattgaggaatataataatagggcaaaattatggtagaacttagcaaaaatttcctactggtaggaaattttttttaaccattgattttatttcatgtggttattatgatgtaaggtttatactcttacgataagactgcttgtatacaattaaactttatgcgtattataataatatttattttttaaaaaaataaaatgatattaa

SEQ ID NO: 127058 - DNA, 640 bp, Cannabis sativa
catcttcttttcatcaaagttcttgtcaaagttaatctcaaactctctgaaaataaagtgcatgaactgagcttctgtaaagttggaaaatttgagaacctcatcaattgttttatcttcaagttgaggggtcattctccttctactcacttcattttcatctttttcatcccaccaaaagcaacttccaagagaggattgctcagattcagttaatttaaataatatgagatccctcaaagtcaatgatatgctctgctctgtatcttctattcttaaattgccattcatttcttcaggaaatttccaaagatcattgcctactgacttcaactttacatctttaaggtctctctttaatgtatttataatctgagtgtgacattcaatgaaaatgaaattaatcacatatatacttgtatgtatatcttgtattgttctatattaacaagattttccctaaatttgaatttccacatattatcaaataaatgagaatataataatgaaaataagttataacaacttcatgatcaggatcaggcccgtctcaaggtgttgagaggcctagggcgaaatttgaaacggggctttttttacaaaaaaaataaaataaatattatataattttatttatttt

SEQ ID NO: 127059 - DNA, 1512 bp, Cannabis sativa
cgctcttccgatctagatcctagtaaaatattttcaacaagaagatcttgagacaagggtacttttggccaacaatgataaaagactcaatggactatgccagaaagtgtgacaagtgtcacaagttctctgaaatacccagagctaccctaaacaaactcaagagtatgcaaacaccctagccataaaattgtctgggggattgacctcataggttcactacctaaagggaaaggaaaagttcaatatgtagtggtagcagtcgactacttcaccaaatgggctgaggcaaagcccatagccaccatcacatcaaagaaaattcttgattttgtggtcaagaatatcatttgccaatttggactcccacagaagatagtgtcagataacggaacacagtttaacaacgacctctttactgatttttgtagctaacatggaatcattaagagtttctcaacggttgcctatccacaagcaatagcaagctcaactactttcttgtgtccattatccattatgtaagcataaccaacacaaaaatgaagacaagaaaacaatgtcaggtgatgataaatcaaaagaaaattaagctagaaggagataagataaaagaattaccccgaagatgtcggtgaagtatctttgagcaatgacatgcggaggcttggtgctgaccaactactgtaacaggatgttctcaaccttagcaccaatcaagacatcactatgagcaagaagctaggagccttgctcatgcaattattccattaaatttgaacctaagctccgagcattatgcttaatttcatttggagagtgatcaatcggagatccctcgttagtaccagacctctccctactagagtcttgagtagaaaaagcggcatgagcagttctacccctcttcctaaccttcttcttcgaagcagcaaaagcagtaggaatgccctgaaccacttcccttaccggagactcagtttccttcaacaccggaatctttctcttcaagattaaataagatgccataacagctaagaagctcatattatctgcaaagaaaaaagaccaaaggttagtatagcaaaagaaaaacaagacaacaagttaactgcatagcatggagcatcagccacttgctaattccctgtccttctctggagcaattctaatggaggtaacttctccatcatcctaggctaacaacacaaatattctccctgaatattcagtgtcatttcgaacagaagtcacttcttctgtaattattttgtaagtatggtgtaattattttagggtaaataccattttagaccttgtattttgtaaaagttaccaattagaccctctgttttgttaaatgacaaaatgggccatatattttccaaaatggtaaaaataggaccctaagctttacttttttaacaattttatttttaatataaccaactttaagacaatttttaacacgaacagatacagaatatgtaactaattttgtcatagcatctc

SEQ ID NO: 127060 - DNA, 732 bp, Cannabis sativa
cttatttgcttatattatacctaaatcatattctttatcgcttattattagactcattctttttggctaaaagcgaggtcaacatttttgtggtttcattgagagcaataatataagattgctctttacttcaagtttggtcacaaaaacgatggtggtacaaactcgcagagccatggtcgatcaggtggatccactagcagtagatcctgcaatgcagactctagggaatgcaagggtcccaccagccactaatcctaaaaaaccaatcaccaaaccacctaccgcgggtcaaggtgtgatgtctcctttggctagaatcacacccggtgtgcaagagactgaaaacaccagtttagcagccgatctaagtactcccagcactgggatacctttagcaacaaatgtccagacaaccattgtagatgataccgagatctagaacctccgtaatgctcttaagctcatgcaaggtcatactaatactttgcatcatgatcaggaagagctccgtgctgctatggacattgcgttcgaagagcgaaggcgcagttcgcggaatggagggataaagatggaaacgttgaaggcttaacaaacagccatcaatgtccgaacaagataggctaccttattgatacgaagagcctaccaagttgctaaccagcaacccgcatccagcatcccactgggtggctcagaagaaactcttgctgggcatactgcccaaac

SEQ ID NO: 127061 - DNA, 2866 bp, Cannabis sativa
acatgtcaaggcacctccatcaaggttttctaccagcagtatgctctcctcctgttccaggatacatggtaattaattgtctctagcatgttcttgaagaagcatcaacatggtattagtcttttttaacttacttgaagtggcagaagtgccacttagttactgttttcgcattcatatacatatttttattgaactctgaatatatgaattggattttatgtgcatattatttcatataaatgtatgtttactagtttttgttgctgatagtttgggtttgattctttatttgcaggaagattcaagatgtttgtagaaagctaatatactaaaagacttaccaaacaaagaactctctgagttgttatttttacttagtgttctaatttttggatattttcttagtacattttaatgtgtatctaaagagattagatgagttttgctagtgttgtttcttcaatgtgtatgtaaaaagataagtagagttgttttttttacatccagtcatgtaagaatacaaaatgataatgatgtatgtaaatgaatttttatgtgtatgatatgatttgtatatggatatattatgttaatgttgtatgttgatgaattataatttgtggtagatattatatgttttttttttttattatactaaaaaaaaatattagtgataatattttgttgtgactaaaaatatattagtgacactgttttgttgtggctaaaaagtattagtgacaactttttgttgtgactaaagataaataagttgtgactaaaagataattgtgattaattgttttacattttaacaactattagtcacagagattggttgtgactaaaagtgacatttagtgacaatattatttttattgtgattaaaacttttagccatgaactttttaactacaatgctgtcacaaaaaaaaaaattgtgactaaaacttttagtcacggcgtttttcacttttagtcacaattttcgttgggactaaaagtcatgttttttttgtagtgtattttgattctgcacctttagtggtaattttcctcaaaaaaattagtgaaccaaaaagatatcccaaatttgtagtgtttatcaaaaattaaccatctctttaacagttgtttttaatttttacaagacatggccacatttccctgattactatatatagataactagtgaaataataggtgaattatccttacaaaattaaaaatatatatatatatatatagatgaaaataatatttttattacatagattaaaaataattatattattaaattatatatcataaataactatattataataattaatacaaaaaattaaattattctactaattttctttaactgttgatcaagtttatacttaaattataatatatgtctccaaatagtttctatccatcaacacaaatatagttattaaaataatttgttatgtacgattattatctaatatatatatttttaaaacaatatattattatacttatataaagaattagaatatttgaacaattttttattgttatttataatatttataaataagctataatgtatgcatattgtttcatacaatgaatatgattattagctaatatatgattaaaaactaaaagtattactcacaaaatttctcacttgtaaaagtataacaattatcaaaataatttaatttgtatcaaattataaaagattttaatagaaaaaaaaaaaaaaagataaaagttaagtaatttaagattaaaaaactcaaaaaatattgacactttttacatagttacagattatttatatagagtaattaaaagaatattttataattttttgttgttaatggtaatatttatagataaactatattatatgcatattatttcatcaacacaaatataattatttatattgatttaatatataattattaattaatatacatataattatctatgataatgtttatagatataaactataatatatacatattatttcatcaacacaaatataattatatatatatattgatttgttttgtgattattaactaatatataggtattcacaaagaataattaaaaataaaaaatatcacttacaaattttctcacttattataatataatggttaagtaaattataaaagattttaataaaaaaaacaaagattaaataaatactttaatatgtaaaagccaaaacatataggttatccaaatgataatgtaatttatattaaattataaaatattttaataaaaaaaacaaggaaatatacttatttagtatcttgtatttttatgaaaaacatatttcttatcctgtatttttaataatacttaattagtacctcatatttttaaattgtacatatttggtaccttaaagtaaaatttaatcaatacagttttatcaatttaaccaaacagttctcagttatatatatgtaatcgaataattaaatttgaattcagaattcataaaattttaaaatattgattgtattgataaaattttatcaaaaaaatttaaatttaaagtaccaattaaatatgtatgattttaaaatacaaggtactaaataagtattattaaaatacaaggtagcaaacttgtatttagataaaatacaggataccaaatatgtagacacccacaaaaaaaaaaaagatttattaagtaatttaatatgtaaaagcccaaaaattattcacacttttatatagttctaatttagaggaaattacactctatatcctttttatattgtcctcttttatttttaccctattttttaaagtctatcatttttacctttttttttttaaatattgtacc

SEQ ID NO: 127062 - DNA, 802 bp, Cannabis sativa
aaatatattatagcatattgtttagtttattattattaataataatataattatttttatttattattttttttattattattatacataagaatatatatattttgaaattttaagttgttgatttagggttatattagggttaagactatacataaaatgtttatatgattgtttagggttgagagggttagaaacagtggtgagaggcagagacgaagagagaggctcatccaacgaaaccgagccgtgaacaaaagtgagatttttggtttgttgagtttgaaagtttttgggctgctctagaatatttctttgagttttatttcatccgagaagagttttagatgcaattagaaggtttgtaatcgcaccttttgagagacaccattgttacgttcaaaataccgttcttgaaacggattcagatttgaacgtgtttaagttgtttcgagaatcaaaggaggttgtatttgagtttttgggaccctaaggctcggtttggacataaaataatggagttttgacgtcaaaaacacagaaccaatattttgacaccataaacggcggtacattggagctaaagaagacaactcttttaggacgtgatttagttgtttctttggacgagattggatcggtttgagtttctgggcattgtggggatccttcctatttgaaaggaggcgtcgaaagaaagaaaacatgagttttggaactcgtcgtggccggagaagacgacccgccggtgaagctccgttcaggggtttttaaaggttttatttcagattttttcttatac

SEQ ID NO: 127063 - DNA, 837 bp, Cannabis sativa
  modified_base (738)..(746): a, c, t, g, unknown or other
  modified_base (812)..(812): a, c, t, g, unknown or other
aagataccttaatttgttctttgagtttgtcattattttctttttgaaaaaaaaaaaatactagattaaactctatttcaaactcagaactaagatcaaagataaaacataaaatcaagtgtctatctcaagtagagagaaaataaaaactttctattgctcttaatatgatggttacaaaaatgattttcgaaccccctctcacacttgaggatggactatttatagactctaatgacctaagttatattgtggtcccaaatagacaagatgtcactttcgggctacaaaccgcaagtgtaaaaggtggtcttgcgcctcgtatctttgtctggtgttaggtggttcccagacgcagaagtggtcccaggtcacataagtggtggctgcagtgtactctttgttgggtcctcagaccttgcaggtgcattgtgtccactactcgtacctccttactttcaaagtttgcatgaggtgtggttgtatgcttttctcttgcacatcttgtcctttgattccttctccaatgacattctcctcaatgtgcattcatatcttaccttacattcacaacacacgtacattacacaactcacttgatgcaacacgacacacacccgcatgcatgcaccatggctcacatgcgagctccccacatggactctcatgtgagccccaaactcacacacgtacacactacgctaaaatctaactttaccagcgtacatttgcagtggnnnnnnnnnaacttttaccagcgcatttacgtgttggaaaaaatcatttttgtcagcgcttttcattttatgctngcaaaagttctaataccaacattga

SEQ ID NO: 127064 - DNA, 1117 bp, Cannabis sativa
tacaataaaaatataaccattgaaacctcttccaaatatatatatatatatatatatttaagttttaaaataattttaactattaaaattaagataactttatgttctaggctatttattgattcaattaataaaaaattttaatttttatgaaaatgtttgtggtaatgtataataataatcatacttaactctttgaaaaaaaaattgtacttaaccacttatattacaaattttatatttactaactcaaaattactatacaacactattctacttatatttgttgttttaatgaattttaatgattttttttttaattttctttgagattttagttttttttcaaaaaatatatatgtaatggatacccgatgtattggggcggatataaaagtgaatttagaaagcgaatatggggtgcggtatggataaatttagtaagctttaatattaataatagctttgtttttttttttttgacacataagcttttttcttttttatgtgataattaataatagctagttaaatatttacaaacaaatattttgtttggaaagtgtggtttataagtagacatgatatggttaaatattattgacagttagattaaaattaagaaaggtaaagtggataatagatgtgctaaaattggattttttaaccgtctatgatatattatttataaaatctgcattgagtaatcaaaaattatattcatcattaattcattgcaaaaaaaaaaatattatatataaaatctttcatgagtaatcaaaacttattttaattattaattcattgcaaaaaaaaaatatttataaatatgtcaagaatgggattcgaacccatgccctttcggaccagtacctgaaactggcgccttagaccaactcggccatcttgacttatgttatgtgaagccacatttacattataatacttttaacattatacatctggaaaaatttaacaaatatttattatggtatttcactcagaaaaagaatatatttatatttattatagtatcatgaaactatttaaacaatagcctgaccagatgggatcataattgatgcagccgtgaataatctgatatttatatatataa

SEQ ID NO: 127065 - DNA, 722 bp, Cannabis sativa
taattgtgtaagttagattgtaaccaaaacaaaaactgtttggtagtcttgatttggttatacattttcttattaagtgatgtcattaactaatttcaaatcttttcaacttttcatctaatttttttattcttcaatgagataaattatctttaatgatctagaatctttattacatgcatatcaggtaccattttgtagttttatctacagtgcacgatatacggcatcctttttttattaattgtttttataatttaattaatatttatattattgtatttgtaaaattaagaattattttttgagaaattttaccatgcacatttttaaaagtgatgtacaaatctactcctatttatttcggcacctgacaaacttttttagtctattttttttatatagtagtgtatattataattatttaagacatcctgtaaaatttaaaaaaatgtaatacgtcgaaaataatgcatttctttgaaagtagtgcacttatatactcctaccagtttcggcatttgggagacttgattagtcctttttttatggtcgtgtacattatagttatttaaaacatcctgcaaaattttgaaaaatttaacacgtcgaaaataaaattcaaactttctgacgcgtgactcttttattgagagggatacattgtaaaagcaccttataatattttttttgtgtaaatttaaatgtgaataccataaatt

SEQ ID NO: 127066 - DNA, 719 bp, Cannabis sativa
agagatgaaaaatattctttattgcatttttcaggttgatcgacacacctgaattcataactgagataagattaggatgatgatatgcatgcttacatgtttagcatacatattttatagttttctattagataacatatcattaagagcgatattagtgtgcacatagctgcattgaataccaacagatatatattagaaaaattctaatgctattagttcagcatatcagtaagagcggtattgatgcacataaagctgcattggataccgacggatatatgatgggctttgtcgtacgaacgttccaaacttagtacgtgttggacgcgggataaggtcatgattaggtatatgggtacctagttacgatctagttatatgtttatgtttatgtttttcttacggagtctatcgactcacatatattatttatatatgtaggttaaggcaaggcaaaggatgaacaatagtgaattcgggctagacaaaaattgtacatatcgaggcggttagacctgaagtgtttagatcttcgggacaattatgccttattttgatagtcgctagacgacaacttttgtagtacatgtattttgtaaacagatataacttttaaatgggattccgaaatatgtatttgtatatatttatttcaatttaaatttatttatgaaaattttaattattcatgttttcaataaactttttgattaaca

SEQ ID NO: 127067 - DNA, 1956 bp, Cannabis sativa
  modified_base (440)..(447): a, c, t, g, unknown or other
ttttttttttcatttttactctttgaatttttttatttacaaaaatacctctatagtaaaaataataagccgtttttttataataagccgtttttttttttttgttattttatagtttatttatagttgttgagaggtatttctcgttatcgtttacattttattgagcaaagtgtatttttacaattttaaaactttacaagtgtatttttgtaaataaaaaaatttggccgaaaaattataaataaaacataaaagaagggtatttttgaaaatctcccctataaaattattaagatatcataattaatcatatacctagaatgccaaaaagaaataaagtgttagggtatgtcctgaaaagtctgtaaagacatttctgattattaataagagttgatcattttgatatatgcgtgaatgttaaattattaatattnnnnnnnnaataatttatatataaatattaaaaaatttattattcatacatgaggttgtgacttgtattgtatagagaataagatcacttagtcatgaataaaatagtcagtaacatattaaagtttaagaatctttaatcaatagttgttagtgtgattcactaatgccgttattcagtgcaagtaatctcgattcagattattgatgtagtatgacatttaagtggatgtgttgtacgtaatagagattatatatgacaaggactgatatgaataaagctatctttatcaaacttattgtttactataaagaccaaattcatatcataaagatgatcaatagtagattggcctacttctgagtaatcatgaactcatgttcttgttactagtttctttgattcactcgttaaagtttctcagagaagataatttttagaacttctgtttaaggaatctaataatgttgatatatggctaggaacataatctaaaattatagaatcctgactttcctaacagattgaatgttggttccctttatgtgttaattttgaaactggaaagttacacacaaatttagattgaatctaaattatacttccactagtgatttaatggtagtataagataaagaagtaattagaatcgtaaaacggtaatttaaccaaaattaattacgaaccaacacaaggatgactaatcactggaattgattatatcaattgacactgcagtaaaactcggtaaatataattatataattactaagagtttaattctatatttatagtggagtaattatagaattaataaataggattttttggttttatgaaactcaataaataatttagtttattggagcttagaattataggtccatagtcttctaatcgccatcttgaaacactatcaagggtaggtctaaagagttgtataatattattcgaaaaaatctattttgaattgaaaaaatagtaattatttatctttgtaataaataactgtttaaatttaaatttagatttaagaccaaagttgtctaaaaaagacactattcttgtcttaattaagacatgataggcgcctaccctattgtagagttatcccttgattttgtctttttagttaattaattaattaattctttttttttaaaaaaaagaaagataaatatttgaatttaaaaaatagttaaatatatttttagttggttgagatattctttcaaagtagttgagatattctctccaagttagttgagatattctctcaagtagttgagagattcctcctcagaaatatcaataaccgattcgattgtggatattttatttgaataattaaatatgatttaattaattaaatatttactactataaatatatgtctgatttaagaaggaaaatttgattttttatacttaaatatacctaatattttatccctaaactcatacatatcaccattgaaaatatatgactactttatctaaaacccaaaaatacccctc

SEQ ID NO: 127068 - DNA, 734 bp, Cannabis sativa
ggcggactaggcctgtgcctagggcccacatagtccaggggcccgaaaagaaaactcttcttttaaatttacagtttactgattttgaaagatactatttttttcctaaataagaacccaaaaatatttttttttctattgtccactatattttaaaataggtagtgatcatgatatctatatgaattgaaaaaatatattatatatttataatacttacgttccagttgttatggatacaccaagtatgatagcttcagataaagatacgaaaattagagtgagtgggttgaacatggacggataagtggcccctttaagtgaaattgcccatgtcactaagcagaacgtagcagctgttgcaagtgatccctataccaaatttcacaccaaaagataatcaaattcaaaaagaaaatagtatatatctcctaaatgaatgtttcggtgaattactaatctgttttagtatttaagaataattgttaatctattttttttataatcatgcatgttgtacttatttaagaacacatgtagatttttttaaaaattttgaataatttacaatactgaaaaacaacactttaaactttattttcgtcattataaactattcagaattttctaaaaatttacaagtggtctcaaataactaaatatacaatcatataaaaaaaaaaaaacaactcttctaaatatcgaaataattataaaaaatctattgaaacact

SEQ ID NO: 127069 - DNA, 613 bp, Cannabis sativa
tatgcttacgaactaaatgaaaggggaaacctgcaaataagagagaacaaacaaaaaccttcacatgaaagggatccaatcaaatcagacaaactcctctatgactctcacggttaactctatttaaatttaattttttttttaagtaaaataagattaaagattcaatgtgatgaggcacacaaaatataatgtacatacttattacaaccaattgccttttgatatttaaggtgtctactggtaggttcaattttaaggtgtctatcctagaattaccttatatttttttattttagattagatttataattctgttgcaaaaaattagatttgaaattttaactaaaatacacgtggacaaagtatactgacacatgtcactttaataaatacgttaaacatttaaccgaatagtagtaatggaaatagatgaaaactaacatgtagtatttttaaaaaatatagtatttaagtgtgtgaaattaaaaataaataatttatgccgcaaatttctttgttaacaaaaaaatatgaaatatctaataaatataaaatataaaaaataatagggtaaatagcggtataagtacctaaaattttatgtttgtaa

SEQ ID NO: 127070 - DNA, 1032 bp, Cannabis sativa
  modified_base (994)..(1000): a, c, t, g, unknown or other
gagtcgaactgatgtgatatatattctaagttcaaattttgggtaccaattagtcaaagaacaagagatcattcaacaaaatttacaatctttgtttttacaccaaattttatattcttttcagatttggtatggtaatgagaatttttacatttatactatctgacgctaaagctgctggttcaagggtagggtacagtactaaaagtcctcggacttttaggcaatttttcttttggaaattgcggcaaaaattttcccaaatttcactttaatgccatttcaagaagtgtaacttttgtcggcgtatttagccaaatatatcggcaaaagtcgtcaacataaaggagctaaatgaagagcaaaagcattcagccaaaaattttaccggtacactattgcgtcgacaataatttgaaaataaaccgctttgtcggtgcaatcatgcactaataaaagtctaaaaaaggggaaggaatttttatcgcgtgtaaatagtgtgggaaaattttttgccggcatcggcgcatatatgcactaacaaaaggttatcaaatttttttactcgtctttagggatgaaatttcacctttaccggcacatatatacgtcgacaaaagttaccaaacaatagggagaaatttcccgcgtggttaaagtgataggtgggaaaacttttgttaatgcaaataggtcatcaaattttttttgcttatttttcagcggcacgatttcacctttgtcgatgcaattatgcaccgaaaaaaggtaccaaaatagtaatttttattaattttaacttttcccaacttttttttttacattattttattttttatttgggttgttttatggaatcagtttctttgtctcagatttttaactagttgataaatgtaactagtttctttatcttatattttgagctattgtgcattatttgttagtacttattttgctatgaaactggttctatttagatttatgtctcagnnnnnnntccacatattctgacttttttttttttttttt

SEQ ID NO: 127071 - DNA, 1109 bp, Cannabis sativa
agggccattttacatcttggccctatatttttttaatttttattttatagcggtgttcgttatgcttacagtatcattttcgtaaattttttaaattttttgaatagtttgcagagctgaaaatacatttaaagttttttaaacgcgcgtgataaactggaatatcaaaaaatctatttttggtatcgtaaactattcgaaatttttcaaaaatttacagggatgatactgtaactataacgaaaacgaatactgcgaatactgctataaaaaaaaaattgaaaaaaatattctattatgtaatttaaagcataaagattaactaaaaaaattgtaattagcattcctcaaaatattttatttttaaaaaccacttagaaacttattgttctagttatattgatattgaaataataaattttccttttctctatatttttttcctatttactctgtttaggcatgtattcttgcattttaataattttattataaaataatatttaaatttttaatgtaatttttatgaaaaaaaagcatatttaaatacaatttaataattaaaatatttcattgaatttgaatgatatttttggtcaccaaataagttatgtttattgtaaattagctaactaatgcgaagtctgactagatctaatttcgtttatggttgtcacgtgcagagtgataataaatatgaaggacacaagaatttatagaagttcgacccatttgatcaggtaataatctactctctttttgttgtattcactcttgagataataccatacagattacaggctaaaatcttgtactttctagctataactgtcttcagtattacaataatgagaatgagtatgagaagacttgtgaaatgatgagaagatgagagaatgcaagaactctaaacacttaggtggtgtttggttgaaggtaatgaaatggaattgaataaatgaaacaattttcatttcattcttttgtttggttgtatttaaaacaattggaatgccatttcgatggaatggtctttccatcattttggtggaatgactattccattttaaaatggaaggaaagaccattccaatgcaaaatttgaaaaa

SEQ ID NO: 127072 - DNA, 2095 bp, Cannabis sativa
tacatatcaaccgcggtgtctcggtttccaggggataggatcaaccctttgactatgtttggaaatgtaattctacttttgtaataacagttttggaactagttgtaaaagaatttataaacaagggatctccatattttggtggtattttgaatgaaagtcatattttaatttaatcagaaagtttttaatcagaccacacttttcctaaactaatagaataattataaataaatttataaagcacacacgtggcgtccttgtaggtcagggcgttacagaaagagtacatgcccacccatagcaagtcaagtactcaaccatagtgtgtaagactgtgaagaatccaacacttaaaggagaatcaggctcaaatcttgataatatgctacgacagaaaggaacaagggttagagatttgagtgggaggagacatattattctgctgccactaatcttgataacatacatatttagaatgttaataaacatacttgttagtaaatctagatcccaataaaatatattccaatagagacaaccaataatatcctcaaagggggtaggccggagggtcaaggtagtgataagtggatctagactaaagaaccaactggttgttttattataaaatctgcctatcttgctcaggccttgactagagagccccctaccactgttgctctcactcttttggaacaaactttggaatttttgtatcttggaatgccacaaagtcctttggggaagtattctctcaaacaccttacacatcaggtcagctcttgctagaaggatgaagattgaggatgtgtcctgccccttttgcggtgagggagaggaaactatggaacatctcttcctctgctgcaactttgcttttcacctttggaggtcctccccttggagtgtgatgccagtgacgaagtttgaggcccaaatgtgggattggattaaattcttatggagcttgaagaaaaaaggcgtggaggtccaagaattatttttgtatgcttcgattgtagtggacacgatatgaaaaatccaaaacgataaggttcataaaaataattatatttgtaacattagtcactctaccgactacatatctacttgttacgcatattttggctcttgtttgtttcttacgacgatgatgtttacacctcccgtttggttccccctcccgccaaatgattgggtttaaatcaactgtgacattaaggttggtggagactcaatgtgtgtggtggccttggcgagagatcataaggagtcgattttatgggtggctagcaatattcttatcttttttgatcctttcataggagatgttgtagcctgtttgttagtcctggagtcagcgacccgtgggaagcattcgtttgtgatcattgagagcgattctgagacatatcaacacgctaaagcgaactagttctgttttgggtattgataattatgtccttcaatgtaaaatgctctcaaaccttttcagtagctgtaattttttgtttatttcaagattatataactttgctgcccataatgtggctaaatgggcttttgccggtaatatgactagtatggtaaatccttcttccataccggatagcttaatttgtattgaacatgaggtctaactcctttgtttgttgtaatgtaattacacactttttttttttttaaaaaaaaactctcaattttatataaatatttaaatttaattttttacagtaataacacatattatacttgtagaacttctgtaggtgcttggtcgttaagtgacaagttattatccacgtgttattttcttattggtatatttatattattttttaaataaaaataatgacatggaccaattaggaactgtcatatggtcattggctttacacttaacgtctaggtatttacgaaaattctaaaaatattattcagatattattactgatagaaattaaattttgatatttattactacaaaaaactgttacgtttagtgataattttttagtcataacataatttttttgtgactaaatatgacttttaatcacaacaaaatgttagttatgactaaaatatagta

SEQ ID NO: 127073 - DNA, 1349 bp, Cannabis sativa
ggttaattatgatattgagctattaattatgatttacatgtttgtggagatttatttaaattcagaatgtattaattatgctatatgtgaatttctcaattttctatgtttgtgttcggtagcagtggaagacgacgttgggccattagagagtcacgtttctttatggtttagaatattatagatagcgaggcattgtggttaggcattgaaaatatagggtaattgacggggtttggaaatttactgaattccccttataaggcatgttttgttttatgtcaaagggcatattagtctttttctatggacttttgtcttttgtggacataaatgagctgattttaggttatatttaataatgcttaattcataattttcctaaagcaactaagtaatagaaagtggaagaaaaacctagaagagtctcacctatcctctctctttctgtcgagctatcaaagaccagcaaggagctgaatttttcttagtttaatctagtgaatcttgttgatttagtgtacttcaaaccaaggtatacaatttaacctctttcctttctattttctttaactcaagttaggtttaggtgtatgattttggggaattagggttctatggtattgaaggtgtttaattttgtattttgaagttatgttagagctattggaggtattttgagctgggtttggtgcttgaattgtgtttgggtgaaatttgagtttaagaactcaaatcttgccctttaatggtgttttcaatttttgagccatttattgtgttttattgtttgaattagttgtgttggagtgtatacaagcattctggagaatattgagaagtttggggttgatttgaagtgttggggacatttttagtggttcctgcactgaatcggttgagcggttcaggggaacctgtagcaaccggtcgaccagttggtccccaggaaaccccatcaaactggaattctggttggggaaccagtttacaagttaggacagttttgccaaccctagtttttcgcatttttgtgatctttatggtattgccatcctattcatcgatagggatatttctagttttgattttaagtccccgaaaagtattttagtgtgtctctcaacagagttacaagttgtgatatagggccctgtaaaatgtcgagctgcaattacactcaggctgaaaggcacacctgagcacagaaacgaggtaagatagcataaatatatatgtgaatgtatggatgttagtaattgtttgcaccactaacactaacaaaaaaagtagttttaagggtgttagtgcagtgtagggttctagggtagttatagtgttaccaacac

SEQ ID NO: 127074 - DNA, 972 bp, Cannabis sativa
tgggataaataatcccagacagatgaggttaactggattagttattcagacttctaatatgcccaaacactggattagacaaattagcctgtgtaattcaatccagttctgcgtactaaacgggcccaagattaagagggacatgggcattacctacccaatttctaacctagtaaagaaaaatccaataaaaataaactagtttatcggattgtgcacctatctttcttagtcaaatacatactgagtggcgtttgttttaagtggatcaaaattaatttcaaagatacaacgtcattcaacgcagaaaattaattctaattttgtattccttaggagaacgggtagctggattctttgacttatgagtaaactatattcagatttgagatcattgacctcaaagagagagtgggtggggtagtttgctaccacatattgggtaacgtgctcctttgaattgataagtctatcccatatatatatatcccatatatgtgtatctattaatatatcttctaactattataaaaatgacataatcgtgtcatactttttaagacaattttactcttatattaaattaaattatacccttattaataaatcaatttatatagtaatttctttttattatgattattaaaccccacaattactaatttagtttttgtctatattataattattttatttctttttatttttttattttactattatttaaacaaatgtgactaatgatatataaacaatattttgtgtcttcatatttataatatcatttgccatatactattttacctatatatcatatagctaatggggaaaatatctccattcttaatgatccctggcttccacatgactcaaacaactatgttgtctcacggcaccctgctcttgtgaataagtcggtcatctgcctctttcaagtcggtactcgcatgtgggatgaggatgttgtgaggg

SEQ ID NO: 127075 - DNA, 2100 bp, Cannabis sativa
agcaagttgacatattgtcaacttgaggtgtttctaatcaagttcaccaaaaagtgtgttgattatttttttggtcatcagaaataatgaagattcaagcaaacttggggagaaaatcacaaacttgagcccttagaaatagggcctaattcccaggtcgacaattaacctaggacgctaccataaattgcttaaatgacaaatttgatttgaccaatgaatccggaatggtcaaaaatggggtaggagacctcgtcctcaagttctagatccttggaagtattaaaatgagatcccgagagctcgagaatgagtgcctagcgtccaggttcataaatggcctagtgccctgggttctgcttgtttgattctaattccatttcgattgtccatctagttttttacaataataagatccatgaagttagagaagtcaaattcacaactttgcattttcatttccaacatgggaaactcactcggaaatgaagagttttgggtctcttatttccactaaacagcaacatctccaagaattggtgaccagcttcgctagaacacagaatcagacttaatggtattaaaatatcacttaggcatcttaaagtacatcccttggaagttttaacacttacccaacgtccacgctgacttcatatgtcaacttgggtgctgagatgtcaacctggcactggatgtcaacctcggcgctgggtcatgaactcccttcagtaaaataaccataactcacttaatattgatctgattgacacgattcaactagcattttgaagctaatttatagctctatcaattcatgtctcacactttaatcgtaattctgaagctatcaacgccaaatttgtaatgactgcattttagaatatggatttgtaaaggcaatagcgttcattattggtattattttataattatttatgattttatttaattgtgggtctcattattagaaatggacattagagttataatttctcaattctggagattttattaaactctagaagtaatatttgtgttatatgtgaattatgctacttttataatttttgctcggcgatgacagaaaaagcgatggatggtcatttgaatcgcatgggtaagtctagaacctttttcttagtgggataaatattgaaaataaatagaataccgagtttgagcggggtaatagtttttgaccattttacccctaggcttaagttgtctttagtttaaccattaaggacattttggtcatttggttaggagattaggtggccttatctagagtttgacagctagtttttagacacttattcagcaagtgatttatccatttagaagaaaataagaaattaaaaagaaaaacaaaattaagagaaaaactcatttctctttctctctctttgctggaccaccaccaaatccataaagaaatcagcaatactcatccctttttctagaattcagcaagaaatctaggagtttccaagtggaggtaagccttatcaccatgattctttagtttcttaagcttgaagtttagcttgaatgtacgattttgagttataggggctgttaatgagttgaagttcaatttttatgttcaatttgagtttggtttgagtttttgcttctggtttggggatatggtgtggtggatgcacaagtttgagtttgaaaactcaagcttggttcacccatgacatgttttagttctgtgtgaatttttgaattttgttgcttggaatatgttgtgggagctcaaaataggtgttctggaagttttggtgaggtttggacacgttttgtgcatgttttggattatttggggaaaaccttgtgcaaaccggttaatcggtttgccatgttctataaaaccggttaaccggttctatgacagccttcctgaacaatccatttcgacgattcgtgtccatttcagagccttggttgggtgattccttgttacttacggtattgtagtttcaattgtctatggcagaacctttagttgaaggttgggtttcccggattagggttttgggcgtgtcgtttacccctttttgttatgtgattagggcatccatccagcgt

SEQ ID NO: 127076 - DNA, 749 bp, Cannabis sativa
acaaacataaataagagaagagcagtgagaaaaataaaacaaaagataatgattaaagaaaaagaaaggagagagaaaaatatattattttattaatttattaaattattacttatgtctaataaataatctagtgtactctaaatatttattattttatacactcatttatttacaatcgttagatctattatcaatggttataaaaacgttcctaccatagagacaaaatagtagttcttactataaacatatcctatatatatatatatatatatatatattttttttgagagggaaccaattcattaaagaaggaacggcaagtctgccttaattagtaatgttttttttttaatccatagtaattgttagtgttgtaaatttgtgtcatgtcgttcggtgtcataaaaaaatataggtcgtgtcgtgttatatcaatatttttaaagggcaaacctaatattttttcgtcgtgttttgctctgacaatgtcgtattttttaaaccgaacatcctgttttcatatccaagttcgaattcgtgttttacttatatatattacaattattaaactatatatattataaaattatttaatacttatgtaattttttaacaatattttacaaataatcatatacaaaaattattggaataattacataaggcatcatttttttgtaaaatatttacatttttacgtttaaagaatgttttttttaacatttttacggttttcgaaaaaa

SEQ ID NO: 127077 - DNA, 873 bp, Cannabis sativa
acggaatacattccgtgaaagtacctcacggaaaaaatcgtatccctatatagattatattttttctatatagatattaattttaattttttgggatcttttgtgggggtcggagcctaagccccaactgcctcactctgtggttagcaatgaatcctctaactctctccctcatcgttattataaatttagggataatatataatttttttttataatattttgacaaagtttagatcaaacacacacaatctttttatacatagttatatatttatcattttagattttaggtgtaatctcacatcacattggctatacataacttatttatttatagtgcttatcgtgattttgattatttttacaaagtttgttgttgtaaatgtgatttgaatagacttttatgcatgcctaggtgcatttgtttgtggtcatcattctcatacttattgtggtcatgattctacttattacacatattgtatccacggcgggccctgaaaaaaaatgggcccaagacggttttagcaaattaagaaaaaatgtgccctttttgtatatgtattttttttatgtatataattttaaataaaattaaactaatatttagtaatataaatacattccaaatcaataaatcatcacataaacttataaatttcaatgcattacttaaatattatacgtcttgcctttttagatgcaaaagtattaattaaatttacataatcaagttttgcaattaaatcatcttcaatggataacatagctaaacaacttaatctttcttgagacatggttgaacggagataagatttgatcaaggtcaatttggaaaaactccgttctgcatgggcaacggtgaccgga

SEQ ID NO: 127078 - DNA, 691 bp, Cannabis sativa
  modified_base (27)..(29): a, c, t, g, unknown or other
  modified_base (654)..(665): a, c, t, g, unknown or other
gttaaaccaagaaatgccgttagatannnacttttaatatataaagatattgacaaacaatgataacaattctctttagatatgtaataaaaataatacttaggatgcgcaaaaaccttggtactgaaaaagagaacaattctctttatatatgtaatgaaaatatatcttactcaatttttgtattttattaatacttcatccatctaatattattaaaagttttatttttagtcacaacaaaatttatgattaaaaataaaagaattttgtaattataaatcatcatttctatgttatgactaaaaggtaactaaatgtattaattataaaaattccaatttgttgtaactaaatatatttttaatcacaataagtattgtgattaaaattaaattagtaatataatttgtatttaatactatattttagtcacgcataactttttgttgtaactaaaaattacatgtaatcacaaaaaatttatgttatgactaaaaaattatcagtaacaaaataattttctttttaatgtaataacatttattataaacgactaaattgatagtagtcatgttaattagtttaaattaaggatactggaagaaaaaggcacatcaaattataattattaaatatatatatctttatatnnnnnnnnnnnntatctaacggcatttcttggtttaac

SEQ ID NO: 127079 - DNA, 683 bp, Cannabis sativa
tactagtgttttataaaaatacagtatttttgaaaaaatttccgtgtgacagtatttttgtaaaaattaactcaaattccagtatttttataactttccgtacaaaatttggcttgctttgagtaataaagccatagagcaatagaagtacgtaaggaggaatgttgtacaacaacagcagcccccattaagagaaaacatatcattttaggtataataatcaatgtattacatgtacatatcacaatactaattatatcaaacaagcatatcaagcatcatattaaaattggagaaaacataaacaatgagtttattattttcttatatttgtcgttagtatcacaagaatttacggacaactattggataaagcacatatatatttttttaaaaaaattgagtttatcaatgacaagtaaccaagtaaattaacttaatttctggtctgccaaggtagcagaaatctatattaggtttagtggcccaatattttcggcccaattttattgtgggcttcctattttgtgccttatatataaataatattttgcaatggaaattatacttactatggtattttagaagtttttatgataaatctgacacatttaagtttgaccaatttatatgttatttttttgtttttaggtcttttatggtatttaatatgccatatatat

SEQ ID NO: 127080 - DNA, 1060 bp, Cannabis sativa
ccgcctcctcgcctcttccaaaatccctttcaaaagtaatcgcaacttcaatacaattgtttaaaatttcctccagacttctggttggagccgctccattatcatccaccgggcacttctttctcccactcctagttttgactcccgaagatctacgagtcgaaaacacagaactaccctttgatttcctaccacggccattgggtctcgagctcgaggcttcatctcccactccaatacagaacgcctcttggggaattgcttccgttttttccgttagtttctgctgtgacaggttctcagaggaagagaaagtagatatagcaggaatgggttgtaatagagtgtgggccttcctttttctattattacccaatagatgattgatcatctcagataagtttgggggaatagagaggagagactgttgggctttgtataaatttagaaagtcaggtttatatagttgcataaataccttttgggcctctgaatcatgattgggccaagatattggacacgcctctggaaaggaatgtgggttttgggacaagcaaacccattcatggggaatatcaatgcattgggctaaagtagggcccaagtcagggattagatcatctctgtgctgattattagcaaaatcagggttaggcaaattcaaaatattacccgggacattatatacttcatggtccccctccatagccacgtgtagattcctcgtaccaatcatcgtactggatgcaggcgccacactcccactactcgtaccagcaatgtacgactgtcccttctcctccaaggttctcgactgacgtaagggttccgccgtatcaccacccttctgcttccctttctccgacggacctgcacctcccggtaaggacgtcgcaacttttctattccaaacaccccaacgtctcctcccttgcaattcccactccggtatctcttctagctcccatttgaggacccccttccccttcgaattaaagtagttactgtttcccgtatcacttttaatccataatccatagagaggaacagccttccctga

SEQ ID NO: 127081 - DNA, 936 bp, Cannabis sativa
tccgagagacaccttccctaaggtactcctttttcgtctaagacttagtttatttccataagtgttgattcttacagatccacgtgtcaacctcatccatgtccacgtattttggaaaaaatcaagggcaacatttaccccccaagcctcgtttagtgaagggtaaatgaggcttgcttggtgcctccggtaggcttattggtataacggcacgcgctccaagcgcatgggctgcatttacgatggtcatcattaatatttatttccttttgcaggcaacgattcgcttcccgtctattgagaaactgacgcatttaatcagtgtcagaaaagtactcaaacgttttcaaccgccctaatgcgcatttatctcagccattggattggtagaataccaatcgattacgattcccaccgtacgatggtgtctgattacagctgtttggcacccttttctggtctataaaagccaacctttttttttcattgagttactttcattatttcgccatttcgactcaagaactcctttgagaaaatttcagaaaccatagatttcttactgttattttttccgtcgttgccaggctacattctaccgccgatcgtcataaacttccagttcacacccctcacgtaagttttctgggtatctttcacttttgttgttcacttgcatgttagggtagagcttttggttaagtgcttgatttttgggaaacgattttggcaaaggccgtcgtatggtgtgtacatttttcttgtgttctgcttctttgttcctttttcgttttgtaatccacctttttactgggggactgctcagaatatggaacagttttcatactcatgttccctttctctcgttttttctttctttttcctctgctttcgctgcttttgagatattttcacctgatgtttgcctaggagaat

SEQ ID NO: 127082 - DNA, 1909 bp, Cannabis sativa
gctaattgcctttactaatccacattactagagcggtcattacagcataaaacccaacaaaatgttccttggcccattttctgtagtatttcgtatgggcctttcctgtttggcccgagtacccccactcctggttcttgcaaagctgggaatacttttcttaggacgaggtctccaacattaaatgtacgattttgaaggtgttgacaacgattttgaatggaaagtcaattacaagtgagatatagtgatgacaatatttttaaaatcatatgatgataaactttctataaatttgtcaataattatatatattctgaattcataacgatatacaatttgtaaactaacagtataatattatatatctataataacttaattacttaaaagttattatttattaagtttaaaatattttaaaaaaataaaactctataatatatatatttgttattaaaagcactacaaaaaatagttacttttagtgacaaatttttgtcacaacataattttttttgtgactaagtgtgacttttagtcacaagaaaaagttacttgtaactaaaagttagtatttaaagataagttgtcactaatttagtttagtcacaacaagtattgtgacaatagatttagtcacaataaattgtaatttttgtgactaatacatttaactacagactttttagtcacaatataagaatgataatttataatttatcacaacttttttacttttaatcacaagttttgttgtggttaaaaataaaattttttatatgaattaaaataatacaaatttagcacagttctttaaatttttcaaaacttctccgtcttaaaaaaaagagtaatttgcggcataaatacttaagtttaacacttaattgtaaagaaatacttaagtttaatttttggcggtaataatacttatgttatatttttagaattctataggtacttacttatgttgtattaatttttttaaaataaataaaaattttatgactttcactaattaaaaattataacgtgacaatttacataataatttaaaaattataacttaagtagttatttgcaactgaaaattgttaagtatttatgccaaaagtaatctaaaaaaactgtcatgagtatctcaaatgagcggagtagccgctttatccacacgcagaaataggcgtggacacaaaacaaaaacgcggaagtgagaagatgttagtgacaaatcgtaagtcactagtaaaactcagtaatagtgccatacagctttacactattcaacttatccagcataagtcaacgtagcattcgaattgtgttatgtttcacactacctagtcaacacattgatggtgtatgccttatctcatagtgacgtcagaataagacttcaaactgtctcaccaaaccctatctcaatcatccaattacttgattctcattattatagctacgcatcgtagtacttgtcggccaaaaatttggcccaatttagtttcaaatttgagttcattagatcactttctaatctaacatgaagcaatatttatgatcattatgctcatcctttaatgttcttctaaccatgtcggtgttcctaaatgtaatgtgtccaacttacatatacctaatattttatttttaaactaatacatatcactattgaaaatatatgaccagtttatttaaaatccaaaaatacccctccaatttctcatactttttttagtacaaaaacataaaaaaaaaaaataaaaaattggtagtccgatggggtccgatggtggtccaacgatggtccgatggtcacctgatgctacttttgtatgtacaaaaacataataataataaaaaaattggtagcagatctggtccaatggtcacctgatgctattttttt

SEQ ID NO: 127083 - DNA, 829 bp, Cannabis sativa
  modified_base (773)..(773): a, c, t, g, unknown or other
ttggtttatcccaattattgtgttccccaacaaataatacattatacatatatacatgacaattaaaaatactgcatataacatatatatatatgtatgaggttggttgtaaaaaaaagtgaaatctatatataaaaattttatatataattaattaattatatgcattattgaagtttaaatgtatataaataaataatcataaatatacatgtatataaattaatttatgacatatataacattttatattaaatacaagtaaagtttaaatttttccttcatcagacaaaacacaaggcaaaataataataataaaaaatatcactaagaatatatttttttaggaaaaaagtaaaaaagtgcatgagagtatgtacattgaaaaaaaaatggagcaatttaacttattactttctaaaagaaccacaattatatatatatatatttagaagattatattttataaatatatattaaaattaaagtactacaactcgaataatatggtaagttagtattatttttaagtaattagtatgtatagagaaatttaaatatttataaatttaataaaaaataaaaaaattactagagaattaaagaaagaatagatagaagtattttgagtgaaaacttttaaattcttcatatgatttcaagcaccacgactccgagcactcccaagtccattgttaattttatcataatacaagtttataattaaaaaaccaaatcaacatataaattataatatatatctattctatatnaagtgtgcctatataactaaaattcttggtttatgagaaatttatgggtgattttt

SEQ ID NO: 127084 - DNA, 1321 bp, Cannabis sativa
caatgtatatatttcttgtttatgagtatcgtaaacaagaaataaacatgcaaaaataaatgagtatcataaaggttctatgtgaacaacatatgtaccacttataagttgatatttctgtccaaagactaaatttcaatattgtgttaggtatcttgtttcaatgagtccatcactataattaaataaaatttgtgtcttacataattattttattatgttatttttgtaatatattatgacataaattttttatgtgagcttatgtacttatttgttctgaatttgttaattactgcttttgttgctaatattactgctaacatgaactcaattcccatgcttaatatcacaaactttaagagctgaaaagataatattttgttggttctcgacatggatttagactatgcattaaggaaagaacaaccgcttctcctacggagtcaagtttcattgaggaaaaaatgaactttgagaagtgggaacgttctaatcgcttgtctaaaagatggtaaagcgcaacgttctagaagtattcaggagtggtatgtccaatgaagtatttctaaaatattttgaaaagaacaaaaagactaagacaagcaagcttttagctactcttgtccacatgaagtataaaggaaaatgaaactttaggaagtacattatggagatgtctaacattgtgattacacccaaacttatcttcacaaagcgattgttgtagagtagtataggcggtcatgtccacaaagaggtaaaaaaaacaagcaaacaatattaacagacaaatgatttagagataaataataagagatgatgagaatgaatttttgtaatttaatgaaagataaataaataacataatgtggtgaacgtgtaaatttattattttatacgcgtgtaaaatagacggtttgaacattgaattctatattgtaaattattctaaatttttcaaaattttacaggatgtcttaaacaattataacgtacacaactataaaaaaatttgggctaaaaaattcttatagatgccgaaacagttaggggttgcatcagtgtgcccattttagtagggtgcaatgtataatcaccctaaatattattttttagggttacatattttagttttagaaaattctataatgcacctcttaaaagcaatgtactgatatacccttatctattttggtatccgaaataattttttagtcaaattttttctcatgtcgtgtacgttgtaattatttaagacatcctacaaaatttttgaaaaattcaaaaaagaattaacacgccgaaaatagaattcaaa

SEQ ID NO: 127085 - DNA, 1113 bp, Cannabis sativa
attagtttcttaaatacctttgaaagtaacacagatattgctaaaaaaagtaatgtaaaatttttttaataacaaaacaacataattatataatctaaaaataaacataatttcaaaagtgattaaacaaaaactgtaaccaaaatatatatcaaattatttttatcttaaagtggatcttttcacgataagtatcaaattaatctcataagtaactaaaatgttgcttatgcaaaaaaaataaaaaagagatcttttcataaaagataactcattggtatgaaaagaatataccgcatagttataatacatggtattctatttttatatggaacgttagtttttgctcattgtttgtgtaaaattattattgtaaataattttctaattatgtatattaatgtaaagatccctgcaaaccccaataataaactttcaattgagattgggccttagcccattagtcgtacaccaaatttataatttctaaaaaaacagatttatattggtcatttttttgatattaatattatacagcaaacttcttcatcaaaaaaaaaaaatatatatattatacagcaaactttatatatgctatacatatgggaaatttacaccctcccatgttttttttttgtcattggttgaggaaattatattatatatttgttttattttatttattttaatttttactttagattaatgtaaagtatatgcttaacttaagtagaaagtgaaaatatattgggcaacccatttaaaaagatgagtatatttgaataaaatataatattaaatatttttcaacttatcccttagttatttttatcctaaaattacattgattcatctaatttacatatgtaaattcacatttattttttttctttttctttttttagacaggttttactcaaattttatatatataaatatatatatactagtcgaggggtacgtaccaaaggcaggtaccactccttaaaatttgtggattataattaggggtggcaaaacgtgtcatcgtgtcgtattcgtgtcatattttatgtgacccactttatatttcgtgtcatgcgtgtcgactcgttttttgactcgtgtctaatt

SEQ ID NO: 127086 - DNA, 1370 bp, Cannabis sativa
agattttggggcactcatctacaggtgggtttatgagtcattgtgggtggaattcttgtatggagagtataagtatgggagtgcctttagtaacttggccattgcatacagatcaacctatcaatgctctgttaatcacacatgtgctcaaagtgggtgtggctgttatggaaaggcagcagagagatgaggttgtgagttcatccaccattagcagagctgttaggacattaatggcttcaaatgaaggtggtgagatgagaaagagggctgaggaattgggtgctgaagttagaaagtctactgaagaaggaggtgtcactcgtatggaatgggattctttcattgctcatatcactagatagattcaaagagagatgataaatattatatatatgtatatttatataatgaagactataataaatttatcatgatctacatgataaaagctgtatttcttaatgagaaatgttaaaagacacccgtagtgccacactctcttatctcttatgtatcaatattgctattggtttaattaagttttggatcccatatagtttaatataatagcttttagggattatccctaattaatcacaagacgatacgtcttaaggtgctaagcactactggtgcccaataataatgctcttttttaatagactatacattaaaaactgcaaagctacattaactatgcattaacctgttttttttctaataacattgccataattaagccctgcaactgcaaccgtggacacccagtagagcaagaggcaattcaaagtgtcaattggcaatggctatagttagggagttattaccattattaaatatacacaaacaattaaaactcaaaaaatatgaacctaataatgattacaataaacaatttttaatactatattataataaatttatttttaaataaatataatatttatatatacattataatttaaaataaaattattaattttacataaataaatttataaactttatatatatattttatttaaatataatacagtacttaataaatatataactaattacaatttattatttataattggtttaaattgagacttaatttttttttataataaattagagattattttcgaatcgagtattctcaaatagatgttctactgtatatagatgtagatatagaagatatgagaacaatctcaacaatacaaacaccaagtgataagtaggggaattactaaacttgaacaaagtcttgcacatttatccaaaaatttatttccccctaccacgagcacttaggtggcgtttggttactaagtgaaaatggaatgggaatgggaatgggaataggaataagaatggaa

SEQ ID NO: 127087 - DNA, 1164 bp, Cannabis sativa
gggccactttgatgaggctatggcctgcccacctactggggaggtggccaaccagcctgtagaggccatggctaacccactttttggggagatgagtcctttgtggtccgacctttatctcaaggaagtctatatcatgaagtgacttctcagatagagtaaatggctttatcaaacttgaagaagccgtcaccccagccaagggcttaaagggtggcaagaagaagttgcaagacaatgaagccctacaactaaggcccagggaaatgggaaaaagggagattttaacgaaggaaggagagccaaaaatggtggcaagtaaggcaactcccctggaggaaagaatcctaagattaggggcaagcccttgcaagattatgagcctcacttcaccacctactccattcgtttggctccaagaaaggagatctatacggcgacacaatcaatagtgatgtatcacaaaactcttcctttcaagtattcagggaagagggatatgaaaaaattgtcgctagcacaacaattacggtcatgacacttatgagtgtaatcggttgcgggatgagatagaatttcacatcagacggaataatgctgctcttcagtggtatgtacgacttgaagctctaacacaagaatgcacctcttcagcctgcgccagttggaggcaggctagagattgtgattggaggccctcacataactagaaactcaaggaaggccttggaatggtatgaaagatcacttcaaataaggaagagtcaaagtcctagaggttgtagaacgtcctccgaagtctcaacactacagatgtgaacctatcacctttaaagaatcagactcctatcatgtcagttaccctcacaatgatcctttagttgttgaggtgcaaatagctaatatattggtagccagggtgatgatcaaagacagagtgtcataaaatatcttgttcaagtaagacctgctcataatgggtttgactttagaagaccttgaaccatgcgagcaactcatggatggtttcagtggagctggcattgatccatgtggcaagatcaaattgctactcatagttggcactgttcggttttaagccctaaataaaactccatttcaatgtaatccatattattcaatatcaataaagaaacaaaagta

SEQ ID NO: 127088 - DNA, 1281 bp, Cannabis sativa
  modified_base (1247)..(1251): a, c, t, g, unknown or other
taatcttccaccaaagaatgattccaaagctggctccaccgccacctctaatagcccaaaacaaattctctcccattgtttctctatcgagaatttttccatgaacatcgacgattttagcatcgaccacattatcaactcccaagccgtattttctcatcagtgtcccgtaggcgccgccggttatatggccgccgatgcctaagctggtgcagaggccagccgggaagccatgaactttactcttctgggaaattctgtagtaaacttcgccaatggttgcgccggcttgaatccaagccgtgttatcttggatgtctacatttacggctcggagatttgaaaggtcgacgacgatgaaaggggtttcgttctctgaaacgtaggagagaccctcgtagtcgtggcctccgcttcttattctaagatggagaccgagttgtttggagcagaggacggtggcttggacgtgggaatcgtgcaagggtgtgaatatgaactctggttttggtgctgaagggactaagtaacgaaggttttgagctgaagattggagtattgaggtgaaggatgagtcttttggggtgaagaagactgtggagagtggaagaactgaaaggtctgagtttagtgagacgcattgtttgaagttatctaatgttgaagatgaagctcccaatgaagattgggactgaagaagaagaagaatgatgagtagtattcccatggatgatttcatccaaaacgccatgtttaattgttctagtttttttctctctctctctctgctcaagaagaggtgctgatgatcaagaattgaagtgttgctttccccttttataagagcagcatcataacgtggaagaatgatgggaatgagttataccattgtagatccctggaggaaccggatcctctgtaatatttttttttttgtgttatattctgtccaaccaattaaattatgccatatcaattagtgagttaaccatctttacactccgttaagtgcatttatatcttctccctcacccatttactattaatagatatttttgtatttgctaattaggatttttgtgccatgaactttcacatgtattaaatcatgtccttggatttttaaagtcgtaaaaaatgtctcctaaattattaagattgttagatttaaggacttctttctaatactagtgaaaaagtctaacatggataaaagtttagggactatgatttagtacatgtcaaannnnnaggggcatgatttggtagatattagagtct

SEQ ID NO: 127089 - DNA, 865 bp, Cannabis sativa
atataaaaaaaaaaaaaaaagagttttattgaataattttagttgtacaacaaaaatggcaaaaggaaaaactaaatcacatgtttacttatgatccttgaatttatgttgcagcatgtaattagtcaaggatattgcgatcattcaattcaatgttgcttgcttaatgaccactaatgcttcttaatgactaaaatacttaatgtcgatatgctaacttcaaccagaattattatagttcttcatccataaatattctagctaaatttattgtgaaattttcttaattgcttgaaaatgtaattataaactctaagtctagcatgaaattctataatacacaatatgatgtatcctcaaaacgagaaagtaatctggtttctataatgttctctaaaaaaaatctgatttctataatggaaaaattaaagttcttcacgatacaatttactggtaattttaatgacgtaattaaatattgatgttcgtgaatcaatataaccactgaggtcgaaatttaagtggctaacaatatttccagaatattagttcatctcaaatatgtatgaatctaatctataatatcttaaagacacatcatcacatataatgcaactctaaggtggtctaaactttagttaatttgatatttcttaacattcctaaaacaaatgcaataccaaatcttatagagacttaggcatacattaggcttctatagatagaagcaaaaagaatgttcttaatttcttcccatcccagatcatttacagacactagtttgagttgaatttatcacccataaagataaaataatatgagatgaataatatataattttatttaatcagagatgttgtggcta

SEQ ID NO: 127090 - DNA, 1242 bp, Cannabis sativa
caaaagactattaaaatgagctacaaaaattagctaatttgacatccaataccagcccaaaatttcaatcaagggtcaagttgtgactaactttattttcgagtgcaccaagatcaatgacaatccagaagaaccagctctagggttggtaatctagaaagttgatgtggacggagcctcaaatgaaaaaggttctggagccgaaattattctgatctcccctcaaggacaccagctccaaagtgccattccttttgagttttcagcttctaagaatgaagcagaggatgaagtgattatagatggattacatcaagttaaagaagtcggagctgaaaatattaacatctacaacgactctgagctggttgtgaatcaagtgtcgggataatatcaaacaaagagaaaaaatatggctgcatatgtctccatacttacaaactacttcaaggcttcaaaaggtatataattaggctgatccccaaagactaaaatgccttcacggacatgttagtcaagctagccacatatctgtaaattgaggcccatggagtagtactaggttcttgcttactcatgcctagcaccaaggcactgggggtaagcataatcaatcatttaaccttttggatgtgacccatcctaaaatttttaatttccaaagagatacccacagataaagccaccataaattaagttcaataccaaactcgtcgatacgtaattctagacagaaggacaaagataggagcataaatagggagtggagatggggttggggtgcattcctcgctcattacccactcaatttctatctctaaatttgtgcttcaacacaattacaaaacttgatacaaaatttaatttttttattgaacgtataaaaaaaataataattttatcattattattattttattatgtaaaataaaaaaatataaataatttttcattaatattatagttaaatatattaataaaataataaaaatgacatataaaaaacaataataaaattatacatttattgtgatacaaatttttttattacttttctacacaccattaaagcatatttttaccataagtgagctatattttaggagataatcttaaaatgttattttacatttaaacataattacaaatattatgctaaatataacattgtttatttatttaggtgccgtttggtaacacttttgttttttaattttataattacaaaatgaaagtaaaatt

SEQ ID NO: 127091 - DNA, 730 bp, Cannabis sativa
ataaaaaagcatatttattaattattatgtgtcttcttaaatttatacaattgataatatagattagaaaaaattgacaatatttttgacatagtatttttttttacaaaaatgctgaaatatatatagcactttaataaaaatgttattataatcaagtattactttaaattagtttatgtggtgaaaaaaattatttgttatatggagataaaataattaaaattaatattgtgttaaaatttaaataacatttattttaaatttttgtttaaaaaaactcccttttaaattttatcacctcttaacatcttgagaccgcgcggcgctgagtatactaataatactaatattcaacccttaacttaagcaagcaagttccctcaaatttcacttacgaaattaatatccaaatatgtgatcatcgtgtaattagatatatggtcatatgggacataatatgaactacatataaattatttaaaaataaaaaataaatcaaatcacaacttgacaaaacgatgatagtaattaaagcaacccacatcgtcttaattgtgaatgtctccacattattttcatactgttactcctttttcaaattataaaataaaatataataaatacgttgcactaccataaatgaatgacaatgtcacgtttttctacaaagttatacacgtatataatatgagtattgctattaggtactaatggtgtttagtacctt

SEQ ID NO: 127092 - DNA, 513 bp, Cannabis sativa
atccatcaattactgtcgatcacagcagtaaaaaaataaaataattgaaaagaaatccacagacacaacggctgacccggaaacggcccacccaacccaacccacggtctctggaatctctttctcttggtgggcgaagacgtagtcgtagttgtagttgtagatagtcgttgtccaagtcgtattccttccttaaacaatctcaaacactattctcccaataaaacaaaaatggctgggatccgattgcagccgccggaggattctgacctttctcaccagacccgagctactcctcccgccgccgatctcgtttccgacgacgaccgctccatcgccgccgactcttggtccatcaagagcgagtacggtagcacgctcgatgacgaccagcgccacgccgacgccgccgaagccctttcagtcggcaacttccgcgccgcctctgattacaggtttttctttcattttgtttttcggtttgactctggagaaaatgttgctatgaaggtg

SEQ ID NO: 127093 - DNA, 557 bp, Cannabis sativa
ctatttttactattttcgaaaatatagggtctattttgtcatttaacaaaacacaaagtccaatcgataacttttgcaaaatacatggtccaaaatggtatttactctttactttcatataatttttattatttcattattatatttagctacaacaataaattataaattatttaaatatatttattattttatataataaaataatattaattattattttttatacttttaataaaaatattaactaaacattaaattttacttcatgttttgcaatttatgaattagagcacaatggttaaattgatacaaatatatcacaaagtcatttttgtgcaaacatagtacatatttttttattggagatgatctaagtacatagagagttactttcaaacacatcattagtaaataataataataaaaaaggaacgattaagtacatatttttttattaaatgcatgtttgacatcataactaaaaactgttttttgttttttaaaacagaaaattattttttgaaaacaatttagcttgtttgaccttgtttttt

SEQ ID NO: 127094 - DNA, 1133 bp, Cannabis sativa
atgtgatatacaggctcacctgatgaggtgatgtgatactcctagcaacgtgtagatacgggcataagtgacatatgagtagtgagcataggtacgggctcacctgattaggtgatgcgatcctcctggcgacgtatagatacaggcatcagtgatatgaaaatttccaagttatggcatagaatgaaatctttgtatggtttcctcctggtgatgtgtagatacatgcctcagtgatatgaaaaatgctaggttatggcatagaatgaaaccgttgtagggttttctcatggtgacgtgtagatacaagtgtcaatgatatgaaaattgctagcttatggcatagaatgaaactgttgtagggttttctcctggggacatgtagatacgagcatcagtgatatgaaaattatcaagttatgacatagaatgaaaccattgtaggatttccttctagtgacgtgtagataccgacattagtaatatgaaaattgtcaggttatggcatagattgaaactgatgtagggttttatcttggcgatataccgagtgtagatacgggcatcattggcatatgagtaccgagtgtaggtacgggatcacctgattaggtgatacaattatgtgatatgtgggtgccaggctatggcacgtgcctgcctgattaggtaatgcaatataagattatcaaactaaagcattgactacctgattaggcaatgtgatgtaatgaagatggttattttatgaggtaatatatatattttatattattaaatgaatgattcctattattggtataattgttttgcattacgagaaatatgtataccgatgcttattcaaggtagatgccagtagtgattcagatttcatcttatgaacaatgcgtgattgtttgattctgattgtgtatgaatgataatattcaaataataaactatgtgattattattatttcttttcttgttcagtccttggactcacgggtgctatgtggtgcaagtaagggcaagaaaaagttagaattgccatgatgtgactaccttctcgaacaatgtacatattaacctcaccggcctgcctgctgagtttccaggagttgttttgggctggctgtatctactatgta

SEQ ID NO: 127095 - DNA, 1039 bp, Cannabis sativa
tcaaaaaatagaggtgattaaagttattttaaattgattagtgaaattgctaatggaaggattgattcaatcaaaataggcattccatattcatctactcaatttaacttaaaacttactcccaaaaaacacattattaatgaaatggttgaaaaagaattcatggccaattcgaatgtgagaaaacacacaaatttgtctaacaaaattcaaattccttcagtttacaaattaagaactaactcataataaaagattaattaattacaaaccctaaacagaataattaatattaatcctcacaagaacaactacaatcttctccatcatcggagatctcagtttccaccatgaatatgttaacagtaatcgatcataataattattattattaatattttgtaaagtaatattatcttattttccttttaactattatttatttgaatttaatttttttttgatacgtaataattttaggttcatcaaagatgattctagatcccaaaatattttaaattactgactaaaaatttagattattaaataattaatatctaaaaatatcttctttttttacaaattaacatcatttattccttagtgctatataatttccttttttaaaaaacaaaatcaaatattggaggagactcctttgactaagtaaaaatatctattctttttcacaataataattagggttaagatattataattatattaggattaggattaggattaggattattatgatttggctatataaagacaccaagctagctagtagcctagtacgtacgtgcatattcattcattttcatcttttgatccattcatatataataaatacgtactaaaatctataagagtaattaaataattaaataagtttcattactaaatattaatactactgatcataaatattcataacttcaactcaactcatatatatatatagcttgagaaagatggcgattaatagaggactgaatttgatcaagtctgagttaaaaaaacgtcacaaatcatcaat

SEQ ID NO: 127096 - DNA, 1760 bp, Cannabis sativa
taactcttgattattaaatttgggttttgatttgtctatccatacttttaggccactgaagaacagatagagaggctcactggagaacaaaggcagggacagagacaaggccaaagggaggggttcatcaaaagagcatcacaagaacaactcaaggccttgagccaacatgctacttcaccgagaagaagaggccatgagtctagtggccctgtcatcagtctccaaaatcaatctcctcgatacagcaacacccatggaaaattttacgaggttactcctgagcagaacaagcaactaaaggatatggatgtgttggtcagctggtgtgagctcaatcaagtaatgaaacctttatccatcaacatgaaatagtcatctttaatgggacattttaagtctatgttaataatagtattggatgaaattgtcttttttgtagggaactataatggtgcctcattacaactccaagacaacagttcttgtcatggttgtagaaggaactggacgcatggaaatggcttgtcctcacctctcaaggcaaagtcaaaggagaggagaacaagatgaagaatctcagagtggacaaatcgagagggtcactgctcagctctcacctggggatgttttcatcatcccagcaggtcatcctgttgccgtggtggccaacagcaaccagaagctccgcacggtcggattcggtgtcaatgccaggaacaatgagaggaacttcattgctggtaacttaacttgactaaacctcttggctaaagataatagaaaaactcactttattttaacctgatttaatatttgggcatgtagggaaagacaacattatcaagcaacttgagaaagaagcacaggagcttgcctttaacatgcaaggaagtgaagttgagcagatattcaaccaaccaaagctgtcttattttgtacctcagcaacaacaagaagagggacgtggccaaagccaccctctgtcatcaattttgaacttggcaggattcgcttaaggaaacaaagtttgtaacatgtgatataagcatgtaaaggagacttagttttgttttttttcctttttcttttttgttgtgtacttaacgttttggctagctatagttcacctttagtgtgagcctagcttatgtgtttaccgataaaaaaacagaagagagctgtagctttctgcttcatatataaataaaataatgttttcttctcaagctagtttttcaactcttcacatgttaacttggatattaatgattataataaatctttcccatctagtctaacaaatgaataacctcatacataccaaaaaatcactagttccacattttatacaaaccttatatactaatatgcgaattattattaagaacctttcacttgcttttacttatttctctaatatataagtgtgtgtgtgtgtgtcagcaaaatgaggtgaacggtagattaatatgaactgttattatgcaagctaatcttactttcagaagggaaaaaaaaccataaattatttgtttgcatatatgcaacttctatacacagagatcacacttaaaataaaaatttaattaaggagttgtcagttttgtagctggttattgccgaattaaaatatctatcaaagctatacaagttagaaccatatactcgaaagaattaattgacaatttcatatcaatctggactttaatttattttttgcttttgttttcttggctggactaaaacaagggagtaga

SEQ ID NO: 127097 - DNA, 570 bp, Cannabis sativa
cttttatttttgaatttttcaccctctttttatctatatggtatggtccacaactcccaaagcaatgctgctgccaatgtttgtctttctcataacaatttcctttgtctcttattacttttttgtaaaagggaattggtttaatgaaaaagtagtaaataattaaaagattttgtatatatatattagagatagtgaattgggtattctttaattttattcaccgccaccagcttttgtgggggtgtgaagccgcgtacataatattattattaatattaattaatgaatgaaagtgttaagagtataaatattagcaaatttaaataatgtgcatgatgcctcatgtgggtgacgaaatatgcgctcaactccatctaaccattctataatgcaaaatcatgatcacacttatttattaacaaataaaatatatatactattatggtgtatatttttggaaattctaatgtagttgagtcataaatttcctaggacccacttagtttaggaactaaaaatttctcatttaaaattatacatttttttttaattgatgttgaaaaatat

SEQ ID NO: 127098 - DNA, 991 bp, Cannabis sativa
ctttgatgttcagcttctttgtacaactttgttgtacaggttcttcgtacagctttgttgtgtagcttggtcggccagccttgatgaagattgcccagtgtatggaagttggcactcttgaccgaccagctataggtcaagtcatggctttgctgacagatatgtggatttgtctttgcttgtgtccaccgtgcagccatgggatcttgcagtttgaaggctgcacacactaacctggctggttaaaggctgcacgcactaacctgacatgtttagggctgcacgcactaacttggcaagttagtgatgagctattctctacgtgtcttttacttttgactatgtggacataccacgtcagacagacaaaattcgtgataacagatttcaaactgtacttgttatgtgtggtgtggtgcggaagtttgtgcggtgtgtgtggtttgatgaacactcctaatatcaagcatctcaagaatataaagattctcaaaatacttcaagtctataaagcaaatattttgatattgtttaagaaaaaaatcctcagtgatcaatttgattatcaaattattattttactcaatgtttaatttcatttaattctttttatttctttttaattcattttagttttataatttaatgttatgttatttttattttatttgatattagtatttttgttatttttattttgtatttttaaatgtgatattgttttaatttaattattatttttgtgataaattttatttgagaactaaaatgtaagattttttttttaaaataaaataaaataaaataaaggttagaatgttaaaaaaaaatacactaaattagtgtagacttaaaatcaaataccattaataatgtaaaatttggtgtatattaatttggtacatacatcactcacatgagatgttctaaaatagaaaatttgtaaaatatttaaagaatcaaattacaaacatactacatcacatgtttt

SEQ ID NO: 127099 - DNA, 575 bp, Cannabis sativa
gtctaataatttggatagttttacgtttaaaagtaaatttagaaaattaaatgtaaataaataattttttgagcaaaaatgcaaataaatgatagttaagatggtttagttaaaaaaattatttcagttttttccaatcctttgtactactgactcaactaacatcaacttaattttgttatcaaaaaaaaaaacatcatcttaattttatttttctgaaaacaaccaacaccatcttaattaattcaataataaatgagaaaatgacaaaaaaataaataagaaaattattgaaaattaattaacaaaaataaaataaataatcaaaattggtttttgattgtgaggagagccgtagtgctgatgatgtggatgcacagttatcgttagtttgaatggacgcagaaagggcccacaagcctctaaaagagcacgtgatattaaattagattcaaagataaaacttgattggttcttaattataatttattattcaacttttacccaccaaatcgaattattttttccaatagtaagttattttttatagttataatattgtttttataaatttt

SEQ ID NO: 127100 - DNA, 545 bp, Cannabis sativa
gtcaccattctcgtgatgccacatcagagtgccaaatttaggataactaaaataataaattatctccattgacaaacaaaataaactaaaagtataaaaaaaaaattaattacccaagaaaacagatattacactcatacttcataatcggtcaaaaaaaataaaggagttatcataactagtaaataccattatatgaatttaaatataaaatttatctataacgaagtctcctaactatctctatttgatagacacgtgtaagatagttaaaatagccaaatatttgtataagtttccctctatgccatgcatgaacctagactaaattccaaggctttttcaaagtgttcacttattcaaacttatcaacatcctccacttaaatctttactaaagacttcttgagagattagtgccttattactccacgtgtccaactaatcccatacatttctcaagacttatcctcacgtggtatctttgatatttaccattgttgggttttatgccctaaataaaactcttttcaatataatcagatt

SEQ ID NO: 127101 - DNA, 727 bp, Cannabis sativa
  modified_base (70)..(70): a, c, t, g, unknown or other
ccaacattgatttgccaacctccttttgccaacacattacaagtaaattctattttatcagcgcaatacnaacttttgccagcataaaaatgtacttgagccgtattaaagtaaacatggtcactatctgtatatactacaaaagaattttacttttagtcacaacaaaacttgtgactaaagataaaaaaagttgcagctaattataaatcattattattgtgttatgagtaaaaggtccgtgacaggtattagtcacaaaaattataattttttgtgactaaatatgtttttagtcacaatatttgttatcgctaaaattaaattagtgatattaatgtatctaaaagttatatttcagtcacaagtaaattttgttgtgactaaaagtcacatttagtcataatttttttttttgttgtgactcgaagttataagtatcacatgcccgcaagatgtcaagaatcatgagattccatcttattaattagtaataagtggagtagtctatattcttatatatagctcaatattttcccaattattctatgtgggacagtgtctataaagatgtgtttaactatatttcaagtagcaaaattacaaaacaatattattttatgagaaatactaaagggtaccagagatgtctagcaccctcctatgtgtcaatatcgctattggttcaactaagtatcgggtcctatatagtttaatataatagctt

SEQ ID NO: 127102 - DNA, 1708 bp, Cannabis sativa
  modified_base (149)..(149): a, c, t, g, unknown or other
  modified_base (815)..(823): a, c, t, g, unknown or other
taaaataaattccaacacaaacttggaaatatttgcatggtcacatgaggacatgatcggaatcgatccttctataatttcatacatcctaaatattgatcctaatttccagcctgttcaacaaaaaagaagattgttggaaaaagaangagccctagcactaaaagaagaggtagaaaagctgtgcagcaacaatttcataattgaagctttctacccggcttgggtggctagtatgtattgatttcactgacctgaacaaggcgtgcccaaaagactgctttccatttccaagaattgatcaacttgtgggcgcaacagcaggttacgaaatattaagtttcattgacgcctattcagggtacaatcaaaccaagatgcatccacctgaccaggaacatacaagtttccgaacagatatgggtctgtactgtaataaggtcataccattcggtctcaaaaatgctggagctacataccaaagattggtaaatagaatgttcaaagaccagatcagacgaaatatgaaagtgtacgtggatgacatgctcgtcaatctaggaaggctgggggggcatgtagatgacttggacgaatgttccaaagtcctcaggaaatacaacatgagactcaatcaattaaagtgctcctttggagtcagctcgcgtaagtttctgggtttatcgtaaatgcccgaggaattaaagctaatatagagaaaatacaagccctcctggatatgaaattgccaacaaaaactaaggaagatcaaagtttgactgatcgaatcaccgcactcagtagatttgtttcannnnnnnnngacaagtgtgtcccattctttaacatcctgcgaggatataagcaatttgaatggacgtaggaatgcgaaaaatcctttcaagagctaaatacgcagcttgcaaaacctcctgtgctctcaaaacctttggctggagaagagttaggaatataccttctagtcacgaaacatgttgtaagggtcgtacctgatcagagaacagaacaatatccaacacccagtctattacatcagtaaaagactcatcgaagctgaaggccggtatccatttataaaaaagctcacttattgctgtaagtgtcaagcaggatgctactttcaggctcatccgtttcgggtatacactgaccaaccattacgccaagtattacaaaaatctgacgcatttggacagtttcttaaatgggcaatggagttgggcctgtatgagattatctttcagcctcgaacaacgattaaaggtcaagccttagaaaattttgtggttgaatgtgcgggtaaagaagagagcacttcagaaagtaacccagagccagtacaagtacctcagccaagcaacattgaagacaagccgacttggaagctacatatggacgtgtcagctacagatcagttgtccaacacaggaatcgcccttgtcacacctggggcgcaacacctgcacgctgcgatcaaattcagatttaaggcatccaataatgaagctaaatatgaagctcttatcgttggcctaagacttgctcgggagatgaaggatgaacacgtcgagatctgtagtgactcacagttggtggtaaatcatgtatctgggtagtacgaggctcagggagagaagatgataacatatctaagcaaaatacatgatctgctcgcacaattcaaaag

SEQ ID NO: 127103 - DNA, 707 bp, Cannabis sativa
ttatggaggcttttggtgattcgtgttttgcattatagaaccaactgtgcacctaatataaatcacaaaaaaaaagtatcagaagcaatgatgaaacattttaattagaataaaaataaccatagatcaataaagtactgaaacagcctccgcccatgaccagaagagcaactgcacaaacatgaggttataaagattagcatatatgtataatctacacagaatatgtaataggcctcaaatgagcgtttacttaaagctcttgcaacgcattgacgaaaaccccttgtccaagacatttcccttggattcatcaaatattttctccatattctttatctgtttgccaagagcgatatatagttagaaagcaaactcgactcaataatatattaagtaagacacaaagacatctaattgcattcaatcgcaggaatggaagtgaagaataatatacaatcgtattttactataatttttgagaaatttgttaaattaaaattttggagtattttttaatattttgatagaatttttgggagtatttatttgcctgagaaaggtaaaatgggatgattatgagactgtacatcttgttttctagtagaaagaattccactattaaacgtgcttgacctggggtaattttaggatgagtgacctcctaagaagtttttctaagaaaggtgcgagtgaggacaaagcac

SEQ ID NO: 127104 - DNA, 1339 bp, Cannabis sativa
gttaaatgtgttataaagattaatcttaactatttattctaaaagctcaaactcaagaacactatagttgagctaaaatgtcaaaaggtaactattataatataaatagtcagaaaaataacgaacacaaccaatcaagaacattttttactgtattcaattagttattgtccagctgtatttttttgttacatttcaattgtaaggtctctaaccaaatattaatgctaacttcttttgttcaaaatgataaataatttttcatttgtcaaattttttaatttttttttaataaattcaaagaatatattttatttattatttattttaagtataagtaatatgtatttattctatatgcatggcgtgatgtggtaacatcataatttaatgttgcgaaattaaatttttgttagctatataggaaggaaaatataatagattggccataactcatatagtttgggagaaatatttaatatctgtagtaagtgatgttacaatttttttccgttataattccattacaaaaaatctatattttaataaataaactatatgtggagttttttttgtaatttttaattttctaccactaaacatcacttagttgggttgtcttcttggttgcctcaagctgatgacaacaatacgtatcttggtcttccgagtaccatgggaaggaacaagtccgctgttctgggttttttaaaggataggcttcgaaaaagggtggagagttgggatactaaaatgttatctcgagctggcaaggaaattttaatcaaaaccgtggctcaagcattgcttagttatgcaatgagtgtgtttcttttacctttgaaagtttgccgagtgttggaaagaattttttgttcgtgttggtggcgttcttctccaaatcaaggcaaaggtataacttgggaagcttgggataggatggtggttcataagcactctggtgggatgggttttcaaagtcttcatgatcacaatatagctatgttggggaagcaagggtggcatcttcttactaatgaatcctcgttggtagggcgtatttttaaggcaaggtattaccctcttggatctttccttaatgcaagtattgggaataaccccagttttgtctggcgtagcatatttgagagccaatccttgatcaagtctggtgctcattggagcatatctaatggctctttggtggatgtgttgaaccaaccatagttgatggataaagataatccttatattacctccactcatcttgcattgtttgatgcaaaagtatcccaattaatggttccgaatgagagaaggtgggatgaggatattctta

SEQ ID NO: 127105 - DNA, 1207 bp, Cannabis sativa
attattattataacatttacaaataaattttgtaaaataatatttagcattattctatattgaagagttaataaaccttttaaaatattgtaaaactttttcacaaaaatttcacaatattctttttcaccatcattaattattcccctatacattttgatagcatcagccctattagtatggaagtcttttttttgttgctttctttagttgatgaatatggaggaagtggattgctctaacactacacctacatacttgaaaaaagaaaccattaattacataaaggaaggtgttaagcaagcattgattatagtatatggaacaaacacaacaccaacaactactatacagatcatcattttcatcacaccactcttctccatattcatataatatatatattatgatcaatcatcacctccacacaatcaagatcaagtgctcaaagagcaaaacaaatgaacatcaatggcagcagaatgctgcaacagtaaactagtaaaaatcagggacaaaaccagcaaaaagaagttgaatgaagtgtgttgatttttttttataagtagaggaattacattgagagagagagagagagagagagagagagagagtaagagtaaattgtacaagactgctctaaaaaacattgaacttaagctatttatagaactcgaacacaaatagaaaagaatacaaaaaaatttcaactaaccaacagttaacagaattaactgtcaactaccaattgtcaacaaaccgtttctgttttagccataatatggatcataattcaataaattctccttgatttgtcttatgccagcatgtgagtcaacagataattgatccacgaagtattctgatgaaaagtttaatcagattctggtagatgaagtagatcaaggcaatgtttgaacttgacctgagtcactgccttggtgaacatatcagcagggttgtgattggtgtgaattttcttaacttgagcttccttacttgagattacatctctaatgaagtgcatcttggtgtctatatgcttggaactctcctgaatcatagggttctttattagatgaagtgtactcttgttatcacagaacactgtgatattgtctatcttgaatcccatatcctatgctagacctttgttgcgaaaattatgatcactacgcaagtatacgcaatcaagtagtaaactcac

SEQ ID NO: 127106 - DNA, 807 bp, Cannabis sativa
gtagaaaaaatatacttaaaactcatagcaacattgctataaaagtctcgtaacatcatttctataaaagcaccatcaccacgaggtgacacccttacatttaattatcaatattaaattatataagatttgatattaattaaaaaaaacaattatataaaatatatatggaagaaaattattacatagtggtgccatttacaggtaacgtcttatgattaattaacgatattttataaaaattattacattaaataaagacctgatacttaatagcaaaattacatctaacaccactagtgctttttagcattatctcctcttccaattcctccctctttagaagaattaatactatgtttggtagaggggagagaatgatgaagagagaggggtggagggataaggataaagggattggttaaatcttttgtttggtaagaagtaggacttaacatcgggcgggttgagattgggtttcaggttggcgagttttggattgaaaaaattgtactcggacccggcccgttcatgtgttgcgggttggtgggtttcgaattcacgggttggcgggttgacagggccaacagattgactttatcaactcgatcaaactcttttttttttaacactcacctaattatctataaatatacctacttatatataaacatataactaaacataaacacttatctaatcatatataaatatataacaaaactattacatttaatgaaatatatatcatataaactttcaacgcataaaagaagtgtatatatattgtattatgtaacttttttt

SEQ ID NO: 127107 - DNA, 1926 bp, Cannabis sativa
  modified_base (1886)..(1900): a, c, t, g, unknown or other
tttttaaaagttatataatttttttagcgacggtccccgaaaaaaatcgtttttaagaccgtcgcgaattctgatatttgtagtagtgtctcgtaactagttagccaagaaccaatgtggctaaaatggctttttagcctccatatgactgaaataagcaagaaataccaaccactgcttcccataagtcacgaccaaccactggcaccttttgacaccgaccggtggcagtggtctcctgctagggtttcagatgccgaaatgaggttttagggtcctaggacccccaaaatatgattgaccatcaaaaaataagtaaaaacacatcccaaggagggcgagaacatgcacattcgagagctatcattcggtcgtgtcagtgctcgcatctggagcaaaacagcacaaactgcccttcaataaaaccggcataactctctcaatattgaaatgacttggttcaacttacattaaaaaagatcgcttcacgatagatctaagtgtttctcataatcataactcaattgtgaagttattgggctcaaaattagcttacagtacaggctagtatactttattcgagaactgagtgatgtaattaagtatgggatgttggagaactatgccacaactagcccatgtggcatcatatgcgagaaatggtaccctaaaacacctatttccaacacttttcaccaatgtcatgaattccaagccgaaaggtgacatcccttatcactccactctactttggtgcatctttagctgagaatcactatttttctaatatttgtgtaattttggcctagaaataagtgagatttttgtagatatttatttatttataattttttattcattattgtgaataagatatggaatttattagtgggacaccctgacatgtgagggatcactaacaaactttaaagcctatataaatatgataataagctagggtgaaagggagaatcggttacttactaaacggctgctaagaacaccacatccatttcttcacatttttgcctaagtcatccttactttgtcgattctaagcctctccttctcaaacaccattgacatacacattttctaagaacatggaccattctctttccttattcttattggtttattatttctaagaaccttacaaccaccatctttattagatttgtgaatattaggtctatcatgagccttgttttcataagtctcgatacagatttcacctaaaaatctattattgtattattgtctgcacactcttgagaacataactttggtgtgtcaaatccattaataaaaacaaaagtagatgtacattaccatcgcgacacggggagtgaaccactataaatcctcagcgtccaatttatttattgtagttttatttagtcaaattaattcatcgcaatccttttattttttacgatcttcttagatcagttgacgaaaaactgcgttaacagtttagtgctttcattgagagtggcgcggtgaaagtttgattgttttacctttggagaactcattaatttacctttctcaaaaaaatggtgttgagtaccaggaagaccagttttgaggaggatatcaaagtcccaaggggggaagttaaccaaccccatagtgaaggaaccattgtccctccacaaccaatggagaggggacctctcagcgtcgagaaaagcgccccatgccacctatcccagaagatcaggggcaagtccaagactgtgaaagttcgtcatctccatctagggagcgcccacctgttaggtccatacatgtgcatagtgttccaagaaaatgaaacattgcacgtccaactggcagaaagcctacgccacaacaaagagctgttggaaatattttaccannnnnnnnnnnnnnnaccaagtatgtttgattaacatccta

SEQ ID NO: 127108 - DNA, 886 bp, Cannabis sativa
tgaattttggactgaaaatcgttggtagataagaaaatttcaatggtggcttacttttagcaaatcttacttttattcctaatcaaatttgtgattaaaagtgaataaattatgactaattataaatctttatttttatatcatgatttaaaaattcgtgactaaagatattagtcacaaaaatcataatttgctgtgattaaatatatttttagtcacaatactcattgtgactaaaattaaatttgtaacaatttgtatttaaatactatgttttagtcataagtaattttttgttgtaactaaaaatcacatttaatcacaaaaaatttatattatgactaaaatatatctctaaacataagtttttttctagttaatatgtataaaacctcatttgaattaattaggtcaatatttctataattaattaaaaataaatcgttagatgacattaaaaataatgatcacaatttcaataagagggagaacatatacgtactcataatatcaaataaagttcaaatagatttatatggataatctcatgatgttcagctaatttatcattaaaaccgatcgaggaaaagtacaatttaagattcaaatacattaattccatgagtcgtacataagtaaaaacaactcttattttctagaaaaccaacaccctataatctcatgtgccatgggatgtcacaagatattataactcattaatttctcaattatggctagggggctttccataactcggtggtgtcttaggcttcccgtaaactggagtcggtgttggcttaggcttgtccactggaggtggtttcacgtaaactggggtcggtggtggtttaggcttgaccactggaggtggctttgtgtaaactgg

SEQ ID NO: 127109 - DNA, 1205 bp, Cannabis sativa
  modified_base (963)..(969): a, c, t, g, unknown or other
  modified_base (1093)..(1107): a, c, t, g, unknown or other
tatcgggtctcatataacttaaaaaaaataatttctaaagaatatcactaatcaataatagggcgctaccactactaatacccaataaaatggttctaaaaatatcttctaaaaaaagctaaaatcattaaaaaaaacaaaatctcttagcagaaggagagatcaaagctaaactatatacttataatgtcttctgcaactaaaactataaaggaaagaaaatttgacttacataatcaagtgttaaaaatagaaactaccctttggtgccctagtataatttttcagtatatatatgcttaaataatgattaattttcttttagatctagttttcatatttatcacacaaagtttaagagaagaaagtataataaacacaaatcaagaaagacagaagtaaaataacttatctggtgaagagagacttgatgaagaatccataataattactataacaatcaaataatttagtgcctaaaataccctttttgtgtaacattgcttgcccaaatgagcatctcagataccagaagaagtcattagatcacatattatatatatatatataatatatatgcaactactgttgctggaatactcatttgagcaagagaaattacaaagaagattcaatacttatctagatctctctctcactctcactttctttctctcttaatatgaagcagaagaagacctttctgttctgataagacttattaggttgggtttaactatatatgtcatgtttgggagtgtatatataaagtaaatgctttctatattgaagccctacaaacaatacccaactgacaacccataatcaaaactacgaaaatgccattaggtacaatactaacacatgaaagtggtcgaggagattttggtaattttagagttgtttgtggaaattaatgaaagagaaatttttttttttgagaaattacttcatatactattnnnnnnntttttttaaaaaaatttatgatttgggtttttaaagtgattgcaacgctagttccaataggggtttctatacgatttttttgttgcaatttaggttgaagcactagttgcaataggagtttctnnnnnnnnnnnnnnnaaaatgcaaaaaaaaattattttaaagtgtaaaaataaaaaagaccctttttctataccctaaaaaattttaaagatactttattttaataattttta

SEQ ID NO: 127110 - DNA, 993 bp, Cannabis sativa
aatttcaatataattttactaagtgattattattaattaaaatacataattttttttataatataatttaaaatattttatatatccgccgcgaagcgcggaatgtttactagttatataataaagtgtagctagccacgtcagtttactttagctgtgatgttcggttaatattaatattcttattcttataataaatagggtttttttttatataaattttacttttaattacaataaaacaaaacttgtaattaaagataaaatttgtgatttattataaattatcattattgtattgattaaaaggtctctgactaaaaatataaattacaatttattatgactaaatgtatttttaattacaatacttattgtgactaaaattaaattagtgatatgttttagttatgagtaactttttattgtgactaaaaattacatttagttataaaaaaattatgttgtgactaaaaaattgtcactaaatgtaactgttttttgtagtgtggcctattatattttaattttatacacttaatttttttattttattttgtggcaaaattctattatatatatatatttttataaatttgacgtatcagttagatatcatcattaaatactaactgaattatcactatattagaaaggtaataataggatatcccatcgatgcatgtaatctaaaagcacagcaaaatttattttgttagagagaaattactctatataatatttttttaatttttttttaatttacggtttaggttaaaatggtttctccgatgatttttatgtaggttgcgatttaagttgctccgttaattgcaatagaaatttctatgtagaattttataaaaaaaatgtaaaaaaactagctatttcaaaatgtaaaaataaaaaaaccctttattataatcgtatatattcaaaatatctattctatataaagtgtgcatatataacataattcttggtttatgagaa

SEQ ID NO: 127111 - DNA, 931 bp, Cannabis sativa
taaataccgaaatttgaaaaatagcaacataaatatttatttatggtttaatttttattctgatgtgtgtgttaagtacttctgggttcgaattttattgtgtgtttttaatatttgacttttagtgttttactggggttctaatatttgagtttatgtttatgagatctgtttttatttatttatttttatagattttgagaagttgaaatttgatgttgtttctattgatgatttgggattgaaagtttgatttttcatacatgaattaaaatttacatttttcgtttcattgattgaaaaatattagtagaaagtctatggaaagagagttttgaatatatgaaaatatagcatttgaatcgagaattaaagtttattgttaatctgtaaagttatatggctagaagaatatggaaaaaattatttttattttattttatatgtatataatgttttttttttttttgactaattttttttgactaatatgaatttatatatgaatttattttaatttattttaattattttttattttttaaaaatatttttgctaaaagaattttttttttgagtgtagcgtaattgtattttacaatcaatcagttagttataatatatggattgatattttttaaatcatatattattaaaaagtagtcgtatatatatatatatccctattttatttaaaaatatttacttattagttattaatataatattattaatttatatttattttaaatttttttctttgaagaatttataggaggccgtgtgcatgtatatacatatattatattaattcttttagattaattaatgtgaaaaagaagagaaaaaaaaaacttgataaaataattttagaacaccatgttacctttttattattaaataatagtaaaatatcaattaatagatttat

SEQ ID NO: 127112 - DNA, 987 bp, Cannabis sativa
atatatataatttatcagaacatgtgaaaacttaataacaacaccaaaacgagttttgaagaggaagcagtgagtgaagcaaaaagagattgaaagatgggtttaaatcaatttgaatattgcctcagtatgtgtaaattgtgaaggtggtagtaagagccaggtatatttatatataagaaaaccctaggaagaagagaaaggaggggtgggtcagattagatttcattctacgagagcaacgcgcgcggatttcagtaaggatatgatgaagaatgctaacagcttacacatccagttgatgaacagtcgagaatcatttacagcaatctccaatggtcttcaatgcaaaatataagtagtacatcacagcatacttcacctgaaatttgcataaacatacaagttaaccaaaactgtacactcctaatgctttatggttttcggttttcggctctcaacaaattaaacttataggagcatgtcactactagactttcaggaccctgtgattcagattcaatacattaccaaagtaccaaagccagaagtagaactgtcaattaacaggaagaaattttactcgagcgcaaaatataaatatgcagttacacaatatgtgatatgaacttgtaaccttgacagcaacttcatattctgaattcagtaggatgcaatcctgatgcattacctcgattgggatatttgatccattcctctacttaaccgaatcaaatactggtaaattggtaaatattgaacaacagaccaactaaacaagaattcgttctcacctgcaggattaaaagccccatgtttttgagagttcgatcctacatcggttgctcactgagaccagttataagtcaattgatggccacgataccacgcaatgttgcacctttcagcttctatcaacccttgtaatacaccttcaagcttctctctcaacccttgtaatacaccttcaagcttctctcaaccctt

SEQ ID NO: 127113 - DNA, 1286 bp, Cannabis sativa
tgcctttactaatccaaattactaaagcagtcactacaggtagcttaacgtctatccttgccagctatgcataatgtatttcacatttatatgttaagaaaatatgtttgagacctgacacatgtcctgaattataaagccttagagctttaactagatatttcatatgaggatcaactagtacaaatgcttgatagaaaggataaagtccttcgaaacaagaccatagtctggtaaggatcctctggagaaatagcaagaagaagccacttgggtgggagttggagtagtttgatatgagagctcaatattcagagttattttggttagattttaaggataaaatccttttaatgggaggataattgtaatgactacttagctttattatgagaataagcagataattatgtttattttcagaagtagacttttaattattatttttatgattatgaagatttatttgaattctaggtgtattaactatgatatatatttatatgaattttatatttttcatatttttatgcccggtaacagtggaatgcgactgttggcctaggagtcacatagatatagtatagtatcttagttttagtggggctgtatattaaggcatttggaatgtcgggagtgtttgggattttggtttaggaccattttacccctaagtatgttggttacttcttggttaagtaagggtaaaaagatcattttaccctaattagttttttttagtaggatttttaataaatcctaagcttatttatggagtaataggctgattgatattaggaagagatgagtcatcttccctttagttgatacttagccatatagaaaaaaaatcaaagctaaaaccttgtctctttttctctcttgtgttcggccaaggtagaagcccaaggaaacccgaatatttcctcaccattctgtaccaatttgaggaggaattcaacctagaatcaagatccttggtagcgaactcaaggtaagttctttttctcttaaaattgtcaatttttgatttaggtttttcatacaattttgtgattggttgctgtacgttttgatgttaatttttattgtttgagtgattttaagttggttttggtaattgttgttgagcttttaagctcaaactttgttatttaatggtggattttgttattattgatggattatgcaatttcagttggattatcacgttttttcataaaccctttgattagcaaatgagtgcacaacatcaagaaatcacaataacacgcctagtctagtag

SEQ ID NO: 127114 - DNA, 1293 bp, Cannabis sativa
aggagtttctttagcatatccttaagagtttggtttaccacttctacttgtccattttcttgtgggtaaggaaccaccgaaaagctcttaatgattctgtgtctgtcattgaagtcagtaaagatatcactatcaaactgcattctattgtctaacactatcttttgtgggagtttgaagtgacaaatgatgttcttgatcacaaaattaagaactttctttgatgtgatagtggctaagggcactacttcggcccatttggtgaagtaatctactgccactaatgcatattaaactctgccttttcccttaggtagtgaacctatgagatcgattccccaaacagtgaatggctaaggagtttgcatactttagagtttgtttggggcagctctaggtatttttgagaatatctggctcttgtcacgctttctgacatatcattatcggccaaaaatacccttgtctcaatatcttctttgaaaggctttatcccccagaatggtttccatgaaaaccctcatgtaccttgaccttgaggagcttggattcttcttttgtgacgcacctagaagtggcattgagtagcatcttttgtacattacttcatccatgaagatgaagcgggctacttttctcatcaatttcttagctacgttccagtctattgggagaataccttgttctaagtattatgcaattggggtcatccatgatttttatttactctgattactgaattccttttgtgtcgtcatcacttgtctcttctccatgttgttttgacgattcaagtaaggtttctttgttgtgtgaatcttcaggtgtttgggacggagatctagttcatgccagttttctttcgaacgaattgcggaggctattctatctattctttgttccaccatagatgtcccagataaaatgatatagaattttgaaaaattaggtcggtattctatcaagagtggctactagctagcactttgcaatatggtttggatcacacttatccggttagaaaaagatttggactcttaatgtccctcctaagttgagaatttttctttggcaagtgtctaataattggattcctactaaaattaatttggctcgccacgaatttttatctgatggctagtgtcctatatgtgagatgaacgaaaaaactactcatcatgcgctttagggatgttcgctttgatgtcttgtaggaaaatctatgagtttactttgtgggatcctcttgttcattgtgaggatttttctaaattttatgtatagatttattga

SEQ ID NO: 127115 - DNA, 1384 bp, Cannabis sativa
atgtttgaacagaaatagatggtagatcgtaacaacactgttttgtgttgtgtgagatcatttgaaccagtaatatttctgacaccctcatgctttccttattgttgtttcagtccattgagtgatagtgctaccgccgtcggggctggtgctgccactcctgctgagctttctggatgtatgccaatggttgaggtcttcaaacttgctgtctcaacgtttaaagtcaacaactggggcctttttggcagtgtatagatgagtcaaagggccatgtatagattatacatgaataggttgttttagatttaatgattattttttgttcagaaagattgttcccagtcaccaaacttagtttctgctgtcatcttccattttctttgaatgctgaactgaatggcttattggtttggtgactttggtctcagtcgtttttgtagagtctggattgttaaaattacattttggtcatcttcctctcgcgctctctgcactggagatgttactgcttgtgttcacttttacacaataaaaattaaccccatggtagggcttcgtaaatgatatcacttcttgtttatttttttaacaaatttttgtgtttgataaattgaccggaatttcattgaattataaaactaaaaaacttgaactttttgaaagaagagttagtgaccgcattttaggtaatttttttcttctttataagtcatgtattttttaacctttctcttcaattgattcaacatgtattttttaacttgatgaaagcactttaaggccactctggttgaagaaataaaactaattcgatgttatatatagtttttagaaaaaaaaaaacatttatcctaaatctgcttcaatataatagtataagtgcccttaaaaaaacaatagtatataaatgcacaatgtcatttaatattccctttctgttaataatctttgaacactttagtcaaataacatctccaatcaaaggttgaaaattgttgggaataattgtatataaaaatatgttaagagtgagatagtatagtaactcatacttactgaatgggaagggaaactggttcaataagcatgattaacagaaaaggtagtacaccaaaaatgaattaagaaatataattctcttaatttttttggaactgattagtttactggtgctcatatagtcatatgttagacataaaaataaagcacagtagtatgtgtgtgttgtcttgaacacgtgggaagcctttgatgtcctttggtaactaactaacaaccatataaaaaacttggaaactatgcatgctatgttcatcttcttaaagtgttcttcagtaagcaagttcaatacttcaaaactaagcagagaaagagagaaaga

SEQ ID NO: 127116 - DNA, 2418 bp, Cannabis sativa
tcgagaattttttaaatggaaaaaatgaaggaaaggcggttccttttccagttttatactttggatttgatcaccgtaagattaaaggacagggatccaacggataggaatgagagagaattagaaaagaaggctcattaatgctattgatgtgcttcaaaaccataaattaccaaattcaaaagcatgcaatttttcaaattgggttaagaccaaaataccctttgtaatcatttaaaaaatactttttaaggagcaattgttatacccaaaattcggatgtacttcagagagtgacacatgtcgatcttgtggaatgtgaaccaacaggtataataacgattatatcattaaatgtaaaatagactaactcattaaatatagaatcaatagaatatatttgtaactcgctgacagtatagtcttaggcgagacaaggatacaccaactatgaatttctgtattgacgagagaccatcttgcctcggagagtacaattacaaggaaactacagataatatatagcgagacgcctatctcgctatagattgaagaatattgacgagatgagttggctcttggaacacttaggatataatccacattataataactaagtgtaataacttaggaatataagggacatgattgtccagtctgcaaggccttatggtcaaagaggagttcttgagtttgctcagtacactagtgctcatgccattgctggaaggcacatgaacaaaccaggtcatcattggtcatccatgtacaaagcgaaatgcctctaatctatgtacaaagtgagacgtctttacccacgaaaacgtcaactgctttgaagataagaagggtaaacagttatgcgatttttcaacattatttacacgtgtttacgtgggacatggccaaaatccatgatttcatgaaaaactgttatgtaattcaaattcaaatgtaaatacctgccaacctacattactataaataggggcagagtatacaaaaaaagggactaaaagcctttgagtgaaagaggtcataaactgtaattctgtatccagaaatatctttaataagattgactcgtggactatacagagttaactgcgaaaccacgtaaaaacttggtgatattattatccttatcaattctcttatatctgtgtttaatttattacataaaagacttattaatcgttaacgaaaatttgcgttaatagtagaaaccctcatgttccatttgttatgcccaaatttatcccaaggaacgtaaaaactatattgttaagtgtttaatatcgcaataataaagaagagtgtcgtattaaaaatattttggggcatgatcaagatttgtattttgaacccctatagatcacgcacttaaaaatattatttaatttggtattgttataatatttaggtcttacatgaaaggttgaaaaattcaaaagagagagagacggagaaatactttcgttttattgatccaaattgggcttctctagtgggatcccatttgctacgaaaatgtagaatcaataagacatcaattagcaagcacaatggagatgtgtgaaggccaaaattgggctcaggctcaatgtcacatgcgatgtttctaaaaaatgctcaaacaagattgggttggactatttgactagttatgacgatatgatcaacataccaagcccaataagcccaaaaagatacagtcaagtcagacattaacattatccatggcctaacattgagctcgcgatgatccgacctgtatacaagattgagtcttatcactcatctaacgatctctaaagtgatcagtcaaactgaccacgctaatgacgatctccctgatcaagtgggagaggagcgcttcacaagggggtgagcggtcatgagtaacgcctttccatagacgcctataagagccactcttagttactgagagagagatcaattttcagtgatcccactacttctcacttatcgttcacactctcattctctctaaaattacatacttatttctgcagtcaagataggtggtaacttagttcagtcatttactatcatctttttttattacattattaacaatcttcctgacttgaccgttggagtccctttggtcggtaccatcccggtgtcccaacgtttcccaattaatttcttctttgttctacaggttgtcgatacccgcgtacgatcatcttcgattgattgtggattttagggtctaaaagatgtaactttcattgatctctattaatttagggtaagattaatctaaattattttaattagctatatagtaatatatttatatataacaatttatttttccatcaacaattattattgggtgagaataatatttagggcattttacaattttgtatacattattttaattaa

SEQ ID NO: 127117 - DNA, 647 bp, Cannabis sativa
gaatcatcacattttagtatttttagtatagtagcgggacattatagttagacattgggaatgttaagaatattcgagattttagagttgcccaaacccctaggtgacttagggactttttagcataaatgagggcagaatggtcttttggccattaaattccttgtcctttagtggactttagttggctattatattctgattttatctgttaattaaattagataaacataggctttactttattttaaccaaaattaaaaaaaaaaaaaaaaaaaagctaggaaattcaacttctctcttcttttactctcactctcaaaccctaagaggatcaacaataattggggatttttcaactacaattcagtagagtatagcaagctttttgtgattcaactctaagtaagatactctagcctttctcttagtaatttcttaagctttaagtttaagttttgcatgattttgtaaggtagggttttgtagcttttagggttgtataattttattttctgaagtttaattagggtttattatgttgatttgaagttgttttgaatgttgttgtgatgtttgagcaagctttgagtttaaaaactcaagctatgctctttaatggtgttttgtgattctgagcatgttag

SEQ ID NO: 127118 - DNA, 803 bp, Cannabis sativa
catctttgtcaaattttacgtctcagctaattattagtttatttgattctaagctatagaatcgataaccttttgattgagtactatagcctaagaagattcctttttcagtcttctcattaagcttgcctcttttctcttttagaatgtgagagtaacatatgcagccgaagactttgagatgctttgctgatggcttacgtccgctccaagcttcaatcagtgtcttactctgcacaactttggttatacatctgttgagcaagtagactgcagttcttactgcctctgcccaaaattgttatataaaactattaaataattaatttcatacatcatgataatttatcagagatgatagtcgtccatcaattttgataaacccaaaccaagggttccaataaattcggtggcctagatttattattattgtaaattattttgaacatacaaaaaaggaggtaaaaaaatgtttttttgacatccctgggatcaaagcgccaaacctagatggatgtggaagttttttctttcatgaaaactgggatctaattggagaaggagtagcagaggccatcatctcctttttgcagacagggcagttactgaaggagataaataatattgtcctaacacttgtccttaaaagcaagtgttctaatacagtgaaagattataggccaatagcgtgctgtaataagatttacaaagcagccactaaattaatatgttcgagactcaagcatcttttaactaatttggtggctcaaaaccaaggggtatttgttcaagggcgtttcata

SEQ ID NO: 127119 - DNA, 1473 bp, Cannabis sativa
  modified_base (1414)..(1423): a, c, t, g, unknown or other
tacacgatgtcaccggaaagtcaccggaaaggggcgaagctacaaaaatgtcaccggaaaaagtagggaaccgggaaaaatggtatagtgtaggttgttctcctcgacgagctgagtttagtggtgaagacgattcatcaaacagacgccagaggtgaccggaaaatccgttcaaagtttgaaaccccaaactttaacttgcaatcccgagctaacggtggtgaaaggagcgggcggccgcttggggggtgaggtcgtcggcacctagagttctgttctgtccggcgcgtggggtcgggcggtggccgaaggttggtcgccggagtggtggtgatggttggttttcttttgttctatagtttgaagagagagaaaatgttagatagatagagagagagagagagagagagagagagagggggggacgaaggggttctgctactgtatatataattttttttatatacatacatatatattattatttaattattattatatatatacatttgactcggtcaaaaaccgagtctttacacaaattattgttaatattaattgatatttttggtaatagaattgctagaaattcaaaatgcgcatttggtattagatagttatgagattaaaattattcattgaatttgttatgcttacctgtcgtaagttttcacatgtcaattatcgaaaattatgattcatgttaatatttttctcccgtatcaatcataaatattactaagatccatacatctaatttagccatcctgtcgatgattttatggtgaaggaaacacattagatgtcatgaaccacacaatcttttttaccctattggtagtggattaactgaatttggttatgacatttaatgtagttgtccttacttgcataagagtcatatattttgtttaaacgactctagcatgacatgatcatttttgttgatagatcattgagaaagctaagaaaacgagcagattgcataatccttgttttcacatagtggcactgctctaagatatttttttagcttttgagaattggtgaaacttacgtattatgcgaaatgttgttgtgttgatgggggagagaatgttcgtctaaaagaattcatccttgaatgttgttttgttgggtaacctcacaatgatcctgcaatcatttgtgtgggtaccgaggtagtaaaaacctcctaacgctcgctttcttccaggaacaacttttatagaataaaagtacacaatctcaaggggagtgggatactcccatcccataatatgatataagacctttagggaggtcataatcctgtaagaactctaaattaactgaaaaggggaaattctgagataattacataattctttatagtactctcttagggggagaactattgggttttgtgccctannnnnnnnnnatttcaatataatcagatttagtaattaacaaaagatcagaaatcgcatt

SEQ ID NO: 127120 - DNA, 625 bp, Cannabis sativa
  modified_base (141)..(148): a, c, t, g, unknown or other
  modified_base (561)..(566): a, c, t, g, unknown or other
aatgaacaaaatttcaacatgaacaaaatttcaacataaaaatttcaacataaaaagatcgtattttatgtaaataaaatcaaaagaaacgtaaaattgtttaaaattccgtaaaaccgtatttttgttatttttttgttnnnnnnnngcatttgtgaaattaacccttttatttatttatttattttcattttattcttctcgcgtaatttgattttttgttataattaacattttatttatttaaactttttgtgtaaacttaaatttgcttctgtcaattttatgatccttttttaataaacgtttcggttgtgtataattaaaaaaaaatgccacaaaagagaaaaaaaatatatcagaatgtgttaatttcaataatttgaaaaaactgcttgaaatcaatgggctttaatccttacgaatggttagcttagcccaacaagcccagtccaacattacatcaatgggctttaatcctaacaaatggtaagcttagcccaacaagcccagtccaacattacacttggttagtttcaaggggtaagttgaaaaataccnnnnnnattaatcaattaatcaaatttacatctaattttatatttaattgaaacatacctctttt

SEQ ID NO: 127121 - DNA, 1870 bp, Cannabis sativa
  modified_base (38)..(42): a, c, t, g, unknown or other
gatattgaataatacggattacattgaaatggagtttnnnnnagggcataaaacccaacattagtagcttatactaagcgttaaaatttctctgcataagttcttcgtgatagttcgatgtattgtacggtttgcgtgccccccaagtgagcacacaaacttatggtctctttgtgacttacaattcaccaagtttcatagaccttgcctgtgaattttcttggggtgatacatgttgtacgcatgtgaaattgaaaaagaataactctaagaagttaatcttgttagcaagtggtttagacacaataatttgaacataaacattatttttattcattaattggtctttgttgttgtttaacttacataaattgaatctacaagcttacataacaaagttttgcttctagatatcaaatatctacccctgcttgacttacataggagaggccactgttgaagaacgcagccacaccaaaaaggtcgtgggtattagctctttttcactctaacaatcagttggtagaactactactacaaattagctttttgtaagctagatactggtagtatttgtaaaggtactctccattccagtatcttggtaggaaaatgagctccgcgttctcattgtaccttctcagcttgtaggctctgttaatagttatctctgtaaattgataggggccttcctagttgggtctgaacactcctactactagatctttggtattcaggaacactctttggagaactaggtctcctatgaagaatttcctgtccttgacttgttttttgaagtgccttgggaccttttgctggtaggcctacaactttaggttggcttgatctcttctttcttctattttgtcaagggattctatgagcaagatgttgtttgtatcttggtcataggttgtcctcctatgagacggtggcactaactctacaagcaacatcgcctcatagccataagctagagcgaatggagttttcccggtggccgtcttctcggtagtcctatgcgaccataggacctctgggagaaattcaggctagttgccttttgcctcctcaaagcgcttctttagtgtgtccttgagggttttgttgacaacttctacctgcccatttgcttgaggataggccacgacaaagaagcttttgatggtgtcatgtttgttgcaaaatttagcgaacatgtcagtgtcaaactgctttccattgtctaaaacaatcttctttggaagtccgaatcaacatatgatgttcttgacaacaaaatcaaggactttcttagaggtgattgttgctacgggttaaggttctgcccacttggtaaagtaatgtacagagactacggcaaactacgcccctcctttcccctttgaaagttgaccaactaggtatatcccccatattgcaaagggccaaggagactacatcatcatgagctcattgggtggcgctcttagaattttttagaatctttggcacttgtcacatcttttgacatagtctattgagtctttgatcattgttggccaaaagtacccctattggagtatctttttggataggcttttcccccgacatggttaccgcaaaagccttcatgcacttctatcattagtcgctcggcctcaaccttcgtgacacaacttaagagcggcattgagaagctctgtctgtacattacttcatctaggattagataactagcagtgtttcttcttatcttttttgcctcattcttgctttcaagcaaggctccaatttggaggtaagctgtaataggtgtcatccatgttgtactgccatccaacatgtcaacttctttagggatggtaatgcttggttcctttaggaa

SEQ ID NO: 127122 - DNA, 582 bp, Cannabis sativa
cctcgactttgaagggcttccggtatactggactggtgtttactcgcctgcaatggaggaatttctatccaagaccactcaacttcatgtctcggatgaagaagaatgggaggtggataagagtttatctttgacgattgctaaaaacaatttgcgagggagactttgcactaatgtggatcacagcaggggctttctcaagaaagtcctggggagaatatggagactcaaggaagcggaatggaacattaaaattcaagaaaaattcgattcaggtatgttcctatccttttcttttgcctctgaacaaaaccagtccagaattcttgccaagatgccgtggtatttatcaaatggtgttctgattttggggaagatggtgaatactaatgattcttggaaagatgatcttaccgcctttcctatttggggaagagctctgggggtaccaatagattatttaactggaaaaaacacgctgagattagcttccatggcagggacggttatttcgatcaaaaatactgatgtttcaaaaatggtgactaatggtttctttagatttcagatttggatgtcgat

SEQ ID NO: 127123 - DNA, 1308 bp, Cannabis sativa
  modified_base (323)..(326): a, c, t, g, unknown or other
  modified_base (1236)..(1239): a, c, t, g, unknown or other
tttaaccataatcaatagatgcaactgaaatcgaaagccctatcttttattcattgttaattcctttattaatttacctgcttcttactttcgctatttttcttgtttttttgatttaaattttctcttcaaactttatttagccaaatagaaataagaatttaattttaacatacttaacaataatcctcgtgggatcgaccttactctttgtgagtattacttgttaaaataatacgtatacttgcgtgttgcaaatatcatgataagtttttggcgctgttaccgggaattgttatttaatattattaaaaattaaattnnnntctaatttggtttttcttttcaatttcagtactaattctgttggtttcaaattcttatctttttttctcaggttcaactagtttatgagacgtcaaggtgcaattgccagattgcatattgatcttgaaattgagaagacttacaaacaaaatagaagaaggaaaagattggaaaaggctatctaatcctgagaaaaaaaaaaataggttttcagcgtcttttatttatttattttttttatcagtttttggctataaaagaagtgaactttcatagttttcaacaagcaatcaaggagtacgaattttggagagcaaaatcgatattgaaagctttctcactagagtttttagcattatttttttctctatcttcttcttctattctaatttaatatgtgtgaaattgctataatgaacatgagtagctaaatagttcattagggtctagacggatattgtctaacattaatttcaactaaacaacataactcacaagattgttccaatatgaagattgttgttgggagcttgggtctcttggagaatgttgagttagtttatgagatacatgtgttgtatcaatttctatactgggttatcactttcattcacaaatgtatatttttttgattcttataccaccatagttataaacttgtaacagtaccttcattagtttgattaaaaatctattttttagttttctgtttttctctacagctttatcttagtctctctacaaagctcactctcattacaatacatctgtcttttgtgtttgtaatgcgggtaaagcctttgaactcttttaactgggctgggctgggctaggcttacgcccatttctctaccactttctctctagtatttcggaaatgctaaagggcaccactggtgcctagcaccnnnntacgtgtcaatatcgctattggtgcaattaagtatcgggtcccatatagtttaatataataatttatat

SEQ ID NO: 127124 - DNA, 671 bp, Cannabis sativa
aatattctcaaataactataatgtgtaagattataataaaaaaaaaaatgaaaagtgaacaaaacaaatttcataaatgtccaaattaagaggtgtactataaacttataattttgtataataaaattatattagatccaatacttaattaaacgtaatattcaataattactttggaaaaaaaaaaagtatttatttatttattgtttaataattttgcatgatgatctcttttatcaaacttttctacaaaataaaacttctaataacacagcaaaaaaattagacataatgttcataaagtaacttttaaaatggtctatttcccaaagtttagtgtaaatttaaagagagactatatatataaataaataaatacatacttagtcccatatgaaagaaaaatacctatccaatttcaatgaattcctaacaaattatgattaaatttcataataataactttacgggttgaagtttcttcacagctaaaagcaagaaaaccaagctagaatattgaaaggaaattcttcattgaatttcactcaactttccatctccattagattttggcttaatctaattatatataagtaatcaactagaatgaacaatccctagttgatttaatcaccaattataaatatatactaatcatatgcataactcaa

SEQ ID NO: 127125 - DNA, 1345 bp, Cannabis sativa
cttattttctagtaatctcggtttagtaggattggttatattattattgtcgtagcatgcctaattcttagggcattacaatttggtatcagagtgctaaggtttttaaacttcctgtagacgacctgctgctaaaaacatatgtcaatcatcgtcaaagaagctcggctcctcgtggtgcagtaagtattgagagtaaatgcttaattgctcatgtgattatttatctattgctttccatattaggcagtatatgagaatctagtataaatgtgatatgaaagccatgattagtgtattaattgataaatgtttatttaataaaagaaataaaatggttgagttagaatttaaggaaataagtgcgtaagtatggtattagtgcctgactcatcggggttgttgattttagggttatttgtgaaaatggaacctctagaatcatctagaccatagggcaagcatgtatagcctggttttgaccaagccaatccaccggcaccgcttgcgcctccgcaaaatctgggggataatgcgagggttggtaatgctaatctgcatgccgactggcagtaaatgtttctttaaatgtgaagtatcatactttgtcaagaatatgaattgcgtcggtttaggaaaccggcactagtagctccggcagagcaagtattaccaccagctccttttctagtggtgggtaacttgggatttatactaccgcattgagattttgtgtttgagcgctttttgaagctgcaacctccaacgtttctgggaggcactgatattattaagggtgagcaatggatgagtactattacccacatcctagataacatgggggtgacggggacggaacgagtgaactgtgttgcatttatgttacaagatcatgcccacatttggtgggacattgtgagtcagacccaggacgttaatactatgtcttgcaaagaatttaagagcctgtttgaggaaaagttttataacattgccgttagaacttcgcatatggaagattttgtgaagttgacttaagggaagaagttagtggctgagtacactttggaattcgatcggctatctaagttcactagtgacctggtaccaatggacttcactcgtaaacaaaagtatgtgatgggactgaatgccactattagtcgggacttgcaaatttccatcgatcacaataccttatacaaaaaagtggtcgagttagccttgattgtggaagaggcagagcaacatgtaattaaagagcaagctgcaaaggatgtcgtcactataacaccctaatctatagaaatgccacgtgtgtgattttataaactagtttaatact

SEQ ID NO: 127126 - DNA, 700 bp, Cannabis sativa
ttctttgttttggaggttaaagctcataacttcgtgaatggagattcaaagttgttgatcatgacttgaagatgatgagttaagactcaagagatttcaattgtatcctcatcagatttgaagcaagaagatattgcttgagttgccaagggttttggttgtttggagcaattacttctgtaaggatcttacaagattgtaagactgaaaattattgtaaattcgcatatcattttagtttagttatttaccttagtttacggaactcaagtattacccgatcgaaatgtgttttttatacatgagaagcttgcaaatcttctctttatgtttaaaatttatcaattaattcttgaattgattaaataaattgataatttgattaaattgaaacatgataatcaagcgtagtatttaagtaatttggaactttcaaattagatgataatcctgtcaataaatatggataatttattttacttgtcatgatcaacttagattggtgatgcaaaaatatatgtattttaattgatattgaataattttatattaaaaagtaattaatattcaaaatatataatcgatattcaattttatactattgcagattagatttgaatgcaaattagatgtgtgtttttttttttttttttaatttaagcgtttatatattacaactatattttatttgggactcgaa

SEQ ID NO: 127127 - DNA, 1921 bp, Cannabis sativa
  modified_base (1883)..(1883): a, c, t, g, unknown or other
agaacagtatatttatccctactcgatgtaaatcatctatagagaatctttgattatttggattgaaacaatagataattcatagcgtatctatatttggaacatatagaggatttatataattaggagtgtaatttcaaatctatagcagagtcgggaggaattaataagttaggaattttacttggtatattttggatctacttattggaatcttggttatataagcccatggtccccacattgtgagagataataatgtattgtagactcaattaattagtttcaattaatcaattagaattctaaacaagactacgtcttgtttatgaattttcactaagtaagggtgtaattgacaagaaagagaggatttaggatttatttatcaattaagagactttgtaaggtctaatgaataaataagctaaatgaaaattgataattaattataattattgaatagatagatatgacatttagagagttagaattaaaatatgacatttgtagaagaaaagataagttgttaaataaaatgcaaaattgaaacctgtagggcccacaatagtggttcggccatagggttgaataaaactattattttatctatttttcaattctaaacctaaccctagatgaaatcctataaataaaaaaagatgactcttataaaaacatattttcaaataacttcaaaaataaagagagagcctttattgaattcgaaatcatcctcctcttttattcttcatatttttaaaatctctatagtgagttgaggaattttccacataattcaagccaatactcaggcctttgtggaagattatgaagaattccaagaacaaaagaagatccaagtttagatattgatcatactctacgatagaaaggatcaagagttactgatctaaatggaagaagacattatattttgctaccaccaatgtatgttttctataactttacatgtatttattttattgttttagaaaattcagatttaggatgttagattatagttctataatcaaaatacatgttagaaaatctagatccttataaaaaaaattctaacaattaggctcagagccacggtaataatttattttcatgacatataaatttaaaacgatgtttggttaatttagatgtgttcatgttggttatttgatgattcaatgtgaattacgaaattttctatgaaaaatatttttattttcattctaaaaatttgaaaatttggtgagaaattaagcaaattccctttttacagaatttaattttgattacaattgaaaaacttatgatattttgaagtatttgaaaaattgggatagcgtttaccccttacgcgcgcggatggtgtgaaccgctcagacaaaattctagtttcggacaaggcttgtccaagttttgttggtcgtacactgtttgaaccccctatacgtacgcaaatgaggatgcattcagccttgtccctcagcatttcacggtcattcgcccttgtccgcacgagccgacagtatgcagtgcataatgtccatgtgttgcatgcattttgttcaaatttttggtagattttttctgtggatttttatttttcaaattttaaaactaattatcatattaaaattaatcaattttagatattagaagactttgaatttaaaaatagatattttttacaaatttactattatggttagtttaaaatttgattattttttattttattcatgaattttaattataagatgagatatttacgtatttcgtttatttaattagtaaaaaataaaatgatcttatttaaatattaaaatagtaataaaattaaagataatctagataattttaatgtaaagcccgcttagttnatttggaaattagcagttaatcttgattatttatgaaa

SEQ ID NO: 127128 - DNA, 2498 bp, Cannabis sativa
  modified_base (572)..(573): a, c, t, g, unknown or other
  modified_base (1314)..(1314): a, c, t, g, unknown or other
tgtcacatttgtgttaagcgggtcaattcgtatttgacccgtttttatttcgtgtcaagttgtgtcgacccgttttcgacccgcgtctaattttctcgacactaacctgtaaacttcgtgtcttgttcgtgtgccgtgtcgaaactcgttttgccactcctatgtcaatgttttaaaagagcactcacacacaatattttcttttaaattattttttttaaatcatttaaataaacatactaaaaacacattataaaagagaagactaattaggattttttttcccctgaactttgacatgtaccaaatcatgtcccttgaacttttttggctgttaaaaattcctcctaaactattgagattgttagatttttttacttttgtctaatttcattcaattttactgtttcagttattgtttatgtattaaaccatgctccctagactttgatatctaccaaatcataccctcgaactttgatatgtactaaatcatgccctctaaactttcatccatgttagaatttttttactaaaattggacaacaatccttaaattcaacaatctcaanngttcaggggcatttttaacgaccttaaaaattcaaggggcatgatttggtacatgtcaaaattcgagaggaaaaatcttaattagccaaaagagaaatttaaatttatatgcatgtactaaattgaaattatttttctaaatctaagttaatctacattagtaaaataggttaatattttataaaactcaattctaccctttccatttcaaacacctaaccctctctattcctcccttatttctcttgctctctgaactcactctaaggactcaaacccacaacttaccgcccacaacattggtcctttctccccatgaccaccgaaggacccacagacccaatgaccaccacggacccaacgacttctccatcaactacagtcccatcggtaatgttgtcaaaagaataaattgtataattaatgtttgttatctatgagtagatgttaaatttagggtcgaaaatggccagatctgagttttgggcaaaaaattagtttctttatcaggtccgacggtggtctgatagtagtctgatggtggtctgatgccttcatgttgttaaaatgagtaaaggttgaagacaaaggtccgatagtagcccaatgatatggtcctatggtagtctaatggtggcccgatgccttcctgacaagtttaatgaatggagcttaacatctattaatgtagaatatggtttgatagtggtccgatgctacttttttatgtacaaaaacatnaaaaaaaaaaaaaaaaaaaggtagcatcaggctaccatcggactcccatcagaccgccatcagtaatggggagtatagacgttgaagttagaagagaaaagcagagagaagggtgtaatgtgtatgaatataaagtgtgcctatttttttaattttagtaaatttgtgttcaaaaatttaatagacaccaaatgtatgcatataaattcaaattttctttgtataattttggaaaattttacaatgtactcttttaaaagggatgttacatttggtgtatattaaattttttagcacaattttactaaaattaaaaaataggcacacctttaattatattcatacccattatatcattttctatgcttttctctcctaactttaccatgtatcccactctcatctatactcatggtggtctgatgctactcataatttatttatttattttatgtttttgtacataaaaaaagtagcatcaggctaccatcagactactatcggaccatattctacatttatagatgtgaatctctattcattaaactcgtcaggttggcatcgggccaccatatcggactatattattgggctactatcagaccactatcgggcctgacaaaaaaactagctttttgcccaaaactcatttttggccattttcaactctaaatctaacatctactcacatataataaacattaatcatacgatttattcatttgacaataacaaatggtgaagtcgtgattgatggagaagtcattgggtttgcgatagtcattgagtctgtggtcgtggagagaatgggctaatggtgtaggtagtgagttgtgggtttaagtgattggagtgagttcagagagcaagagaaataaaagtgaaagaaagagaattaagtatttgaaataagaaggatagaattcaattttataaaatataaatttattctagcaatataaattaacttaaatttaagaaaataatttcaatttaaaaaattaatataaattcaaattttccctcataaatcaatgcaggaggcgaaattcgagttgtaaatttcaaatcgagactatttttctattttttttgggcaaaaatacgtaaaaatatatagatagtgttataaaataatataaagtagatgagaggaaagaagaagaagatgaagagagaaagag

SEQ ID NO: 127129 - DNA, 879 bp, Cannabis sativa
  modified_base (850)..(853): a, c, t, g, unknown or other
cacttaacaacctgaatggacgaaatagtagagaccaaatcaaaattagaatttggggagttctacgcctaaaaattcagtaatgggagagttgattgtgccaaatacaaaattaggaaattttagccacaaattaccatgaaaaactatcaacttcacaatcaccgccattgaccaacaaacaaagctccacctcatgataaatcatctcaaaactaattgacaatgagaagtttaggtcattcatcttatatatgacaattaattaacattaatgtgagactaattctaatacacattcctcatgtttgggtttgaaaagtgtgggtataacgaacgacctttaagaaactacagtgctaaatatgacatttaaaagaatcccacaaggtcaaatatcgagaaatttgtaggtgtacacgccaagaaatttgtgaattttgaaacatgtcaaagaccctaacactgaaaactggcacacattggccgaaaggtcccaaatagaggttaaaggggaaaaagcttttagtttggctcgtcttttttgaccgacagtattttgggctcactaatggattacaagtaactttgatactatattagaagttggaataagatgaatgaggttctatctcaaaactaattgacaatgagagaattagcctattcatcttatatatgacaatttattttcacatattaacaacgtaagactaactctgatacacgcctaacctaataatgataagcaaataatttttgtaagaatatatactcttaaatttattgtatagtattgggtaaatagcggcataagtacctaaagttttaaatttgtaagcggcataannnnaatgtttatttttagcagcataagta

SEQ ID NO: 127130 - DNA, 1077 bp, Cannabis sativa
gtcgaccaaatgcggtaaacaatacccccatgccaggtcaatattctcaaggattctttaaacaaatgttacccgagaatgtggaaagttacttgaaaaaccttccaccgctgcctaagttaccaatacagtctcagctgccgccaagaccaccatgccgaccaaggtcccgaatccctcgtttgccaccacggccaccaaggcctcctggggcgctaccaatgccttattccctgcgctcacgaccaaaaactcaattagtgccgccaccgtgggtgcacggactacccaaacaggtaaaaccgccaccattggcaccacagctgccgcagccactatgtgaagatctaagcgatgtattgctggataacttagaggaagattataggaggataaaaaataatgaaaaagggtacaatttattgacaaattatgtgggaatatggaagaataaaacgaaaaatggtaagaaagataggaaggtgagtgcgatagagttgctaaatgggcttcaagaacgttatcctaaagaaagagattcaataaatgagatcaaggctcgtattcttgaaattggaatgaaattatctgagcttctcgttgaatataccttcttatttgaatttcaagacatgagtgagaagattaaattcgtaaaaaatacgatgcagatattaattttggatgaaggttctacaagcatcttgattgagaagcttcattctacacttctgtcgatcataggaggaagattcgcgtatgcaagacatttttatacaatagttgatgaaggaaaaagtccttacagaaatggcgcggcgttagagtcatttgagaaaaaagaaagcaatgtcaatgatgcaatgttcttcaatattttttacttggaaaattgtttgaattatccttactacgatgtgaacacgaatatcgcacaattatctagttcggtgaaatgtttcagagaaaaatttctccagaaattgggtgtgacaagttgcatgataaataatgtgaagagtaagtttagatgtgtctatgactatgacgaagaggatcgtgagcgtgtacggaagt

SEQ ID NO: 127131 - DNA, 848 bp, Cannabis sativa
agcagatgtaataccatcttcagtactctcactattccttttagaagcttccataacattatcatctccaactacttttttatcttccaacaaaacttcaatattttcaggctgcaccaacaaagaacccataatatcaaaacttgaacaatcgtgaccaatttgaaaaacggtacatgaaaaagaaacatattagctactaaatcaactaaacaaaatacaaagcaaaataattgcaaataaaaaataaaaaacaaaaccttatccatgccatcctcagcacctacatcaacagcctgatcagtaacttcattaacaatagcatctgatatttgtcttatttcttgagaaaaaaacaacaaaagatactaatatataataaatttaaaaacacacaatataatacatttcaaaacaaaaaaaacataaagtcaccttataaacttcagcaccatcatcattaacaccacccaatacatcaacagctaaaccattaccctcaccaccatcctacattgacaaaaacatacaaaaaaaaagtataaaaattactaacaaaataaaaattgaaattttattagaatgaaaactaaaaaatataagaattaattgcatcaacggactaaaatctaaaattaattgctataatattgttggtcaattatttagaagatatactatttattagcataccgttaaaacatatatatattcttacactgaagcggactttttttctagttttcttttttttttctaacattttatttctctctctttccattcacatgtaatgatgagtctcactacttttttttcttctctcaatgtatgatatgacatatcat

SEQ ID NO: 127132 - DNA, 992 bp, Cannabis sativa
atatatagtgaatatatatattttagaatattacaaaaataaaattgtagaaataatgagactttttccttaacattcccttaatcatttaattatatttcacatttataatatacatatttttctctttttattactcacttcaattcttttactatatttataatatacttatatatatatacatatgatttctatttttccccactagtaataccatgtttgtttttggtacctgaaaaaattataatttaattttttttaatatgatgatgtatattataattttttaaaataatttacaattttttatgatttttaatttaaataatttacaataataaaaatagactcgacatagtagcagagtgtttatttttggtacgtgaaaaaattataatttaatttttttaaatataatgatgtatattataattttttttataaatttctaaataatttacaataccatcaatttatttcaagtgcatataataaaaattttagaaaaacattttgtgttctcgattggccaaattaattatggctaagtacactaaattattaaaatatatatatcactaattcttaatagtaataaatattataaatactatataggtaataatatagtcaaatgtgtttgaatattatatattgatgaaatattctttttaattaaactcttttttttcttttactaatattggtatggattggtgtcaccgactaagtatgaaaagggatttatggtcaaaattaattagattgcgtcaacccaactccaaaggaataaaatttatgtatatatatatatataatttattcatataattataactatatattaatataatataatattaattgaagaacatatgtgtctgtatattagagaaaagaaagaagaaaaaaacaaagtttatgggttgagatgtgaaaaaagaaagtacttattaatattgatggaaaacaataggtaacaacaacaa

SEQ ID NO: 127133 - DNA, 1706 bp, Cannabis sativa
atgggacctctcatctccctagccattggattcactgtaaccactttgaaccgtggatctctcttagccctgtctcctttttaaaataaaaattgtctatggcagtgtcattttttattctttttacataaaacttcatattttctctgcaacttccttttcccttttcttgtcatattttccatgcaagaggcattgaaggatttgatctaacgtttactcgtcatttccatggaactcttcccagacattactcctcttcaactgaactagcaaagttcttatttagggggaacatttgattttcaggttaactgcgatcgctgcatcgattagcttcgaatctttaaggaaattttttttggatacaccaactatccccactgatttttcaagtaagtgcactaaccccctgtctgagtttcttggcatttcacatttagggtaaaaaaggttcttgcttaggttagggctagaactgtacttgtgccgcgtcgcaagatagtgtgtgtgaaagagaaaactcatcttcaaatccattcattgtttcaaagaattcgctttttccttcatggatttgaacgaagaccccctcacaagcacatccatgtccgtcgagggagaacctattcaaaatggcgaagggttttccgcagaacagaattaaattgaagcctttgtagcaacttcttagcccatgaaggccttagaaaccatcccaaaaagtcaacccataactgaactagacctctttgcggatagcaagagaggtgaaagggggaaattccttcaccagtgcaggcccatcctgagtccatatgggaaatggactagaaagccaacgagtttcgatctaatgggatgttacaagcgaattcagaaattgatggcctccgtaatgtccctggactgatgtggcacaggcttttcacccttggggaatctgcatccatcagtgttgatgggttgagtgcatggagttggtctcatatttctagtggcgctcagcttcctttgagaacttatttcgcgaatctgattgcaaaaattgggattgtgcccttccagctgattccttcatcatacagactcttggatgggtggtacgtgttctacaaaatcaacaaactgaaggttccttccctggaggagatcctttttttactgtgtcaaggccaattccataagggcaaataggtcgaagcgggggttcttctcactagataagcgtccggacacttactgccccattttccaagcggatcatccccatgatctctaagaatacggggtttcctctaggtttcctaccagtagggtgccatctctgcaattaagcttccaactccaaggtatcctaccaacttaccttgaatttagcttatttttaaactttgtcaatttttgtgcttgggctaatatttctcaacttgtagcagtgcttccggcttagagtgttaggacggaagagatgattaagagagaagcacaatatttggctttctcgaaagatcaattgaaggtcagagagctagtgacaattaaacttctctataggtctggcttgatcacaaaattttagagtattgacaccgttagcctatgagggcagcgccaacctcccaaggaagtgaaggaggcgattgccacaagtttggctattataatcaccaatgcggccaaaaatgatcgtgcctttcactttg

SEQ ID NO: 127134 - DNA, 646 bp, Cannabis sativa
  modified_base (65)..(74): a, c, t, g, unknown or other
  modified_base (358)..(367): a, c, t, g, unknown or other
ttttcaataacaaaattttaaaaacaaaaaatctacttttatttttctgtttttaaaattaaaannnnnnnnnnttaccaaacgccaccataattattctctttttgttgtttaggtgttctagttatttttagttgctttagttatttattttcttttatagtattttagtaattttgaaaattaaggtggtatttgggaatacttttgtttttaaattttttaattacaaaaataaaagtaaaatttttattttaaatttttgttattgaaaaataaaactgtgttctataaccacttttattttttaattttgaaaacaaaaaatataattgtattctgtaaattttatttttannnnnnnnnnttgattttatttaagtcgagtttgaggctatgtccgggggcgagtccaagtctagggtcgggtctgggttcagtttccaaagtctaagttagattcggagtctaaaatattaattaaaaaaaattcaaaaaaatttaaaagtgatttttttttttaatttttaaaatttagattcttaattaaaaaattaaaaaagtaaaaatagttttataaagtatgattttaaaaatattttcagtattctaattttaaaaataaaaaactgattaaaaaattgtt

SEQ ID NO: 127135 - DNA, 760 bp, Cannabis sativa
  modified_base (421)..(425): a, c, t, g, unknown or other
  modified_base (523)..(523): a, c, t, g, unknown or other
gtaaaaattaactatgagattataattaaaactcctcctttaatattgaggaaatgtgtgttttttgcactagtctcatagaaaaagaaaaacatgtgtttatacaagaaggttgtagaaccaactaaatacgtaaagtaggaagaaaaaacgttataaagacttgtgggttgttaagacaagtgtaatgtagtgtgcgtgatgtgtgaaatatgatcctttataacgcgcattggttcaatagtatgcaagtaacatgttggtctatacatgcatgaggagtgctaattaacctcctattacaatctcttagttaatctctacgtctaaaattacatgtcgaaatatttttttcaatttttttttcatagcggtattctttataattatagtatcatccctgtaaatttttgaaacattnnnnntagtttacagtaccgaaaacagagttcttgatattctaatttaccacgcgtgtttaaaaaacttcaaacatattttcgacattgtaaactattcgaanttttttaaaaatttatagaaatgatgatgtaagcatagcgaacattccggtgaaaaaattcgaaaaacaatattctgacatatatttttagccatgaaagttgactaaaaaattataataggaggttaacgatagcactcctcatacatacatcactccctatatgtaagaaaaaaatataagtgcttaaaaaattgttctatagctaatggatgagtggttttttttttttttttt

SEQ ID NO: 127136 - DNA, 739 bp, Cannabis sativa
  modified_base (459)..(483): a, c, t, g, unknown or other
  modified_base (704)..(705): a, c, t, g, unknown or other
tatatatatatataaatatttctcatcaatttattattatttattttttcaataagcataaatttaagtatgaattttttttttttttttttcaagtcctgaactgcatacagttttgactttttggacaagttaggttagtccttacacaactaatatatttattatttaggaaagctttataacattattataacaacttttactataaatttgcattattatgtatgtattttcagttttattatcacatggcaccgcatattccaatgagcgctctaagtttaacttatatatattcaatttctttagaaatcaaaccttcatttaactattttgtacataaatgaatacatttttttcttatttttttatgacgggtgtaattttaggaagagaatgcaaataatttgaaggaaaaaaaaaaaaaaaaaaacctattattattattattattannnnnnnnnnnnnnnnnnnnnnnnntattattattattattatttcagcatccgagtagttagcaaaaattattaacaactaactagtgccagccagtccaattagtttctttctctctaaatatatattttttaactaaaatttattaccgtgattccttttcaaaaataataataaaaattgattttaaaacaaaggaaaaaaacaaaaaaatacaaaaaaggaaaaaaaattacaaaaatacnntgggctggcccattaaacatttatacagtccaca

SEQ ID NO: 127137 - DNA, 1008 bp, Cannabis sativa
aatggggaggttacattatttttttcttattattcaatagaaaaaaattagaaaacataacaaaatagaaaaaatagagaaatggaaggaaaagatgtcacattagtgctcttatgctttcctttatttatatatatagatattttttgagggaatgtgttgtacatatacggagcagttaggctttagaattaatcccaatgttagtcataacaaagatgtcatgtgacttgagagctgggagttggattagagcgtatagtcctcagattaatcctaccaagcaatatccctcccaatttcatgatcaatgtagtagtagtgatgtcttttgtaaacctgtccactatgttagattgggaactcaaaaacccaaacgaaaacatctttcactctagtactattaggacagagacgagagagaaaaacttgttattattctttattgatctgaacagaaaatggattacatcattgaagacttaaataggcaatgagataaaaataacagaacaagaaaagaaataactaaaataactaactagctgaaaaggagcctaactaaaagaagttttaacacgcccccttaaggtggagtgtaaaatttttttacacccatcttggatacaatgtcgtgaaaaagagaggggtagagaggtttggtgaggatgtcggccaagttggttttagaaggaacatgattcatcttgatgctgccattgtttatttttttcccgaactatgtgacaatcgattccaacatgttttgttctctcgtggtagacagggttttcagcaatatgaattgttgttatgttgtcacaaaataggagagaaggtgtcttgatgttaatgtggaaatccttgatgatggagtggggccgagtgagctcacatgtggcatgtacctgttagaatatcttttaccaggatctagatttacaaacaagtatgtttttaacatcctaaatataaatctctaaaacgatgaaaaataaacacataaaa

SEQ ID NO: 127138 - DNA, 564 bp, Cannabis sativa
tgatgaaaggtgagaataccctataacacataattattactctataaattatcacttaccatcactaaccacaaagacaaattaatgaatttttacaaaaataataatttggcttgattattattattgatttgatttaatatttatttacaaaaaatataaaaacaatccaaaaactaaagtagtgtagattggtatagaacaaaaaagaccgacaatagaatcataccctccactccattactagattttagggcccaaccatgcattttgtgattttattatatgtacaaatataatacaacttgatattatttcttttcactctattataaatatcatacaataatatatatttataaatttaaaataaaataaatgtcacatcttttatgatcttttctatttctcatgatttggggtacgaatcattcattttctttttcttcttcttatttacttgattatttttttgaaatatttgcaccaataactattattattaaattatttaagaatttacccttacctattttaatactcacaatttaggtatttcttttt

SEQ ID NO: 127139 - DNA, 1649 bp, Cannabis sativa
ccatgaacgaagaaaggcatgagagaaaagcatatcggctagtgattgtgaggccccaccccaattctggactggaggggacaccaaaggttttgtatcccaattgagctatttgataagtacctatcattaaaggatgaaagtgattcaagcaactgaatttatctttcatagacataatttgtctccaatactaactactatttttttttttttttggaagaaccaactattggtttgagtttcataactccaccaatctttatcacccaagtacacactacgaatctgcttcatccacaaattatcttgcttaatagcaatagactaaatatatttccaaatagcagcaacatattccacttaactgttcttctaaatctcaatcctctttcactttttggtttgcaaatctcatcctaagagataagacttaggccatcataattagccattactttccataaaaaagcatgacacaccgcattcactttgtaaagtactttcgtagacaaaattattattgaatggtgttttgagtattttgaatatttttgttatataaataaattgaaattctatatatacacattttatcatatagaaattacacaatatatggaaaaattataagagtttacttttttattgtataaataaaaaataccatgagcttataggttttttttttttacatttatatgtgattttttttttccatatttttgtaaaaaaaagatagaaatctcatatttttaaaacaataataagttttcgtcgaaaaagtcacatgagctggaaaagtcaccggtgccagaaaagtcattgaaaaaattacacaatagataatatttatatatattttgaaaatgtagccttaataaaaaataaacaaaaaataattgactggttttacaaactttggtctcaagaatggtagatgggaaatgtaaaattatgtactaatgttcttggtaaatgtaatataataaagtagaaagtgatttgattttttttttatgagaaatgttaaaatttttataaatatttgtctgaaattattttattgttattggtgtaattaaatattaagtctcgtataatttaatttaatagctattataaaatattgctaactatatgcaaagtgcatgtaagctagatacactagtgtctaaaaacaatgttcattttcagtatatgtacaaatagaaagagaggtaaattaaaaaattgaagtgaagtgaagatatagagaaaattgaacataaggaaggaggactaggagtagtagtagtagtagtgtggtacaataccaaataataatgacaagtaaatagagaaattaaatgaatgcatgataaacaagtgtgggtggagaattaggtaggtggtgtgaatatcaccaaccaaccccacaatatgggacataataataataaaggaagtaactctagtaacatttttttttctttttattttgcaatattagtgaatagtgataaataattatattggtgaataagttatttaatatgtgtaattataatgaatacttctcattatatttaattttgggattattttataaatacataaaaataataaaaaatttacaaaaatacagttatacagaattttaaatattt

SEQ ID NO: 127140 - DNA, 727 bp, Cannabis sativa
agacatcgatcaaaatagtaggacatacatataaatttattaatatataattatagataatgcaatatgtataaaaacagctggtcctgtgtattgtctttgttatattaggctaaaccaagtcttatatacatcttgattgttgtgattataatagcatatcattcatggtctttctttaaatttaggaagacaatctgacgtatataattctcaaattgatttttatggacgacaaatgacatatattataagtatctggttcttcatatataattgtccacacgtttataaagacatctatttttttctctcttttttccttttattaattgtctcaataaaaagttaagggcatcacaaaagttgaggcctaaaaaaaagtcacgagctttttgttgacggtagtattcgtttagatatatatatttgaaaacaaacaaacaagaaaaaaaaacgtatttacgtttaaggaaaaacaaaaacaaaaacaaaaacaatagataataatataacgtacatacgatacgaacgtgattttcaaaactcttttatctttattaagtgagttcacaactttttatggcaaactttatacagtgtttataacgttccggccggtcagtattaaaatacagtcacttacggtttatttggaagttattgcgtaatatctattctatataaagtgtgcctatataactaaaatttttggtttttgagaaat

SEQ ID NO: 127141 - DNA, 1105 bp, Cannabis sativa
cctctccatccactatgctccctccttccaaacacaccctaagaaagggctgcctgtaaggccttaactttaccaataattggagttgaggctcctaagatgttagaatacagccctgcaacgacagttcctttactgtcaataactacaacaccaacacctattttaagattttaggaatcaagagcaacatccacttggagtttgaacatcccttcagaaggaagcttggtgtatccaattcttgatggtgatcatcacggttggggggagcaagggcctctaaattccaatgggagccacgtatttgaacttccttgtaatcttataaaagattagagacaaaaagttccacatctataaaagttcgtgaaggcttgttgaagatagctctgtttctttggttccacaccatccaacaaatgttagatagaagaggaagttgatccttatgtagagtatcaaaagttcttagtgaaaaatccgtcataatgactatttgtggagtacaaggagtgaagactagtgtgtttccatatggacttagctctggtacgccctagaatggcatgcgtaatcgtttcataatttttggccattgcaaagagagcaataggggtgagagatagatttttttatggaaaagattgatattacagggtaacacatgatggtaagctttcctaataaaatacttaattttggaaggaactttcatagtccaaatagacttccatcaggttttataagctgcagggttagaggaagagggagagggtgaagagaccaaggatttagctagatgatacgctgacttaacagtgaagatgcatgaggggtgacaatcccaaatgagagtgtcctccatagaggggcaagtaggaactttaaggatatcttccacattattagtatcgaagtaatctttaggcgatcaatgttccaagaaccattgtctagaatgaagtgtgagaccaaagagttatgagaataggtgccatcttttgtaatatccagtttaaaatagtatttaatttttcgtttggatattaattgtgcgaggataattaattcatttatttgtgttgttagtgagttgatatta

SEQ ID NO: 127142 - DNA, 663 bp, Cannabis sativa
aattaattgttgttgtgaggttggtctttctttgagaaagattgagggtgtatttgtcttgttcgattaatgaaatttttttttcttgatcaaaaaaaaaaaatatttagacattgttattatatttatcaaatgtgtaaagtgtaggatatataattactctcctacaatttcacttttttttttaaatatgtaaccgtcttccttacctataaatataaaatgctgatcaaagaggaaggatatcgaatcctattgtgctaaaactctgtcaaattaagtagaaaattctcaaaaataatattaacttataaaattagattaacttaattattatttgttttttgatgaaaagcgtttatattatagaataaaaactcagttagacctcacagtcgttacaaaatagagtttccggtatagaagagaccggtagggacccatacatctgatgggagaaggcccatctagccacattatgagcgcaaaattacatgttctactgacataagagaaattacaactattaaataaaggagaagatttagtacaaaataacaaattaattcaagcgaaaaattcttaaccttaattctaaacttgagaaatagtattttaaactaaataaactaaaaataagaagctaaaagtgattaaagtggt

SEQ ID NO: 127143 - DNA, 1005 bp, Cannabis sativa
aaaaggaaaagagaaacctgtagttaaggggatgtataacgattagtgggaaaattgatttatttgtctcacgctagacctaatatttcctttgcagttagtttggttagtaagtatgtgcacaatccttcgaaagaacacctagaggcagtttagaggatattacggtatctaaaggaagacaccaggaaagatttattgtttagaaaaaatgaagaaagaggtatagaagcatacacaaatgcagactgtgcaggttcagttgaggataaaagatcgccatctggatattgtaccgagttatagggaactcttgttacttggagaagtaagaagcaatctgttgttgcaagaagtagtgctgaagctgagcttagaactcttgctcaaggagtttgtgaactaatctggatcaaacgagttcttgaagaactaaaacttcaaaagtcaagtcctttgaaactatacggtggcaacaaatctgctattagtatagcacactatccaattcatcatgatagaaccaaacatgtagaggtggaccgtcaattcataaaagacaaaatggaagaaaaggaattatgcgttgtttttgtgcctagcaaacaagctgctgatttgctgacaaaatgactatcaaaagaaagcttcgataaccaagtgtgcaagctgggtatgtgggacttgtatacaccagcttgagggagggtgtagaaataatcagtatttattagattagttaaggtgttaatagttagttgaagtgtaattattgtgtaagtttgtacctatttaaaggtttctttccaatagtaaactcaagtgaatatttcttctacatttctacacaaaccatataaaaattagtgaagagcaggtgcataaacacacaagtcatatacatgctgcatatggaagtagcacttgtaaagaatgcttgcaattttatgttaatgctgcctgtttttcttaccagatgtattaagaatgatagagatttgtaga

SEQ ID NO: 127144 - DNA, 1582 bp, Cannabis sativa
aaaaaaaaaaaaacataaagtaaaccgggaggtacacccccacacttaaacacaatattgtcctcaatgaaacttatttgaaaaaaaaaaaaagacaaaaaagtaaacaaaaattccttgaacaacgcttcccatcactccatggcatctcccatgtcatgtgttgcctcatcattagtcccttgagttgcatatgtgttgtactactacatctattgtggtggctggggataagtagacatgtcgaccccaaggtgcatggcattcattagagcacaagcatcgttgtacattgtccactcccgtatctattgtcggtgttgcctcatgtcttcagtaatagaggctaacttttttttattcattcaaggcgttgtggtatagtcatctgactgggctcctcttcctctggtgtctcttccctagatgaggatgccaatgtcttctttgttttaagatccataaaccgagtcgcaatgtttctgtcaaaaatgtgctgaggctgcagactttgttctgaaatagagtattctaccccagctttagcacacagtgttgtaattagattcgaatgagaaaatccctttctgatatttcgaacatgatccataatcgagtgctagatgacacttcccacatcaatgaacttcttatgaagaatggcatataggagtttggtcattgtggtatcaacaatagaaaaatattttgttggaagcaacttagctctaataaattggagccaaatatgacattcatactccatgtcattctgatgaaagggccttaattctccatcttcagttcgaacccattgagagcccaatttgcaaaggcttctgatgataagatcataatcaggctcttgaactatctttccataatcatcatcctcaatgtctttgaggccatagaacttgttgatctcttggcgtgaaaaagacacatttttgccccggactttcacttcatggtttacatggttgacatcattggcataaaactcataaccattggaacaactacagcatcaggctgagcacaaaatttgaacaaatcttgatcactaataattattgtaaattggaagaaggaagttgaaagattgtcaaaatcaaatcttcgttctgcaatcatcttcccgccctgagtgatgtcatcctgatagaaggacttggtggaggagtcctattagttctctcgttgttgcgaagtcattcaacattaggtggaggacccattggttggtgcccttgagcttaagccctaggttttcctagtgcctgcttgattaccaggtgtagcattggcagtctgagcatttagtttgccttggatactagttctcatttgaacaactgctcgacggggtgtctatcttactaactcaaaaatacccctacgggaagtagttttgtgattagatcaataagatttttcaatctgctgagatatgttagctctccggtgttcttgctcaacacattggctgtaaatgttcttctagttttcacaaaccactgttgaaaccgttcgtgttgcttatggagagagtcttgcaactattgttgcaagtcagcca

SEQ ID NO: 127145 - DNA, 1449 bp, Cannabis sativa
  modified_base (160)..(163): a, c, t, g, unknown or other
  modified_base (1142)..(1145): a, c, t, g, unknown or other
aataataaacagataataaatatctaaattatatgtcaaaatatctcaaattaagcatatttcaaatttctacaaaaatatctaggtcatttaaatatttaaaatactatatataaatttatgataagtaaaattatataaaatatcatttttctaactnnnnatttataaacaattaaatatttagcaaaataacaaatttatgaatttgaaaatattatggttagaatatctataaaaaatatatatgttaatttcaaatttattaattatttaagtcatcttataaggtaatttcaatgtaatatttcaaattaaagataagactatcacttaatttaaatatacctaatattaaaatatttaaccttattattaaataatatataaatattaatgaattaacaaaattttaaaatctgaccataattaaaaataaaataatcaatttttaaatttaaacctctaaatatcagaaattaataataatctattaaaaaaataaatattattaatttgtaaaattgatatttaagtttaaatatattcaaaatagtattttatttttgaaattagagtttaaaaatttaaaaatctgaaattgtgtgaaaaatcacccaaaaattggattttaggtggctgcccacgagacaggctgcatgtagcctatcacccgcgtggaaggaggcatttgtagggtaatcagctgagaaaactcgaggcctgcagcctctgggttcaccatctgcagggtgataacgcacgcatcccgtgtcttagcaagaggcattagcgtgcgcttcagacagaaaatgcctgaatctgggcgcgcatgagtgtttcttgtccgagatgctggtgtgattggcaccatctcaacaccatgtgcacccagtttttaaaccttcataactatttcaatttttattggaattgggttcaataaaaaccaaaattgcttaatttttcacaaggaattcaaataaaatatttttcagaatgaaaataaattactttcgtagaaaagttttgtacatcacatacaatcatcaaataacacataaaccaacatgaacacatccaaataaataaagttaaaacattcatcattttaaatccatattacatgaaagtaaatcatnnnnatggctttgaggccagttgttgggaatattttatcaggatctagattgactaacaagtatgttcattaacattctccaaaatatcaatatctccaaaatgatgaaattaaacacataggagttagagaaccttacattagttgcagccgaatataatgactccttccgtttaaaatctctagcccttgattcctttctgacgtagagcattattaaaatctaaacctggatctctttcactccttcaggtttggttaccaccgtcttactcactatcattgagtacttgacttcctatgtgtgg

SEQ ID NO: 127146 - DNA, 909 bp, Cannabis sativa
  modified_base (847)..(847): a, c, t, g, unknown or other
gatattaaaagtttcttccaataactgatcctaattaaaatacaaatactcacatccaatctaattaaaatacaaatactcacatccaatccaactgtaactggatgcctaattttttgtaattagattgaatttgattggttcggtgtaattagatcagtttagtgtaattagatcatagatcgaatcacaatcattattgagggttaggaagagaaaatttgaaagttaggaaaaaaatatttgattacaatttgactcagtatatcattatagtttattttgttaaacacactatctacattataatttaactaaatagagagaactatcaataatttttaaaacacaaaaccaaaatttatatttactctattacataaccgcgcgaagtgcatctacatttactagttattttataaagaacattgcaaagggaaatgggaccaagatcagttatgaactcaagttttttcttttttgggattagcaaaatattagcatcattacacccttcctcaaactatcctgtatcgaaaaaatcacgaacaaaatccaccacatccctcccaactataggccaatatctttggtaaaaagccagagtcataccatccagactcgagctcttgtcgagatgcatctaaaagataaatctcttaacctctttctcagaaaccagaagactcaattcttcattaattatacttggcatgatcacagaaacacaaccacaattccattacaaaaatttctcaaagcattgaaaaaggagttgaaataattaatcaccactatggataaaccagaatcctaatgaacccagtgttggaatatattttaccangatctagatttacaaacaagtatgcttttaacatcctaaacatgaacttctaaaacgatgaa

SEQ ID NO: 127147 - DNA, 2321 bp, Cannabis sativa
  modified_base (45)..(65): a, c, t, g, unknown or other
  modified_base (2244)..(2278): a, c, t, g, unknown or other
aactttatatgtgtttatttaccgttttagaaagttcatatttannnnnnnnnnnnnnnnnnnnntgagtagatctaagaccctggtaaaataaattccaaccctaccacctccgtcaaaacaggtgattcaattcattatttatggatttttgtttttccttgatgagaataatggcgactagaatgttcccctccttgctggagttaatggccatcccaagttccattcgttcattactatctcttccaaatgctttattattcgacccacaattgcttatgtttttttacgtgttttctgtccgatctgtgcatgtaccggtcgacgacgatgttgggttcgtggttgacgtgctagctctagatcttgttgtttgatcttttcatttgtggttatgggctggcaatcgaagatagaattgagttcttgttttcgagttggtggtcgccaacggctatggctttggggttgacgacagctctctgtttgtgatgaattttttttttttttattgtttgtaatttttttttacggatgtgtaattttttttttggcagatgttttcatgctcttttatgaatttggtgggtttctatttatttgggttaaattaatgttaatacatttttctatgaatattttaagtaaaatatttgtactgtatttgttgaatcacagatttctacatacttttttatgacacttcagtttaaaattttaattttagtttaatgtttgtctttcaaatttttatcactaatctaatcccacttctaagtttcttttttttttttttttaaagaaaactataaaaatataattatgtatttatttcaatttttttaatctaaatatattatttttgttacggtaatataaatcaaattatcatttttatatataaaaatatatatacccatttaattttatatatatgtaccttccttgcttgtgggcccctatatataaaattaaaacaaattgaattttttttaaaaaataattaaaaataatatttatataaatatttgaattaaaataattaaatattatttattttgaaaaaatatctaatgtagtggcactttcttgtgtctcactatatctctaaaaatattaatagaaaaagaaaaaaaaggatatagtgacactttatttgtgttgttgttaccgtttcagtctgacaaaacttgactctatatgcctacagtgacgcgcagaaagtgaatgtaaaaggattcagtgacacatgtgaagtactaaaattgtctttctagtcaccctcattagtgacacgcattgaagtgtcactatacagttttagagttactcaatgtgggtcactaaaattcatttttctagtagtgaagcttctaacaatgaggatgaacatgaaactccaagtgctggcctcaggctagcacacgaagcgcgggctgaccacctagacatacaccacgactctcaactcgttataggttatgtcctaggtgaatacacaactcaatacaagaagataatggcttatctgagctattacattagctcaaaggttgtactaaaaggcaagccgcaaaagaagacacaacagccaacacagtcactcgattagccagttgcaccttgacaaccaaggtagactttgtacttgctcagttcttaaaagaacttaggttccctagttcaaaataaatagacttgctggacaatcaacatgaatacacatacagtgggataccttaaaggaaaaattttgccagaaagcagggattaggggatggttgcacgctctccatcctccacagcataacacacagaagtgcaatcccaacaccacctctaaggagcattaccaagaaacaaggtaagtagctattgatagaagtgcacaaaggctctacagtaattatgctggggggtaaagccaaccgagtgtagtcaagttcaaactgcagcatcgacttggcctcttaaaggctggccgaccatagcatcatcaacctagccgaccatcacctccacaagttggtcgaccatagaatcaatgatttgaccatccctagcttcctccaaatggccaagcaatgctccaatgtggctggccacctagtcttgacctggttagcccaatccaccagcattctactctcatacttctggtttatagaggctaagagataaacaacatcttactagcaagatcccttggcaaaagggaaagaagtgttgggttttatgccnnnnnnnnnnnnnnnnnnnnnnnnnnnnnnnnnnnttattaatatagatcagagataacatttaatgttgcatggttc

SEQ ID NO: 127148 - DNA, 757 bp, Cannabis sativa
agttaatgaattcttaaacaaaaaccactagaacttatataaaactaatatttacgtggctcgcaacgtaactctcatctagtatatctatatatgtatatatacatttatttattatgtgtgtttttgcatgtagtatatgtacatgtgtgtgaaagaagattggatcatataatattgagtagaaaggaaattttgaggagaaaaagctaacaaagcagtgagaaaataaaatatagtagtaaacaatgtcagtgaaaaaaataaaatatagtaaacaatgtgtttcataaaaaaaaataagcataatataacaattaaatttaaatgtagcctaagagaaaagaggttaatgaaagaagttatgattaaaaatagcacagtaaatcattgaattaattgtattgatcaataaaaaaaaaattataaaaaataatgataatacattcagagctttctttaactattcttggtagaaacccaatattaatagggcttatatacaaagtaaaagtaaaagaaaatctctcaattaatttagattaaaaaataagaaaataaaaaattagtggaaacttaatattactagagtttatacggttgtggtattgtagaattttagttatatagaatttatttatttatattatttaaaaataataaaaaaattaatttatacggattgtataattttatagtaatttttatagtaattttagagtgtcacatcaccgcttcatacttcttctttatatat

SEQ ID NO: 127149 - DNA, 703 bp, Cannabis sativa
ttttttttttaatgaacaaaaatgaaatcatgttatatgtacgagttgcccaaaatggggtgacaatcaaaattaatgtgaatcattgaaacagctggacccatctctgttatggttaatggtcccccacacactttccatcttcaaacccacccaacaactcttttatacttcccacaacactcgtccatcccaccgtccaccatcttaccgttaccatataacttttaatccaacgattcatattaagccacgtgtcaattatagtgttgaaagcttgaaacggctactatcccttaaccgtgtcagaccgagtcggtttactcgctttcgtataggtcagttccaagtaattgactataaagacaattgaatctaggccgttgatttttgccagatcattcacagaataaacgtctcgaaatccaacggtcatctcaacttttgctttttaaactcttgagtcctttacttttctctataaatagccttaaaaaccatttaagtaactcataactcaaacaacccaattcttcttcttcttctttacttgtatctctctaaactcagaatattcattctcagagaaacattcaatttctcactctttaaaatggctcgtgtaagctttgctttggttgcagcaatggcagcaatgctagtagtctccaccttcgcccaatccccggctccttctccctca

SEQ ID NO: 127150 - DNA, 954 bp, Cannabis sativa
tgcaacataaaatgcagtttctgatctttattaattagtaaatctgattataatgaaatgagttttatttaggacacaaaacccaacagcccaatataccctcattctttacttaagtttagcatataatttacgtacattaacctaagaggtctaatggaaacattatctataaaagtgggtatatcttaaagaatataaaaatgaaggtaaaaattaaaacaagtaaagtaaagtggatatacaatgtaattttctctatattatattataactatattatggtgctatgtacatgctcttttaaaaaaatatatattatgtgaaatacagttaggtaataaatagttcaaatgaattagttattaagttatactattaaacaaataatgatataatagttattttaaaacattatatttacactttaaagttttatatttacaccttaatattaaaaaatatgaacttaaattaaattttaaaatttattcttaatatcttttttacttttacattcttttgtattaattttaagaatattttcaatcttgttttaaatttgtaaataatttattttaaatttattataattgtaattactaatttttttttaaaaaaaaataaataactttccttatagatatcacaaaattatcaaaagaaaaataatataaaagaaattaattaaatattagtattaaatatgagagaaagtgccacataatgaaataaaaatatctatatgtacagacattttttgtgactctacttaagcattatcctataatattaaatataaaaaatggagctctctaaattctaatttcttttagagaaatgtaagcaaatgaccatatttctaactctatagatagttaatgtcctttttaaaaataataaagaaaatgtcattttttactttttaatacctaaaataccctttattatata

SEQ ID NO: 127151 - DNA, 787 bp, Cannabis sativa
agtgtgcaaacactttgaaaaagaataagaaaattttcaatgtcacttggagtgatgaagaaaattctaagaatgttgctctaacctttgttatgactattgtattgtgtgattcacaggtgagagaaagatttgtatttttggataataccattgaaaaagaagcaactaattcagatgattctaaaatatgtgaagagtctctcgctgaatcatataaggtcatacaagattggtattttcgttggtgcacccccatccactgctgctgcaagttctagttctgattctgcagatgtgcgtgaagtcaaacaagaagtcatcttggtgaataatcgtttggctgccatggaggaggtttagcaagagatgtcaaagcaattgtccaccctaatcaagctttacgggacataagcttttttaaatttctttatctgtgtctatttgttggacttatttctatttatatttatttttggccctaagatacacaaaaaagggggagtaatagtttttaatttcttactttgttttctcaactttggaccctttttcgagggggagttgaggttggtacttgtgttaaacattggtttaaagttagcattatatttcagtttaatgatgtgtttcttaggggaatatttatatggtgtagctaactttgttttgcaagtacaattttgaaggggtgttcataaaaatcgaaaaactgaaaccgaccatcaaaccgaccagaccgtaaccgaattttcggttccaagtcatcactgaatttggcggtcgg

SEQ ID NO: 127152 - DNA, 974 bp, Cannabis sativa
tcaaaccgaaacaaaaaaaaaattacagtggtccgatggtcggaccatggggtccgaccaattggacccatcggaccccatagtccgaccatcgaaccccccctctcttttcgtctctctcaaaccgaatgaaaaaaaaagccccaggtccgatggtcggaccatggggtccgaccaatgccgagatagagagagaaagagagatgcagtgagagtttgaggggtatttttggggttttgaaaaaagtgtcatatttttgttagttttaaaggtattggtttaagaataaaatattttagttttttaagtatagaaaatcaaatttttcaaagaaaattgaatgattcagttactattttcttctttttcaaaattactttgctaataattatatatattttttcgaaagctattaatagttatacattaatggcataaatattataattaaaattaatatttgtaatatattatttactaaaattatttagaaatatttcaaaaaaaattatttaaaaattaaataataattatttaacttgttactttataaaaaaaacataatcagaatatttaaattaattaaattatctttttgaattaattatgcgggagttattttgtaaaattatattttaaagaaaaaaattattattatatatttaatattaaaaaataataaaattattacctttatcgatattcttaaaataattagtggaggaagtattcttttatctcttatttaaacaaattttcactttcttaatttttataaagtaatcaaatgcagaagaataactattgggtgattctacaatgcaccaccttaaaagagatgtactgatgcactcatgacttgtttcgatgtccagaagaattttttggtctaatttttttttcatatccatgtacgttatagctatataagataacctacaaaattttgtaaaattcagaataatttacaata

SEQ ID NO: 127153 - DNA, 702 bp, Cannabis sativa
gtaaaataatttccaacaagtaccggcaatgggatccagttgttgttactgggggctgctgcccttgagtccttccttcagtgggaggcgccaagggagggtcgtcccttggaggcaagggcctgctattcagatccatcgggatgtttgtatcagtttggctagttgtggtggctagacttgcggcgcctgttgtggtgacaggattggccacatctacaatgttcatagcagttccagttgtggctggagcatgaacatcatgatttgcagtctatgggtcttgagggagactcgaagatgcagacggtgcagtcaaagttcttctcatgttaaccatggcatttgatcaaatacggtatctatgctctcaatgaaagcaccaaactattaacgttggaaagtggtcaatcgacaacgtagttgtatgaatctgatgtttaccacgtgttacacaatcagaatcagaatgtaaagaacaaacagaatagttatagaggttcggcccccttttgatagcggataatgatctactcccctttttgttgtattgataccgagggctaatactatttagatcgctataggtgggatctgatatagcacccttgaggatacaaagtaggaatcgagattggaaaatctcgagtggtgagattgcttgttgttaggttatttttagtattaattttagattaagtt

SEQ ID NO: 127154 - DNA, 1001 bp, Cannabis sativa
tatgttaggccttttaaataggtgtatgggagcctagttgcaagtcaattatatgtttatatgttttatacttttcctactgagtttgtcgactcacaaatattttgcctgtgtaggtagaggaaaggcgaaggctgagcagtagtgagtccagagcttgttggtgactatacatatcaggatggttaggtctagagagtttgattttttgggacgacatgggctcatattttgtagaaaacatattttaaaatcggttataaacttttaataggatcatggagatttatcaatatatgtatttattaaagtttaagtataacattttttgagaaattctttgattagcaaaggtgttcataagaattggaaataaaatatgatgcacccatggctgttataagcttgtaattaggtgtgaaatggattaaataagatggtttaggggttacataaaagttaggactgaaaactactttaggcgacattatgcctaattctaggtgacatgtagcctggtgtaatttcatgtaatgcccgacatacttaggcatgctataataattttctaattactttccatacctttgttattcaaagggcttcttgaaaaatgtgaaaaattaaaacttttaaattaaacttattttaataaatatataatttctcataattttccaggattccatttaaaaggttataattgtatacaaaatacatttttgtcaaaggtgatgcccaaagtccacaaaataaaagctcatgttgtcgcgagactgaaaactccagccctaaccatattgatatgtacaatcatcctcaaattctggattcactgatgttcagcctttgccttttcataatctacacatgcaaacatatgtgagtctagaatcagtaagaaaatcataaaacatataacgtatcactgacttgtgttgtgaaaatttatattgatttataatttaattgcgcaagtgtacacaatcacaaacaagtaa

SEQ ID NO: 127155 - DNA, 916 bp, Cannabis sativa
atatatatttatatatagttagatgcaatccacttatacttataatacttagtatgtacatttagtttttttaggtatggtattttaacttttagttaatatataataaaaatagtaaattaaaatatatataaattaataagaaaataaaataaaatcattgtttaaagttttgaaagtaaatgcttattagtaatttataagtaatgtttataatgatgttttttctaattttctatcgactcaatatagagaataaaaaaaattgtatttcacactttttaatttattgtagcaactaatttaacttttttaaggagtttgtgaatgtaacaagaagtagaaggaaaaaagagctagaaacaaaaatagtgtacactgaattctaaatcgtgaagctttaaggagtacaaggtgcatgctaaataagtaagaaaataaaattgaattttgatgtggctatggctcccaactttcataaaggaacagagaggaccacttgtatacacctgcaagaaattagggagtacgtgaagaaagaacaatagccaaacaaatctaatttacaatacttataagtagtcatataaccaatctataactcaattcacaatgaagactcacattcttttttttttttaataaaaatcaataagatttattaattaataagttaattagttcaaaacaatagaacgcacttcagaggaacagttctccagttcaagcacacgacctgtagagaaacaagagtctcttgccaagcaatgagccaccttatttacatatcgttttacaaaacataaatcaacaaaagatagagccaaaagcaaatttagaacatcttgaacaataagaataaactgtgaaagcataaaaataccgctctgaatcgcttggacacacaccaagctat

SEQ ID NO: 127156 - DNA, 730 bp, Cannabis sativa
  modified_base (71)..(81): a, c, t, g, unknown or other
taaactttatatgtgttcattatcattttagaagttcatatttagaatgttaaacaacatacttgttagtnnnnnnnnnnncctggtaaaataaattctaacactttatcaatctcctatttctgccatacatgcttaaaaatccctcaatcacatgattggaggattaaaacccagaatatggctaactaaggtagagttccaataatgaatttcctcaactttgtcttcttcacaaatcttagcacttttaacttagcaatttgtgtttcaaaatgagtaattggaaaagaagaattagaagcctcaccttaattttattttccaccagatttattcgctcgagcgccaattatttcaaaaaaggttgctctcattttttattgcagaaggtgaagtttcgacgatttgggggaaaggcgaattcccactccatcgtcacccaccattgatttcactaaaatttgtcgaaaatcaatctcaattgaaccaaccaggaaagaatcccaaacatctttaaacttagagtctaggagctgaaccgcttctactcccatcaattgatccattgattttttcctttttacaatattcgaagaagtcggtcccctcttcttctttttcctaattgggtttattgggaatttatgccctaaataaaacccctttcaatataatctgatttgttatcaatagaagattagaggtcatttatgtttacatgtagttt

SEQ ID NO: 127157 - DNA, 1105 bp, Cannabis sativa
ccactgcaaaagatacccacctgtgtttgtgacgtgtttgttttatgtcaataacgaagtaaggcatgtgactcctgaaaaggtcagtccattgttattagtgccttcactaataacaattttaaaatgtcactaaaactattttaaatattataaaattaataaaaaatatttattagtcacattttcaattatcattaaaagtaaactacttagtaacatttgattgattttacctcataactatttagtaacctttgattttacttcacatgagcatatccaatattttttataaatgttactaaaattataaaattgtgatatttttaagtgttattaaaactcatttttagtataatgccactcactacaatcccaacaccataattcttaataagactcgtacacaaaagatgcacatcattaatttggtagttgacaataaaaatgaatcaacagaaatttgttaccatagatgtaacaattacctatattataaattagtagctacagctatcaagataacttgttaggttagaggtaaccagttaccatcaggattactggctactattatattctagtaacgagtagcctatattatagtaatcgattaattgttattcgttactatatatcttagctaacttactactttcttaccataatggcttcatgtattatagtaatcagtttcagagacttaaatttagtatcatatacttaatagttaatacatgtggtgttcaattatcattacaaaatacaattagtattagtgataatattttagtcacaaaaaattaattttttataattaaatatgacttttaatcataataaaaacttatttactactaaagcataatatttaaatataagttgtcactaatttatatttaatcacaataaatatattgtgactaaaaacacatttagttacaacaaattgtaatttttgtgactaatttttttagtcaccgactttttaattataattaatataagaatgatgatttataattagtcaatttttttataaaggattatttcacaaaaatataaaaacaacaaaaaattacaaaaatacgatttcacggaa

SEQ ID NO: 127158 - DNA, 1041 bp, Cannabis sativa
tacttgtatagaataatgtatataatatacaatttttttaacttaccaccctatataacaaggcaaatatatatgtgtcacttacttctttatttctttccattaatttattttttaaaattaaaataaataaaggtcacttttttagttttgaataaaaataaaagtcacttttataagtacaaacttttttttaaaaaaaataattttggagaaaaagaaaggaagataacaacctgttattgttatatagtgtagtggtacaaatatttttgttagcatttttttttttatttgggtcgaagattcaaattctactataatctttttggtaagagattagagtattttttttaactatgttctcttaacgtattaaaattattaaatattaattaaagaaatataattggagcaagaataataaaaataaattttttattttaaaattttaattattttaattaaaatttggctaaaaagtaaaaagtaaccttagaaatgctcttatacttaactttgtgcattataaatattccaataaagagaggatgaggtatatatatttttaataagatatgatcattttttattattattaagaaagaaagaaagatgcttaataaagtgataatttttttttttttgggttacaattgtagaaagccaaccaagttagacaagttttgacactaataaacgtgattagctcttggaaatgaaatagcataaataagacctctttagtcaatttttcattatgttccaataaatatcttttacattgttttgtactttgaaacctatgaaacttacaaacacacaatttttattattacaaatgaagtgtatattatttaataattcttaaattttattaattctcaatattataagacataataatgcacacttgaagaaagcctcaaacttcttgagaatgagagaagcaatagctaactattactggtggactcagaatttcattcaaataagccagaattgtaatgtatatatctttatatattaaaagtgtctgtc

SEQ ID NO: 127159 - DNA, 772 bp, Cannabis sativa
ggagcgttagcaccagtcgctcccctgggagaacatcagcagattcctggcctgccaccgagacccaatggaagagtaggtataatctctagaggaccccatatcggagggactactcgaaaggagtgttgctcaagctatttcagagcttaccgacttcattctctatttttagaactctgaattcaattggccagacttccagttttatggtgtgacagccctaatattgttttattgacagctaacccagtactacatgctacaacaaagcatatcgagttagatttgtactttgtttgtgaaaagatctcatagcaattggttcgtgttaatcatgtgcctgctttagaccagattgctgatggttttaccaaggctatctccagttctcgatttgctttgtctcgtcacaaacttggtcttatgtatgcaccaattctaagtctggggagagtgtgaaggagattagtttgttagtctgttaaagtgagttagaatggtagttattggtcgttagttgttagtttgttatacaactgtgaattctattttgtaatagcttgtatatataccattgtgtctctgttctaatgaatatgaggctattctttcagtcctatctttctcttcttctttttcttccttctttctctttctttcaccatggttagatgcaagacaagtgttatcggcataaatttaccctccccgcgagaaggacttgtctatagagaactcactgtattgaaggtggctcgcaatattatag

SEQ ID NO: 127160 - DNA, 757 bp, Cannabis sativa
tgttttctgttacgctgctctaatggcagttctggaactctctagcgggttacatctggagttactagttcaatcctgtttcttcttcttctggatctaatcctgttttttacctctttggtgtcgtttcgattttattttgatcttgctttctttcattttctttgtcgttctttcttctctttgacttgcaactcttctgctactcttgctttgcatttattgctcttaatgcattttgtccttttatccttctgatcactcattaattgctctttcactcctctacctgtctattaattgcgtaagatctcactaagtgtgtttagatttagttcttattgtttttctttgttttttcttcctccttcaagtcttttcctgttccaccatttatggtagccgtcgtcttgagtcgttctaggggaggctatgattattcctaccacctatgggatttgcatagatttgtcgacaagatagtttcagcatctccatttaatcttccacaacaagcttttcatcttcaggtatacctctcttttttctatttaaaaatttggattgttgggaggtccttacttctccacttctcgagtcttgcacgcattgttttttcactgtgttgttgttatacccaaaattcggctaccttctcagtgagggacacgtgtcaggataaaaggaatgttgtaaagaccgcttagcttaaatttagaaattagcagataattagggtttaattatggaaattatt

SEQ ID NO: 127161 - DNA, 1049 bp, Cannabis sativa
caatggctggaggtatatcgatctatcattgcatatattatcgatatggttacagtttatgttctgcatttcatatcgtatgtatatgctatattacatatactatattatagtctaacattaactaataacaatcaagagggaatggaaaaaaaaaagcttgtagttcgtgctataagaccataagatatatatttttttagttatatataaaagaaaatatatatgtttttgagtaaatttacagtatacttcttaaatgggttattttagtagattctctagttgttttggcatacaagatagttttttagttcaattcttttaatgattgtgtacgttatagttatttagaattatttataaatttttaaaaaattttaatttataataccaaaaataagatttatatattttattgcacgcacgattatttttttatacgcataataagtaactgtttaaattttattttcgatattgtagagtattaagattttttttaaaaatttacaaataatcttaagtagcaataatatatgcgaacattaaaaaaaaattagactaaatttattttttaaataccaaaatgtctactataaaaatttcatatccttttatgaatgtgtcttaaaaataaataaaaacaaaacgaaataagagtaataaaaacatacatgtcaaggtctggtttataccattatcattcttttagaagaacatgtgataagttcaataagtgcatacaatagaatatgctatatcaaaatctcccaacttcttggaaaccaaaataaaaaatacattaaagataagctatttggatgttaacaataatcttaataaatctttacttaaaagaataatacaacatcttatagtcaaaactatttaccttttatcttaattgctccaccagataaaggaagatacttcatgaacctcaagaagatttaatttttttttcttgtgaggaaaatgttctactccaattaataaattagatgatatgtgaaaaatcgtgtttttgcaaatgtcagttgtatata

SEQ ID NO: 127162 - DNA, 906 bp, Cannabis sativa
ttatggtaatgttgtttgtttgttgatttctggttgtttaatggttgtgaatgtttaaatttttctaattttttttaagaaaaaaactgaagtcttcaggtgcgtttggtggtgattctggtaatcaggttccagaattttttgaacacgtcatagtgttgcctcccaaagaaagaatcaaatctggaaggccaaggaaaagaggaatgacgacatcttgggaaacaaaaaaatataacaagtgtggcaagtgtggacaaaaggaacataacaaaaaaatgtgcagaagaattacatcatagaagtaaaaaaacaactattcagcaactagaaaataactataccaaaacatttagataaacatacatatttttttcattagtttttttgttatttttaagtggaactttttatttggtaaatattttcatttatattacagttaagtgataaactatttgcttgattcattaaaagcaaatttgctattattgtatgtccactcttgcatttgtgccctcaagcactccattaatgttttaactagtgtttccctggctgcaaaatttgctgagttgtgcttcagctatgttagatgtcatagttgagtacctgtaatttaaacagattttatcatcaatataatttttaatctaactgatatgcaactctaaaaaaaaataccaaaacaacgttttcaatagtaattactctatcatatattatccttttttataattgattgttattattttacatgttgttttttgaatgatagcttgactatttcttatggccaatttttcccaaatcattcggtcttatgcgcttatccaagttttctagctctctcatatgaaattcgaactctatttctgtgtaagcttttgctgctggaaagaatgg

SEQ ID NO: 127163 - DNA, 1727 bp, Cannabis sativa
ccccgagaccccttcgatgttgtgggtagccatggtgtcacgaggatgtactcatcaatgtttgaggatgccattacgtttatggtgggggaagtggcatctacccctagaataatttgacccgtaggtgtgtggtgatcgtttatcccacatatgagggtgttagtccaccgttttttcttggaggcaaccaccttgctcaagctaggggtaaaggtgattgttaggcatccattctaatggtcacgaccacccatcatgactaacagtccaccccaacggtcatgactttatatattctccattaatcaagtctcagtatttccgtaccacgtgccgttactctttccacatcaccatcgtcaaaatttaggtaaacaaaagtataaatcattttatgggttctttctcactcaaccgacctctcactctctctttatgcacttgaaacttttttattggtcttgatatttttgggtgaaaattggtagcttggagttgatttcttgagggaaattgtttgtttaagcttggtgagcacttgaggtagttttccttttaatcttatgttgttttagttttgaaatttgataatagatgattattgcatgttgtgagtttggatgaagtttataggtgaaagacaagggttttccttgtgattatatcttgtattctcaaacctaagtttttggatgtgtttttaattgtgtttgtgtgttgtgctgagtacttttaggcttgagaattgaaatttcatgtcatttttgtatattgacgttgctatggttaactttgagatttttgctatgttagctcaagtttgagttaggtttgagcatgtgaattgtagctttgtgttcttgagctcatagatctttgattgctaataattggagctttgattttgtgaattcaagcatgttatttgaggtataatgcctagaatacacattttttttatttaagcatttatatattacaatgcataccctgagactcgtacctaagacctccaacacccacgcatcctcctatggccacttgagatagcctcaagtggtttcctagaaaacaccttagtttggcttgaattttgtttgctaattatttagtaagtttgggggtcaaattggcctaagtttggattgggttaaacttgattttctaggcattttctgggttttgaacccagtggttgcgatcaagctcaaactagcgagggtgagcccctacctaggctctggtcgcgaccaccacaagtctggtcacgaccaaatgacaaaggcagttcatttttttgctattttattttgtgaacaattttcgactccaaactccgttttggaagttctatatatcattggaaagctcgttttgagctctattatttggtctagtgttggagtattaattgtgaatatttatggatgtgatttttggggatttaaccgtagtttgtaaaatcttagaattgtgactaggataaccggcgcttggttagaatcaccagtgcatcgagatttctccacatacattagaaatcaagtaagacagtgaactaagtacatagaatatagtgcagtggctcagtagtacattatgttattgttattgtgaatttgcgacctggggttattaccctaagtgcgtattattataaatgtgcaataatttgttaattaaatatttgagtagtacattatttgattgttattgtgaattcg

SEQ ID NO: 127164 - DNA, 627 bp, Cannabis sativa
tactgaaccatcgacaaagctggcaaaagcttttggaagcaactgataatattgtggaaatacagaacaaaaaggagattaagaggttgttttggcaatgcaaaaaggagattaagaggctgttgggctgtgttttgagttttctaaattgtgtttttaaaatcgggaataaaaaataattttttatcataatggtgtttggtttaagttttttaaaacaatatttatatattttttattgaaaaaactaatattctataccataccatgatatgaatccatctaaccctggaccaaactccgaactcaaacctgaacttgaacccggattcgggcatggccccggacccgacatagatgcgcactcggactaggacccagacttaggccggggttcgggtccagtttcaggtaggggtctagtgtccaatgtccggggtctggatcgaggtctaggtttgtgtctaggtacgagtccggagtccaggtccgagtttgggtttcggggtttgggtcaggggtccaggtcggggtcggggttcaagtccaggtcggggtcagagttcgggtccaagttgaggtcgaggtccgggtccggtccaagtttcaaggttcgggtctagggtc

SEQ ID NO: 127165 - DNA, 1762 bp, Cannabis sativa
atacagatatgacacttaataatttgttagcagtttctcatattattcgctaaattaaaatttgtagtattaaaatgcaccaataacggtgccaccatttatgatgtttaacacctctcttagtatttttctatctttaatggatggtgtttaatttgaactaaaaattgagtcaaaatatatttggtcaaaattgcgccaaatatataagttttttgatagataggtacaacaatgtcagcaaaagccttaattaatttttattaaaagtatataaaattctattaagtatataaataaaatataaaaagctagtgattaattatattaataagtggcaaaatagtaaataagaatgtaatatttattatttttacttgttgtgcaccgtttaggtaaggttttagtatagtatgctctttatattttctcaaactaaataagattcttagtaatttgtagttttttttttttttttttttgttatgtttggagttgtatattttgttttatttgtaccaattataaatatttttaccattttaaggcctcatatttttttccctttttcttaataaatctctctcatttttttaactaaattttatcttttaaactattttttttaaatcttttttacattttttttaccattttttctcctatttatttgctcctttcttttaatattttttttatatttatttatttattagtaaataaataatagtattgaagactatacgagcatacatatgatattaattttcattacaacaaatctaacttttaggggcgataattttgaggagacaaaacgttgcctctaatagtaaagttttattattgttgcccctacagaaaccaatttttttttttaaatgtgggaactttaggggcgacatatgtcgctcttaatacgttttgaagcgacaaacaacttattaggggcgacatataataagttgaaataaatccgttattgttgggcgggaattttcccgctcacattattaggggcgacacatgtcgcccctaatgccctgccaccagacatagttaaggcattgtcgccccaattgtagcctctaatattgtgcacacaaaaagtcgcacaactcatcttaccgatccatttcttcttcttcttttctctaatcttaaaccccccatttttcttctgaaaaaaaaaaaccccccatttttctgaaacaaaaaccccattttctcttctcctttcctctctcagtccttgaattcagccttcatagccatgaaaactcaggctccgaaaaactcaggtacggctgtattatgaatcattaacgtttttatgtattttgttcgtatttttgtttttctctctttttaatattaaaactatattttatatataattattttctctctgtaatttttttgtgcgtgtattatatatttctacacgttttgtcctgattttaatctataaaaacttgttaatcagtgtaagacccattttctcaggttccagctttcacgtgggttttggctagtttagttgtttgtttttcatctaaagaggtagagtattattattattaaaattattattagattacatttttaaatttgtgtgtgtgtttttttgttaaatttttctgtgaaattgaatattatttatgtttatttatataaatcaaattaattttggagctatttttaaaaatatgggaaaaaattattaatgttatgataaatatggcataaaaagtaaatgcca

SEQ ID NO: 127166 - DNA, 689 bp, Cannabis sativa
tattgtattcttagtattatttaatacagtacaacatttggtattgatttgtattaattgattgtgtaaagttataatatattttcaatacactcgaccctaacaccaactacaggttcgggtccagatctgggtcttgagtccgggtttgggtcggagattggtgttaattccaaatctttgtaaatattataatacaagctaatacggattatttgttatgtattaaataatgcaatatacattgtattaaaaaatttggtcgtaataattattacaatacactgctttatttaaatatagtgttatttattatttaataccgtatcaaatgagcactaaaggaagtggtatagtactcaaccatttgcatataatacatggctttgaccgaaataaatttaaaattacaagtgtggaggatgctggcattgcgaaattcatgcatgctagcttgtagctactatttccaaacctattttaataaagttgttattagtttttattttaaatattcttcatcttttatatatatttaatattaaagatatgagcattgtaattaggtaccagtggtacctaacatcttcttgatatatcgcgttgcgattgattagcgatacttcttaaaagctattatattaaattatatgggactcgatgcttagttggaccaatagcgatattaa

SEQ ID NO: 127167 - DNA, 696 bp, Cannabis sativa
gtgatattcttattattttagttcatgatcatggttacaatctccgctatgaacacaactctagagcattacaaagagaatcccaacactctcaacttgagtactccaagaacacaacttgaacagttctctcaagctctctctcactctgtttcttctcacctcactcaatctaatctcataatttatatcatttgcaaaatgagaaccttaatgcctttatataaacaagctacatggaaagaaaacagaaacaatatcagcctaagtaaccaagctcaggagtgaaaacataactgaaaaaactaactgtccaagacagttggaaccagttctaaccaatgacagagtttgttaaattaacatgtttctctatttagattatcaaaaaactacaaattccaccttaatcaaaaagagtaaacaaggttcaaaaccataagggggtaattcagctatcttaggtagaagttacatttagcaaatccaaacagtattggaatttgctaactgatagcacgtttgtacctacatcagcaaggtttttctttacttgggatcttttctaactcaacttatccttcttctaccttgtctctgatccaaaacaacctcacatcaatgtgtttggatctctcatgatagactgtgtttggctatctggtttttgatccccctcgtatggaaatagaaggg

SEQ ID NO: 127168 - DNA, 995 bp, Cannabis sativa
tatatttattttttataaaaaaaaaaggtccaaaaagatattttttttctagggctcaaattaacttagggccagccatgtatcctaactataaataatactatggaccataatactaaccgtattcagaatttacaaaatcataataaaataatacctaaacacaaattaaattttttaaaggaggtttcccaaaaatattggattttgaataaatgtttacatttatactaccacacagcaaaatttatatttttactgccttggccatatttttttttctttaatattgtaaacaccaaaaataaaaaacgaggtcatcatcttccacactcacggatagaaccaccatagcaacactacaacacccgaaaaataactattaattccggcgagatgaagcagatttattaaaaccattaatactaagattggcatagtttttctaatgttgttcttaggttgtttcactattgtctcgtatgtttaataaatgttggttttaaattgcacatgttaaaccaaccaccaatatttttattttgaggtataaccaaaataaaagaattatggagagtagacctcaaagagagaacacacacatgcaacaggttactacacaagctctgttcagattacgacactaagaaaaattggctagcaactaattaaggagcaatgtatccaataagacaccaaaatgagtgggatatagcacaaaatgtgaaagatgtaatagtcttacctcccattgaaagggtgaaatctggaagacaaaaaaaagaggatggaagttggctggtgtggtaaataatccactctcaactaaacctattctgatatccaaatcagatggaaaatcagttaatttcagttgtacccattcctatttagaaagttggttagttagttaaataactaacttgtctcaagttgttaagtgctggacatgtcagccactaacaactatatattaaactcttgtttgtaatcag

SEQ ID NO: 127169 - DNA, 1871 bp, Cannabis sativa
aatctagatcttggtaaaataatccccaacaaactgttgacctcagaaattggccaactgacagtggagagtcgtattaaactgatgcttgccacgtgttacacaattagagctagataataaatgaacacaaggatttatataaaggttcgaccccattagttagcaagtcatgacctactccccttttgattactgatacagagagataatactatttaaatcactataggtgagatctgatataactctctttaaagttacaaagtatgaagcagtaggcaaatctctaatgagagagagataggaccttggaggcgtgtgagcgagagaaaaagagaaagccctttgggcgtgtaggagagagagagaagaggattatggtttcagacttagagctttatggcttaaatgagatctaggggttgagggttgagttaaggctctttatataggagagcttaaattctaattagcaaataaaataagagatattcacatattaaattaataaatacaaaagaccaaattgcccattgaaagtaaatattttcgtagcatcttagtgggctgccaaggcccaacttgtagcttgacttgctgtccacagataaaggctgcacattaatttcctgtaagggaaaagcgggccaaccatgcacctgtaggttgaggtctatctggccatgctactgccaggatctagcaggtcatgtgcctgccaagatcctgcaagtcatgttgctttcagctttaccaaaaggaagccagcctttggagatggaggccaacctttgtacaccttttccttgcaaaggctaggcttccttggtcgaacgaaccttcccttggtctgaaagtcaccttttgggcgaccaacttgtgcccagatcttggccggcctatagactccccttggctagccagacatggtggtacaactctttgactgctcgcttaacttctttcgcttgctgcttaatggttttgccatgccttgcaaggagactttgtcttgctattggcaaggctgtattccacatgtactcttgcttggcttatgtggacatgccacgtcaggtggataaaatttgggatgatactcttaataaaagcaccaaaatattgacctcgcatttagccaatgacactgagtcttgaaagcgatatgaaatcaattcgattaaatgagaaaatatttaatatcaagcataaactaagaacacgagattttatagaagttcagccccattatttggtaatagcttactcccctttcagttatatttcacttgtgagaagagaagcaagaacaacttaatctatctcgaaagctttctgtaggtatttgagcagcgtcaagctttcttgaaaatatgattttggatccttgaatagtgaaattgttccactatttatagggaataattacaatgagaaaaacattttttcaaaagctggcaagtcataaaagaagaaactaataactttcataaattgtgacaattacatatagaaattctctaaaattgaggtttgactacatataaagtgagaaagtatctttaatgaatttatctcatgcgattgccctaatcgggtcacttgagacgctgactgtttttctccgtccaggttaaatccattcatcccgtacgacaagctttaccttgtctatttattattacatctagcaagttatatatcttaggtggacactcaaaagaatatttccctcacccaagtctcaatgtcataatacgtgttacccaaaaaacatactacgggcaagtttggtacagttgtgctgtgagaaaaagcagttgtagttgtgctgtgagaaaaacctacttagtgtttggtaaatataa

SEQ ID NO: 127170 - DNA, 642 bp, Cannabis sativa
actcatgcatggtagtcaaagtcatcgcacttttaatttattggccacttaagttggaaacattctttactccaatggaaaagcaatattattagcctctctagtctctagctaggaccaatctattctattctcatatatgccttatgtaattactgtatgtttataattatagtctctagtctctacttttataaaagactagacttctaaacatttgaatcatgcttcaagtatcacatgttaagattccctactttctatcatgttcaaagaatgaaaaaaaaaaacatttaaaaaaaatatatatgtcatacataacaatgttgactaacgtattaactaacacaaaataactgttttttactaatatatatagcgtctggtaatacttttgtttttaaattttttaatcataaaaataaaagtaagattttgtttttgaaaaaaaaaaatttgtattataactacttttatttttcaattttaaaaacaaaaaacaaaattgtattctgtatattttatcactacaagaaaaatcagtttcaatgaggacaaatttcgttggtaaaagatgtctttttcgtcattaatgcccattaataacgacatgtcgtcagtaaaaagtcgtgagtaataatt

SEQ ID NO: 127171 - DNA, 1155 bp, Cannabis sativa
ataagtaaatctgattatgttgaaatgggttttatttagggcacaaaactgaccaattaccacatggcctcgccttcttgccttttgctttttcatacttggcatcaagatgcctattgagatctgttctgaaccaaatgtcactgaaatactgccccttggttccactatcttagtttactgaataactagggcagtttttccttccattgggctttggcactttcatactagtcccttttggtgctacaatgcctttctgtgcagaaggctgtctaagtaggcgtcggtagctttctgcgactaagaagtcatgttggccgaatttgtgtttttttgatgaggtacggaagtagtagggctttgaggtttacctacctttgcctttcacttttcttgtacatgagcagaggttccaacattaacagggttttccctattatttcctctgaccaattcgagtgaggggtcatcgtcagaatcacccttatccagatctccaaacttggctcgaaggccagccatcattttctctgttttttgagaaaacgtttcctgatgggccaatttcttttggtctcgagcaactccttagacactcgaactacttcgaggtcttactcatagtggtagccatctttatagtacccatctttggcatactctccattttcctcctcctcctcattatcgacatctctctcattgtcagtgttgttatgctgattgtttaggtcatcctttcaattgcttatgttgaacgtatccccacctctcgtatcagtctactaggcgtgctctggcgagagagggtttacttcctccataacagtctcgaggccgccttgaggagttttcttatgaattttccttcatgtaaaaaccatgatagcaacatgactataggtttacctcttcctttagctctcaatgaaagcacctaaatatttaccaaaatttttagaaactaaatatttgagaactaaagaaataataaagtgtaaaaattaacgagatagagatttttacgtggttcaagtgctaattaaccttagtccacgagttagtttattagcctctaagggcgtatttatgtgttttgtaggaaactaactatgtactcttagtttctcttgaagaagaagaagaagaaga

SEQ ID NO: 127172 - DNA, 1681 bp, Cannabis sativa
atatggttaggttcgatctcgagagtgttattcatgttctttgatttgttagttaagcctagctagtcaaagttcgcgtcagttggctaactttacagtcaatagttaggtttcgtcccattattctacttaaatgttgatgtgtctttgtaaattagcaattttgccctctaaattttgaaaacaatcaaatcgtactcgtccaaataaaaatgagaaagattcaataatttttttagtaaatcttaaaaacttaatttaaatcttaaaaaaaaaaattaaataattgagaaaattaaaaaggaagttaaaattttaaaaataattaaacgacttacaaaattatttatttatcattaaaaagtccatttaaatataaaaaatatattaagaattaaatatttgtaaaaaagaaattttaggggaacaagtttgagtttattttttattttttccaaaaatatagagttgtttaagtaaacgtaacattattttagtttaatttctattttttttcaaaataattttatattttttattgattttttaattatttttctttattttttaagatatgagtttatatatataaattagcttgattttttcttcaaaaaaaaaacttagattgtttaaattatttattggattttcaataattttagtttaattttttaagataagtgtttataaataaaataaagtttgattcttttagaaataatttaggtttttttttaaataaatttaatattttttaattaatttaatattttattagatgttttaataatttttattaatttttttagaattaatagatcattataatttttagaattaatttttttaataaaaagggccaaaattttgtattggtcaaagtttagaggataaaaatgttaatttttaacggttgaaaaattagaatctaataaaagggacataattatgtaactattatattttataggaaatttttaacaaactgtacattttagaaggcaaaatcaagtagtgtcaaaagtttaagtggcaaaaatactaattattctaaatttattatttaattaatatttttatgtatattttaaaatttatataatgttttctaattatagaataattacgacattaccactaacttttggtacataacattaaatattaactaaaaattaacactaaacctacctgttgcatcaaaataataaaaggtggccattttaaaaaagcaataataataataaaaatatggtgtagggtaataagccaacccaattttagatgagtcattttgacaataactcctttcttaatagagaagtttgatttacattctaatattaaaaaaaattaattttaatatttttcaagtaaaattcacattattttctcataatatcaataattattttaattttattttcatatttttttcaaaaatcatctatacttttttttctaataaaagtttaaataattttttattttaacatttttattttaatattttaaatatattttatttttattttatagatgtatttttctaagaatatgagatagtgattttcttattcaattatcagaaacacatactaaatctgatttggaaaagattatattcacaatcactacaaaattttttacttttagtcacaacagaatttgtgactaa

SEQ ID NO: 127173 - DNA, 1277 bp, Cannabis sativa
tagaaacccaaaccgtaaatttgacaaaaaaaattaaaaaatagtatacgtggtaatttccctaaaaaaaattgcaaaaaaatttaaatatttttctttttatttgataattatagcacaaaaaataaaaaaaaaaaaaacccataaaaataaataaattaaataaagtaaacataaaaaaattaataacaattaagcccccacataataaaaattctgagtccgtcactacatacaatactaaaaattgatgcaaatatatattacaaagtcattttttatgttaaatataacacaatttttacatctcctatgggagatgatctaaggtgctatttttttgaggttatttaggattttgctctcccaaattatgacatatatatattattgtgcattctgaacttttcagtccattacaaattgttcttgaattattcacagtattgtaaattggttattctgtcaaattttgtcacacgtggcaaacaaaataatgacatggttgcttagtcaactgcgcacatgccatgtgtataatttaacattaaaaaataaaaattatgcatttttaaaatcattaaactaaaactcaattaatcattaataaaattacgtaaaattacatttataaaaaattaaattatttttttcaaattaattatatatttggcgttgacatgatgttgacatgtcgattggctgagtgactatgtcatcattttacttgccacgtgtgacaaaacttgatagaatgactaatttacaacattatcaatagttcaaggaccttttttaacggactaaaaaattcacgggtacaataatacataggtcatagtttgagagtgtaaaaatcctaattaatttttttaatgattaataatctttcataatataaattagaatatgtatattgtaattcaatatttaattacactaataaatataaaaattcatagttatgttggccccacactaacatggccggtcctaggcttagacaggctaaacccgcatctagggctcactcttattagaggcccaaatgaaaaaaaaaaaaaatttaatataaatatacacattttcttaataatttttaaaaatactatttattgttattaaaaaggccaaaaaattattttttctagggtccaaattaactcaagacgagccctgctcactaatatatttagagggaattacactctatacattttttatattgtcatctttcatttttaccatcttttttaaagtctatcatttttacctct

SEQ ID NO: 127174 - DNA, 704 bp, Cannabis sativa
taatagaattcccatgtggattatcatctcttacattttttttcactctttattattagtgatttagttgtattaataatcaaggaatttttttaaaaaaaaaaatgtataaacaaggaaagttgggtttgttatttataacattttgtgtttgtattttcaatttcattttgattctcatttccattattttaacacaactaacggcattatgaactttttgtagacatgtcgtactgaatgttatattatttttaacatatgtgtaataaatcaataatgtgtaacatacgataatacatatttttgttttgggtaaattgtggcataaataactaatgttttagattttatacacttaaatactttatctttatttttaaaaatacctaatgttacaattttcttataccgttactaccagtattttccgttaacttataaatatagacccgtggatagttcagatgcattatatttattttttttattttaaaacttaatatttttaatatataaaactaaatgctacttgtttaaaaaacaaaatcagttctcataacaatttgtacatgatattggcactttaatttgataatcaagttccatatactgcactggtactcagctatggtattgcatctctcttattttattttattttttttgaaaaaagtagcatttatttttttatattaagaata

SEQ ID NO: 127175 - DNA, 1442 bp, Cannabis sativa
  modified_base (1397)..(1401): a, c, t, g, unknown or other
agatcctggtaaaataacttccaacagtttcttctctagctcttgcttttctcttgaatcttaagagatttcaagagatgtgtttgtacactcggccatgaattatgtaagggcttgagcctttattgccattattggttgatatgtgatatctaattggccaattttagtggcccacttgagtagtcagtcagatgcttcatgtttctgtaaaacctgctgcaatggttgatcggtgtacacctttattgagtgtgcttggaagtacgacctcacctttctggattccaagcacaagttgtaggtcagcttctccatgactgggtaacaactttcagcatcgattagtctcttactgatgtagtatatagggtgttgtacactgtcttcttctcttgttaggactgcactcacagcatgtttagtgacaactaggtacacgctaagctcttgattgtctaggggttttgacaatacatgtggttgagccaattattgttttagctcttggaaagctttttcacattcctttgtccactcgaattttttgttgcctctgagaatgttaaagaagggtacacacttgtctatagacatggacacaaatctgcttaatgcaacaatgcgtcctgtcaagctttgtacttccttgatggtttggcaatttcttgtccaaaagggcttggatcttatttgggtttgcatctattcccgtggcattaactatgcagccatggaatttgcctgagcctactgcgaaagaacatttgagggggctaagattcatgatgtactttcagaggatctgatagcattcgttagatcctccacatgcccccagcctttttggacttaactagtatgtcgtccacatacacctccatattcgggccaatgagatccttaaacattttattcacaagcctctggtaggtagcccctatgatttttagcccaaagggcatgactttgtcgtagtataagcctaagtctgtcatgaagcttgtgtgctcttgatctgtcggatacatcttaatctggttgtaacctgagcatgcatccatgaagcttaggacttcatggccagttgtggcgtccactaggttgtaaattcttggaagtgggaagcagtcctttggacatgctttgttcaggttggtgaagttaatacacactctccactttttgtttggtgtgggaaccaacacagagttggataccaaagtggatagaatgcttcgtttatgaagtcatgggcccgtagcttctcgacttcatctttgaccgcttgggcgggttctttgtccaataacctttttttttgttgtacgggccagaagtttggattgaagttgagggtatgggttatctcagtgttggaattattttaccaagannnnnatttactaacaagtatgttttaacatcctaaacatgaactt

SEQ ID NO: 127176 - DNA, 820 bp, Cannabis sativa
  modified_base (35)..(44): a, c, t, g, unknown or other
ctcgttgattaacaacgagctgcacagtatgtttnnnnnnnnnntaatacgcctatgctagttagagtgttacactatcgacaatgcatatgagatgtatttcatagaacgaagtaagaaaagtatatctgtgatcaacaaacacctaacaggaccgagatattgtacaccaatggtatgtcttaacttaatatatgtcatgcataaaatatttcttaagaaattaactagcactaagatttatatgtgtattaccaaatttttatagtgtcgtaaacaatcaaacgatgttgaatgtggatactatgttatgaagatattgaaggatgtatttataaatgctcctaaaattaaaccttacttagggaataaggtaaaagtattacataacttgtatacaatatatatgtgtgtgtttgttgaatttataattgctaattaaaatttaattttgtacctgcagttgcagttcatgtctaacaaatcatattctatccaagaaattaataaagttcgagaagaattaatgtgctaaagagttcttatattttcttaaagcataattaacttttacattttagtcgttacatttttttaaaaaacataatcaatacgtataatcaatacgtaatgaatatattttagttgttatattactttaagaatacattaatggatatattttaaatttgaatggttacatttttaatgtaacgatcatggttactttttttttagccattcgatcactattaaatggttgtaataaatttagaaattaaataaaaataaataataaataacttgtaatctgatatta

SEQ ID NO: 127177 - DNA, 649 bp, Cannabis sativa
gaagaaggtttatatcaaataattgtactcactaattagaaaacaataattagcaagaacatggatatagagtttaattaatccattattaacaaacaataaaatcaaaatggtccttattcagaccatgattggccatagtaaatatggaagtcatctaagactatcataaaaatctgataggcattcacttccactgttattcccaagagcaagataagagacttagtgggttgatattacataccaccccagttcttgttgtctttcaacacagtttcacgaaaatgctggaactcttttttgaattcttcgtcattgtccattactttttgacggcagagaggggtacagaacgcagcaaagtttctgcatcaattcaatatcaacacacaatttagatatataattacacatgataaattgaaagcttaggtccacaaaaaaatgtgatggggttaatattatagtagttggacatatatattttatattgaacttattaaaaactaaatctacctcgattagggcaagaaattccatgtaatgtaagtaagtcaacaccatatatattatcattgggggtgtccttttggccttatgagacaacagtcaaccataattttctgaccaattgaaaagttgtttg

SEQ ID NO: 127178 - DNA, 1145 bp, Cannabis sativa
  modified_base (1055)..(1055): a, c, t, g, unknown or other
aaatcagtaatatgcagtcacaaggcatcctatggcccaattacttgccaggcgcacaggcaagtaccagcgactacgcccaaatgttcggtggcaagaaaactaaggcaagcgcaacaacaatagctctagaagaaatagtggcattaagggaaagtataacatttccccatgccacaaaactggaaggtcaaggaggacgtatacctgtttcaccctcctaacgaggaaacctgagggcatcttcattgccactcaaggaacattcccatacagaaatccccctaaaataaaaagggagttaggcaagggggacaggtcaaaattctgtcagttttataacgacttcggccacgacaccaacaagtgtcaaaattcaaagaggaagattaaattcctcattagacagaattgtccccatctatgttgttatgtgaaaaatgaccagactcaggctcaaggtgcccaaaatgaagacccaatgccaccatcaagtggcaagcatcagcattgaatacgactctgctgtcgactagccaaatttgaggtgaactaattctctcgagaattctacacataattctcgtcctcgacgcagataccatcacaactagaagaatttattgacgaaaatcaatgacaaggtgaacctttgaaggattacattcaatgttttatggtctaggccactaaggtcaaaggcctaactgaagaaggtcgatataccaccgtactgggggacatccttccattgagtgacttttagaaagatatcaggaggatcttgacaaataatatgaaagagttcctaaagcaagctcacggtttaataaagttgaaagaagcaatccgacaagcccaaacaggagggtaggttagtagcaggcaacctgagggtgccatgctaccccatggcctgcccaacatgcaagttagtacaagaaatgtcaattaggcctccaacagtaaaaataatggaggcaaacgcgataacaatagttctggcctcaacattggcaaaaaagggaagtagaatactgttgggttttatgccntaaataaaactcaattttaatgtaatctttatcttctaagtatcaataaagaaacagaagtatttgtcatcactttgtgtgtcatttggt

SEQ ID NO: 127179 - DNA, 1753 bp, Cannabis sativa
atgtgcagcatatgtacatcaacctgatgataagcttgatgctagatctgtcaaaggcacgttttaggatatccgataggcataaaaggttatagaatctacataaaccagaatgggaaacctaaggtgattatttcaagaaatgttatgtttaatgaaaataattttcctcacttgatagccgagaagaagaatgtgttacctggcagattcatctgacaagaggaaagatttggtagaatttgaaattgagcttaaaggatttgaaccaagtgagaagaatgacatcacagacacatctccaggtgagactaaggaacaactagatctatctgacgactagcttactagagatagaactagaagagaaatctatataccagcaatgtttgcagaagttgatctgattgcctatactttgtgacaactagcttactagagatagaaccagaagagaaatttatacaccaacaatgtttgcagaagttggtctgattgcctatactttgtcaatagatcattcatgtgacataccaaaaccattgagtatagaagaggatttaaaaagaaagtacaagaaggagtggtctcgggctgtggatgatgaattaagcttgcttagaaagaacaagacacaggccttggttccaagacctaaggacaagaaggtggtttcatacaaacagattctaaagattaaagaaggtgtgatagaggttgagtgagtaagatttaaggcaagattagttgccaaaggtaacactcaggtggaaggaatagattacaatgaggtgttctcacctgtagtgaagtataagaccattaaacttattttgtcaatggcaactcagcaaggtttagaagtggagcaacttgatgtcaaaactgcatttctaaatggctatctagaagaagagatatacatggagcaatcacttggatttcaggtagaacaagatggaaaaaagatggtttgtaagttggaaaagtccctatacaaccttaagcaatcaccacgacaatggaacaaaagatttgacagctatgttcatgagattggttcacaaggtccaagtttgatcactgtttatatttcaagcacctacaagtgtcaatagttgtgtatctttgactctatgtagatgatatgttaataatagacaaagataagacaataatctaaagaattaaagataaactcaaggtagaatttgacatgaaagaattgggacaagtaaagaagatacttggtttagaagttcatagatccaagagtgacagagtcatgcatctaaagcaaaagaactacattgacaagatcctaacaaagttcaaggtgcaagattttaagagcactccagtacctcttggaggacagtttgtattaatcaaggaagaaagccctatgaccacagaagagaaagaagagatagaagaaattttatatgcaatggctttggggtgtctcatgtatgtcatggttagcacaagacctgactttcttatgctttaagcatattgagtaggttcatgtcaaatcttggcataaataattggagggcactcaaatggttgctgagatattttagagggctgttaggctatttttagccaatgtatcgggtcacaattagagtcattttttgatgtttttagacagaattatgcttgttttctatgttttcaggtttcccgtagctgttggacgttcaaggcttcaaaagtgcaacaaaagacaagttgagccaagaaa

SEQ ID NO: 127180 - DNA, 1325 bp, Cannabis sativa
taaggtagttagggtgttacacgttccatctgttaaataacataaatacaaagtgaaaacgaaataaaatagaaaggatgataaccaacacaaaaaaatataatttaataattaaagtctaaaaccggtttatgagctcttacatagctgccaaaatttaataaataaaaccggtttatagcaagcacaataaagacattctttttttagaaaagataaaataaaggagtatgaaaagaccaatcataaaggaaaaatagtaaaatgtgaaaagcaagaacatgaacagagaatatagtgggcaatggttgagtaatgtgactcgatatgtgaggatctatgcgtcttatatagaccctgttacatgcaaattcgatcaaacccagatggataagctcacccttattcttgatcccaccaatgagtgtgtggaactctgatacttgtaataaagtctactcttacttctaggagcttgttgatcactatgaggtaaataaatcttaatatatatatatgttaaaaaaattattgagttaatatcatcaatactaacaaattaatcattaggatgcaccattggctgagtacactcttcccttgattggtttagacatggggagattaagtgcaatatgaatatatatatatatacacaaccataaatctcacacaatgtcaaagtgcttaacagtgttgtaaatcagtaggagattcactgttttaagtttatgatatataactaatagcttctttttctttttaaataattacctcacaaatcactaaaaagggtttccattataacaaaaaaagtacaacaaaacatgaacacatcaaaaaagctaataaacagtccctcacttattctcattttgctctactttatgataataaaattttcaactgaaaatagcaatcgatgctctaacacccactcccccaaaacttaacacacaccaacataaactcgccaaaaataagacaaacaatacctattcaaaatgacaaaacttggttcacaacatcattttaaggcttgagaaattaagagaacatcatcaacttaccaccttattaaaacaacaaaaatcaaaacacaaaagcacacacccaccaacgaaaataaactcaaatataacactgaacatttaaaacaacccataaagaacaaatataacccgaacccataaagcaacaaggatgatataacacttccataattgaaacttgtaacatcgacaacactaagatacccactaatcaaaaacataaaaaaaatcaaaagataatatgaacaaaccttatagcaactccaatccaca

SEQ ID NO: 127181 - DNA, 658 bp, Cannabis sativa
gtcatgctcgtcccacttaagctcgtattgattttgtcccatgtcaaaaagttcaacctctatttacagtactacatgataaatgattggtttagtttattttgctatataattcagtgtctaatttgtgtgtacaattctatgtatcgttaattttatttataataaaaaaaaaatgtacaaatagtatgttattaggcattattggcgtccgcgtcataaaagtgatgtctcataaatttataattttttataaggggtttttttattagtgtacaaatattatattataaaaaattagaaaaatacttaattatgaaacctatacaattctaaaatatttttacaaaaaaaataatatgcagatcattaaattattgaatgtaataaaatagggaattaatacttgaaaaatcgtatttttgcatatgccaaaaaatttctttgacatcactaaagagaaatgggactgtaaagacttgtagtaacagaatagaaataacggtgtagaaataaaaaatttgacataagagaattatatgtgatatcagtggtctttcaaacactcttagtctaagaagccacgcccagagaatgacataaattagtaaagtctcaaacaattacaaatacaattgacttaaacaagtttagactc

SEQ ID NO: 127182 - DNA, 1296 bp, Cannabis sativa
ataaaaacaacccagaatcctaaagatcaaaagcaccaaaatctcgtacctgcccacaataatttctggaattcacatcagctccattctcaagtaacagagaaacaatctaacaaaattcccaaaaaaagaaaacaaataaataacagcaaaattataactcggaggaaaaaaggaaaactcgaatgaaacccaagaaaatataatacctcgttgtggcctttcgcagctgcaaaatggagaggggaattaagaccaccgaaagtggaatacttggcgagacaaggattacaatcgagaagcatcttcgcctccactacatcgccatctctggccgccgataccaacctctcgccggaggccgagcacccaaatgaatttcccattttatccttcccttcactcactctccgacaacgccttacggtgaaaatctcgtacggcagaagaatgttaggtcaaccgttccgaacaaacaaacacggggtaatataaacaagctaataaccgcgtgtgggtctgtgtatatatatataatatatataaatatatataaatactgtagtggagtggagtggggctggggaaggaaatcaagaagtttgggtttggaatttagctatgaaaaagggaagtggggggcagaggtgacgtggcaacttggtttctgtttctgagtctccctggtcttgactttttaccagagaaatcggagatggcgtgatttgggtttcgattagctccaatttcagagaagagtgagaaatataattattaattaataaataaatatatgcaagtccaactttactttactttacctttctttgctttcttcttctccaatagccagactagtggcttggctttggctacctaattcataaaatagtaaaaaatataagaataaaataaaataaagacgtaaagaacagacttttcaatttcattgtgtaattatgaatatggtagatctataggaggactgtctgaatgataattaatgatcacatatatttcgtttcagtctcacatcaaaccattttaaaacacagttgtctcctctccctaaagaatgcggtatgtttgaatatttttgaaaatgaaagtcatcatttattaaaccaataattccgttaccaagctccgtaacagctcaaccggaacatttgtacaccgggttttttctattttaagttaaaattactcaaaataaacatttataccatcctaagaaaaaataaacatttatacttttactaattacaaaaataatatttataaagtttctttatt

SEQ ID NO: 127183 - DNA, 851 bp, Cannabis sativa
aattagatttactcatcttccattaaagcccatacgtaataacaccgtcctaagataaccccactccattccatcataagccttgctcatatcgagttttagagccatcagacattttctcccttaagtctttctttttaagtaatgcataattttaaaagaaaccatgatattgttagaaataagtcgaccttggagaaaagcactctaggtatcagatattacagaaggtagaaaaacctttaaccttttcgcaaggacgtttgttatgacttttaggagcacattacaaagcgaaataggtcttaaatcactcatatagctaggctattttcttggggataaaagccacgtttgtagcattgagaccatcaggttggacccctgtcaagaagaaattttgaacccgtgtaaccacatcccctccaaccatgtcccaacacttctggtagaaacctggtgtcataccatccggacctggagacttgtcaagatgcatttgaaaaagagcttttcttacttcatctgcttcaataggtctaagcaattcctcaatctatgcagtcgagatacaaggagaaatgcagtcggtaacatgagatcaatcagctccagtaaaagaaaacagatctaaaaaataattcatcattaactcagctacacccgtgtcccaaacatgccacatcccagtcgaatctttgagtttagaaattaaattgttacgacgatggaagagggcgatatattgaaaaacttactattgttgtaacgtccccatttcaagcctccgttgggcccttacacccacggaatgatggctcttataaacgagtacgtcactctggttgctt

SEQ ID NO: 127184 - DNA, 2652 bp, Cannabis sativa
  modified_base (52)..(71): a, c, t, g, unknown or other
taatcattttagaaagttcatatttagggcgttaatcaacatacttgtgagnnnnnnnnnnnnnnnnnnnnaataatttccaacactaacaaccaaatgcagaagaagcaacctattagttgaaatagacaagtccttgaagatttacttggtcctcgaacacaacctaagaaaaactatagagattgagtaaacaaggtgaaactggtcgctacgttgcaccacaaaagacttcgataatcaatattttttttaagttggtcaatatgtggccccaatcgacgacaattcactttgaggtcaagcaagatttatttggggttaaacttactcggtatggctttcaacaactgacatcaaggaattgtaccaaataaaatatttaggagtctagcctattacaatctagtgcaagtatgatattcaacttttcttaaacttgaaaaatttattttgagagcttgttataaattatgtgtttttataaggattttaaggaacaatagctggaaattaatggattaaacagactatatgtatttttaaatccaaggaccattaccaccaaggttggggattataatgcttgttgttaagcactgctcaaatgtatggttgaaatcgataattcggctaaataggttattgccccctacaacaatcaacaagtaaatttaaaattaatactttcataatttacaactctacataatttataacaatcggctaatcttacacatttctttgtgtagtgacatgtataatggatggttgtactcatcaaaccaagtacacatacagtggcgtacttggattacatcaatagatatatatatcagaagatttaaaatacattgttaacatgtaagttctataaccaacatcacagtacataagtgtgtttgatattttatatgctaactttattttttgtgtaggttgctcaacctgcttagtaaaagctcaactcgatacaatgatcgtctcattgagtggataactctgatatgtccacgacaacaagaagggaagcaatatggatactacgtcatgaaattcattgaaagtttcatgaacgaagaagatccaatataccgagtaaaataaatggtcaaaaactaaatgagtaatataaatataatttcttttattttaataataggtcattttaatatttaatatataatttctttctattttattttatagggtaggagcaatctatactcaaatgatgagatgaattttctgtgtgatcagtggattgaatacgtccgagcaaagacattgtgataaaagctattacgatgatgagtatatatcccagttttatgtttatactttacactataactaattattttcatataactaacgatttgtatatttttcgattaagttaaactagtttgtatttatttcatttttattcattttcaatttatgttgatatttcactctaactaattattgacagtaaaaatttaaaaaattaattaatgcagtgaataaataaaagaaattttttattttttccctttttatgcaccaaaatgactgggaaaaattgtgactgaaaaatacgaaatttataattttaattgaaaacttgattataagtgaaggtgtaaaatcgtgggctatactattcccacgattggttttaatcatgagaaatgctaataaatgtccttatttttctctatagtgaaagttaatgtctctttttttgaataataaagtaaatgtcccttattattttttgctacctaaaatacccttaactatatataaggtatacattattatgttttattcattcaaaataaattataaacaaagaaatataattatctgataaaaacatagtgttgtcacgtataatttaatttaatatattgtatttttcgttgtggtacatcagtttattttttaattatagttgggagtatggtatattaattccataatatgttacattttttagtcaaacatggatgggtatatactattaaatgaatgcttttttttttttttgtttttttttattaaaaagtgttgatatccatcaacgtataaaattagttattgtgtatgtatgaagatgaatcatatatttcatactaatttagagagataaaagttataatatatcaattgtttgtactatgataaaaaaaattgatgaaatattaatttttagtctgtagtatatatgttttacattatggtatatgcattttgtgtactacagtataacatttagaaaataaaataataaaattttgattatatgaaaatataccataatcctaacctaatataccattgtggaaaaaaatatatatgtatatatttgtacaatcttaaacatgaaaacaacatactccaatcaaatatatttatgcctcaaacttaaactaatattttatgtttttttatttcacccaatatatgttatatcacataaaaataatataacttacagaaatatgaatataccacaaaattaatattaatgatgcacttaatttttttgttttccttcatcatatattaaatcacgtaaaatagatatatcaatcttaaattaatataccagttaataagtttatattttactatttccctcaatattcataaaatacatat

SEQ ID NO: 127185 - DNA, 747 bp, Cannabis sativa
ctattgatgtaattaagttttgtctcataaacttaagaaaataacttagggaatattgttaattaatcgtgagacactatttatagaaagtattgggaagtactggtgtctaataacagatatatgtgtatgtttttgagattttacctagcaatttcagcacgtattctggcttgttcagcaatctcagacagttcatggttatcgttgttgtaatgaggtaatggaggttgaagaccatcaactgttcgttgagccgatgcccattgagcttccctttggcctcttccataatccctccttgttgtgaaagcaatcttaattggttttcataaaaaaaaagcaagtgattatattggtggatacatacatattttttcaatagagagagagttaaagaaagaaaaccttgctgtgaagcatggtattccaggctttgccactcaatgcatatcgagtcatgaacttgagaacatcaagagggaagtaagtgacaatgctgaaaagccagatcacaccagcccatccccaaccaattccttggattttagcaaaaccccagtttgcatacacagcaattagagtggccacctgtttgtataagtagaaaaattcattaaaggatgtgggtggcttgttatgtaaactagaagggaaaaaaagaagagaaagaaactacaaaccagttgcgcggccatgaaggctccaagaagcaagaaaccggggcgttcaacaaaagaccaactc

SEQ ID NO: 127186 - DNA, 954 bp, Cannabis sativa
tgtaattattttatttttgttgtacatttatgaaaaaagcccattttaatatgtggataccataaaaataatttctaatttgatgaggggccaaattagaaatattcaaaaaggattaattactgttttttcagttattaataaacaggtattgatcctcatttttgcattgcttcatatcgtattattctctcttgtatctccatcaccaagaaattaaggtttcagaaaaaaattttgatgcaaaaattggaagatcataccattccaaaatcgattctatagactccggtatgcatctgttaatctctaaattattattttattctcatgaattaattagggcttagatcaaacttatagtattttacaatatcttctatatattattggaaatgttgccggtcaatttggtaccatcattattcaaacattattggaattattatacaaatttattttgagttcaatactgcttctggttttgatatgctttttcatggcatattactagtttatctaattaactgtacggtatttaattagatatagtgtgagtgtgattattacactagactatagagaaccttccatttgaaatttgattaattcttgttcataataatatgaaacaaatgaataaacattgtaacataatatgttatgttaattaaattaaatagtgttattagatgtgtacgaaatcacaatgcgagattaagatataaacaataaattcacagttgactttatgaatattaataaatataatatattcgtgtttgtgaatactacaggctgtccaaacttgtttactttgttagcattgtgcatgaaaatttaattatataatatttacatatcaattatcatatggaggaggttctaatggttacatttttattgtaaccatcatggttacattttttgtagccattggattactattaaatg

SEQ ID NO: 127187 - DNA, 874 bp, Cannabis sativa
gccagtgaacagccccttgggtctattcatcaggtgaaattctctggttctcgcccagagatggtcttcctcgagccctattacctcttgcccattgaagctggcacaaaaggctcgcaactctgcttgctacatgctacaataactggcggcattaccaaacctttgagtctagcgactgggaattactcaacaagggcaattttgaaagtttggtgtacataagttatgatctcatgcaacaggttagtcttttccctactctttttcctttttccccaatcgtctttatactcctttcttatcgcctgttatcattcctccgaggcttttcttttgtcctttgctcctcaatacagggggcttcagcgagtggagatgctcgagatagaactttatcagaccagagaacatcgtgatgtcatggccaaaaagtggaatgattcggagtttgaattctctcgggtaaaggaggaagtcgagaagcaaaagagggctaaccagaagaaaataaaggagcttgaggatgccaacaagcctatccaggatgaggctgatagaaagcttgaggaggccaaagttgacaccaaaaatagggtcaacagaattgtcaggaagtctatctatcaagcttgattagccaatcccaagatggatttcagttttctggggaaagaagctgaggagctgcttgcattctatgagaagaccaaaatggaggaagttggagatgcaaacgaggttgaagaagaccaagaagagccaactaaatcccctactatgtaggcttggtctttttatgttttcttcttcttttttttttatttaggaaaatggccctttggccaagacaattgtaacgccctaatgctaa

SEQ ID NO: 127188 - DNA, 1280 bp, Cannabis sativa
ccgcctatgcccagggccgggccttgagtacacccatgtctagggtcccaccctacgggttcttgaaaacaatttctttatttatatatataatagatattttttttcctactaaaaatgacaaggtaatattagttacattctttggccaaatacatcctattctatttttatgactccttgaattttgtatacaattctatcacaattttccatctcacccttccaaaacttgttatttcggttgctccaaatcatgtacaccagcaatacaatggcaacagcaaataccttctttttgtagctgtccactcttgctttctttatccacttgctgattctcttcaaagtcacggacgtagtcccccatttaagccactgcttgatttgtgctaagcagtttttcaaaaacaggcagttaaaaaataaatgatccattgtctcgctgccatcactacacagtaaacagttatcattgtcaaccacaccaaacttcttcaatctttctcttgtcttcatcttcctaagcatagcaagccatagtacaaaactatacttaggaagattaaaacgattccaaacaagcttgctacactccaccttagccggctgcttgtgtaattcactataaccaacaaccacttttgtactgacaatgtgactggtttaagtcacctaaatttttcatttgttctttgactagtaccaacttcctccaataccaactcgcttgagccgtaagtttatacgatccaccaaacctcattctttacatatacattgtgaacccactgaacccataggttatcttccttcttagcaatggcccaaacatatttgaacattgcagctttattttccaatccgagatgcatctaagccccagcccacctaagctccttgactgacaaatcaaagcccaagcaatcgcaggaacacatgttaatgtgtattgcccattccataaaaaactacgacaaatgccttctatttcacttacaattttctttggcaacatcataacttggcaccaataagagtgtatggccattagtactgagttgataagcacaatatgcctagcaataccttgcaattggctggggagattctcttcagacagataggtactcctaagtatttaaaaggcaactcttgtctctaacaactagatacatcaaggattctttgtacatctgcatcagacatgttactacaataaaaagctgatttagaaggattaggtaacaagcctgatgtatgagagaaaagctttaatc

SEQ ID NO: 127189 - DNA, 947 bp, Cannabis sativa
agttttacaaacattgggtaattatgccgctaaaaataaacattagaattatcccacttacaaacttaaaactttgggtacttatgctgctattaccctaataagaatgaaaatatgttgtggttgatcatactaaattcttcactcacctacgagaactaaacatttaaacaaccctaaaaacataactaaaactagcctaacaaacactacaatttgcactgtgtttgtgatataatgcactaggcctctctcaacatcatagctccaattactcattaatattggccaaataaaatataccatatagatgtttttgagtgccttattttaaatgagtaagtttattgaacaaaatatatacatattttgtatctgagtaggttcaaaaatatgaaaaagatcattaggctcaaaaattaagttatccaaagtctttttatttttttttaaaaaaaatctctttatcaatttctatgtctgaaatcatatgttagaatatttttttttctaacttttgttcagtatttataattataataagacagagttcttgatattccaatttaatagtagtgttaagaaaaaattaaattcattttcggcattgttatatgtaaaaatttacagtgataattttataactataaccattaagccacagagcaactaacacaacaacctaaatctcaactcaattcaaactgtaatgtacatcgcaatttacacaacaatctaaattgcaaccaatggaacaacctaaatcgtaaaaataaaaagaaaaatacaaaaaaaaaaaaaaaaagatatatataatcataaaaataaaaaaaataaaaaaaaataaaaaagaaaaaagaaaaagaagaagaatccatccaagttgatttttttaggaaactttattggggaattaccctatttactattttttttttaactttttt

SEQ ID NO: 127190 - DNA, 2161 bp, Cannabis sativa
  modified_base (2103)..(2116): a, c, t, g, unknown or other
ccaaacctcgtttggtgtgaagtgaatgaggcttgcttaaatgcctccggttgtcgtaataactaacgggcacgtgcctcgggtgcgtggggtgtatttatgaccatcattgttgcagttttttctttttacaggcaacgattcgtttcctgtccattaatgatctggcgcattcaatgggtgtaagtcaagtactcaagcgtttccaaccaccttgaagagcgcttatcccaatcgttagatctgcaaaatgcgaatcgattgttattctcaccgtgcgatgaagtctgatcacaactgcttcacacccgctctggcctataaaagccagccttcccatttcatttggttactttcgccatcttgccaaatgttctcaaagctttcacagagagaaaaaattccaaacaccatagattacttactactcttccttcgccgttgccaatcttcattgtatcgacgatcaacaccgacctccagttctcaagcttcatgtaagttttcagggaactttatacttgtattattgtttgtttgtatagcatgtttagggtatctggattgattgttgaatttctgggaaataatctccattgaatttgcttagtgcgtagaatatctcttatttgtgcccttgctattttcctctattgcttttctggagttgtcttttccgtcaaaataacgttttcaaagtgtagagcgattttagggcatagggcaattctcgatttttgcccttttttatccttttgctttagctgctttttggatttttgcacctgatgtttgtcaaaggaaatccttaggattcccatttttggcaatcatcccgagagggcctctttccagcagttaggggacccccattccctttttaaacattagggtttggtttggggcctaactgctggattttcttaattttttcagaaccaatatgtctgttcctgcatctgggtcaaaatcttccaagaaagaggcagttcccctggccactttggaggaggtcatgaaggcccccgtggccaaagagaattatacttcccgtgctaacggctgggaggcggatgagctccactccaccttggtttgcgctcatcagctcgagaagatcgtgactgtggtgggtatcaagccatctgcttttgtgaccttccacaacctccctcggaattaggagtcgcccaatcacaactacgtggggttcgacacttggagccaaacccatttcatgtccagggccatgctgtctcttcaagattacttgatcaattttttggtttttgtcggccttgcgccttaccaattaattcctcaagcctaccacctgctttcaggcttattcattttttatgttgccaggggctggggttcccctagtccggctgaaattttgtatttttacgaactcgtttccgtccccaaaaagggagaaaaatttaaagacgatttttatggcctccgggcccatcctttaaatgagggcccgatcccttttaattttcagaaatatgtaaaagagtaccgccaccgcttcttcttctgctctggcttccaagtcatggactgcctggagcttcttacggagtgggtcaggatccctcccttccttcggaccgcccctactcagctgttcctccaacgtgccaaaaccttctccacctacaccaagaaggacctcaacgtgggggactcggtcacgacggagaactctcgaagggccaaacttatctccgggagccagtcgatggatgacttcaacctttcaaaggtcatctgcctaaacgtctgaactcctgccgcagagagggcgctctgggtggacatcattactttggcggaagaccggtaccagaagtacctctttaggagggaacaggacctggcctacatcaaagcccaggctgccgccgggaggacccttcgtctggaggcaggtccagatcgagtgccttctaggcctaaactgctggccctggtccccaacacaggggctcctgacgccagtacgtctggctcttgtaagtctcctttaataatccaccatgtcccctctgtccgagaatatgcccggtgtatgttggaatttattttacnnnnnnnnnnnnnntactcacaagtatgttgtttaactccctaaatatgaactttctaa

SEQ ID NO: 127191 - DNA, 2355 bp, Cannabis sativa
  modified_base (941)..(946): a, c, t, g, unknown or other
tcatctgacggctgtcgtacatcacggattacaatccgtgaaagtacaataacgggacaaaatcatatccaagtatccactaatttttataggtagcgtcctttgatcaaataaaactacattgtatattaactttattttatatgttttaattattatttttatttttatagtttttaaaatatacttacttttataaatgatgtctcaattatactccttagattaatgtaaattatatgttagacttaggtaaaatgtgagaatatattagacaatacactcacaaaagtaggtacattttaataaaatataatttgaaggcatttttgattaatggatacaaaaaagaggtcttcctcaacttatctcctatgattagttagcgatatttctttaaagttattttcttatgttatacgacctgatacttaattatactaataacagtatgatatcaaagagtgtattaggcaccagtgatactttttagtaattctctaaattatactatatcatacttttcgaattcttgaggccttccaaaattttcaaacaactattgaaattgttaaatttaaaaattttatctaattttattaacttaaatttaatgtggataaaaatttaaagatcatgttttgatacatgtcaaaatttaaaagacacgatatgataaatatcaaaatttagggaaaccattaggtacatgtacaatgttcacattagtaaaattaaatggaaataaataaaagttcttgtgtccaataattttaaagttaattaggatttttgcaccctgaactttgatatgtaccaaatcatgttccttgaacttttaagcttgttaaaaatgcctcctgaactattgacattgttgaatttaaagacttttatctaatttcattcaattttactaattcagtgattgtttatgtacnnnnnnatgctccctatactttgatatctaccaaattatacccctcgaactttgacatgtactaaatctaaatcatgccccctgaacttttatccatgttagacttttttactaaaattggacaaaaatccttaaatctaacaattcacgatgcatttttaacgaccttaaaaattcatggggcatgatttggtacatgttaaagttcaaggggcaaaaatcctaagtagcctaattttaatagttctagaaaaaattttaacggtctaaaaaatccagaaaacatattttaataaatattaaaatttagagaacaaaaattatatttttttttcttttattaatcaattttataaggtttaaaggtgttttttttttattttgttttttcccgtaaaaatgagaaaataatttgcaagtcacattaattaattaatagaaacgtaataaaggtttttttatttctttttagaatatattataggtatgtaattaaaattgtaatttttttaattgagaaaaacgtgttgatattgtaaattgaaaaaaaaatattcacttcaaaattgtaaatattaaaagtgaccggatcatgtaagattggtgagaaaaaaaaaactactattttgagggagaatgttaaagagtctcaaattgataatatgttgaaactaaataccatatataagatgcataaactactcctctcattattgccaattaattttgagatggaaccttatgcaccttaccatacactcacctattctactaccttaactatacactttcgcattctactatgatatcaaagttaaattaaaactctaacgagtaactgatccaaatctaaaaattggtccaaaaagacgagccaaaaaagctgcttgtgattcgggaatagtgagtcaaaaagagctgctgtgaacgtgttaaaaatagtcaccatcttgagtgggaatctcatgcatcttactatatgcacttttatttattttgatatttgaaataattttttagctaatttttcttaatgatcatgtacgttatagttatttaagacatctttcaaaattttaagaaattcgaaaaaaattaacatactaaaaatagggttcaaatagtgtattacactcgtgcctatttttattttacactcatgtaaaataaattgtttgaacaatactttctatattgtaaattattttgaatttattaaaattttgtattaaataactataatataagtaaatatatataaaaaaaaaaattgaacttaaaatttgttttggataccaaaataagtatcagtatatttacatttgttgcattattatttttcattttagtgatattaaatgagactattttcggcctgctctcatcttcttctcagcaccggaggtaaggttcat

SEQ ID NO: 127192 - DNA, 1527 bp, Cannabis sativa
  modified_base (1290)..(1312): a, c, t, g, unknown or other
ttttttgttttgaatgccatatttagtggcattaagttttcttgccatatatatgtaaactatagtatattttcccatatttatgtaaataacccttttcctttactaccctttcggcagtttggtctttggtgggtggcatgttcttgccagtaatacttggatattaatgtttaaggtccagattattcattaatcaacccaattaatgtatatatatttaattagcctgcactttgtgcttgtcattattaatttagattctttgtaaatgatttatgtgttaagtttctcctttacataaaaaaataagatgaattttcaaaaatgtcattttttttattttatttctaattttactatctaaaatttttatttagaaaattacgttagtaaaattctaaaataacaaaaatattaactataaaacaaacacatttcaacctcacaacaactataaatcaactataaataaactataaaacaacctaacgataactataatacaattataaataaactataaaacagctaaaaaaatagtttattatttttattaaagaggtatttttgcaaataaaaaaatttaaaacataaaaatgaaaaaatttctatatagacgtattttttttttaatttttagtatattatgtaaattttttaaaaagaggattattttacaaatacacaaaaataataaaaaaattaaaaaaaatatatagttgtacggaatttaaaatatttttacgatttttatgttttattgacagaaattacagtctttttatattgtactcgtattaatttgttgttgattttttgttatctgtaagttattttttttgttgttgtttggatattattttcctattacttttatgtaattttcttgttgttttcgcgttgtttttataaaaaaccgtaaatatatatataaatctttaaacataaaattgtattttttgggggggaattatctcatatactgttttttttaactttttttttttcaaatttacggttcggggttctaaagtggttgcagcgctagttgcaataggggtttctatacaatttttttattaaaatttaggttggagcgctagttgtaatagaagtttctatatagaattccgtaaaaatacaaaaaactattttgaaatgtaaaaataaaaagttctattttttttttaccaaaaatgatgtttcatgtaattattcgtttaaaaataaggttatggttccatccatagctgcacatgatagggctcattattattattattattnnnnnnnnnnnnnnnnnnnnnnntattattattattattatggtaaatattattttgaaccttatgttttgcaagttacaaatcagattctctattttgtaaaatgacaaattggaccgcatattttctaaaggtttttttttttttcaattttaaccaaaaaaagtaacattattacaaaaatacttccaactggccaaataaaaaatatacagcccaaataaaaaaaaattacaca

SEQ ID NO: 127193 - DNA, 1236 bp, Cannabis sativa
gccagagtgcatgctggccggccatatgatgcccaaaagtttgtcggtctattctggccatagggctgggtaggggtggccggccaacccccttgaagtggctgattcatcattttaccgtccttcctaagtaatcggacctcttgttagctgtagtgctgagtagatggcttggccttcttattggtgagatatactcccacgttgcattgatactggccatgcggagatgccacgtcaggtaagcaaaaattgggataacacccagatttcctaatttattcattgtaattatagaaaaatattaatttactattttatttcttatagattgaaggaaactattactatgtaattagcccctataaatagtggtctcatctcactattaagggacagaaaatttttcagagagaaagcacccaagagtgaaatcacgatctaagagtaatttgctcagagatccttgtaagagctttcaagagggaatacttcattctttatctcacaagttaatacaacaaaaaagggagtaggctattaccataatcacggggttgaacatctataaattctagtgttttctttatttattactctttgttttctattgtctatttattcttattgcttaaattaagactcattgtcatcggctaaaaacgagatcaataaagttcacataaaaaaaaattgttattaagcattattctctttagcaccactatgaggtgacatatagttattagttttttataatcattatcagtattcaaagtaaaataagtgagatccaatattaaattgcaccaatagcatatgacatttcacaaagggtgttaggaaccatacatagtctttagcatttcacgatataaaaaacgataattgtcccacctaaattttacttttgaattagcccctgcacatattaatcaccaaaaatacatgttggaattaaatccaactaattctttcctaactataagtctgttagaaacaaaagacaacttgcactactacaacaacctgaatacagatactatccaaatatcctaacagaaaattaacacaacaaaatttaaaaatctacctgccagctcatctatccaagaccagtttctctgatccttttcccagcagtataaaagactgcttctggtctcttttttgggcagatctgaatactagagagaaagagagaacctgtaattgctctgagttcaaagataagaa

SEQ ID NO: 127194 - DNA, 899 bp, Cannabis sativa
tttttttttttttatataatcccaatgtgaagcaaacttagtcagtacatactttaagcagtactgtgtcattctaatgtttcatttaatcctcttatatttgataaataaattttaatatttatgatatatatattccaaatgatttgatttacagggttctccttaattaattattggacatatatataatttcttaaacactatagccatatttgtttttatgatggtttctgtttaccaattaaaaattaataaataaataaataaattgtttatagtagtgatcatgtagatgaggcagaccatttacctttaatgggggtaacatgggtttattacataataataattatatggtctttggtctttgctgtgttgtgctgtccttcaattctgaccactccaatccaattaccttctcctaaagcaaaagatacctacactttctatttatttataaatattaatgagctaggaaaggatactttggtttgggttcattacttgtaaaaaagcctatatcgatcctcacatcacatgcaaaatcttcttcaaatataagtgtgtgtgtgtgtgaagtgacccacttatcactttggtgcaaagctaggaaggaccatgttaatatatgtgacaaatctctatatcttccttttgttttctattcaataataagtccttaataccattcttttagatatttcaaaataattgttctaatttaatttttgtcacgttttattttgagtgttattatttaggtaagattattttagatgtaaaagcatatgattttacccttgctactagtcacagtcgaccaatcggacccatcggaccccaaggtccgaccatcggacctctttcttcctctctctgaaatctgaagaaaaaaa

SEQ ID NO: 127195 - DNA, 813 bp, Cannabis sativa
  modified_base (768)..(771): a, c, t, g, unknown or other
gaataaacaaggtaagaaatctgtcatgaatgcacaagaatcttaccataaaagaaaaaatattttgtcaactaacttgccaaaaaaaggactttacacctgtataaatattatagtgtaaatactcattccaagatagtcatggcacccaaggaaagtgccatgcataaatcattagacaacccattcccaacaagccaacaactttcttaatgaattaatgtgtggcgtttggttgagaaaaatgaaaatataaaaatgagaataggaatgagaattagaatagaaattgaaaggaataaaacttaaaatgtataaaaaatagataaaaattattaaattttttcaaatcatgaattggaatggtttttctttttatttcaaaataaaatagtcattccctcaaaatagtggaaagatcattccattaaaatgatattctaatactttaaaatgcaactaaataaaagaatggaatgcaaattatttcctttccattttattttatttcattacctccaaccaaatgccacctacaggtcagccaaaagaccactatatattcatgcatgctaattttatttttaattaatgatgtgtagtaataaagtaaaagacgtatgtaactcaaaatgtttttttttgggggcgatagttatgtgtttcttctaatcaatatatatatatatatatataaaggaaagcactaaggagttgtggtggcaatttgtatgagtttttcaccctcttctttgatttctcaatttnnnnatttttctcatttatttataattttttatatattatcaaata

SEQ ID NO: 127196 - DNA, 1177 bp, Cannabis sativa
tgaaaaactgaaagccccaacaaagaactgaaaagaaaatatgtcgaaacaaattttcaagttgccaatataatcattaaagcacgcacattacaaaggttcaataaagcaatactatcacagctcaccttaagagaaggtgttgaagagtccttccaccatgaattcatttgctgtcatgaaaaattcttgagctgtcatcattagtactatggtacaattatggtgccattatttcacaattgtcaagtgtttcaatacatgtgtgcatttattctagattatccatagtgtatacatacataatcaccttgatgaaattgtccttcatcatatttgctcctgcagtttattactcttcagtttttttttcacatgactatgcaccacaaattaaaaaaaatacatcccaatatgaagttgatccacataatatcatgcatatgtgtaatacacgtgtaaatagatgcattaactagagaggccaagcacacacacatcggacaaatgtctcaatatcacaccaaaacacatttcaaatgttcaattgtggtctcctagaatgattgtttaatctcaagttgttctttaccttagggcccacctgcgtacaaagtaaggatgaacatgaaccatccttattttcataaacaccgtgaccctgcagcttgcaacttaaattgatttagtacataacatagaacaaaaatatctaaagggataaatgctaactacattaccaaagtagataaggccattagtattaaaaacaacttttctaacgtttcccagatataactgtaaaatatctatctactacttaaataattgtaatttcaattataatcttacagcttcaatctaatgctggaaagataacttttgtcccttataatctttgcataaaatccttcctgatctgtcaaaaaaaatacaaaatgtcatggaaaaacatagctctgaaacacagagcaaaaagaagactaaaaaaatatgtatattaatttctaattgcagaaattagtaacatgcatttgaagcaattaagcttacccatgagagagagtacacaattaaccaatcaataacttttttttgttcatcattaagggtcaaaatatgtcctgcaaaacgcttcttatgttcagatttataaatcacatacacaactggttct

SEQ ID NO: 127197 - DNA, 757 bp, Cannabis sativa
ttattaaatatgtttttatactgtgtcacactaaaactaaattaatacacaaatattttttttgtgatttaatcaaaataataatgctaataattagattaatagtcacaaattaatcatactaaaattgacaaatatatattgtgatttttcattagtttcaattgattaataattaattaaataagtgattaattaatatatatatgtatatatgtggactttcactacaaaaaatcttacttttagtcacaacaaaatttgtctaattataaaatcatcatttttatgttgtaactaaaaagtatatggctaaaagtatttgtcacaaaaattaaaataaattgtgactaaatatatttttaatcataataattaatattgtgactaaaagtaataaattagtgataatttgtatctaaaaattatattttggttacaagtaattttttattatgactaaaagtcacatttaatattttagttacaaaaaatttatgttgtgattaaaaggttgtcaaatgatttttttttttatatttgttattttcaaactctatacattaataattttaaattaatcttaaatttgtatgcaatatatagccattcagttatatattgtgatgcatgatataattatgatgcaaattaattaagtcataaccataagattaacaccagatatgcataaaataataaaatataatatatatatattttaatctaaatataataatttatttattaaaacata

SEQ ID NO: 127198 - DNA, 1185 bp, Cannabis sativa
  modified_base (1121)..(1134): a, c, t, g, unknown or other
agggcataaaacccaacagagtcaactatctgggactacctttcaggagaaacagctagccatccggaacgccttttcgaagaaggactagctttcttgaagacccttcctgaaaggataagaaagccttccaagacatgctactgcgagtccacaatttttaggaaagcaaattagctcctagagatattttcatttggaggaaatataccacaaattctacctagttacttcaaattaaaagtatgatgatgatgaagaaagaaagcagccatcatgattggtgttccaggaatctcattatactaacttctgatattgatcaaattcaagcaatgcttgaacttgtttactattaagacgttagtctcaacatcagcatgattatcttctgttctgaccttctctaaattaaccaacccttcttttatcttttctctaatctagtagagacttatatctatatatttgctcttttcatgataaattgggttcttacacagatatatggatgactgaatgcacaatttactccctctttgatttgtttcaattcataaagaactccccgaaatcataatgcttccttgaatgcttccgtagttgccatgaattctacttctatggtggaaagagcaaccacgaactgtaattgggtcttctatgttatacagttctagtttgtcaagaaaatgtaagaagtggcactacaacattattcatcaatagcggcggaggcgtccaccgctaataacccctaaatttgtggctattagttaatagcaatgtgtgctcgtcgctattagtagttattagcgatgaattttgagtccgccgttaataactattaatagcgacgagaacttgccgctaaagtctcccaataatggattttaataaaaaaaaaaattaaattaataatttatataaatatataataataaattaaatataatttaacaaattctaaatattataatttaacacttacaatattcattaatagtattaaaatgtctcaattaaactaaataaataaaattgatataatatatatagtgtctaaattattatttgttgggattattttatcagattctagatttactaccatgtatgtnnnnnnnnnnnnnnaatatgaatttctaaaacaatagaatctaaacacatataaagttttagaaa

SEQ ID NO: 127199 - DNA, 1660 bp, Cannabis sativa
ttgaaaaaatgcatgtctttgattttggcagttttatggttccaatacacatcaatagcattaatgggctgtcttctccaattctcttctattttaatccattagatctttcttattgtgatctgatggttgaaaaatataaattataaaacggtaagaatcaaatttcttgccattttcatcttctccaaaaaacttaagctttctgaaacttccactcgagctttctgaacatgtgcatgccatccttatctttgacattcttcctacaaatatatttagacttgcttttcgaataccgatgttcaaaaaacttatcccgccggccattgcgtctccatttgcagaagtctccaacatccagctttttgacttcgtatagtaagtatctcgttctccctttgcttttatttgagttatgatttgtctcacattccattacatcatttggtttaacaattagggttcgtatctcctgggtgatttttaggttttagctataatttaggtttattatattcctcaagcctctgatttgataaatttcatccaaaagttgtgattatctttcttttgtagatatgtcccaatctggttcataaatttattctccagaatcctcaacaccggtatatcccaaacatatagcctgcccatataaacccataaattccaaacctcattccaaattggaaatgagtgatgtcaggattagagaccatttgattaagtcaaaccaataagagactgccagtcgttatagaagattcttgcaagaaatttctgagggcaagcattgctttttgcaagacacggcctggcgtgcacccttgagtttatcttctattccattcgcaaggccaatgtttttacccgccgtcactgttgcttttgaaccaggtgaccttgagtttgaaatcatgtctcctaagccccgcaaatttaagacccctcaggaccccaatgttacatttgagggagaacttatcgagtccaaggttaggtctattggggcctacattggtggcatccttcagtcctgcggcattaagcactggaaagggtgcgttatcaggcctgtggcaccttgggaattcagttattttcctctagaaaggataatacgcaaggagtgtagtggttccagcatgagtaactcttcagatgttagagcttggagccttgagtatatcaaggctggagttattcttcccctcagggattacttttaaggactactgcaactatctcggagttgccccattccagttgaatcccacctcctatagaatccttgcgagcctcaaggttctgtatcacatcttaggttgggagtgtcctactcctctggagataacctgcttttactctgtcaaagtcattcctgcgagaaagaacgttgtggggggcttctattatcttggggcctatactggcgaccgtaagctcatagttagtttacccaacaagacaaattttaatgatgacttcttctggacgacgggtttatctctaataaagactactgtcttccgaatcatacgtaagttcctttctttgtgaattcatattaacttgtagtttttaaagttgctaaatattaattttaaaaatattaaataattaaattttggtctgataacgaataataaaagagaaa

SEQ ID NO: 127200 - DNA, 1744 bp, Cannabis sativa
tttttttttttttttaagtttacaggtttagtatattctgctaataatttttttaatttgatacacatactattacaaaagttcattgttatttgaagtcgtccagtactagaatatcattatgggatatatttagctttgtgaaaaaaagtagttaatcatattcatttttcattccaagttatagagggatgcctctctctttacatgtataatagagacgtattaacaagtgtctttttgtgtaatatataagtgcagtcttcttggacagttaatctttatgtaatttgagaatatgacacaatatgaggacatttatatatactcaataaatatggagataatatatctttcagaatttatatgtgatcagtgtaattgatttgaaatcacgaaattcagtcaaccataagctatttacataaataccttgtacttgtgctattttacacataaagatgaaaagatgagcataacaaccttagtttttgttgtgtgaaaaggaatgtagtaatgcataacacaaccactatagcaatgttccaacataaacacaaacaaaaatgaaaagaaagactttttaatttggatgataagattagagatatgtaaaataatagttaacatatgtttattaactttattatttttcttaaatcttgattatgatatgattttaatattgtatacaggacaacttaataattagcaagctttattttcacagggaattaaattttttttgattgttatgtccaatgacttattttttttgtttaataatatgatgaaaattttagaggagtttgaataaatattcatatatagtgaagtaagttgtgagattatatatgtactgcggttagattggtaaaataatatgcatgttagatgagtttgaatattttaaatattcatccgtagtgaagtaggttttgcgataaactacgatcggatgagtgatgatttgtattttttgttgttaattgatagatgatttgttaaattggtaaatattgtataaatagaggaaaatctgtcaaaatttttgaaaattgaactatttttaaataactagtacttaaattaaaaaattagtttgaaaattcgatagtttgatcgtttatcttacttagtgtgatttaatattttaggtagttttagttagatatggataaagaatagatgaaaggaaatagattgtttacggaatatgaagagggtattgagtatttcatgaaatttgccataaaaaatagcagcgatcctaatatgataccttgcctatgtgtgaaaattttaaaaaagtgagtggtgtataggtaagattatacctttacaaagcttttatagtttcgtcatacaaacaatctcaatagttcaaggaatatttttaacggttagaaaaatttaagagacctaatttagtatatattaaagtttaagagataaaaatcctaattaattgtatgctaaatatagcatttactaatttttttaggtaaattgcggcattaatacctaatgtttcagattttatacacttaaatactttatatttattttggaagcaaaaatactcaatgttacaattctcttataccattactgccacttccgttaactcgtaaatatggacatgtagagggcacatatgcattacatttatttattttattttgaaatttaatattcttattatcaaaaactaaatacaacttgtttaaaaaaaaaataagag

SEQ ID NO: 127201 - DNA, 787 bp, Cannabis sativa
  modified_base (171)..(177): a, c, t, g, unknown or other
  modified_base (207)..(209): a, c, t, g, unknown or other
  modified_base (255)..(275): a, c, t, g, unknown or other
  modified_base (747)..(761): a, c, t, g, unknown or other
caaggtgtaagtatactttatcatcgattatcatgtcagtctaaatctagtgaactgaaaagtcatgggaattaaacttttgaacataataatcattattatattatactgtgctggcgacactataatcatgaacaaatatatagatatatgttttggacttaatagaannnnnnnattaaacataaccatgaaataaatcatgtnnnccatgcaacataaaagcgatttcatcttatattaattagtaaatcnnnnnnnnnnnnnnnnnnnnntatttagggcacaaaacccaacgagaagcctgttacacgaaacaaagggtaacctgccaactacaactccaagtcgatgtgattattgcgaaaattgaggatcttaccatcatcttgatttttccacaatatagcaaggccctcactatcaccatgggcttccacagcaaaactaccttcatagcccaatgatatttttacatactcaactttatctttcttacaaatagtttcacacaaaaaaattaaattgcgtctcttttgaaaaacaatttcttttaggaattgaaaaaaatgcgagttcccaagccctcagaaattctaacttaacagacttataactcctggcgaaccccagcacgagaacctgttactaacaagatttttttttttaaaaaaaaaacaccagtttttccatgcactacttctatttcccccatctgatgcacttgttgttggaaatattttaccnnnnnnnnnnnnnnntaccatgtatgtttcattaacatcct

SEQ ID NO: 127202 - DNA, 1981 bp, Cannabis sativa
  modified_base (68)..(68): a, c, t, g, unknown or other
ggaccggcagcactttggctcacatcggatcacaaacgactttttggctcacaacggatcacaagtgnctctgataccatgttagaatgtgaaaattagatgaatgagattctatttcaaaaccaatatagacaaaagtgagtggaggtttatcaacaccccctacaagtttcaccttgtccttcctcaaggtgaaagtgagaaaattgatcttggatgacaaaaaaatctttccaggtagcgtcaaaaggaggcaagttcgcccatttgattagagcttgaggaataatcttgtgtgtgtaatatcccgaaaactaaattatgaataattaggatttattatacattatgtgttaattaggtagtaatgagtaggattatgatcctgctaacttaattgaacataaattgtaaaccataagtggataaataagcgtaatttgataattacagaaatttatttgaaatatgtggatataatgtaagttgtttgtgagataaaaatatttttaagttcgacgaccctgaagatctgactggaggctaaaagtgtcacaacattattagttagaaataatattgggattattgggataagttgtttttagaaataccaaggtatttttaaggtactcaaagttggctaaataccttagaaatagaaatttcttagtggttaaaaaataataagataattattaataatagttttttattaatattatattattattattataactgttattattattatattaaaattaaagttgttatataaaacttatatgatcgataacttatatatattattaagtttttgaaacataacagaagaacaaaattgaaattttttgtcggtgcaacgaaacctttaccttctcttatctattttcttcaattttcaactcaaaacttaatgaatattgaatcattgaagagggagagcttaatgtaaggatttgttttcgttttaagttgaatacaattggttttatatagtggttttgtgaattagaatagttacgaggattctgactttatagaattattctcgggttgtcatgggactaattctgatattttcttactgaaattaatgtgattttgggttaaaaattgagtttggaactttttatagattatgtccgaacattagtgacgtttaccagttaagagctcgattttagtttccattatgtaagtatggtagtatgtatggtatatgtgtattctgtgaagtttggagtagtttggacaggtttccgtagcatttcggtaagtgcgtaaattgagaatcgcacctttttgccccctgcccaaccggtcaacctgttgtgaaccagttagtcggttcaggtagaagcggttaaccagttctcaatcggtttaccgtttttaggcagcctcaaaaatttgggaatcatatttttacggtaacttttcactcaggtgtctattttgtacgttctatatactttttcgaagcttacaatgagctctatcatatgatgtatgttttagagccaaaatataagttttattttagtgtatttgcattacggaatttggtaggaaaccctaccttgtcctttacagctgttaaacagtgttttgagatagacgtttattggtttaccattgttgtgatatagggccaagatcattggggatagttctccacttggtttggctgacatgtatgaatctgaattaaatataagaaaaatatattgtactacataatacgttgtattgtaatacaattaatattgttataaattgattaatattgaaattgaaatatgattaatattattatataataaaataaataattgattaagtaatgataacgtgatgttccctttactgtcactgttgtggaaacatggaagaatctgtgcctcacgcattgttctactgtaagagcattcgaagagtctagaaaggtacactattttatccttatattttttct

SEQ ID NO: 127203 - DNA, 902 bp, Cannabis sativa
atcagcgtcggtagcaaattttgcgaaaaccgacgttgaaagggcttaaaaaccgcctctatagggggtttttgtagtagtgaaacaagcaagctaggtgataaatttgttcttggggatgctcttcttagtcaaacttaaggagaactaatttcatgtcattggtccttgaccacacctgaacatagacattgtgtatgcttaacttcataagaagaaatcaatttttgtcaaggaagctcttgtcatgtttttaagcatgatgatttgtttcctgtaccaactagaagactgtggagctttcatgtttgatgtagacaaaatacacccaataaagaatatccatacctatctaaagcactaatgttctattcttttgtatgtgagaaacttattttattcacatgtaaaataaattattttaaatattatttttggcgttataaattatttataatttatacgatttttaaaaaattgtaatgtatagtgtcatatatatagagtaattctaccgtaggactcttagtttgtacctcatcgcatggggtagtattttaaccaataacatataagtcaatagaggctacataggatggtagtgtgcacatatacatgtgataattttttctagttataaaaaaaaagtggctgccttataaaaaaattgttaaaaacatagaaaagagatatctatatatgttgtgtgtatgtatagattaatgggctattttttttttattttgctttaatttaatgagctttgttattttaattttattttttattacaaaaataaataaatatgatacaaaaaattcatatataattttgagaatgtaaaaaaaatatatgttaatatgtgtcataaaaattataatatgttcataagaatttgttag

SEQ ID NO: 127204 - DNA, 723 bp, Cannabis sativa
  modified_base (32)..(34): a, c, t, g, unknown or other
attcatttatcagaaaatcaattatttatttnnntccttaaatagaaaattatttccttaattagaaaataatttccatatataaaatattctaataaaagatagctgaaaaaattgacaaaatgtaacataaatgataattttataaagttcaagaggatatttaaaacctttataagtataaggcatggttttttaaaaataaattatagaattttattaatagcaattagttaaaataataacttgaaatctaattgggacatctcctcactagattcacgatcaggattataattaaaaaaataaatcaacaaataatcaatctaacttttaaatcttttgacaaaaaaatttaaataaaatcacatttataacattttttttttattatttcatatgtatggaaagcattttatgagcaatgctagatacatacaaaactacacgcatatttttacacacaattatatgtatttagtttattatgtttagtgggagggagggatagtaggatggatggagaggttagagaggatggggagtaagagggatagagatgattgttcatctcctttgtattgtttggtattaggggtgaggtgggaaggatagaaaaaaaattaattagtaaaattacaaaattatccttttaaaaataaaattctattattttttaagggtagttattgtattttgcaaaatgtgttttgtctttttcta

SEQ ID NO: 127205 - DNA, 937 bp, Cannabis sativa
gaatcaagtttgtggcatcataggctaggccatccttcctttaatgtactcaaacatgttttaatcaatgaaaagaagtctttaccttctaatttacaattttgttctagttgtcaacttggtaaatctcatcacaaaccttatcctactactttaaaagaatcaaaacaggcccttgaattggtgcattcggacatatggggtcctccaccaactatgtttagactcggctatcggtattacatctattttttggatgatcttagtcgctacacctggatctttcctcttaaaaccaaagatgaggccttatctaccttcaaagcttttcaaatgcaggttgagaaacaactaaataccaccataaaaactgttcaaaccgattggggaggagagtatagaaaattcgagccatatctccaatccataggtgtgaaatttagacatccttgtcctcacactcatcaccaaaatggaaaagctgagcgaaaacatcatcacatagttgagaccggccttactctccttgctcactcaggtatgcctcaaagatttagctgggaggctttccaaacaacaacctttcttatcaatcaccttgccacacctgttttaaattataaatgtccaattcaaaaactgttcggtcttgttccaaattataaattttcaaaggttttcggtggtgcatgttacccatatcttcgaccttacaacacaaataagttagaatttcggtcagccaaatgtgttttcattggctacagtccgagacacaaaggatacatgtgtcttcacacctcaggtagagtatacgttgcaagtagtgtaacctttgatgaatcagattttccaattgctaatggcttcacatatcctactgcacacacagattcctcactctcaccttgttacaccgtaactagcataggcgtat

SEQ ID NO: 127206 - DNA, 1515 bp, Cannabis sativa
agtctactactttaaacgatacgtacacttgcgtgtgtaaaatatcgcaacattggctctccgacactgagtcacaaatctatttcttaaaatcaaccctttatcctctgatgactcactaaattttaacaaacttgataacatgaagtcttactcttaagacttgaagtcatctcaattcgctatctcccctcggcatatgctatctaaaccattcaacttataatgtctcatacaacacaagtgttcccataaacacaaagcacacctataacatgcagaaaactagctcagtcttgatctcattctacgcccatgcatattatctatatgcaacttgcagcaatcaggtaagtcttcacactaaataacccatctgttgtactgtttccttctacattgacacaccaaaactgaacaagtaccctgattattcaaatatatgaattagtaggctcccccacttcaacttgggaagaagttctctcttagaggaatacctctcaaggtatagcttgcaagctaattcactacaagaaatgtcacttttgtcagcgcagtaacgaactgtgctggtaaaagtgacatctcttgtaaggtaaccgcatacgatcgcatacagttcttccattccaaatgttactttaatgaagatgttgtactaatgccttagtcattctgactcttcgccccttgacatttctatgttgccttagtaccttaatcctgttgactttcaccttaagccaacattgccatggtgttatcttagtacctaagtcctactgactttcaccctagataattggcacttcatgtgtctcgagtcttcttgactttacatcctgaacaacaatccatctccatgatacttatctcaatacttgcaatgaataccaagtctattgagtgaaccgtgagggtctctcccccacttcatctattggcatcctcaacaacatgcccacacgtgaatgcctgactgcccagttcttcatgcacaccatgccatctaaaagtgcatcccacaggatgtgactctcgagtgacctatctcatatagcacccttatcgatttctatatgcatgaattgtccactcaaccatccaactaatttgcactagcatcacgccctttcggactccctcgatgtactaagttccaatgatgaaagcctctagacttcatgcaaactctagcacccctcttaaccttcacaagctcacatgactattaagcctcactagcacagccttttggcctccactcaaactctagcgccatcttaacacttgaactcattcttcttagccctgctggtttttttttacgcattcattctacaactatgtatctctatcgatgcttttctgtgacttacgcccactggaacttttacaagccaacacatctcactcgactgtctcagctaggggtgttcacaaagtattcgatccaatccacactactacaaaaagtataattctcgtcagtttttaagtgtcatttaaaga

SEQ ID NO: 127207 - DNA, 876 bp, Cannabis sativa
  modified_base (433)..(442): a, c, t, g, unknown or other
taattaattaattaattatacttttagggtttgaaacattaatggttgtgtgggttattcttgtatgaactacgtatatatagtcagaggcggagccaaaatgagaagttaggagggccgaactatattataaatttaggtgataaaatatttcaaaaacaatttattaacttcataattaaagtttctttaaaaaaaaagcttcataattaaaattaaaacgcaaaatctttttcttgcatattatgaaagttattgttaaggaatactaatttttttgacgatttctctttttcaatatacaatactagcaaacaactacttaaatattcatttttatcttgttgccaagtatagtttttattatattcatagttgaaaaagattatctttaatttaataattctagaaatgtaagaataagagttatcannnnnnnnnntaattaaaaaatttaaagtggtacgacaaaaaaaattgaagtgatcatatcttgcaaagcaaatcaatattattaattttttttaaaaaaatcaatattattaaagaagaaataatgctttaaaagaaaaaaaaaaggaaataaatagattttcataaaataaataaataaataaaagaaagtaaaaacttatgacaaaaaaagttaacatttataaattttaatttgactttcaaaggagtacaataattatcaaaacaaatcaatttttatatataaatataagcgcacacatatatatattctgggggccatagcccccatatgctctaatgtatattcgtgcttttgtatatagctatttcatataaaatgtagttatgtaataaattttttagtttaacgatatcttttaatttttacgttaattttaa

SEQ ID NO: 127208 - DNA, 1057 bp, Cannabis sativa
  modified_base (165)..(166): a, c, t, g, unknown or other
aaagtcctaacatggataaaagttcaggaaaggaaacatttaatacatgtcaaaattcgaggggtatgatttggtagatattaaagtgaagagcatggttaatttagtaataaataattactgaaatagtaaaattgaataatattagacaaaagtctttaaatnnaacaatctcaatagttcaggaaaattttttaacagccagcaaagttcaagagacatgatttagtatatatgttaaagtttaaggaacaaaaatcataattagcctatattataattcgaagaactttgaaatattatattttcaactctttgaaatattatattgaaaaagtaagagattatcactaccaacgatgctatatctttactgataattttttattacaagataaattttcgtaactaaatattacttttattattgctacaaaacataatttacctgtcactaaaagataatatttaaatacaaattattagttttattaataataaattgtggttacaaacatgtttagtaaaaatatattgtgatttttatggctaacaacacttattgataatataacataagaatcacaattttttttagtcataaatcttgatatttttatagtgtagtatatatagatataggcttcgtacatcgaaataaaatatttgtaaggataaataaaccgatcgatcgatattaaacattgatgatacaaatacattaattcaaaagcatatatatgaaaaatggaagagacgattaaatatacgtaattgaactctagagaaatgcaccctgattatgagtcgtaaaaaaactcttatttttctagaaatcaaccctagctagtattaattattctctctcaatcacatatgccatgatgattaattactcatcatgcgatcgatcctcagttctcaatagtggctaggactcgggggttttccataaaccggagggtgtccagggttgcgtccgtagctcggtggtggcttgggcttctccattgggggaggtttcacataaactggggttggtggtggcttaggcttc

SEQ ID NO: 127209 - DNA, 1058 bp, Cannabis sativa
aacccttaacctcaaacctaaccctgtctttggacctacgttcggacccagccctagaccacagccttagacccaagtcacccaaccccaacttcaaactttaccacaataaaacctaatttttaactattacaatacatatttatatatttttttatgcattactaaagaaggagtatcaaacaaatctttttaatatataagaaaaaatacaataacttttaaattaaatttttttgatattttatatagattatacacaaaggtacatctatagcccttggaagtattggataacttcccaatgatataatatcttgaatgagatatttctttgtatttatataaaattcatattaatttctcatttattgtttggagaaaatcatagataatattgtttatgatggcaacaactctttgtttaatcaaaactagaaaaaaaaaaatcataaacacccacccttcttccattttaagaaaataaaaaatgaaacatcatacacaataaattaaaaatattattatattagtaaataactaatcaaaatattatactaacagataacccccttacttgaattcttataatataaagttgtttttcatttaaagaaaaatgatgatatgtgacaatctattagaatggtatattactttaaaattatagaaaataatgcacaactttttacactatttgatataaataaattttaaatgtaattttgagtaactacacaattatttttttgtacataacataaaccaatcaaccaataaatttttctcaaaaaaataaaaatataaatcaactaataaattttctcaaaaaaaaaaataaaatctactgaattccaaatataaacttgagtcttgagttgttacctaaaatattgttgttttaaagaaatataattagagatggaaatttatactgcggggatgggtaatcgcggggacccgtccctaatggagttgggattccccgttttggtggttaatggggcggtggtgggggacaatttcaatacccaaagcggggatggggcgggagcggg

SEQ ID NO: 127210 - DNA, 1194 bp, Cannabis sativa
tataaagttcaatttagctaatgttacaacctcactaacctcactagctcgtttcggtgcttccaaatagcccaaacaatcatagaagcctcaagcctttcggacattgtccacacccgtagcccctcctcgaaccaggctacaaacatcatcgctgcagcagccacactaggaactcgggacaagccccaacaactttgagcgaaagagcatcgaacaagaacatgcagagatgtttcgggggcagatgtacacaaaggacattgagtattgattggcacatgtttagttgaaagccgaaaccttgttggtaagcaattagaggtgactcgccatagaaaattcagcacctttggggggagtttcaactgccaaagttctttccaaaagcccaaatttaccgccattaattactacccttgattacttgttgcaatgcataagcactcttcactatgaacaagccattgtcttccttcatccaataccaagtgtcattgcctacattccttgtaagaggaatttaccaaactaaagcttgatctctaccacttagcacatccgaaacaatctctccatcccactccaaggagtcaatcttcatcaaagagctaacaagattccccacaagagctggatcccaagactcaatgaagggattcaactcatcagctagccaaggatccatcaaaatgttcgttgtagagtcatcccccaccatctttcgaacccctactcgaaccaattcttgggcttcaaggacactcctccaaatataacttggattagatccaagtgtagctgaaaggaaagagcccgtagagaagtatcgggctttaaagattctccccatcaagctatcgccacatgtgagaagcctccacccttgcttagccaacaaagcaagattaaaatccctaaaatcccaaaatcccattccaccaatagctttgtgagccgaaagcttatcccaattcatccaatgaattcccttgttagaagaagatctccaccagaattgactaatagctcgctcaatatcattacagattccaacagggataaggaagacattcattgtgtaagcaggaagagcttggacaactgacttaataagcacttctttaccagctctagaaagaaacttgttgtcccaaatttgaattcgtttatgcaccttatccttcacataac

SEQ ID NO: 127211 - DNA, 881 bp, Cannabis sativa
gaccatgtgtatttacgaggtttcaatagaagttatactaattggtattaccatggcgaacatttacctaatgatccatattcattaggaaagcgggagtagatgatattgagggtgacgatccatatccatatccatatatacactaggcttaactagaggagcaagttagtcagggacaagttaaggtctatggccaaaatgacattataacgcaagcgctcgggacaccagagcatcctggacgtgtcaaggctgctaggtatgctagtacttaaaaaatattatttcattagttagacaaaataaatattcattaactttatttatgaatttgtaggttcattgcaaaggcatctaaactttttgctaggaagaaaatagaagtttctgatgctgtggctcaaaaataaagagaaacatgctcaagattatgttccacacgaacatgctcatcaggagcatgttccacaaaattatgcttaggacactactacaaaattagattttaagtgacaccgcacttacaaaagtgcgggtcactaaagggttaggggtaagtcttagtgactctcataaaatgactctaaaatttcaatgttagtgacttacaatttgggtcattaaaaagtaaatcatataatttctattattgtttttttttttaaaaaaaaaaagtttacctatagtgacgcgccaaccatgaatgggtaaatatttgccgacttgtctggcgcgtcactatatcataacacaaattatatacaaaactccataattataaatgtaaaagtaaagatttattaaaatatatatataaaaaaaaaaactaaaagaagtaaaatcaaaaaaaaaaaaaacaacataaatcagaagataat

SEQ ID NO: 127212 - DNA, 822 bp, Cannabis sativa
  modified_base (756)..(761): a, c, t, g, unknown or other
agagatagactaaggggttgagagttatgatgcaaaatcagagctggaggaggttgctccagtgaggaggaggaggaggtacatgactcgttctatcctccctaattgtcccttgggccactatggcgcctgtggtaatccactgaataggctctgtgagccttcagagctaggactggaccatgtcctggaacaatctcctgagctggagatactggatgcgagatcacatggagctagttgggtctcacctacttctactctgtcgaatgaggcctttagtgagatcattgctagtggcttaatatgggatgtccacggcgagattcctcgtagaaactatcgggcgcaccgaccccctccaggttggttggtatgatctgagcatcatattgaacatggggcggtgctgccacttcaccagtattttttggatgtcactttgggatgtgaccaacacagctcatgtcgaagagcataaagaatctcttgacgatgttcgtcttgtatagggagttaggctggcctccacctaccccttacaaaatcggtactactttgatctgaagtctgcgccgaagtagaacaggactggatatttttattttagccagattggtcaccaatggttgggtgacactaattgcagcacaaccatgtcgaaggttggcggcaggtatgccaaaaagtactttattgcatatggtttttgttggatcaggcactaagaattccagtgttgggttttgtgccctnnnnnnaactcatttcaatataatcagatctacttattaataaagttcagaaataacattttatgtt

SEQ ID NO: 127213 - DNA, 770 bp, Cannabis sativa
cttatattgatagcacaagttgtcatgcggtggagcatggggttattaggcctaagagaggagtgtggtgctgacattgatgtatgtgacgatagaattcgggccagggattgggccatgtgaggtgggtgaggccaagataggagaagaagttggagggggctgctgcagcatctaggctacatgaggagtgggcctggacttagcagcatgagaagtgggggtggctgggctcgtgtgagcgtgtgcctcattgtgaggaataggtggagagttgggtcgttgggttgggtcaggttgtggatttggtggtgctagattctgagagaataacattcatgattgatggatcaatattatcactcagaaaatcataatttgtaggagtggttttgtgtagggtcaaaaatggaaattcaatttcaacaaaatgcacatgacgaaaaattattatctttccactagacatatcatagaaatttgagccacaatggtttggagccggactaagataggcacaagggaaagactgttcctataatttgttgatagtagtggaggaaaataatgaaaaacataaacaatagaaaacatgtaaattcgagtaagaagggtcactttgataaatgatttgtgcaggtaataaataatctaagaccttagaaggaaggatatttagaagatatatcgccatagatagagcataatgccaaaaggatggtggcattgaagcatgagctagaatggtccgaatgatattattgatagat

SEQ ID NO: 127214 - DNA, 823 bp, Cannabis sativa
aaaactgaataattcctattgtcattcatgtatttaaaacaaatttgtttaaacctacttttcttcctttcattttctaatcatacaaacaaattaggaaaacaaaattggaataaaaacacttacgattaactaataaatgagcgcaaggccagccacgatcagaggagagagcgagagactcctcgtcggtgaggcgatcggtgagcttgtcgactaagtcggtgaatttgaatgggtcacgtcgaggcggtacccaaaaggaggaaccgggaaggaaaggaagccaatcaggggtggccctctggacgatgatcctatggactatgtcgtcgagcttcttgatcattaaagcctccgattcacaatccggcgactgagacgacaggtcgacctcgatgaggccgtcatggcggccggatagcgtggaacgagatcggtgaggctgcaaaagagagagagaaagggcagtgagaggtgtagagagatgtgagggtcgagctgggaaggttttggagagaaaccgtgctgccattgatgagatttgagggacaataaaaaaataagataatttatgggttgggacgataatctggcaagttcggccacctattaacaaagtggaataaaaaaattaaagaaaaaaatattaactataataattactttaggaaaattctacacacacccttaaaatattaatgcatctctatttattttagcttccaaaataattttttagttaaattttttttcatggtaatgtacgttatagttatttaaaacatcctgtaaaatttggaaaaatttaacacgccgaaaa

SEQ ID NO: 127215 - DNA, 757 bp, Cannabis sativa
caagaaacaacatatccaattgcattaccacacttaaaacaaaattactttctattttttggttgggggagaaagagggggaaccttatgatagaagcattgccagctgtaacagagcccctgctctacttgaaattcggtctgagttttctcaattttgcagcatcgaactatgaagggatacaaaagaaaagcaatatgaagcaaggattgagaaatctgacttaaaatataatttgaactatagaagcttttggtgacatgaaaatcaataataatacaagtttgcaaaatttggtatttaccatttagtatcaagatcacccatatcccaatattaaaaaataaacgaatggaccataagaaatcctagtacctagaagcaatcagagaagaaacttctagttgtggaacaaaactttctttcaaatgggcaagcagaaaagaaatatggatactgaaatgacactaattctaatatttgcattgtgaaaaagcaatagaaattacaacagtagcttatgtaatttacttttaaaagaacaatttactatttctattatatgtactacgtacataccttagaccttcatccttgtcaatgtcaacaattatggatggcttccctcgcccccaggtactttcacctacagaaaattgtgaactaaaattgatgttctaaagttaatttaaaaccaattaaaatttttgtaatatataaagaagtaatttcttgaggttttatttaatgaagaag

SEQ ID NO: 127216 - DNA, 841 bp, Cannabis sativa
aaataatgagatctcatgctttagttattttcaataaattagtttattgtttttattataaatggttttaaacagactagcaagtgtgatgtctcagaaaatcggggcgttacaatagctagaagctataggtgagacaggtgatacgcgctttggttgtggtggaaaacacgcgcccaaatgggcctttcgatcaatagctggacgatcagatggagagtgggcttcatctgcaagtggaccttggcatatttgaatttgatttacttttggaatttatgcttttctcctcatttctttaagatttcttcaatctagttctcatccttgttcaataaacgcacttgttaaccctaaaaattagcactactaactctcgaggttagtcaactaataactaaaggactaacaaaagcgcattcaataatcttactcactcatcatgcatttttaaagtcatcgtcgatgcatatgggtctcgggatgcatctaagtaactcgaagaccaactccgtggtaatccacaaacaaaatatggaaaaaggtgaggatgtaagtaagtgaagttaaggatggagaccaagtcgcggatgcatgtgtgagtgtgtgtcgtcgcatgtgcatgaaagtcgtgagtgtgagtgtgtgcatgtgtgtgttgggtacgagaggaggactcgcatgcaagccatggtgtgtgtgtgtgtgtgtgtgcgagagggggctcgcatacaagccgtggtgtgtgtgcatgtgtgtgttgtgtgtgagaggagggctctcatgcgagcccatgtggggggcttgcatgcgagtcgtggtgtgtgtgtgtgtgtgtgtg

SEQ ID NO: 127217 - DNA, 1362 bp, Cannabis sativa
  modified_base (552)..(552): a, c, t, g, unknown or other
  modified_base (1311)..(1315): a, c, t, g, unknown or other
aatcagattagattgaaatgggttttatttagggcataaaatcccaacaagtttatggttttaggtttaggattaagggtttaaagatttagatttagggcatacgatttaggatttatgatttagtatttagggtttggggtttagggttttgcatttattgtgtagggtttatggttagggttttgggttttagatttagggtttagggtatagggtttagggtttatggtttagcgtttagggttttgtattcaaggtttagggtttaagggttagggtttagggttgagtgtttagggtttagggtttatggtttagtgtttagggtttacggtttagtgtttaggatttatggtttagcatttggggttttgggtttagtgtttagggtacaaggtttaggtttagggcttaggggtttgggtttagggtttagagtttaggctttagggtttagtgttagggtataggttttgggtttagggtttacagtttagggtttagggcttaggatttagggtttagggtttaggctttagggtttagggnttagggtttagggtatagggtttatgtttttgggtttaggttttttcaggtttatggtttagggtatagggtttaagggtttagtgtttagagttttggggtttatggtttagggtttaaggtataaggtttcaaggtttaatgtttagggtttagggtttatggtttagggtttagagtttagggtttagcgtttagggtttagtggttagggtttagtggttagggtttacgattttgggttgatggtttagggtttagggttaagggtttcgcatttacggtttagggtttaggggttagggttttgaatttagggctgatggtttcgtatttattgtttagggtttagagtttagggtttagggttttggggtttagggtttacagtttaggatattgggtttatggtttagggcaaggtttagggtttatggtttcgagtttagggtttaggtgttcagcgtgtagggtttaaggggttttgggtttaggctttaaggctttagttatagggttcagggattaggtgtgtatagtttagggtatagggtttagggtttaggggtatgaggtttagggtttatagtttatggtttagcgcttaagatttagcgtttacgggttagggtttagggtttagggtttaaggtttttggtttagcgtgggatttgtgtttagggtttagtgtttagttgttaaggtttagggcttagggtttagggtttctgatttaatgttggaatatgttttaccannnnntagatttactaccatgtatattatttaacatcgtaaatatgaatttc

SEQ ID NO: 127218 - DNA, 759 bp, Cannabis sativa
gcacgggtgacacgagtacggcacaatacgaaggaatatgggcttgggccaagtacgacacgaataaatatgagcacactacaacaaatataggttttaggggcgacaattgtcgcttctaatagtattggaaatcgcccctaaaagctattaaaggcgataagttgctcctaaaaaatcgcctctaataattcgcccctaaatgtattattaggggcgacaaaaaagtcacccctaattaggagcgacaaaaattacccctaaaaatattgtgcatcagtattaggactcttttcttttcaactcattatctggaggtatagttcaatataataataataataccgaaagaaatgccttgaatatatatgtaggcagtccattttgtgaccagaaatgcaaaatacggaatgtatttcgttgtacggcagatgagtttcagggtacgtaataatatgtgtaaatttatttatgggtcccagggtacgtaataatgtgtcctaaggtacgttactattttttaactttaattacccatagatcaaacacagccctcagaccaaataactaccccatctaacgaatgtgtacatcacagaatatatcccttaaagtacaccaacggaacaaaatcgtgtcgctacatatgtaatatattgacacatacatacacattacacttgagatgtgaaaattaaatgggaaatttgattttttatgcttacatattcttgaaatttttcccttaaactcataata

SEQ ID NO: 127219 - DNA, 1675 bp, Cannabis sativa
tttttgcatatttgtgaaataatccccattgttttttttttttttgtatatatgcaaaccaattgatggacctacatgatcactattcgaaagtcctattttttatttttatttttgtagtattgtcccctttaaatttataaaatattatataattttattttattctctctcaaataaatttaattttttccacttagattccgcttatatttttattatatacattgtctagatttgattatattggtgtgtcccatgctagaatttaactattttaaaacatatagaatggagtgttaaaaacggattatattttagcacagttcaaaaaaaaaaattactttaatagtatgttaactttggtacatacatataattaagagttgtatcaaatttgatactagataaaacattagtgtcaaatttataattttttttttatttatttaccatcactaattacgtttatattatttatttactataatgttacaaattattataatttatcaactatcaataatatataattaacttcgaagtataattatatatggtacatttaaagtataattataaataatgactaacttatttttgtatgtcaaatttaatttaattaacacaaaattggagattgtggcaaaactattttagagtgtagtactatcttaaataagatatgcataatccactaatatgtagtttatagcctcgtttaatgttaattataaacattttacaaataaatttattatatgtaatagtatgtagtacatcccttaaatttgtttatatacatgcatatatttgttacgaccccaactttaagtcatgaaagatttgtaatatttatgatttgagtaatcaaatgtcacaatctactaagtatttacttgatgattacgtttaatattatattaagtatttattttaagattttgtgagtcataacttcatggtaaatttattattcattgttacacgttcattaatttaatgctatatacaagtatctatcaattagattatgtcaacgatgactttaataaaacataattgttttattaatactttagcgctgcaatttaaaagatacgcatccataatattctgttaccatgttctatacatgagaaaaagttaatgctcttcagcattataagtaggtatacatttgtaacagtttgatatgcacttccactgattaattttctttttggaatatttgtattttacttttaaatacgtatgccagacacgtgacgaattataattcttaattttaccaataaacaaattttagttatctcacaaaaaaaaaaaaaattcaattgtttgcacatcatataaagtacaattatcagtaaggtttggttttgtcattgcaacttcatataaaaaaacttaattgctataattttaacaaagtacccatttgaaaaataagattttatacatgtttttctaacaatctcatttaatataatatgtaaggtacaaccttatttacattatgagtgtaatcatcaattgaattttattaatgacaacttcaatcaagactgatcattgagaatttggtcttattattttagttaatagtacaatatttatatatcctattttaatacatataaggagaaatactgagtaagttgtgcaatctcac

SEQ ID NO: 127220 - DNA, 951 bp, Cannabis sativa
tataatgaaaatattatctataaaagtaggtatatcttaaaaaaaaaaatatgaaaataaaagtaaaaattaaaatatttaaagtaacattgtttttatttatttttttacaaaaatattcattttttacatgttaaaaacagaaattgtatgctatgttgttatgttattttgattggtgtatttagggaggcacacaggacaaggaagaattttaatttccatcccgacttattttctactaggaatggggtaggaaatctcctaatcgagacgaggacgggacgaagaatctcctaataaaaaaataaaatttataataaaaatttaaatacataaaagtattaaacaacataaaaattaaaatattaaaatttaattattactcaatagattaattattatccaaaaaataacttaaaatcataaaaatgatactaatatattaaattatacaacataaattacgaactataaaatattattagaaatataaataaaatattaaacggatcaccatcagggtggggagtgtagtccccgtacctattctgtttaattttcggggacaaaaaataatcctcatccctgtcttgttctccatttagacaagaaatcttttaagggtggatctattgataaaatgtgtatatcttgtattcaatctatgatttataatatctttttaattaacataaaggagttatattcatcatctattgataaaaataaaaaaaataaagagcaaagtcatacccattaaaagacattgttttgtagatcctctaagtgaggatccaatagtactttatctgatcccttttcattttcagtggtttcgaagagaggagcctcaagctttggagggttctgcacataaatcactagctagtaaatatttattttattttattttaaaaaaataattaattaaaaaagaaagaaaatatt

SEQ ID NO: 127221 - DNA, 910 bp, Cannabis sativa
ttttttttttcatgattctatatgttgtaattatttaagattatttaaataatttataatgctaaaaataagatttatatattttattacacatgattgtttttctaatacatatagtaaataagtgtttaaactttatttttaataccataaattatttaaattttttaaaaaaaattaaaaatgatcttaaattactacaattgatcttaaatgctgatataaataaaagagcgagaataaaagaagccaactacttaagaaatttcctattttatatttggagtaagttgaaaaataccacttttgttaatcaattgattaaatttaactctaattttatatttaattgaaacaaacctctttttatatgtattgtacccaaaatatctttacataagagagtcacaagaagagtatcttgaagtgataggggtaaatttggtacaatgtttgaaaaaagaaataaaaataataggcttttaaaaagtaggtaaaaataaaagagaacaatataaaaagagtatagagtgtaattttctctttatatttcatgtttggcgactacaaaagtagttttcctttaggatcacatatttaggatagtataaaaatttgtcaatattatttaaattactatatatgtagctaaaaacacgttaatggaacttgatttattattcctcttttacttactctatggactacaaatataatctctatattatatactttattcgaattcgatgcattaaattcaattattctttttttttttttttaacaattaacaagattaatatacatagctagtgtagtggcatggccggacccatacggaaaaataaaattaagaaaaatatatattttaattagttaccatatatattaataattaataagttagaaa

SEQ ID NO: 127222 - DNA, 1181 bp, Cannabis sativa
taggactatcatccaacatgtctatttcttctaaaatagtaattcttaattcttttaagaactatatgggcacaaggtttcccttgtcagttaaggtcctgctcgctagacgggcaagtgcatcggtcgttgcattctcttctctagggacatgccttatagtataacctttgagctgacttaaaagtcttgaatctttctcaaataggctatcattcttttacctcgagctgtgtatttacctaggacttgatttacgactaattgagagttgctatatatgtccagttaattagcctgcacttcttgtgcaagcctgaggccaacaattaaagcttcatattcagcatcactcttggaggccttgaaatcgaacttgattttgccatgcaactgttgcccccagttgtaatgagggcaatgcctgcaccggaaaggtggtcagtataacttttgtcaacatgcaacttccaggctagaatttttgtgctcttgctttttcttattctcttgctcttgctattcttccaaatcttaagagattacaagagatatgtctgtacattcaatcacgaagttggcgagtttttgacctttaatggccattcttggtatgtaagtgatctcaaattggctaagtttaaaggcccacttaagtagttggccgaatgcttcaagtttctgtaacacttatcgcaatgacaggtcagtgtatacctttattgggtgagcttggaagtatggctttagctttctcaaagctgagagcaaatagtatgtcagcttctccatgagtgggtatcgactttcagcatcaataagccttttactgacataatacactgggtgttgaattccatcttcttctctaattaggactgcacttacaacatattctgtaacagccaagtatatgcctaattcctcattgtccagaggtttcgataggatatgaggttgagctaattgtttctttagctcttggaatattatttcacactcctctgtccattcaaaatttttattttctttaagaatgttgaagaaaaggacacacttgttcatggattttgacacgaatttgcttaatgatgtaatgtgtccagttaggctctacacttcttttatttttgtgggagacttcatgttcaaaagggcttgggtcttatctggctttgctt

SEQ ID NO: 127223 - DNA, 1147 bp, Cannabis sativa
atggatgcgtgctgagtgacatttcacaatgtcattgctgagtgacattgtgaatccccttgtcgagtgacttcatgaatgtccttaccgagtggcattcttggatgcatactgagtgacatttcacaatttcattgccaagtaacattgtgaatgcccttgccgagtgacatcttaaatgtccttgctgagtgacattcatggatgcgtgccaagtgacatttcatggatccatgccgagtgacttctcaatgttatggccgagtgacattgtcactctctaggacgagtgacattgttactcttatggtcgagtgacttctcaatgtcatggccgagtaatattgtcactttatatggcatagtgactcaaggccgaatgaccttgtcactgtcaaggccaactaacattttgataaaacatcattcatttttttttacatattacaacatgtaacaacttatgtgaagcatgcttttcaaaatacaggtctaacgaaattatcacaagtatttatagctctcgttacttattacaattagaggtgatgttattatgaacctaatgtatccttatatagaagagagaaacctatgtaaaatatgataaatgcactctttaagaaaaatggaaaaagtggaaagacaatatgttcaatatttaaataatatttaagtaatatataaagaaaacaaattagcagatgtcgatatgtccgagtggttaaggagacagacttgaaatctgttgggcttcgcccgcgcaggttcgacccctgctgtcgacgttctaaatttttatctgacaacttttttctttttttctttttttgggtttaagtaactcaatgttgacgtgatttgtgaaatttattctaatgaaatattctactaaaagagatggtatattatacttacacttcataaaactataattacaccctattattaaatttactttaatttttaattaaaatattattttttttataattacaccccactttgtgtaccaaaaagggtatctttgaatacaccccaaagctttaatttaccattgaaaaaaatggaaaaaaactagaagtcattaatggcttctacacattgattgtccaagtaaatctaataaaataaataataataaaaa

SEQ ID NO: 127224 - DNA, 570 bp, Cannabis sativa
ccaagaactgcgattgtcaaatgagcgttatgtcttcacacacagaaatgacgggatttacataatcaacctcggtaagacatgggaaaagctccagctcgctgctagggttattgttgttattgtgttcatgtacctagcaagatgctcaaatgagattcactttgcagcatatctaaattcacgtcagcattgacccattaaaagcgattaaatcacagttgtatgattttcaaataataaccgtatttatttacgtggggcgtaattaaggcccataattttgggtaaatattgttgtgggattcgtatctgattgtaattaattgccaccgtatgtcactataaataggggcagaatgtacagaaaaagagacggaaaatcctttagaaaaaagaaccctagtttgtatcagaataatcttaataagactgactcgtggactatgcagagttatctacaaaatcacgtaagaacttggtgttttttttatttattattttttcttagatttcaactaatttctgtgttgatcctatcacgaaaataggctaattatcgttaacaaa

SEQ ID NO: 127225 - DNA, 669 bp, Cannabis sativa
atttttttatttgtttaagtttgtcattatgaatattcactaattattatataccccacaagtactagagtgtgtacgctcttgaatcgtgaattatatatatgatggtacataatatatgcttccgttatttatataaacttagtaatatagtcactctttctaattattttaacttgtttttaaaattataataaaaaaattaataactcaaataaaatagttctaacatataatattaataaaatgttagtattaataattttatgtaattactacatatcaaaactccatatttttttttaaaattttattcactatatttttaaataattattattattaggatcaaattttttttaatgtgttgtatatatagaattttaatctacttattaaaaaaaaagttattataaaataaactcttatattcataatatattattttatatatagatagattaatatttataaatctaataaaaaatataattaaaaaatgagagaatttaagagatgtagtaatgctttaaatgtctttctttaacaaacgtgtatgtgattataaatatgagaaatgctaaagggtgtcagttgtgcctaacactattctatgtgtcaatattgctattgatccaactaagtattgggtctcatataatttaatat

SEQ ID NO: 127226 - DNA, 1059 bp, Cannabis sativa
ttttatttctcagctctctctcctccgcgaccataagtcacgccatccctctcctccactctctctcacttcgtccttctcctccgctctctcatagcaacacaaaggtaagcacaacattctcttatttactgtataaatttttattagctatgatttaatttgttgatcttgatctatgtgtgtgcaaaaaaaattaaagcttgcaatccgaagaaaatttcgagaatagtcaagtgaaaagcaatctgaagcttgtaaaagaaagttttgaggaggaggaaagcgacagtggatgaggatgaagcttgtaaaggttttcgagcggctccgacatatgcgagaagtggttccgaagaggatgaagacgatgactttgttttttgagggggaaatccactataagccacagtttaaaaccattggctatactataggtgacgttttaaaatcgtggcctatagtatcaactataaaattgtcggaaattcttttccctaatttttttaccgtcacctattctaccatgtattctcgaccgtcaggaattctttaccgggtgtaaaactgtcacgaatttcgtattttttagtagtgttatagtatactactcatgaataatacctcttaaaatataaccattacagtaactccttttatcatattccattcaattttatggtgaaatgagtgacgtggtggatggtagttatatatagatacaaattaaatacttttttttttatcctttttactttaatgattaaaatactataaatataaatatcaatataaattattatattaaaaaagtcttttattctattatttattaacataaaaacggttaaaggtatttaatttgcgtttatttatcaacgatcatccactgcttcactcattttacaataaaattacatagaatataatggaagggttacgttactgtaaaatatatttcaatgggtattattaacaagttatacattataaggggcacaacttaacagtgtaaaaagttcaatgagtaaaaatactaattattctattaataaaaat

SEQ ID NO: 127227 - DNA, 1945 bp, Cannabis sativa
cacttattaaggcggtcgttacaaatgccaaagttaggaaacatcctagctttaaactttaacatcttctttttgttaagtggattcaaattgtattgatcaccacatttaaaaccagctatagctaaaaactcctctactccaagtctaacggctttagaacctatcttataccaacactcctcgtcatccctctccgtgttaagttaccttaatattataagatgcaccgattttttttttttttgaaaaacaagtgtatgcatatcagaaaaaaacccaaatggcgtctttcgaaagatttcttcctgctcacgtgaaaatcttaacttcatttcaaagaggacacttgtatcgttaaaatcttgagcaacacctctgaatctctttttgggtttaatcttaaaataaaacacctgatatataaattcaaaaaataaatagaaaaacaatttgaaatatcaaataaaaaaataaagaaacaaatacaaaaataaaaaaaaaatgtttcacaaaaatgaaaacaactttgatctacataaaactaatttaacaatgaaatatataacatacaaataaataaaagagggataaaaaaccggtttcacaacaacaaaactaaattataacaaaatatataattgacaaaatgaaaccagattcaagttatgattaccataggggcagcaggaatagatgaaccactcaattctgtctggcactttcttcttgtcacagacttcaacaggtttttttttttctttacttataaaatcaacaatatgttcaaaatcatcatctgtgaaatcagacaatttttcctaaaaatgaacataaaataatattaataaaaatgaagcatattcaaattaaaaaaaaaaggaaaaaaatttatacaataatacaaacacataatatataaaatgtataaacataccatatttttttttctagtttatcctttttttgatataccactaatattacgagaagatttttttttactgccaataactgaaccagtttcagcaactattttctgaactacaaagtcatcatcatcttcatctttgcacaaagattctttctatacaaatagtaaataataatcaaacattaaaatatattaaagatacataatcatgagaaataattaaataaaattgcacataaaataaagtattaaaccagatttgataaaaatgtagtgcatactttctttcgacctccatctttctttcgtgtattaatttcctttgcattatcaactttctcgcaaagctttagcttattacaagcaaatactcgttccatctgtcaaataaaataaatacaaaatcaaaacaaaaaaaaatagcaaggatgataacaagcacaataaatacaatttaataactaaagtttaaaaccaatttataaacttttacatggctaccaaaatttaataaataaaaccggttcataacaagcacaataaagacattcctcttctataaaggaaaaataaaagagtatgaaatgagcaatcacaaagtaaaaatagtgaaatgtatacattgagacaatgaggactaaaattttacttttagcttttctcttatttgaaaattttcaattttaattcctttagtttttgatctagtggtgtggttgtttacatcaagtacaccaaatagcttcctcctgctagtccctttgacagttttctcaaagcaagtggctgttaaaaggctactactatactactactataaatctcacacaatgtcaaagtgcttaacagtgttataaatcactaggagattcactgttttaagtttaagatatatagctaatagcttctttttctttttaattaattaactcaaaaatcactaaaaatggtttctattccaaaaaaaaaaaaagtacaccaaaacatgaatacatcaaaaaggctaattaa

SEQ ID NO: 127228 - DNA, 1011 bp, Cannabis sativa
  modified_base (315)..(317): a, c, t, g, unknown or other
gagttattaatttttattcatatagccagttatatttttagttatacatgagacatttactttggtgacttttccagcgacgttgacttttctattgactttttgggtgacgttgactattctgttgactttccggccacgatgacttttctggcgaccatgatttttccggtgacttttctgacgactttttcggcaaaatttattgttgttttacaaatatgggatttctatttttttttacaaaaatatagcataaaaaacccatataaatgtaaaaaaataaaaaaaaacccataaccctatagtgttatnnntttatgccataaaaaagtaaactataccctcagttcccataattatgaaaattccccaaaaactaataataaaaatcagccttgtcttttcattttttgcatgagtacccctattactcatctactattttccttttatttcaaagttctttcttctaactggttgtgcattccattttagggtttctttttctttcttttttttttcttcttttcattgctattcatcttttttattctcattctattatctctgttttgttcttcttcttcttcctttgtcttaatagttttttttcctccttatttcgacggcgtcgtcctcgtcgtaggttatcggcgacaattggtttgcattttcgtttgtggtgtggattggagttgctatatggtgcgttcatattatattttgatttttttatgtttttaattggtgggtatcttagtgttgtcgttgttacaagtttcaatcatggaagtgttatattatctttattgctttatgggctcgggttatatttgttccttatgggttattttaaattttgagtgttatatttgagtctatttttgttggtgggtgtgtagttttgtgttctgatttttgttgttttaataaggtggtaagttgatgatgttctcttaatttttcaagcctcaaaatgatgttgtgaaccaagttgtgtgcttttga

SEQ ID NO: 127229 - DNA, 1882 bp, Cannabis sativa
  modified_base (999)..(999): a, c, t, g, unknown or other
  modified_base (1643)..(1646): a, c, t, g, unknown or other
  modified_base (1735)..(1744): a, c, t, g, unknown or other
ttttgttttttatttatttattttggtgaagatggagggtggaggtggtggtagactcagactggtggtaaggtattattattattattattattatggcagagagagagagaaagagagacagagtctagagagagaagaaggttgaacaacacaagagaaaagaaaggcattaagattaggcaaacaaggcaacgtatgattacttagtttctttgttgtgattgtgaatagagtactttagttttttagtaggttgaaatttcagccttggtaattaacactttttagcaaggtaggtaatgtgtttcacaaaacatttattagtttaccattttaccccttttctatttatatatatttattatgattgaacaataattatttaatcaacttgctttgtttagttcgagataactaaaactcaaataaattctcttttgaacaaccaaaaaaaaaattcagagttttgacccccttacaatgggagaaaaggtcaacctataattattttattttcctagtaagaaaaatatatattttattttcataatgatttttttttagctcaactaaacacggttaagggtattttaaatagagtattataaatatattgcatatgtatttttttatcttaatttcataaaattaaataggtagtgtatccattcaaaaaaaataggtagtgtataatgtggtctaaatttaacatatatcaaaaattgtgttaaatttatcacaaaatataatataagccaaattttacactacaataaatattatttttcgtcactcattaatttcattaaccttttcatattttttttatatatttaatataatttctatatacttttaataaaaatttaatatttttgttcttttttacacttttattaaaaataaaatttattttacctagagtttatttgtaaaatttgagtcaagtataatattaactttttttaattaatttaacataaaatttacaacatntatttgagatggtctaacattctttgtttagttttgtttgtgcataaattgcctattcttttctttttgcctttttattttgagataattgcccttattattttactctttattgattatgttttggatttttaattaaaatgtctaattttttttagaggcaaacatactcagagttggttgatcataaaatttaaatacctaaactttttccttcattttttctttttttttttcagtaaaaatactcaaagtacgaaaatgttggaccttcactatccaaataattttaaaaaagttgataaaaatgtaatttaacttataaaaagtcattaaaattatagaaaaatatataaaatatcctaaattaatcctaaaattaaacaatagttttatttaataaaaatagtaagtgaacaatttgtttgtctaaagaaaattattaggtgtggtaaaacaatattaattttattaaataaaatatacctttaattttagtattagcttgtaattttacagattttatgtaaatattacttttattaacttttcaaaaattacttgagttctgaaggtgcaacattgtaatacttagtaaagtttgattttgtgtaatagaaatataatggtaatggtaatggtannnntaatggtaatggtaatggtaatagtaatagtaatagtaatgtaatggaataagaattgtaatgataattaattacaatgtttggtttgnnnnnnnnnngagtattgtaatcaaaattattgtacttggtttgatgtgaaaatgtaatagaataaaatgtagggtgattctacaatgcacctccttaaaagggatgtactgatgcaccattgacttgtttcggcatccagaagaatt

SEQ ID NO: 127230 - DNA, 991 bp, Cannabis sativa
ctatttagtaatattatggacaacaaaattaaacttaggaggagtcttactaaaattacaacataaaaataaagttgatagtcttctacatgcagtgataacacataattagaaatctcttatttaggagacatatcgatattgatagcatgtatctatacttccgagcctttttcaatcataacaaaagaatgagatttagtagaagccttctttaaagccatatcacaagcaactagagggtcatggaactctagtctctcagtaaacatccacaaaatttcagcccaatggtttctagcgaaagccccaatcatcatcctatctatcttgtccaaccgcaacatcagaattaacatttatctagtccattgatggtggagaccaaccattaacagagccaatagttagttggtacaacaacgaagcaacatattttgcaaacaagacgacactaataaaatatggtacgaaaagttattaagtacattattatgctctttctcatttctagcccactatatttttttattaagaaaaaataattttattaatcaactaatcaattacaaccaaatcaatacaaaccaaatatgaattcttatggtccatatcagagttaaaaaaacaaaaacggattttaattaaaaaataatttaatccaatatgaaccatatataatcttaagaatctcaatataatatatagattaaatctaaactacatgaaaataaagtaattcctcttgtagcatatcaggagattcttgattcttctcgtaataaataccgatcatccaattttttgctatgaacaacgataaaaattttacaccacagtctttcagactagcctcaatactcaggataaaagtaggctaatagatcatataaagggaagaagaatttctttcatagtatgtattcagctcatgagacactgtgattatgagatgaagatgaaagactctatcacaaggagagagagagag

SEQ ID NO: 127231 - DNA, 719 bp, Cannabis sativa
  modified_base (673)..(679): a, c, t, g, unknown or other
gacttttttacacagctcggtgtgtcacgaggtatgaacatctcggtgtttaagatatgaacatcttggtgttcatactttaagtaaaaattttctaagtatacaattgcgaagacaaaaatcttcataaatttcacgaattattgaataatgagtagtataatctttttactaaagaaagcaatggtatacatacatatgtatccccctatacttaggtaattttcaaaaaaattgactaagtatatgaatgcgagtactactgataataatacttttaatgttcgccattccatgctctatcaaagacggagttgttaagatcagatagtcggtatgttgtatttcctatttttttagcgattaggtaggggccttcctagttgtcgccaaaaacttcatgcacaagattgcatgtattaggcataacttttttcgaagccaattctcctactcatagacttctttctttaactttaaagttaaaatagtgtgttgtgtgctgttgataggctacgttttttacctgagcctgatcgcgcgtctttcttccagaaagtttaattgaagcaattgatttttctcattgtcttaatgttaaaaaaatctcttcacaaggacccacctcctactttgagcctaagcatattaagatttagattcttttaatctnnnnnnnactactgatattgacttggaaatatacaacggtaagttta

SEQ ID NO: 127232 - DNA, 802 bp, Cannabis sativa
cctcctgattttctttctattgtagtggttgaatcttcttattaataaagttaccattttccttcaaaaaaaaaaaaaaaaaattatttcactatatttttattaataaaaaaagatatattgcccttaaattttacacatattctataattgagagagtgaatttacaataaaatattttcgatcaaatataattaacagtaaatatgagaagaaagaagaacagagaaaaccagagcaagaattttattatggctcttcaattctcgtttacaactgagagatgagcttattatatagctctgttcatacaaggtaaattagttggagaattaaccaactattaacaaaatcattagctacaaaatcaagattaacaacccaaaactaatcttgactaacttagtccacgtggtctaaaagtaaatgattttggaaactgatagtttaatttgtgttcataatgttcatactcttcttttatctttaaataatattgagttgtgttttgtcaaacgatctgcaaataagctggctcatgttttagccaggaattcttgtttctctccaggtcgtgtgcttcaagtggaagattgttccaacaaagtgcgttatatattgttattaacgattgctagttaataaagtatctaaattttattaaaaaaaacagtaaattagtataagcatacaaattaaattaaaagtaaaaaaaataaatcgaatagaaacctaaaaatattatacttttactatcaaaatcctcttttttttttttttttttttgaaaaaaataaataga

SEQ ID NO: 127233 - DNA, 706 bp, Cannabis sativa
ctagtggccttgtactggattctttgagcctctttcttatccacgggaaacttcccttctcggatgtactcattgtatggtgtcatccaggagggttcttcctcttccactcacaacactagatcacactcgatagtcggttgggctaagaactccactggtacagattgtagaacattgattcctaggttgatgcaagcttagctagggcgttagcgttgacattgctttcccttgggatatttgcaatcgtgaagtgttgcagctactctaggtaactcctaacattggccaagtatgccaccatccttggccctttcgcttgtgttatccaagttttcattaatcagacacgtggcacgatcagagaggggacacaatctctacataaggcatctaggggaattaaaagaaatggctcccagatctagaaggcagtgagaggcaatggcttccaggagcaacatccttcactaaggaactcggaaagtggtacaggttctgaagatattggacacgtcagctctttgcaaaatagtgccccatagacggttatacctttttctgaacaagattagatcttgtttcctgtgccactcatgatagtgcgcgtacgtatccttgagcatgctttttgcccaacagcctgggtagagactatttcataaaggagagacctttggactgttggaaatttattttacca

SEQ ID NO: 127234 - DNA, 1016 bp, Cannabis sativa
cttgagaatgttgtcaatgttggtgatgttttggaggctaagttaaaggacaagaagcgtcttaatgggctgattttgagatggggtatcggtggcaatggcgctgatgattcacaaaaagaaagggaaatactagatgcactcaaacctcacaccaacttaaagcaactttgtttctatggatacagaggtacaatattatcagattgggtaggacatcattccttttcgaatgtaatagaagtgcgtctacattcttgtaaaaattgttgtttgttgccaccctttggacagctaccgtaccttaaaaagctcgagatttgggggtgtgatagtgtggtcataataagttcagagttttctaagtcatttcaatcttttagagattttgcatatttggaacatgcctgaatggaaggaatggtcattcagtactagagatggagtagtctttcctagacttaaagagctttatttggaagattgtccaaagttaaatgttcacttgcctgattatatatcttccatcattaacaatgctacaagtgttgagttgtaagcaactgatgcctttactgccaagtgccaagggatcaacagatggactcagcatttccatgtctgaaaaatatgaagatctctggatgaccagaacaaaagtcttttcttgaaggaggattacctttgagtttaacttcactaaggatttccttttgtgatgagcttgaagcctttgatgaagagtgctttggagtcttatcttgtttaaaggattactatatttcatattttattaagaaaaaagacctaatttcatttttaaaatattatattttaaatttgtaccactatatatatatatatatataaatttttggtgagatcacgtttaattggggtacttatcattataataaaaagaacaatcatcatctatgattgtgctcaaattgcttatccatgttgttttgtgttgaggattcaaaagtgaagttgcaattaaactaattaactta

SEQ ID NO: 127235 - DNA, 1782 bp, Cannabis sativa
atgaatgcactcaaagatcccactgttcagatgattgggctgtgtggaatgggcggcatcggcaaaaccacacttgcaaaagcaatagctcgacaagcaaaggaagttaatctgtttgataaggtgataatgggcagtgcagtttctcaaactctagatgttgcaactattcaatgtgaaattgcaaatgatcttggtgttgaatttggtaatcatgagaccaaattaacaaaagcgaaaaagctttgggaagagttaagtaaacaagagaaggttctgattattctagatgatatttggcagcacattgatctgtttgaaattggaatacactttagagatgaccaaacaggatgtaagattctatttacttcgagacgtcaaggtttatacagtcatgcacttgagtttgctatcgattctttacaagaggatgaatcaacaaagttgtttaggaaagttgtggacaaaacacttgatgaaaatcctaaatgcagatccctgttgagtgaattggttaaggaatgtgggggagttccgattgtcattaatacagtggcagctgcattgaaagatgcgtcttcatccaaatggaggactttcttaaatgaaatgagaaactctgcccctaagagtattgaaggcatggagtcaaaggtgttccgatctataaaattaagttacgattttttggaaagtgaagagcccaaatcactattattgctttgcagtatatttccagaagatagactcatatctgatgatgatttgttgatgtatagtgtgggctggcccttgttagagaatgtcaacacattgggagatgcaagagacaagttgtacactctaatagatactttgaggaaacattatctattgctgcccagtgatgaaagcgaatctcacattcgttatcattgggtcaaactgcataatgttatcagggatgctctcaaatcagttgccaacaaggaaggtctgttttctgtatctaagtatgaagaactgcctgaagaaaagcacgctaatcttgttgtagtgtcattgcttcctgattttatgactcagttgcctgacatattggcatggccaaagcttgtttcattcattgacgtgtcttttcgtaaaaaacgtctctcagattgcttctttgcagaaacaaaaaagctaaaagttctgaagttaaggcgtgtagatcttcgctcaccaccaccaccttcatcctctagttgtctacttgagagtctcgaaactctttgtctaaacgattgtgacttagaagacacaacatttcttggaagtttcaagaaattaaaatgtctagatctttcggattctagatttaaaacattgtcaaaacaggtgggtcagctaactcatctacaattgttaaatttagatcattgcagaggtctcaaagtgattgaacctgctgttatctcaagcttgataaatttagaagagctgtacatgagagatgtggagatagcatgggaggttgaaaaagtcagcagtgaaagaagtaatgtcagtcttgcagagctaaagaatttgccccagctgagcacattatatttggaaatccaaaatgatacttgtttgtcaaaagatttcatctctagaaacatgaagaggtatcgaataattgtaggtaaactcgactttatattcacttacaacttagccagatcatatccaagagtcctgatgttggagcttcacaacgctaatttgataaaagaatgtggttttgataagcttatgaaagaatgccaagcattg

SEQ ID NO: 127236 - DNA, 1595 bp, Cannabis sativa
atcagcacttatgtagcagccactaaaagtcacgccaactgcccgttgtggaaggaggaggctaaacctagtgggccaagattggaaaataatgggcttctattttagggtattacattgtaccctaatgacctagcaattttgccaagtacaaccaccatcgtcaagggatgagatcagctgccattttgagaggaaattaattgcagaagaaaaagtgccaaaaaggaagtgcctaaaagaggaaaccacccgaaaaaagaagaaggagaacacaaacttcatttgtttgaatttctattctctttctttcatttttctccatcctttaaatacttgaagttttttttttagttgcaaagactaagtagcagccatggatgagaacactttattttggatattaattactggtttgaacatgagctaagcctcttgaggcttgaatggctatgaacccttatgtttggtatgattaattttaagcatgatttatcaattttgcctttgttcattcaagtaagcttgttgtttattaattgttattacttggccacgagtaacaatttactaagctagatctggttctggaaaggctagatctagtagttacaacttggatgatgcaagtgaattcctagatttaggttttttcttagtaaatggaataggaatatttcatttgccttgcataacttgagaatggatgtttaaatgttgttctacaatctggtttgatataggaatatattgatctaagtggtagaacttaatttgtgagttttggaaaattatcataaacacaagaaaattttgttatctctgtgcgacattgctgaagcaaatctgtagcgattgagaaaatccccactagggggattagttattcaagtcacttttaaatatattacatttcttgcaagcaattttttagtaacagtagcactattttaagaaagtttaattacagtcttcttgaatttgaatcattactcagccattctcatatttttccttttactttaagttgtacttagttggtttcacatcatactttgtttgcaatacctatggagatgatcttacttatcactttattaattctgtgactgcgtatacttgcgtatattaattttcacaacaagtttttggtgccgttaccggggattgaaattaaaaattgtgtattatccactattttgtaatttatttatggtttgaggttctaaccttgattgggtgcgatgtatttttctttttcaagtgtaatctagtgcatgaacgagcaagaagaagaccttgagcttgctcctgttgaccgcaaaattaaacgcactttcagacaaaggagaaaggaataaaaggctaaaaacgtcgcaatatggctgaagggtttgaagtttggggtgcccataatgatgccaatcctattgccttggccgatgatagagcctgagcaataagagaatatgctgcccttatgttcaacgagcttaatccaggcattgtgagacctgaaattcaagcacctccttttgagctcaagcccgtcatgtttcaaatgctccaaacagttggtcaatttagtgggttgc

SEQ ID NO: 127237 - DNA, 796 bp, Cannabis sativa
catataagcattcaatttttaaaggtttcagatcactaaaccaaagaattttagccaacggacatccaaaaaaacaaatggctcaggatttcaacatcgcaatcacacagaacacatcctctttccccatcacctgaatacttatttctagacaaaagagttccacaacaaactctccaaagcatcagactcaatctcgggtggatatttttggatcaaatgaacttccaatgcggaagagctagaccaaaccgatgctcttgatccaaccaattagtcgccttaacattgaattttccattaacagatcctttccataccatcgtgtcctttttcaactcgttgacaatatcgattaagacaattctctcctatagatcctctccaaataagtgtcaaacatatctagagttccactttatgagatctatccataaggcctgccacattcctcaaatgggggggccttgagtcgaatcatttccatgatctcccagaattcaccataatcgagctagggaatccacgactgccaccatatatcaacatgtgttccattcgctaagatcatgcaagacccttccaagataagcttataggtttccaaaacccctttccaaatcacagaatcagagcttttagattgaacactccaaaaggagtcccaaaaacaatacttggcttggagaactttcacctacagcttatccatattagaagccatctcccaagctaatttcgcaatcaacacacgattaaaatcctcgaaccttttaaaccccaatccacctctctg

SEQ ID NO: 127238 - DNA, 585 bp, Cannabis sativa
gaacatgttgtttataagcatctaaaagataagtttttttttttttttggtttgttgcagagattttacggcttggaccggctaagggccacatgaaacaacattaattatatctatacaaatgacacatttgtatattgatctagctatacataataaaaaatgttacaattgggaaattaagtaggtatagctaggcatgagctgaatgcaaattagttaatataaatagtatatcatttaatttgcatgggagggatatgatctccctcatgatcatgaatgtatctgaccatatatagtgtgtatggacactggacagtattagtgctgctgttatatattactatatatgattccactctgatgttataactattaattaatgctttcataaaattatattaattaagcttttaattactgctaattaccatttatatgttttgttttgcaaaataatctataacctatataattagctttttggcctttcactaattgaattacataattagcctttattatatattcaattataaaaattttaactaagtaattgaaacatgtacactatttactttt

SEQ ID NO: 127239 - DNA, 525 bp, Cannabis sativa
tccaacaatctcaataattcaatgagtatttttaacaactttaaaagttcagggggcatgatttggtacatgttaaagttcatgggacaaaaattctaattagtcatttccttttttatctttgctccaattactagtatccttcctccacgtacacactatagtatcatttggtaatacttttattttctaatttttaaatcacaaaataaaagtaaaatttttgtttttaacaaataaaaattcattatctaaccacttttgtttttaattttaaaaacagaaaacaaaaagtgtattctgtaaagttcattttcattttccttttttgattttatttaagtctggtctaagtccatggtcagatttaggttcgggtcagaggttgggttcaacactagggtcttggggaggatttagatctaagtttggtcagagtccaaaacattaataagaaaaaaaaactttttaagaaaatattaaaagtggctttttttttttcaaaattttgattctcaattaaaa

SEQ ID NO: 127240 - DNA, 727 bp, Cannabis sativa
taataatttttcccatatttttgaaaatagccctaataataattggagatatttgtgctataggtactaaaattgattgatttatattttgtgatatgagaaattaatattaataaaattataatttacaaattttgttagtgtgacacttaatgttaatgtagaatacgtcacttcaaaatcttattttaacaaatttaaaaactaagtctagttaataacttaagacatggagttcataatgatgaatagagtcggtcctaggtatagacgacttaggtctgtctctaggattcacatcttttgagacccaaattaaaaaatgaaagaactcattaggtttaggcttttatttaagtataattaagtatattacaaataacaaatatttatagtttagttaggtggggtgtataatacgttacacaatagtgtgggttcaagtcccataacatttttttcaatatttttttttaggcccatatattatgagggtcggctctgtcaaagaaattagacaaacattataattttactaacatttagtatttataccacataaaaatttaaaactttggcacttatctcacaaacatctctaataattattaaaaaaaaacactaaacatggacaaaacaaaatatttagagaaattttagtaaagttaatatctaatcaaacagtggctgtagtttagtggtaagaattccacgttgtggccgtgga

SEQ ID NO: 127241 - DNA, 2119 bp, Cannabis sativa
tcagatcaaatacctccctcatctgacggctgtcgtacatcatggattacaatccgtgaaagtacaataacgggacaaaatcatatccctatcatctaaatatatttaaaaaactatgttgtcacaataattaaactaacgctatgtatcatctaaatatatacttaaaaataatctatatagtaataattaagctaacactaataatcatctaaatatattcacaaatccatatagtaacaataaactgaaatatattacacactgattaacaagacaactgttatcgctctacttctgctttcatgtaaagaatccaccgatcacacatagcatttatctcgtcatttgtgtataaagtggagaaccgattctgtaaaataaaggtatatattaattagtaaatactattatcatatgctatttaataaagaataatatttattataatacttattaattattttaccggttgtgtcaatacgcgtattggatcttttacggtcatgaaactttcaatgaatttcatgatataatatccacattatttgttgtcaggttgtttatgacatataggagttatccacttgatagttctatcaagccgtcctatcatttgattgtatgtggtgaacgatctacacaaaaaataaagttagcatatatacatttataaatataaacaagcttaatgttgggatgttaattatagaaattacgtgggaatgatgaatttcaaatcatctggtacatcgccattgcctgattccaagtatgccactgtctgcgtacttggttggatgagtacaagcaaccagtaaaatattatcttgcacaaatagatgtgtaaagttgttaatatatacacaataattaatattatgaaaagttataaatactaaaattatttattttaaatctacatatactaattattgtatgggacaataagccatttatctagattggtcaccctagtcatacgagtgactagtgcttgacaacagttactgtcaactcctgccttggttggaccacgtcagtattttgctacacaagccgatgcgcttcttaacgatcaacttgacttacaccacaaagagaaatacccctactccctctacttatttccctatcgacccgagtagggcgagagccaacagtggcaatctctgacaagtagtctgagcagaattcaatcgtctcttcaacgatgtatgattcaacaatacaaccatcaagcctacttctatttctgacataacccttcaagatttttatgtatcgttcaaatgggtacatccatctcaagtacacaggtccacacaactttacctctctcaccaaatgtactgtaaggtgaaccattatgttgaaaaaggaagggcaaaaaattgttctaaacaacacaaaacttatataatttctaatatgagattctctaacttagtcacatcaaccactttataacaaagatatttgaagaataaacacaacctcgtaattgcatatctaactttcttaggcaacacagaatggatactcactagtagaatgtgttgaatcaatatatgatgatcgtgagatttcagaccacttaaaattaatttgttcatatatatccaatcaaagacatttgaggagtacccttcaggtatttttacctgggagatagaaccacataaagatttttttctggtttagttagagtatgacaggttggtggtaagaacgtttgttgaccaacaacttgtcggtgtatgttggccgaatccctaactctttcaaatctaggcgagatttgattccatctttgctctgcccaagaatattgaacaagatattaagcaagctgtctgacacatttttctcaatatgcatcacatccagattatgacgtaacaacaaatgcttccaatactcgagctcaaaaaatattgacttcttcttccatggtcgcttaggttcatttgtaacaacgtcacttttctcacgccaatcttttcttttctttgggtttgcttttcgctttccaaggtggaattgaactttattcaactttctaacacttgttccccttgcagaggttgcggtgtaacgtccccgcttcaagcctcca

SEQ ID NO: 127242 - DNA, 626 bp, Cannabis sativa
tttttttataaatatgtatggattagatttgatcggttatttttacatgtcaatcaacattcaatccgcacaagtgcggatattcgtactttatggattgaattgtattggaccgtgcagattggattggatcggctattttatgaacactcctaaattatatatacatagatataactttttttttgaaggatacatagatcatagatataacaacttatatatatatatatattaacatattaaaatttatatctctacaaagaaatatatgttaatatatattattattatataaaataataaatttcaatttactacaattgtattggcacatatattgatttctctcatttcaatatgttgtgcttcaatagaaataataaaccaaaaaatacaactctatgacaagagatacaaaaagacaatcacattaataatttctatttcagataattttgtaaccatatttatgttactttttagtgtatgattgaactatatttatcacatatgtattaaccatatattaatataaggatatgattttatctcgtgatgtacttttacggaatgtattccgtggtacattagatgggtctcaggttacattaaatgagtgtcag

SEQ ID NO: 127243 - DNA, 994 bp, Cannabis sativa
tttcttcatttctttacaattccacttcttgcgtgataaattagatcgaaccatctaagttttaaggcatcaaaaatcaaaatgttcacatttttctacactcgcaaaatttacacacaaatattaaataattcatatttatagcacatcatagtacactgaatgttgtgtatgaattgagagcagttacagaggaagagttcttctttgagaggaatgattcaaattataactttgccttaactaaaattttacaattttcacgcattaatatgttaaaaagaatccatttcaaaaaaattgtaaaaaaaaaactgtgtatgattaacaaaataataatactgtaaatcttgcctcaagtcagcgatatattgttcaactaaatgatctatttgcttggttggtaattatgttagcataaacaatattgaaatttggagaccacatacgaactttcctgatctgatttaagagttcatactttcaattcaattcaacaacgaatacatattcaaagattttaagtatataaaaacactagaagataaacaaactagttttcaaatcattttggtaaaaatgctgtgggtagagattggatatcgatgtaagatggtagattcgcttatgaacacatcgatagtaattactcattaaattagcttgtgttacttggcatctgaattctgactcccaaaacgttttattaaagtttgtgctgagttatcaatatatgaaaggacccttatgaatatgaaatagtcgttacacaatatcaagtgcaaataaatatgaaatagtcgttaacccgatatgattttaacaattgagtaaatgttgtgtttggcataattaaattaaataataaaaaaagatgtatcccggatcactcatgtaagtattgtttgtggaatttatattgggaaacttacaaaaatattgtaatttggattaacttttacaaaaatactatcacacagaaatcttttcaaaa

SEQ ID NO: 127244 - DNA, 657 bp, Cannabis sativa
ttataaaaaaattaaatctttaataaaatcaacaaaattagttaacatatttaatataaattaaattagttgatgtgtcaaactttgataggtttaacacagtgttagacactaatttttaacaggtgatcttgattcataatacatcctaataactcaaattcatcaatagttataataactcaaatcttaattcaatatgaaatatgaaatagtgcgaattaatatattgtaagtatttattattttttcacatcagcagtcaattttatctttttacaaacttgaatcttcattaaataggtcaagaaaagaagctaatttgttcaaaaggaaagtaaagaatcattctaaaccaactcattatctagccttaaatctaatttggctaagttatgagcaataacattatgctctctaccaatataagcaactctaagtccaaaattaaaagataatgagttcttaatacaaaccaacaaatcatctaagattctacggttccaattataatttaaaatcaaaatatttgtttaaagttgtccaacaaaaaaataaaataaggacttttgttttatatccctaacaataaagtgttagactttttatttgggcttacattaacttttattgattttattaaaatttgggttgatt

SEQ ID NO: 127245 - DNA, 921 bp, Cannabis sativa
cttcgcaaactctaatggagctttcctgaagatttcaaccttgaagaacaataaagtcaaaatggtgattattccagaagaagcagtagctaacagatggtctgacctatatgaatgtctctttggtttacttaaaaggaagccagaaaatgttcaagacggattaaaacagcaaaaagaagtgaagatagaagaaggtaggaagaacaaacaatcatgggctaatatcgtcgaaagatcgaggcagcatgtcactaaagcaatgggtgggaatgaaaatatttcaaaagaaagctttcctctagtaatgaggaaaaccaacaaactgggatattgggactttctaccaaaagggaacgagagcttcagaccaagaaacaagtttccaaaaaagagattagagcagaaaaatttccatgagtattcacaagcagaaaagagtgacaaggaatggaatagggcggtgatgatgttcaaagacaatagcgagatgtcatggagtgccatactctacaatctctcaagggaaatagatagaaagctggtggttagccaaatgtatgatgatcgcactataatttggtgtaagaacgaggaagagatggactttctattgaagttaaacaagatggtaataccgggaacaggggggcaccattgcctctttcattaaatggtctgtgaaaaaacaaaacaaagatgtgaaaattgaatgtagaagctcatggataggcatcgaagggctgccattacatttgtggaacatgaaaatcatgaggaaaattggagcgatgtgtggggggctgctagatattgagtaaatattagatgtatattagctgtaaaagaattagatatttagtagatatttagtctcctagctttgtatataaatatgtattattctatgaaatcgataca

SEQ ID NO: 127246 - DNA, 995 bp, Cannabis sativa
tttatgccacaaattactctatttataaaataattaaacctatatcttttattttcttcttaattctctcttttttttttattttgtttatataaaatattaattaaaaaattattttaattatatgatacaaaaaatattaatcctaaagtattatatataattgtgcgatactaaatatataaacctaataacataatattcatttcttattcttctctcataatctttctcggtcaaaaatcaacaaaacaatcaataaaacatgagaagctcacattacttatcatcatcaagatatcatactataatatgtatattgatttcttcttaattatgctcattatcatcaagctatatattaatttttttttcttaattttactcatcatcattaaggtatatattaatttcttttattaattttacccattatcattcattttttcttaattttactcatcatcattaaggtatgataatatatattgattattatttgttctttttgttaatagttgctcttattaattaaatatatatatatggatgtagttttaagaattctcacacataggaattaagttaagtattttaaatcatgaggtgatttgatatttttgataaataactatgattatattactcaatcaatcaataacacactattactattatatcttatcaaaaatttattcaatatttttgataaataagaatcattgatgactttatgcttactataatctctctgtaataattattttgagctttttttagttttaaataaaaaaaaagtaataatattacaaaaatacttctagctagccaaataaataaatctacagcctaaataaaaaaaattatacaaataccacttacacacaccttcaacccaagatccatgctacctgaacaactatcgcgcaaccatcgcataattacgcagcaatccaacgcaaccgaaatgaaaaatttaatcagaaagagaacca

SEQ ID NO: 127247 - DNA, 1782 bp, Cannabis sativa
  modified_base (1670)..(1673): a, c, t, g, unknown or other
atatttaaaattccgtaaaactgtatttttataaatttttttttattgtttttatgtttttgtgaaataatccctaatctaaaacattaatgttaaagagcatgactccctttcaaattgcaaatctttgaaatttattgatgatgttgagtgggcaatttccaattcgttccattagctagatgatgttcatgagatggacaattatgtccccctttcaatttgttaaacgttgttttccttaaatagttgattataacaacacaagttacaacttacaattatgtaagtagccaggactaacctagatagatctattaattcttaaaccaaaagatatttttcatagctatttattataagagtacatattgttattaagtatagtggtgcttaacattttctcgacatgtcgtgattggctaacgatactccttaaaagctattatattaaattatatagtattgtatatttaattggacaaataacttgacacgtaagaggatactggacatttctcttgttataaataccttttcttggacggtggccttggttttatccatgccagacttggccgaggctgccacgttggcagcagattccttggcggactccactgcgttctttcccgattgcattattttcttctctttatttgataactgaactattttcgttgttataattttttttttcaaatgcttgtaatttgtattagaagatcaataacgatgaggtagatttaaatagcctgagttgcattgacacgtggaagtgagcgactacgtggaggcaagagagctcgttggccttcctatgtgacacgactgcgccacgtgtcgtgaagagggactatgtgaattgtttttttttttggataaaagttatataaagtatggaaggtggcgcagggagaaaagtatggggacacgaggcagattgtttgtgacacgtggctcattttgatggacggttgcagtttgtaactgtttaccttaactatatgtaacagctgaccttatctctttccattgattttaatggatggttgtggtgaatcacgcaccatctttcttcggcatcacgtttgaggataaaagtagccttcttctattaacatgattatttgttgatttagtaatgttttgacccacattttttttaggggattcttttacttcaaagatgtttgttaaattttgctaaaaaaaaaaagaaaaattgttgtattttactttaattttatgttgggtacagaagaaaaatggaaagaaggaacaaaaaaaaatgtgtgttaaatgagaaaataataagataggagtaggtgattctacaccaagaaagagtgtacagatgtgtttttttttaatgtttcaaattttttattttaaatttttattttataataatgtaccttatagttatttaaaatattttataaaattttgataaatttaaaataatttacaatataattagccgtgttgaaatagtttcatacacatataaaataaaagaattacatatgcaatataattagaggtatttataaaataatcaatttaatctaatctatacgatccaatctaatttaatctgtaaagtgcgaacatccacacttgtgcggattagatcggattgaaaaatttaaaatccgtatttgtgnnnnttgaatgttaattaatatgtaaaaataattaatccaatacaatccatacatatttataaaaaaaattaaaaatttatatatacaattaacattttacactaaagaaaat

SEQ ID NO: 127248 - DNA, 517 bp, Cannabis sativa
gtcttaaaatccactcttcaaatcctcctctcatttcatttcctatttcttatttggtgagagaatcacacgcttttgaaagggaataaacacgtttaaacacacacgtgctcatctacataatataattaccacactctctcacacactaaacgacaagctaaccgcaccgaacgacacattttactcccgcgtttaatttcttctcttatctttctctttccatgttcgtttcccagtcggtgctctaaaagaataataataataattgtaattcaatctaacctaatctaattaaagaaaattgctaaaagcagctctaatggcgtagttgttgttactggtggcttccacttgtctccaaatgaaacactcaacttgtcaacttctctctctacactctgctccaatcccaaacctaacactctaaatcttaccgaataaaagataattataaacaaagaaagaaaaacctaatttcctttccaccgtatagtggaaaatccctatatacaga

SEQ ID NO: 127249 - DNA, 860 bp, Cannabis sativa
gctgaccttggcttagagaagtcaaggtgcggcacgggtgttccgctgcctgaaaaggtgagttagtgacatcaagtaaccatgaatcacgaagaacactaatcaaagaactagaaccaacattacgccaagcccccaagccccaacctgattaaattacgtgtttcaaagatgctcttctagatgaaactaaaattattaccaagataagttgttaaaaaagtcccacaaggatagtaccatgctttgtatgtatgctgtcagaagaatttagacaacattaaatttgtgcaagtatttgaaggaaataagaatattcaattatagatttgcgagcactcacttaaaatagtgagtactcaaactattggctatagatagacaaaattgataattatttgagaaaaagatacaaagaaaataggagaagattaaggtttcattcagctgcaagattcaaaaagtatagaaatacaattaataagaaagtcttatacatgcaactaatacaaaacactaaaataaaggaatagactaaaataaccctaaataaatatttaacaccctccatcaaactcatgatactgctgcaagaagcatcatgagtttacctgaaagaaaacgaaaaccaagaaatcatatgtgacttagtaaaaatgtcagcaagctacaacgacgaaggaacaaaaggcaaagtaatggtgcccactagtttcagatgatgacgagtaaaaagacaatcaatctcagtatcactactacaaaaagtataattcctgtcagtttctaagtgtcacttaaagaatttacgttagtttagaaaatcgatgtatataccataatcgcaaatagttttttat

SEQ ID NO: 127250 - DNA, 1399 bp, Cannabis sativa
ttggagctattttggagggtttaaggttgaagaaaatcgtgtttctagttgttcagaatcaggatttcagatggtaccaaccagaattttggatggtaccaactggaatgtcgtttggtcagtttttgagaaatgctgaattttgtatttttgccataacttttcacttgggtatccgttttagatgttctgtgtaccgttttgaagattgcaatgagctctacaatatgcactacgtttcagagccaaaatatgtattttattttaggattttattaccacaaggttctgtagaaaacccaagattgttttctacgagtattaggtagtgttttgaaatagacaattatcggtttattgttattgtgacgtagggttcaaaatcgttgatcgttctttatacaggtcggccaacatacgtgaactgagacttgaggtaagaaaagtatattgtactacacagcatgttatattgtaatgcaattaatatcattgataattgattgatattggaaaaagatacgattattattgttatataatgaaaagattgcctcattaggcaatgacaatgtgatgataccatgaatgtgatatacgggctcatctgattaggtgatgcgtttcttagcgacgtaccagacgtaggtacgagcattagtgacaaatgagtaacgagcgtaggcataggctcacttgattaggtgatgtgatactcttggagacatgtagatacgagcatcagtgatatgaaaaattgcaaggttatggcagagaatgaaaccattgtaggttttcctgtcaagttatggcatagaatgaaacttgtgtagggtttcctaccaagttatggcatagaatgaaactgttgtagggtttcctgccaggtcatggcatataacaaaaccattgtagggtttcttcctagtgatgtatcaagggtaggtacgagcgtcactgacatatgataagtagcgggtgtaggtacggcctcgtcgtgattagacgatgtgatatattagtgccaagttatggcatgggctcactttattaggtggtgtaatgatattatatatgatattgcattatgacacgggcttgcctaattaggcaatggaatacaagattatcaaactaaagcatcgacttgcctgattaggcaatgtgatgtaatgaagatggttactttatgaggtaaaatatatataatttatattattaaatgaatatgatttctattattggtataatagttttgtattacaagatatctatatactgatacttattcatggttgatgccactagcaaattggatttcatcttatgaacaatgcgtgattgttttattctgattgtgtataactgataatattcgaataataaactatatgattat

SEQ ID NO: 127251 - DNA, 627 bp, Cannabis sativa
cattatattatgtttgttagtgttgccattatttcagcgcgcaatcgagagagaaaaaaagatagtcactagtggtgtattcttattcaactaatactgtaaacaaaataatatatgttgtaaatgattagtaattcttataataatttaaaattatattaatacttacatcaatagtaatattatgctttattttagtatttcttttattaatatatttcaataatattaaaaactaaatacattaaatctctttgaaactaaatgataggagtgagtatttgataaaatctactaaaaatacaattaagatcaatattaatactgctatttttgaggagcaaaataaatatagttttagttaggtagttagaaactgtgaaggtaaaatactttggacaaaattttgtagcaaaaatggcaaagtttgctcttagtttactgaaataatgagagttaaggaaattttaaattggataaaagatcatagcctttctattgtgatagtttggctactattcaatatattaaaggcttagtgcatgtttagcatcataactaaactgttttttgtttttaaaaacagaaaattgttttttgaaaacaatttggcttgtttggccttgt

SEQ ID NO: 127252 - DNA, 932 bp, Cannabis sativa
attcaactggaatgtacctctcacaaaccaaatatatcactgatcttctaggtaaatttcacatggatggtgctaaaagttctccaaatcccactagtactgctgccaatctgtccttaactgatggagaaccatttttggatataacattgtacagaagtacaataggggccttacaatatttgtctttaacaagactagatgtggccttcattgtcaatatgtcattgtcaaactgtcctaaactcagccaatttttaaaggcttcctacaacatgtcattgggaagcatgtaaacgactcttaaggtacctagaaggaacgatttcatagggacttgtgcttcgaccatgcattgaaatgactttcacaagttattcagatgctgattgggccagttgtgtagatgatagatgatctactggggttatgtcgtgttcttaggcaaaaatctcatatcctggtctgctaagaaataaccagtagttgcccgttccagcacagaaagcgaattcagagccttagctaatacgactgctgaacttcgatggatcacttctctgcttactgagcttcgtgttcacatgtcaaattgtccagttatctaggatgacaatcagagtgcaccagctcttgctgccaatcctatttttcatgcaaggtccaagcacattgaaattgatctacattttgttcgtgaccaaattcttgccaagcaacttgctgttcgttttgttccctctcttgatcaagtgggtgatcttcttacaaaatccttatctatagagagattcaactacctcaagtccaaacttcacatggcaaactccctgctctgtttaagggggatgttaacacctaactgatttaagttaatatagttagttgttatgtctattagggtagttgttagtgttagaaattattttacc

SEQ ID NO: 127253 - DNA, 1165 bp, Cannabis sativa
aaaataagtttatatgaaaaatatttaagtaaaactcaatattttttttatcatttttttgttgattttttttattattattattttcttttcagtcaagggaacaacttcagtccatataataaaaaaaatgagagatttttttttaatattacccattaagagtgcacttatatacaggataatactttgaataaaattagaggtttttattatacattcatatattaattaatattgatgattgatgagaagaaatataaaagagtcaaagatttttttagaataccaaaagttataaaatgtaatattaacatgaataagcattgaatgataaaataattagaaaaaataataaaaatttgaaacaatgagaaaattgaaaaataagcttcttcaaaagttagagtgccatgtcacctagcctaacaatagtattatataaatatatagatagatattcattatacaatatatatatatttgaaacaattctaaatgggtattatatatatataaatcaatatcaatattaatcagctatcatcatcaatatataaagaaaggtttaaaacattccatgtggcaatttaattgtccacatttcctaatctttaccctcttaatttttgatttaattctttgccctcttaattttttgatttattcctaatttttttttatttatttaaattttattctattaaaaaattagttaatttaaatgagtgttaaagaagagttataaagtggtaatgtatcattctcctatttatctattttatcaataggtggcattatctctttctaattttctattttttttttttataatttatgattttttttattatagtcacttaatatttacattaatttcatacaattacttaggttttcatttaattgtagttatggagaaagtttaaaagatattagtttaacattattatatagtttttatttgattataattatggagaaagttcaaaagatataagtttaatattagtatatattttttctattgctaaaacaaatagtattaataaaatctgtcaatcaaaagacaaatgataaaaaaaaatagtgcttttttatttgcaaatttgtaattactactaattttatatttataaaataactattaatgtcataatccatt

SEQ ID NO: 127254 - DNA, 797 bp, Cannabis sativa
aaaaaaaaaaagaaaaaggtaaaatctcctgtagttataaattcaaaaactagaaatcctatttttttttttaatagagttgataatatagttttattattattgttatattattgttattatcatggggctaaatgcatgttttattatatattaatttaacgttctatttgaattaatgcctcgtatctcatgaatacttgtattattattattattattattattattagtttaaaaagttttattaatttgccaatattaatatacttattaattaaattaaaacgatactatttaagcatggtaataaggtttcaaatactttgctaaataatatctttcatccaagatctaactatttttattatttatatattctaattcagaaatgattataaaataataatgttccttaattaaaattaatgatgttttgactgaaagaatattgaggtgaaaaccagagagaatataattaatgtgagacatttcacatcgatcgttatcataattaattctttttctagttaatttatttttgaaggggccattataatatattatttattattatctacgatactgtatttcttttattaaaaaaaatggagaagccgccattgccgaaaaagaattatcttcttatgttcttaataaatcaattgatttttgagtcaataaatcaaagtcattgtttcataggctcatataggccatgttagactttttatttgggcttacattaagttttattggttttattaaaacttgggttgattggatagttctttgct

SEQ ID NO: 127255 - DNA, 1078 bp, Cannabis sativa
  modified_base (717)..(722): a, c, t, g, unknown or other
acaaataaaaattgggaccttaggtattttcaccgccaatttttgaggttaaggactaatcggcatcaacttcaaattttttgggatttttgccgcaattatccctattctaaataaatagttttgtaacatttatatatgccaaataaattattttgagttgccaaatacatgtttggaataatagtgggaccacacaaaataaaaggcgaataattgaggttcttcaaattgtatagatattgaagcaatatcaagttgcttagaaaataggttatcgattaatctagtcatgtcatctagtttttgcatattagaattacagagatgacatgcttcttcacactcttaattagtactcttaaactaaaataagtgaaatttgatattaaattatatcatagcatgcaatatattacctcacaatttagcattactaattacataattaacacttcaaaatatcattgtggaattatgtgaaacacttaataagcataactaacacattttagtgatgaacttgtagcctaagtaagttggtttatatatatatagttacatgcatattaatatataaatgtaaagccagtctttggctcaaataaataaaatattaggaatattttaccaggatctaaatttacaaacaagtatgttgaattaacatcttaaatatgaatatatgtaatacgataaaattaaacacataagagnnnnnnaaaccttacattggttgcagcaaaataatatgactacttccgctcaaatctctaacccttgttcctttctttcgtagagtataatcaagatctaagcttggatcgatctcttcttctccttcgggtttggttactaccgtcttccgcactatgattgagtacttaacttgctatgtgtgggcatggcactctatcactatgggtgaatttggtgaagaacaatgaagaaagctttaaaatcactatagaaggtctctcatctactagttgtctgacagagttattagaaactagatttggcaggttgaaagtgaatagttcagttggatgagctgagagcatcatgttccttttat

SEQ ID NO: 127256 - DNA, 562 bp, Cannabis sativa
ggccacacaaacacgttaaactgtgtaattacctccaattacatccaattccaattctcaggtggctttccaaacgcgccctaaatttctgttacaattaactatcaaaatattatgataattaatgacaaaataaaatttgaaacaaaattaaatgttgagtataaaataaaacatttaatcaattattgaaatattaactttgatatattaaactaattaaaatcagtcagttggttaattattaaatataaaatattctaacaacaatatcacaggaatataatgttgttttttgtttgaagagagatcatggtcaacacttcttgaaatttggtgataatatcatctaaggccacctccaatgggctgcaaaacctcaattacagtgtgatatcacaccaaaatcaagtccaaccagcaattgtataatcattttttagtttgtctacaatatcccactatatttaggtaggcattatagataacactaaattattatttttttttttttttgtgttttttttttaaatttttcaataatcatataatatttaaaaaa

SEQ ID NO: 127257 - DNA, 2033 bp, Cannabis sativa
  modified_base (42)..(53): a, c, t, g, unknown or other
aaagaaaaaaaaaaaaaaaaaaatgttttttttttaaaaaannnnnnnnnnnnaaaaaaaaaaaaaaaagcaatagcttaagggtatagttcgaaggactaataaaatgattagtgaatacatttggtaaaataatagtcaattaatgtaaaataatttaacaactctaataattcatattaaatatcacacaaaaaatctcactaaataaatatattttacttaaaaaatctcacattttatattattaacttaaaatagctaatttataacataatcatatcctatcatgacaactagtaagaatttaaaatcttaaattaatttagtaaaataaaatatttattaaatcaactaaaaattacacatttttttaaaataaaaacttaaataaaataacacctaaataatttaattatttaaattattatagtgttctcacatataatcaattaatgcattttgaaagatatagtgagcattcgtattcttaatttgtctatgtcggccaagaaaatattaaattattttaatattcttcaagactaagatacttaagtaattaattttactattaaattattattttacttaatatttatttttatttatgttgttctttttagttttataacttagtgttgtgttatttttattttataaatattagtatttttattattattattttgtattttccaatatgttagttcaaatcaattactacttttataataattttttatttgagaactaaaatataaaattattttataaaataaattaaaatacgagtattaatgaaaaaaaaaaaaagttttacactaaattgaagtagatttaaaattcagcaccattaatagtgtcgaatttggtgtatcattagagtgaaataatgtaaaaatttcacactaatttgataaaatggtacaccattagagatgtccttagagcatctccaaagacatggcatattgtatatatggagtgggtaaactctccaaggacacataatattcaacatcattttgaggttaatactacagtgcaaggcatatataccgtgcactgtagacacgatattctttttttagtatatatatttaattaatatttatatatgttttatattattagatgtctttatgaaattaagaatttaattttgaaaaattttataatacacttttttaaaagtgatgtactgatgtattcttatttttttttggcacatgatagacttttttattctaatttttttacagtcgttaagatattttgtaaaattttaagaaattcagaaaaatttaacacgccgaaaataatatatctctttaaaagtggttcactgatgtattcctacatgtttcgacaatcaagagacttttttagtctatttttttcatggtcgtatacattatatttgtttaagacatcttgtaaaattttaaaaaatttgaaaatatttaatacgtcgaaaataaaattcaaattgtttgtcgcacgtgtgactcttttatttagaggagtacattgttaaatcaatttattttatataaatttaaatatgaataccataaattatttatatttttaattatgatttagtaaatatttattgcatttttatcgaattttttattttacaatataattacctttaaactaatcaataaatttatttaaaatattatttagatataactattgtggtaattttagttaattaatataatattaattcttttattttattaaataattaatataataataaggaataattttttagtgtaatttttggtattgtagttggagtggaaatagtttttgacaccaaatttaatgatagtgtgataccaaatttggtgtgctccttaaaccatctctaataattataccatttcggtaaagaatctacactaatttagtgtaaaatcttttattttttggtacaacaattctaataattcacatcaaatattctaccaaataaatatattttacttaaaatattttatattttatattat

SEQ ID NO: 127258 - DNA, 1497 bp, Cannabis sativa
  modified_base (40)..(56): a, c, t, g, unknown or other
aatagctataaataattttccataattaaacataattaannnnnnnnnnnnnnnnnaaactaagcggtctttacagaggcttaggagacatgatttctagctcaaggtcacctggttcaaaagcaatagtgacgttgggtaaaaacattggtcttgcgagcggaatagaaaataaacactagggttcaggctaggcagcgtctcacaaaaagcaacggttacccttggaaatctcttgcaaaaactacctattacgagtggcagtctcttcttggttcgaattaatcaaatgatctctaatcctaacatcctttatttccaatttggattgaggttcaaagtttctgggtttatatgggcaagctatatgtttgggacatttcggtattgcaaattctggagaataaatttctgaacaagattgggacatctttaccaaagaaagacaatcccaatgcctggatgaagtttatcaaaccaaaagcttgaggaatatgataaacctaaactaatgctaaaccctaaatatcacctaggagatacgaaccctaattgctaaaccaaacgaagtactgggatgtaagacaagccgtaactcaaataaaaataaaaggagattgagacacctactgtgcgaagtcgaaaagtcagacgctgaagatttctacgaatgaagacgtggtggtcggcaggataaattttttgaacactgggatttgaaaagcaggtttgaataaattcttaggaagaatgtcaacgataaggatggcatgcataagtttagaaagctcaagttttgggagatgatgaaaatggtataaaatttgattctcaccattttataccttgtatttttcgaccatcagatcacaatatggaagatctaatggatgagaatagaagggaagtggaaaagatagcccattaatgctattgatgtgtatcgaaaccataaaactgccaaaatcaaggacgtgcattttttaaaaagaaattatgacaaaaataccctttgtaatcattaaaaagcactttttattaaaaaagaactttttaaggggcaattattatacccaaaatttagctatcactttagagggggacacatgtcaaattgggaagaatacgaatcgacaaatgtaatgatggttatatttgaaaatgtaataacttattaaatgcggaagtgacagagtatatttacaacttactcactataaagtcttaggcgagataaagatttgcaagttgttgccttgtgcattagtgagaaattatacaactttagatgtataaggcgaggcgtcaacctcgctacacattagaagacgagatacaatgaccgataagatacttagcatataatacactgtataaaactaagtataataatcggataaacccatacaactaatagcgaggcgcccatctcgctataggaaggcacgctcgtggtaccttcactaatcagctccagacatcttttagtgagattca

SEQ ID NO: 127259 - DNA, 1040 bp, Cannabis sativa
  modified_base (198)..(205): a, c, t, g, unknown or other
taagatgaatcactacaaaaacagatacatttagtgtaactttttagtcacaacataaaaattttgtgattaattgtgacttttagtcacaacaaaaaattatttgtgactagctaaaacataagatttagatataagttgtcactaatttagttttaatcacaacaaatatagtgactaaaaacacatttagtcacnnnnnnnngtaatttttgtgactaatatatcttttgttacagactttttagtcacaacatatataggaatgataattcataatttgtcacaacttttttacttttagtcacaagttttgtactaaaagtaagattttttgtaataaatattacgttttacatatttatttaaattttttaattctaaagtgtcaaaaatttaaacatcaactttaaagaatagtgataactctttcattgtactaaattttaatacattaaaacaaattatataaatatatttaaaattttggccttattgacaaaaattcataagccactgcctagtaacaagtacatattaacatgatcctatataagaaaatatatattataagtttcttatactcattcaaaaatatagtcacccatcggtgatgaaaaaatgcatacccctctcattaaaaatttgatgtagactatagtagtagtgaaactcacaaatatggacattccctaacaaacgagaaatgttatgttcctaacaaacgtgaaatgttatgggatatcttaatcaatgtgtccaagtataaaaagtgacattattattggagcaatataatgttaagttaaacatattttaatttaataaataatataaaaaattattaactacttatattaatgcttctatatagtattactgcttctatgtagtattacgcacttaagggagaagtcaaaaaagtacccttttcattatattttaacttaatttatagggaaaaaaacagaaaaatacaaaaaaggaacaaaaaattataaaaatactttgggccggcccattaaacatttatacagtcc

SEQ ID NO: 127260 - DNA, 1058 bp, Cannabis sativa
tggtaaaataatttctaacacctttttggccactacctcctcctccaccatcggcatggttccttgacattcacaatgttcattcattgaagtcaagtcaagttgaaaatttggactattcaattccatatctcgccaagcttcagggtgtctacaataaatacccatttttgagggcatatgctactctctatcggtggaagccactctttgatgagtacttctcaaaaaagtcaagccgacgactttaaatcaagtgcttcttgggaggcaatccaagctttctacactttgtcttttttttgttttaaattcaataaacatgcaatattaaatggctttcacaattgcattgtagttttttctttctttctttcttttctttttctctcttgtaggtgtaagcataaagtcaaatgaaattgggcgcgcttatggaggttggcactagcaagtttgcacatcattgactaggggagttcttctttatttatttttaaacttgctcacacgtatttgagaattttgtgcttaaacatgttttgggaaactaatttttttctttttattttattttgcttgtttgcaaaataaaaaaaattgagccatatgtgctttggtttggtattttttacattccaatacatgattgatactgtgcatagcttattgaaaaatgtaaatattgtttgagcttgtgactaattcttgtgctaatttcattttaattgagatatatccaattttgagcacaaatgcctcgatcatttaattgtgagtgatttggtgaaagtttgtgtagatatgtgattgtgatctcacaagtcttagaatttttttggttctgtcttgaggcaaaatcttaggcaatgcttaaccaaagacatgatttaggccatttttggatcgtttgagccttttgagccaaccatggtattattttatccctaatcactcccctttgagcataattgaatccctttgtttctttaacacatgtaagcctagccaaatacaaatctttccaccatataccctttgagcaccttattattcta

SEQ ID NO: 127261 - DNA, 651 bp, Cannabis sativa
taaaagttaaatttacaattttttcccattactagcatagcaaaagagcaaattagctacaacaacacaaaataaatgtaacccaattttcttcaagcttggaattaataagtgtatatctaaatacatataagggtggataaagacagtacctttaaaagcaaatttagcattaggaagccattgagtgcaattaacagaagccttgtgacccggaagagtagtcaaaatctgagcagtctgcaaaattcaccaacaacaaaaaagaagataactttgaagatattcatacagtaagtaatgatgaagaagaagaagaagaagagaaaaaagacctttggagagaatataacgacggcgttttgagctccaaaggatactaaatcagaggcaccccatgaaacgttgttgactattctgttgcagccagctccgatgaatactctcttcactccaactccgccgccgccattagacatgtctgactgactcagtttctttgctctaatcggagaactgaaactaaaacactcacagagacaagtgaagatggaggctgccattttgggcctgctacttctaaaattttatgggcctatggttttcttggcccattatgttttttttagagaaaaatatatggggtaagtt

SEQ ID NO: 127262 - DNA, 1088 bp, Cannabis sativa
agatcctggtaaaaataattccaacagtgttcatgacaatgccccacctcagtttacaaggagtaccctagacatccacctcatgatgcaagggacccagatttttaggatcacctcaaccaaagaaggaaacctaacctaagagaccacctaaacaaggggcatgcagaaagggatgtcccatatcaggcaccatatgacgtccctcctcaatagggggaatatgcatctcagtttaatatggttgctcctctaccagaagatcacaatgtcctagcttttgggattaatgacctaagacttacgacatagaacaataaatccaataattttttaaacaccaacaaagatgtcgatgggtacgggtcagaggaggagctcgaatcattcccaccacatatcttgacactactaaatcctctagggttcaacacatcaaccacgaaaaatatgatgggagtaaaaatcccggggtccatattagtgatttcaatacacttatgagagtgagtcaatagaagttcccaagtaccatgacaaagtttcttgagtaccatgaccaagttccccaggtaccatgacaaggttcctcaagtgccatgaaaaagttcctcaggtgcaatgacgaagttcctcgggcactatgacgaagttcaatgggtgccatgatcaagtttcccaggtaccatgatgagtccactcagatacactcatggccaaagtggagttacgtccaaagtggaggtctactcatgactacagtcgtgaggacacgtgaccaaggaccattaaagctagagtcgtgaggacacggaggacatgtgaccaacaaccttcaaagctagatttgtgaggacatagaggatgcatgatcaacgacctttagagctagagtcgtgatgacacgtgaccaacaaccttcagagctagagtcatgaggacactgaccaacgactttcagtgctcaacattggttctacctctgaagtccaagtaactcatacgaacttgagtctatgtaaagagatacttttgtgctaggcatttgccatcacaatgtaaagaccgcttagtttaaatttagaaat

SEQ ID NO: 127263 - DNA, 615 bp, Cannabis sativa
taatataatacttaatataaaacatagcatacgtgcatcgtacgtaacaatatactagtataatgataatcggccattgatttgtattattcgtttgatagttttttttttttttttggtatatatataagattgtaatttgatttatatatagcttcattgtgttttatcgtggcttcttctgttaatccacgtattattttattgaagtttgttatatttatttggttcatatacgcagatatgctgtagaaatttaactttgatattatatatggattacatattttatggcttatgtcggcttatatcttctccgatatctattccatataaattgtgtctattttggtttttgaaagtttttgaaaaattcatgagtaactttttatttatattaaaaataagatagtttattattaaaaataaaatggtttatgataaattcatgaatcactttttatttatatatataataaaataaaaataaaataaattctattaaatccaaaaaaaaaataggattttacattttctttaattaccgtatttctaatcctaaggtttattattaaaaataaaatggtttatgaaaaattcatggatcacttttta

SEQ ID NO: 127264 - DNA, 1250 bp, Cannabis sativa
gtatttaaataattagataaaaaataagtgttaaaattagaaaggacatttttgtttcattagtcgaaataaaatagtataattgtaactctaaagcccattatatattcggccctaagagttagatatcatcccaagtctttatttaagcccatcccatctaaacctaaccctaagtgaatgtctatataaagaaagtaatgagaagagagatataatcttacctaatttaatgtcagacaactctcttctcttctttctttgaaattttggagttcactatacactttctctctcaaatattttttaataaaatatttgagtatcagcccacactattcaagcttatacttaggcctttgtgaacgactatgatgaacacaattgaaggaggagaacatccatgttaagatcttgataatgctctactacaaacaagaatcaagggctagaaatctgaacggaaggggacaatttatttcgctgcaaccactaaaaggatttctataatcccttatgtgtttagtttattgtttttaggaactttcatattaagatgtaagattagtcttaatcaaacatacatgagtagtaaattaaaatcatggtaaaagttttttcaacaattttatctcttgaaagtgcgtaaaaacgaaaacacccctgaataatgaatttgcctcactatttataagagagaatgaataaatttattctcaaaataataggagaaagatcaatgtgcattttgaatatgaatcccatgattttctcattctgttcagtcaaattccatgaaaataagaattttatattgttcctaatcttgtggaaacggtaaaggaaagtatcgtaaaatatcttcagcgaagtcctcaggtcggctatttacgttatgcgacttgctcacatcgctcagcgcgaggtgaaatcttgagcccattcaggtgataatttttttgagcatttatacttcaatttcattcgtcattgtcctgcttggttggtggtgtaacatttcgtccaggatcaaatttccttcttacgtgtcagcttgccaggtacccaggcccagccctaggcataggcgggctaggcccatgcctagggcctacacttcctacgggcccactaaattttttgaatatttcattatttaaatgttatatttaattttgattttctcaaaaaaaatgttatatttcattaaaattaacaattaatatacccaaaattggcctagcacagtg

SEQ ID NO: 127265 - DNA, 881 bp, Cannabis sativa
cttctagtcacggaaacatccatctggtgggtttcgatgccatattctccatctctccacgcgctctccaaataccagatgaatatccattttattcatcctttcatttgcataaacggatttgcaattcattgatttagagcttcgtgacctccattgacgactagatacatttctctaatggaacgtcggagttcgaagcacgaagtgtggaatatactgtacgcctttattttgcgattgttagagcctttgttgcaatttttgtggtcgcttctttgtggctgcgagaacaacgacgagttgttccccaatcccgaccttcttctttatgccatattttcgattgtgcgatcatgacgctgaaatcataatcgtcatcttcgtgaatggttttatatatgctctgtttagaatagcctttctgccattggttgtagtcgagcttgtagtcatgttgattgctgatagttcgaagttatgagccttattgtcactattcttcttttgcaggagttgacgcgatatcttccgaattgatttgcaatcattgttttggacttgagcggtcccgagatctgagcgacctcaagatcagggcggttccaaaatctgagaaagcagttagagtcattccttcctcattaaatataatatatgtttttcatcttttcttctctgatcagctggattttttctaagttgggaactgttgagattgcttgctgatgtgaattttgtaattctctgaacagtgccttgataatctagaaagatgatttgtattgattttagctgatatctaagtgctggggctgatttcttgacttttgatttctatgctaggggctcgtcatgccatgattctcctccaaaatcat

SEQ ID NO: 127266 - DNA, 1002 bp, Cannabis sativa
  modified_base (953)..(971): a, c, t, g, unknown or other
atccatccaatattttagatccaatatttattggattagattggatccattcaatcccaaaaaaaataaaattttaatgttaattatcatatataaatttatttttttaacgtataacaacataaaattaaattactcatccaaactaaataaaaatattaattagttcgattggatgttggatgtattgaatatttggacaccctatctaatatccgatccgatccaattggatattgaaaaataacatccaatccgatctgatcataattagacatttaatatttagtggtcggttgtaattgaattgaccgactgtcattgaattggattgatttatgcacactcctctctctctctcttcaatttatacaacaattaataaaaatattaagaaacaattataattatttttttaaaataaaagtcctattatagtgtccaaaatattatagatgagtattaattataatttcttagtcaatatttatgttcgaaattacatgtcaaaatattttttttttcattttttttcatagtaatattcgttatagttacaatatcacttttgtaaaatttttaaaattttcacatagtttacagtaccgataatggagttcctaatattttagtctaccatgtatgttcaaaaaactttaaacttattttcagtactgtaaattaactatttgaaacttttcaaaaatttaaaaaaatttatgatgttgtaaccataacgaacaccgtcatataaaaatttgaaaaaaaaaatattccgacatatattttcaaacataaaaaataactaagaaattataatagaaaattaacggtcacattcctgaaaattatatcctacttatattgaaaggtaatattattttgggaaattctataatgcacccattttaaaagggatacaccgatacatctctatctgttttagtatccgnnnnnnnnnnnnnnnnnnnttttttctcatggtcatgtaaattatactta

SEQ ID NO: 127267 - DNA, 743 bp, Cannabis sativa
tttaaaataaaataaaaataatttctcttctcttttattcttttttctttatttttgctttttagcaagagcggtaagaaatttggtagtcttgttttttgtgttgcggaaagattaaggtcgatccttgggaggacttaagactctgattttataggcttttgatgagagagagagagagagagagaggatttgaaaatctatactgaaaatgcattatatttgagcaagggaagacatgttatttaaaaaattttagatttgaactaattgtcgacggtaaaattgtggcctataacattataggcgacgattttaaatcgtggcttatactataggtcacagtttaaaattaaccgtcgataattctcctttaaaatattcgcaatttttaaggcacccttaaaaactgtcgagaatacctcacgagtgtttaaaactgttataaatacctaattttttccgacaattttaaacactcaattttttagtaacgatccaaaaaaaaagtatttttaggacaatcggggatagtagtttttgtggtagtggtttttttgcgatagtgggatggtacaaggaagaaggtggagatgaaggatggtactggtcgacaataagcatccactatcgagaagagtaggctgcaaatgtaaacagttttgtcatagcacttttagatcggattataattaaattttattttgacaaaacatcagttcatggtcctatttgtactattt

SEQ ID NO: 127268 - DNA, 961 bp, Cannabis sativa
tttttatcgattgagcttttcaagtctaccctatttgttaaatccctagttttacccaatttgagcctaaatgttgacatcttgtttttcttttgaccttatacaataacctttcgagccaaaaaatccttattcatcctttttcacaccatatattgatgttttatgtatttgtaaaagtgtgagagttttgttgaggaaaaaatattgatgattatgtataagtgatgatgagataaaaaaaaattattaatctcttagaatgaatgttttgtaagtcgtaagtatttcactaaaaaaaactaaaaaaacatgatgagaaatacatcgaacaataaaatgaatactcgcaacattttcagtgtgggggaataggaagttttatttttttttaaaaaaaaaaagatacaagattgaatattgtggagagtgattagagaatacaaataggaattgtttgagagaatgttgtatgctatagtgtgatttgagcctaaattaaccttcttatctacctttcaccctagtcttacattataaccctataaaatcctattgatctttaaattatgtgtaattacattagtggagaatgatttggtaattaagcttatggagtggattttcgttgaaatacacatttcttttgagatgagcattgattgttggcatgcatgaattgatttgaatgttagtaatatgatgagttgattgcacacacacaaaaattaagtttgaaaagtgatttatcttgagttgaaattctaatgattgaataatttagatttttcatggaaatataaagggatgtacaattcttgaagataatttttttttcttaaataccgatttgcttaagcatcattcattttattattaacttactcgaggacgagtaagagtcaagtgtgggggaatttgataagtcgatattttgcctataaatatagctaatttatgt

SEQ ID NO: 127269 - DNA, 858 bp, Cannabis sativa
catgtacaactttctacatctctcaatgaaagcaccaaaaggttgactgaaattttcagtaactaattaattacagttgtttaaatgattaaaagagatttaatgcaagtatttttacgtggttggggcattaatgtgccttagtccacgagtcactactatttaatatagtagtttttcttacagagggtgtttacaccattttttctgaccccttcttaagaatatagttggaatatttatagcctcataaagaaggcaaaaatgttactattgtcgcaggtgtcgaagcatggcttgcataagttcccagattaagataatagggtatgtatgtatgtctgtctggtaggttgtataaacttttcctaggtgtttggtaaaataagcccttaaccttctttgattgacgcgatagtacactatgcaaccgtcataagagtcatagattagagtgtaatcgtcgaataatatgtttaatgcctctaacacatcttttcagaaccattcacaaacgtttcccccatgctgcatttaatgcgcctatgtaattcacgtctgggatctaacgatcggacctggatgttttatctagctactggaagcgagcataattcctaactacatggtatgattgaagcaccctaagggacctcctgaacatgactatcaggtctcgaagcgttctcttacggaatttattttaagtattcttgacctttagactttcttgttgcttgcctgacttcgagactgccacgtatattgggaaaaattagggacaacaactttagtaaatgtattaaaaataatagaattatttttttaggctaattagcaattttccccccgaacttt

SEQ ID NO: 127270 - DNA, 1830 bp, Cannabis sativa
attttatggaaacccatgattctcaacataccaaagcgtaattggctaaactatgagtcactttaatggcttctctaaaaacaaattttaaactagaaacaaattaatattgctctaaatttcttatgtcttgcacaaggccattcaccttccagcaatcttcgaactgctcattaactagatgaatcgcctgtaggcgatccatttggacactaacagatccaatcgacactgaattccaacttttaaatccttcatgatgctctaaagttcagcaccaaacggttcacaactgtgattcttcacagtagttgaagcaaacataacccatccctcactgtttcgtatcactatctcagtcgaagaggtactcgtcgtagctcatacacccgcatcaacattgattgaaaaagaatccagagcaggggcctgccatctcgcctctcctcccttcttcctctcttagctggcagtttattggcctcttaaaaatatcataagaaactttctacactattcaagtacatctctcgcctttgtactatgcgtgtttaaaaaattttaaattcatttttgcactatttgaaaatttttaaaaatttataatgatgatattataactatagtaaacacagaatgaaaaaataaatattttataataaaatgctataattagcactctctcaatacactaccctcgagtggtggcaaggttggcaatttttattataatgctttacgaaatatttttttaataaaaaataaaagagatagttttacaaaactactttaagaaagtgatttaatttcaccatttagttactcattttataaatatataaataaaaaataggaatttgtagtatattccattttccatatattctcaaaattaacgccacctttggattctctttctccacattcctcaatggtatcacaacatcaaattaccttttctttttttcctttccaaacttaattatccttcttccttattaattgcatacattaaatactattcttaattaaattttggatactaaatttgatttatttgataactccaaccatcactaaaaatcttgtatattaaatattaattatttagttatgtccaaataattaaaacttcccatatatacatatcactttcccatttatatagtagagttagtaagctcatataaatatatggtaaatattattatgcatcatgtattttgtaaaagttattaaatagactatctgttttgttaaatgacaaaaatatttttttgtcaaaacaaacttaataataatctgatttaaagatgtatatgacaaaactgtttacatattctgtatcatttcgtgttagaaattatcttagagttaattatattaaaaaataaaattgttgaaaattgagctatggtcctatttttaccattttggaaaatataagatccaatttatcatttaacaaaacagagggttcaattggtaacttttgtaaaacacaagatccaaaatattatttacccatatatatatatttttatttttattagaataattagaatttttatcttttgaatttttatactattgtgtattttatagtataagattctttaataatatcactcgaattataactttaaaagtaacgcggttcttttatcatattctatttacttttattgtaaaaaaaaaacttactgattacatggtagttagtaaatagatacaaattaaataactaattaaaaatataaatataaattttatatatataaaaaaaaagaaaaatatgttttgtattattcatgtatgttatagctattt

SEQ ID NO: 127271 - DNA, 563 bp, Cannabis sativa
aaccaaacatcatcaatacgacttgaatttaagggaatactcaaaatgagttgagcatcccttgtattaaacagatcacgcaccaagtccacgtcccaggctaaacattcaataaccataagagcaaatccctttttaatttttattttcctcctaaaatctaaaactaataactaaaataaattattaaaacctaaaataaataaatgaaacaaatttaaatttaattaaactcattgaattaaaataaaaagaatcaaaaagaaacaaaataaaatttcatagttcatttaaaaaagaaaccatatcctcaaaatttcatcacgaaatcgaacctaaatcctcaaaatcaaaaacgaaaattgtgtacgtactaaaaactaatcgattttgtccatatcgaccctatttgatcttcattcctaagctaaatccctaaaggttgaagggagagcagtagaggtgcccagaaactaatcgtataatggaggacgacaatggtggaggtacaatcctatttctcttttccttgattgtttatagtttattttgtaatttgagtg

SEQ ID NO: 127272 - DNA, 870 bp, Cannabis sativa
agactcctcaagtgggcaatgaattgagtcagtttgacatacaatattagtccagagttttgattagaggtcaggccttagctgacttcattgtagagtgcactggataaataatgatcctaaaatgtcaacaccgaaaagagaagtttggagaatatacatcgatagttccaataggtctgccaaaaatggcaacacattggtcccaacgcgaggacaaagcttcttcgtcaactcaactctgtttataagaggagggacagctttgttccacctattataattggcaaactcggcattacacttggaggataaactagtggaaagctttttcatctcctcaacttcattaccatgccttttttggtagaactaatccatggcttctaggcgagcttcgtccccttccgttaaccataaagacctaaccagaagagtggaaggtgctagaggtaagggaggcagtttagtcctttccctacacagctgagttgaagtggctggaataattttaggcattgggggtggcacagaaggattctaattgttcttttaattccaagtgcttcacctaggcagtcttctgccatcaggagtgttagaccccttctgggactaagtatctattgtttgtcgcctcgagactgccaactgcaagaccttctctttggtctctacccttgcctttttgttggcaccaccatcaaatgaactggttcgcttcttattgattagtacaagcccgttgtagttcgagctgtcccctctagagctctttaaagaaacctgattcaaaggctccacgaatagggaaggtgttgggttttgtgccctaaataaaactcatttcgatataatcagatttactta

SEQ ID NO: 127273 - DNA, 1587 bp, Cannabis sativa
cttaatactgattatatgttaatctatctcagagatgattagataacacctttattgctttctttaattttcttgtttttttctatttcaaaacctatgaaaattatttatctaccaaatagaatcataagtctaatttagtggtatttagttcaattcctgtggttcgacctcacctacgttagtttactacttgattacgtgcacttgcgtactgttttacaattttcataacaagtgcccaccttttaaattacgtagtggctacccctaagcggcttaccacgcaacgaccatcattgaagagcaatgggtggccatgctgaaatgtaatggatattagctcttttacgggtccctggacagtgaaacgttagaggaactaattcacaagttggctatttggtaagtacttggccatttggaggaagctggtggtaagtacttggccatttggaggaagctatggacggtcaagtcattgattctatggctgaccaacttgtggaggtgatggtcggctaggttaatgactctatggttggccagcctttaagaggctaggccgatgctgtagtttgaaccttactacactcagtttgctgtatcccccaacataattactgtagagcctttgtgcacttttgtcaatagctacttagcttctttcttggtaacgctccttagaggtggtgttgggattccacttctgtgtgttatgctgtggtggattccactgttactcaatattttccttttttttaaaaaaaataaatgaaattatgggaattaattttagtgacacctcatatttttagtgtcacgtattataaaacactaacactgagattttagagtctttttatctggatcactaaaactcacccgaaccttttagtgacccgcacaaatatgtgggtaactaaagagtgtcactaaagggtaaatttgtagtagtgctttaaaactaaccttgtttccttgttcatcaattgcccccaggtgccctgggggccatgcttgcatcgggcaggtggtcaatgcacctcttaggttgagttgttttgctcttcctctcgcttcttctttggcttctacttttctcccaaacattgagagatttagggagatatgattctatgactagccatgaagtttgtgagagattggcctttgttggccacgcttggttgataggtggccttatattggctgagtgtcagtggttcacttgagtagtcggcctgatgcttcaagtttttgtagaaccaatagcaacggttgatctgtgtacacctttatagggtgtgtctggaagtatgaacttagctttttagaaaccaagagcaagctgttggtgagcttttccatgagtaggtaccgaatttcagcaccgatcagtctcttgctgatgtagtatacatggtgttgtatacagttttcttctcttgtgaggacaacactcatagcatcttctgtgactgctaggtatactcctagctcttctttgtcttggggtttgagtaacagaggtggctgagctaattgtaacgtccctgcttcaagcctccattgggtccttacacc

SEQ ID NO: 127274 - DNA, 2178 bp, Cannabis sativa
ctctctctctctctctcgttttccctcaaccaccaccactcaccacccaccaaaattagtcggaccacctcccaccacgacctcagctatgccgaaaccacgtcggaccacaaccacactcggtcagacctctaaaagctttattttcctcacaaaaaatttcattttcttcaccccaaaagcaataggtaaatgtttttttatacaaaatattattagtttatattgtatggcatggatctacacattaatcattgtattatgtcgtttttgtgacctgaaataaaagtagagttcgtatctgaatgttggtttttttctgggtttttcaaatttttgcgattttgtacaccattgtgcgatttttgcgcgatgccagcagaagtcaaagcgttaaggatgactttcattctttttagcgacatttaacgatttccttgtgattttgtacaattttaatggttttgcgatttgtgtttacatcattatgcaatatggtttttttttttttttttatttcctgatgtattttttgtgcgatattattttatgcttgtgcgattattatgcgatattattttttttgtgcgacattatgcaatattatttctttcttgtgcgacattatttcatttttttatttttttcttgtttccttttgtgtgcaacattatgcgatatgttttttttcttgtgcgataattgtgcaatatgttaggctgattttttctttttattttcatatttgattgttgtttttcttggacagattcaattatatttgtgcctatactatatgatggtgtttgggctatccccaacaagtaagacaatgatgtttgacattgagattatactggaaaatgtgcgtgaagttttgtatgaagagttggatgtggatcctttggtgtatgtactgaaattagaagtctgttacatgtacatgaaagacaccaagtttcccttactatgtttaggtgacatttgtgcgatttacgtttctataatttagttgattgtaaatatttttcatattttacaatttttgcaatgtttatgtgataatttttgactcttgtgcgatatttgtgcatgtttcttttccttaatatagttgactgtaaatattcatattttatattttttacaatgtttatgcgctaactttttacaattgtgcgattttttcaataatttatttgactaaatgtttctcatatattacaatattttcgatatttatgcgatatttttttatatttgtatgacgtttttgcgattttattttccataatttagttgactgtgatattataataattttcttagttgacaaatatacgattttaggcaatatctttttatacttgtgtgacgtttgtgcgagtttattttaactgtacagaagggtaaaattggtaggcacagaagggtagtttatctcaattgtactgaaatcaaatattacagcataaaatttagaattccccgcatatctaaatattatcatactccctctttttcatccataatgctttgcaaaatctagccactccttctcaaaatattctcatatttctttgttaaccccattctatttcgaactacatggaagcttaattaatacccaactaaataaagtttcaccgtatttggtagtaaactttttgggaatatgctacaaaattaaatcaaataaaaagttaaaaaatttatgtaacaataacatgtgaaagctgtgaaaaaaggtatcagacatatttgaacttcttcaatataatataaatatatataatggaccagaaataaagtgtagagccaaaattctaagatcaaagaagaatgaatcccaaaatttctcgtaataaaaaacaaagtgtattgcatagcacacaagaggcaacaaaaaaaataataaaaaacgaaataatatcgcacaataatcgcacaagaaagaaacaatattacataatgtcgcacaataatcgcacaagcacaaaataatatcgcacaatgtcacacaaaaaacacaacaatgaaataataaaaaaaaaacaaaaaccatatcgcataatgatgtaaagatatcgcacacaaattgcaaaaccatcaaaatcgcacaaaatcgcaaggacatcgtttaatgtttcgccaaaaagaatgaaagtcatccctaac

SEQ ID NO: 127275 - DNA, 2546 bp, Cannabis sativa
tttttttttaagttttctattcaaaaataacaatttttttttattaagatgtattttaatattaatttttaaataaattaatgttatttttaaggtctaagtcaccgatatttttagtttaaccagaatatactataacttaacagaatatttctaatcaattaacataatttaaataaatattaaattaacagtaaataattataaattattaagaaaatgtagtatgtatacctatttcgagggtgtaatttctagagttaagagacttcaatatgcggtgcatatatatattttaatattaatttttatataaattaatattacttttaaagtctaagtcaccgatatatttagtttaaccagaatatactataacttaacagaatattcctaattaattaacagaatataaataaatattaagttaacagtaaataattataaattattaagaaagtgtattatgtatacctatttagagggtgtaatttctagagttaagagacttgtggtgcatatatatatttttatatatacttatatagataattatattttattttttaattataaatttaaaaattaaaggaaaaaatagaagattttaaagcaatttataaattgaattaaaaaaaataaatagaaagtgagataattttgagaatatatatacctatttagagtgatgttatattgattaattaattatatatactatttttaataaattagttaatatatactttaaaaaaaatagattaaagtaaaatttgaaattaaaaaatattaatttttaaataatctcagaaaatatcaccaaatagcgaataactcaaaggggtcgagagctaggagaattcattaattcaaagcatcagccaaaataaagtctttaatacaacttgagtagccagaccaccaaactatgcttgcggtaacaaaaagagcaagcttagcaagagaatcaacaacattgacagataccaagatcattatgcattctcaatctaaaaaggttttcatgttatatatcatttttttaatcacacacactatatatattcattatttttgtatgtgtagttcatgttatcatcaactcataatataattcaattcataatagatttcaatttaaatttaaatcatcatatttttaatttttaacttagataattagaactatgtattttgaatttaaggaggtcttaatcttaatatagcacttttttttttccttttttttcttaaaaaaatacactatgtatatacatatattcaacatgtaattcatgtttcaatctaaatttgaatttaattcatgccatttttaatttatatatatttattatttttctttttttcatattttttaatttgaaaaatgataaatcttaagtaacaaattatcatgatttttaaacaataataacttttagaaaatgataatgcttttcttaaatttgtgaggtatttcaagagaacaaataatattttttaaaaataataataataaaaataattataatgttaaggagaatgacagttaggttgttagaactagttagttgtgttagttatatttctgttatgatttgtttccttgctgtcttgtgtggcttatgacaactttgtatatatataccttgtactcttctcaaaatcaatcaatagattcaattcctttgttttcagttcttgtctctctcattctctctctttctattaaacataacatggtatcagagctgtaattcgttcaacaatggaagcttcagcaatcggcaatggaggagcatcaagattgaaccatgccttcctccctcgttccaatccagtttcgttctcacattctttatcgattaaacttgatgaacacaattacctgccatggaaacatcaagttcttgcatcaatcaaagggagtcgcctacaaatgttcttagacgccaccaaaattcctcctaaatttctcagcacagatgatgaagacaccaatattgtgaactctgccttcgaagactgggagcaacaagacaacttactggtttcttggttgctctcatccatgtccgagaagacaaccaatcgtatgatcggttgcgagattaccgctcaaatttgggaagtcctgagtgagtattacactgccctgaattctgctaacattggtctttacaagactcaactcaggaacaccaagatgacaggttctttgaatgattaccttctaaagatcaaaggcatagttgatcttcttgccactattggtcataagcaatcttcccaagatcacgtcgaagtaatctttaatggtttgcctcctgaatacgatgtgtttgttacttctgtaacaacaagaaaagagtcctactctgttgctgaaatagaagctctattaatggcacaatctgttcgaattgagaaaaacaccaaagccctggatatcaacaaaagtgaagccaatttagcccacacaaaaccagctcaggggagttttgccaacagaaatcacttttcaaactctcaaataccaacaggtt

SEQ ID NO: 127276 - DNA, 1322 bp, Cannabis sativa
  modified_base (1270)..(1291): a, c, t, g, unknown or other
gcatcatctcttaaatgacatattgaacttgtggaaattgatgacttggcagaagtcaccatttacttgaagagaatgttttgaaaaattatcttccaaaaatataagatttgttgagttttaaaacttaaatttaattttatatattattttaattcaataaagttcagaaattaaattttaaatttatcaatcacttgatttacatgtatgtttacatgatattatgtattataaatagattttattaaatttctaaaatatagttgttcacaattacagtgacacagtgacgtcatcacaataaaaatatattgtgattatatggtacaaacttatttattcctaaaatttattagtgtattagatttacactatgtgataatccacaatgtagtatatacttatactatgacaagtggtatgtctttttcaaggtattggtaaagtagatttgtatcgattgtattggttcacattcgactggaccagtattaaaaatagaacagatattataaactaactattatatttattctaagtcaatataacttagttgatcgtagatcaattcgatctaaatcctatatgattatatgctttaagctaattgtgttatttaagttttttggcttgtttgttaccagcttaccctacaaattagcctaaacttatatctagagaaatcaatagtataattgagtgagagtattaatcatagatatggatatctataacatctatattagaagtaaaatagtagttttctttgaggttgattaaatgtgttaaatgatagatatctcatttttgtaattatactagtttaatataatacatttacaaagaactaagtattcaaagataaaatacattgtcgcataaaatggtaattttagtctctattccttttgaaccgtctatggaggatcgttgaatgattgattgaaacaatagataatttatagcgtatttatattatgtatatagagcattttttaatagtgcaatttcgagtctcaagtggagtcacgaagaatcaataagttaaaaaatttattaattatatttcaattctacttattcagagcttgattttataagcccgttgccaataaatatctagaataatgtttgacataattagtttttcttttattctcttgagttaaattcttatgtatgtacaatattgaataataaagggtaaatattatttcggactctatgttttgtaaaagttacagattggaccttctgttttgttaannnnnnnnnnnnnnnnnnnnnnttctaaaatggtaaaaataggaccatgagct

SEQ ID NO: 127277 - DNA, 745 bp, Cannabis sativa
acagatttacagtattctaacatggggtatcaagagcctccttaaattagttcttgagaatatatgttagtgttggtcttctattaaattattgtttttgcactggaatatttggttaattattataccgcatatgtatatgtgctactactggaaatttattcttgtttgaatcgttcgtatatatagcatgcgattgaagtttttcaatttaatgtaatatatatagtgtaaagtaatttattgttgctgtgatcatatatgtgatgcatgtatattgtttcttttttgttttactgatgcgagaatgcatcacatgctaaatggtcaacgttcttattttttcaatcaatcgcatataagaatttacagtatctttatttatacatatgcgattatttatatatgtttgtcttttggtctgttaatagagaatgcaatgcattctgttctgttttctttccttttgttttattattattattattattattttgttaaaatatataataattttaaataataataataattcagtgacaattaaatttaaattttggtttaaagtttattaaggatatctaatatttaattaaattaattgaaacaaaatatcactaaagtgatcttttttgtgtggattaatttaataaaaatattatgataattgtgtgtatgtgattcataaatttattaactaacccaaaggtgagttaatatatggttgaatttcatgcatgtttgt

SEQ ID NO: 127278 - DNA, 994 bp, Cannabis sativa
gagagagagagagagagaggttgtgggtcgaacgaaaccgaatggtgagaaagtgagattttgggtttgttgagtttaagaatttctgggctgctctagattatttctttgagttttatttcatccaagaggagttttaaatgtgattagaaggtctgtaatcacacctttcgaaaataccggtcttgaaacgaacccagatttaaacacgtttaagttgtttttgagatcaaagaaggttgtatttaagtttgtgggaccccaaagatcagttttaacttgaagaatcggagctttaaggtctgaaataaaatttgccatttttgagtccattaacaacggtacaccggagttggagaagacgatttcgatctgatggattggggttgttatcctgtgtagttcttgattgttttgatgtctgaagcagtgtggaaagcttccccaatcgaaaagacgcgtcaagagcaatcggggacaaggttacactttgtcggcgacggaactgatgtgcacgccggcgaccacgttctttctcacatatttttatagatttcgattccttattttattctaaggtgtttagtaaggtttgataattttctgaaattattttgaattattatgaattatttagtttatttcttaaattaattataaaaaatacttaagttattcaaaaaaatctaagtttattttatatgattatttatgagatatatactgttacaaaatttatagatttcaatttcagtccattgtgtattttttatgaattttttatgctattttttaatttaattataaaaagtacttaggttgctcaaaaaattcaaagtaaataatttttggcttggtacggactataaactatgttagaatggttgaattttgtttttgatcatttttgtatttttcatgaatttatttatttaatacataaaataattatgaaaaatagttaagtaattctaaaatagtaaaatatattttt

SEQ ID NO: 127279 - DNA, 1174 bp, Cannabis sativa
gccagaacttgaagacaaaatccagaaatcaaacattaaattccaaccctaaactcaacaagaaccatctagaagcataccataccatcatactaacacaatcatacataatacaacaaaactctctcaattctcatacacatgcaatcaaaaggtcaaagaacataaagacaagttttcatggcttcaacaatcagaattcaactaatgcaaaagaaattagagagcttaccactaatttcacaagcttctactataagaactacaccaaaattccttagcttttcttccaatttaaatgaaaacaaaagagagagtgaaagagagagaggggggggtcagctaaagggtgaaccaaacccagaaattatttttttctttttttttccaaaattgcttttgttggataatagcttaagtggttaaatgaccaaaatgcccctagggctcaatatattcacacattaagcacaagggcaatatagtcatttcaatcacacatatgtaacacaagaattcaaattttctcaataatcattttaataccctaaataaatcctgaaaatgtattttgggtcccgaacccagttcggcccaaaatactcggttgtgactataccacgctgacttgtcagaaaacacttgcagatagacagaataaacatactatataataatatactccataatcacgatatatcataaaatttacgattttacccttctctggtcaaaattacagaaatgcccctggctcactaacggggtcctaacatgttatttcttaatttaattcacatacaagaaattatataataataataataatataatttcatataaatacacatttaactagttagggtttgctaatctgtttctctaaatcttaggatattacaattatcccctccttatagaaatttcgtctcgaaatttacctaaacaactacagataattctgctacatatctgtctcaagttccccggttgcctcttccactttactgttcctccataatacctttatcagtgtaattagcttgtttctcaagacgttttctctactatcaagtatttacaccggttgttcctcgtatgatagatctggttgaagttccaatgcttcataactcagaatatgggacgggtctgagacatacttccgaagcat

SEQ ID NO: 127280 - DNA, 1025 bp, Cannabis sativa
tttctatttttatatttttacactttttacacttttacactttaaacactttaaaataatttatttttttatatatatatttttaagaaattttacataaaaatctaataacaactaatgtaacaacctacatcctactcaaaattcatatatcaattcacatggaacaaaatgcaacttggggtgttgccctaaagtctcaactcagtctctgttaagatccatcttcaagtaaaaggtaaagtaatacattttcataataaaaaatgcaacttgggggtattgctcttcaaacccatatttgaatatttctatataaatctatttgatatgtacattggaaaagttagaaatttaagctaaattttaactatggtgaacataaattaacaattaaggaagaagaagaagaagaagaaagggcgaaatcgaagagaagagaagagaagaggagatgtacccgcaaacgcggaggcagttagcagtgacggcggcgttgtttgtggcaggagtgtcgtttatgggcgtgggagctcaccttgcctattccaatctcgacgccgaacaagctcgcctcaaagctcgtagggatttcgtcaaagatcgcctcagaaaactcatcgacgaggacgactgaacttctcacaatactctgcaagtaagcataggcaaaaaaaaaacgacaacatttactatacacttttgtctgtcgtttcttaatactctttctcctcttcttctaggtttgttcctcgttttgatatgttaaatatgatttatatgaattaacatggtaaagcaaagaaacactcgtgaacaaagtcaacgacccattttctctctaactaactaaactcctctgttgtcttatctctttcaatttctcagtctgggtctccaatggcttctctccaaaaaggtgtgttttacaattacaacgatatcccttgtgattttcttggggacattctctcaagactcgatgtcaaatctcttaaacgatgcgagtgtgtctctaaatcttg

SEQ ID NO: 127281 - DNA, 1157 bp, Cannabis sativa
aaaaataaaaattacacccctctcattaaatcatgagtccgccactgatatatatatatggaacacttttaaatgggtattacccattaataggtactaaacaaatttacttataaatattaattttaaaaatattaaactattagattttggtctgatagcgaataataaaatagaaatttgaatttttatgcttaatttaactaattattaaagaaaaaaaataaatatcaaaaaaaaaaaaaaatatttttttttttatttacactatatatatcaaaaatatgtttatatgaaaaatattaaattaaactcaacaattttttatcatttttttgctgaattttttttttattattttagctaatggaacaactccaacccatataatgtaaaaatgagaaactttttaattaaatagaaaaattaatcataaaaatttaaaattttctaatattataccaattcacgagtaatacttattaagagtgtacctatatatatttgtttttaaatggcaattgtatatttttttgtaatttcatgactaataaatgttattttggtaatttaaaacattctctctaaaaatagtcactacctaaaacttgttttgaaaaaatatataattaaatatggatcaaactctttaaaaagaaaagaaaatgcaaaacaacatattttttttttgaaacgaaatatcaacttcattgaattaaaagcattctgaatacaagagagccttcaaatcaggccagacattacactcaaaaatacttcaaccagaggaaaatcgagcatgcctagcaatagcatgagcaactcaatttgctgaccgtttaataaaacgtaacctaacatcaattagagacaacaataactcatgacagtcttcagtgattaaaccaaagatggagaacatattttggtcacttcgaatagcctgaacaacaaggaggctatcggtctctagttcaattttttgcaaaacaacatattgggtgatataatagttacacattatttattaattaataaagagacatttttatttcaatgactggtatattgttaaaggattaacaagtttattttctacaatttttagggggtgtgttgaaaaatatcacttttattaatcaatttatcaaatttac

SEQ ID NO: 127282 - DNA, 851 bp, Cannabis sativa
gaaatttaatatgagagtatttttaattaatgaatacaaaaaataagtattcctcaacttattttaaaataaagatttacaatagagcattcttatgaggcactaaagtatctatcaacattattaggtgacgtcttataattagatagcgattctctataatctttaagtaaatagagcctgatattaaattacactaataacaatattacacattacattcagaaaggtgttaggcacataaatattatatatatttttatatagttttgggtctactagattatctatagacataatgaagaacccaccaaacctacattttcaactaacattatatggaattttatgttgaatttatttatttatttatttttatataggttaccaaacataacttttatcaaagtatcaaaactctaatatgaggtttagaagctattaagtgtattataaaacccccaaatttactgatcactaatatgagataaaacacgcacatattttatactgagttgataagtatacaaaatacgaataaattattactattcatatatagggtcaatcctgaggtgagaaataaaacgttcgaccccaaatactcaagctccaaagttgttaaaaaaagtaagtataaagattaaatattaaataataagtacatatgtagcaaatgtggttcaatatagtggtagagattgttaaatttagcttaaaatatcaattcccaatttctacaactattattttaataataattaaactaattatatagggcctaaattaaaaatcaaatggtagaagagtatgtgataatatggggttatgatatgggtttgatccgaact

SEQ ID NO: 127283 - DNA, 726 bp, Cannabis sativa
  modified_base (695)..(696): a, c, t, g, unknown or other
gatgctctgagtcgaaaaggtctacggtaagtttatcaattgaagaggatttcactgaagttggttgaggatatgattagagcggggattgagttcgtggttgaaaaacttgctaatatcacgttgcagtctgatctattagaaagaatcaagatggcccagtagagtgattctgagctacatgtgtacaaagaaaggcttgaagttaggtcggtaaaagacttttcaattttgtcaaacatgttattacggtataaaggcagggtttatgtaccagttgacaaaggtatcagacaagaaattttatatgagtctcacaccaccccatactccttacacctgggaacaactaagatgtattacgatgtaaaagccatgtattggtggtcagacatgaaagatgacattatggagtatgtatcgaaatgcctaacctgtcagtaggtcaaggcagagcatcaaagaccagcgggtttacttcagcctctaaagattcctgagtggaaatgaaaagatatagccatggacttcgtggttggattaccaagaacagtagggtattatgattctatttgggtaatcgtggatagatatacaaattgggcatactttttgttgaattttgtgccttaaataaaattcatttcaatataattagatttactaattaataaaagatcagaaatcattttatnntgcatgattcacatgatttattttatgatt

SEQ ID NO: 127284 - DNA, 1053 bp, Cannabis sativa
atgtcattatttattcccaaaaaggaaaaaaagttgtcattgtttggtcacttataaaaatgtcattttgcacaaacatgagcactattaataaaatcctttttttttttgaaaaagaaataaagtctgatttttttttttttgaacataaataaagtctgatttaagaagataaaaaaacaacataaaaaaaaaataaatgatgattgaaaaataaatgaataacaccaaggagaattggtactactttcccactattcataaaattaaaattaatatttcatatatatatagtttaatgaagcgagttaaatgatgtctgaaattccttcatatattccttccaaaatataatcatttgaaacaaagtctcaagtatcttattcttaccccaatcatttttagaactatgtatttatgtatactactacatattattaactaatccaaataaataattaattacttaaatatatattcttatgtgtgtgaatgagactatacttttgttccaacataatatataacactaccaatgacattaaaatatgatttgaaatagagagagtaacatggccttatgactattaacaaataaaacaccaaaagataatgtaaactttaatgattaataagcatataagatatttgtttgaatgtttaaagagcatacatgtatgtgagtattgttatttattggacggtgaactcaatactattataaggtaatactatacaaataattaacatattttataaaaatattaaattaaaatattcattatttaattacactactaaaatatattgtgaaaactatatattttatagactttaatttattcaatatatgcaaaaatatagctttaaaaataaagttattttatgaaaaaaaaaattaaaaaatataagaatattttattattttttatgagatactggttaccttaagtaactacttatttctaaactgttttcccatatttgttaactttttattttttatttttttttaatttttcctataaaataatattttcaaaaaaaaaaaaa

SEQ ID NO: 127285 - DNA, 1085 bp, Cannabis sativa
tcctatttgtacaattttatacttaaacaaccaagagcctaatgatatctacccatataaaaatttaattattttaggatcaaaattttgtattatttattttaacaaagaaaaataagatttttaattttaatttaatacacacttttttaattgaaagggaattttcatatacttcataataatatttatatattgacattaaaatttttatacttaaacatgcgagagcctaatgtatattatgttgtgtataaagactgacatatgttatgtagtagaaattgttagtcattattacttaaatcctagtttagaacaatagactgcaataaaagtgttataaccaaaattcggttgtacttcaggagttgacaagtgtccaacagaaggaatatgaatcaattctgaatgacataataatattatatcaataaatacatattaaataactcgttattattaaataaaggttaagtaaataatgttcaaaactcgtcaactttatagtcaaaggtgagaaggataataattattgaactgaaattaacgagacatatgcatgcctcagaatatacaaacaagaaggggatattcatccactcaagcaaaatgaatatgacaacataactacttcgcgttatacatagcgagaagatcaccttacattgctagagtcgataaaagaatatgacgagatgaactacttcccaacacttagcattttttttcttaagatggacaaggaagaaaactcatatcaagtgagatgtaaccttccacgttagcaataaccgtctagaggaaaaaactaaaaagttgttgggtagttataagatattattccatatgtgattaaatgaaacgtgaggattatccacgcttcatgagcagttgtatttgaatcagtcctaaaaaagggtaactgtcagcctatattcctataaataggggcagattccatggtaaaagggacgaaaaatttgagagagaattattattattcaaattctgagattatattttgtactcaatacatatccctaataatacacactcgtggagtatgtaaattttaactacaa

SEQ ID NO: 127286 - DNA, 1771 bp, Cannabis sativa
  modified_base (45)..(54): a, c, t, g, unknown or other
  modified_base (101)..(123): a, c, t, g, unknown or other
atgaatttatacattatgtacaattaatcatgaaataaatcatgnnnnnnnnnnaacattaaatgttatttctgaactatattaataagtaaatcttattnnnnnnnnnnnnnnnnnnnnnnnggcataaaacccaacagttatagcagagatatatatgatgtcgcgagatgaaagtgtttttagggaaaaacttttatcccgggttttagttaagaaccgggataaaagggtttcacactaaatccttttatcccagtttttaactaataatcgagataaaaggtttccctaaaaatcttaatccccgttttgctaagccataaaaatcgaatcttgaacttacttttttacctttgatattttttttcaacgttctaccaaatatggcccttgtctaaaaaattttttgctccatatttgaggctccaaatctaaaagtggaataaaaagtcacaatatatcttttatcccatttattatttttgttaactaaacaagtgggataaaaggtcccctttcttgtagtggattgtcaaggtgcatcctaccaggtcaatacaccaggtagagttctctagttcttgtccggagatggttctccttgagccctactgtcccctaccccttgaaggtgggactgaggagtcacaattgagctcgcaacacgctaccaacaattggcgcaacctcttgacactcgggtgtcgcgattgggatcttgctattcgcagcaataccgaggatctgactaaaagaagtaaggagcttctgcatcaggtcagtcttcgtactcctttgctcttactcgtccctactctgcctttctcactaacttttctcctctggcatcttttttggtttacgctacacattattggtcgtctcaaagggtcaaggtgctagagactgaattttgacagattaaggaacatgaggatgtcgtagccaagaagtggagcgatgttgaagctgaggtttctcgcactaaggatgaagaaaaaaagcaacgcgaagctgaccaataaaaaattaaagcactcgagaattatgtcaaatttctccaaggtgatcttgttaaaaaacaagttgattatgatcaaaagctcaaggagttggaggcttgaaccaaagagaggatcaagaacattggtaaaaggaccatctatcacatttggtcagccaacctcgagttggactttagttttttgggtgatagggccgaaactatgcttgcttattgcgataagactcgagaggaagaatttagcgaggaagaagaggttgacgcagaacaagaaaatcccgccaagtcccctataataatgtagacttgtatttaaatttatttattttttgtttaggaaaatggcctaatggtttcccctttatggcattttcgtaaagacaagtttgcgaagttggttggccaatttagcttttaattaccttaaatgcctcgtattttttcatttgaacttaatatatttacgtttgcttgcgttttcattcacaatgtaaacaactatattttgataaaatgcagaatactcttggcctttccattgctcgtatttttcacatttaagtagttagtaatctactatgtgcgcgagcagtttattatctgccagacttttgatttgcgagcagttaaaatacttagctacctataaatgatatttaaataaactaatataattactaaaatgagatctcaatcatttatcactattcagccaagctcgaagtaaatcatcgttttacttct

SEQ ID NO: 127287 - DNA, 600 bp, Cannabis sativa
attattagctcacttataataagaatataattaaagaaaaagaaacccactgataaaaaatatcatgaaatacaatactaaattcataaaaaaaatttgttctttacaatctatactttgtactagacgaaaacaatctgagaatatcttcacatgatgataaacttattttacatttttaatcttgaatttttatgactagttaatgattaataagaatatttaaaattaatttacttattaatttttattttaagtgtgggtaatgacataatttcataggattaaatttaacataagttcttgttaaaaataaaatacataagttttagatttcagtgtgatgagtagtgtagagaaaaaatttaatggataaaatatttttctaaaaaaaaaaatattacaccctgaggggaaaacttataacgaaaatggcaagttcgctaaaagagcggagtttgcaacagaggaaagattcttattccacaaagcacaaattctataagaaagagtgtacttggctagaagccactaagcctagcttagtggtgagggagggatgggaaaaaagggagaggtcatgggttcgaacccaggacc

SEQ ID NO: 127288 - DNA, 880 bp, Cannabis sativa
  modified_base (31)..(41): a, c, t, g, unknown or other
  modified_base (68)..(73): a, c, t, g, unknown or other
  modified_base (101)..(108): a, c, t, g, unknown or other
tcttcaaccgtgtagtcccatacctacacannnnnnnnnnnatcccacttgaccttccccaggcggtnnnnnnttgcacaacttacccggtatttcccctnnnnnnnnacgggactactgactgtcacacacgtagtggttaagcatgacttttcctttccaggtcttcgtgcacaacgctagagttggggcagggcccctaacttgttcatagctcggatccaatcttagcctgctaagttccgtccgaactccccctgggaacttttgggcttagcgaccttcaaggtagaagggtccacagcaagttgcttctcagagagatcaatgacttcttcaaccggtacctttaccttggacggagtcttaccacccttagacttcttcgccagaggagacaagtccgagctcacccctactctcttcttcagagcttcaataattttctaagacatttctgcacaggaaaaatgatgtagtcagaagaggacataaaatatatgagggcataaaaaacaaggaaaataaatgcaagttgaagtactctgcacgctagcgggaccattctcccaaacaagtacagatggagcgtcatcatatgtagagtcttcttgctcctccaggacagcctttccttttccctccatagggatagatggctgagcaggcatgccaggttccctaatccgaatagcatgctctatgggcacttgctcggtcgggaaagtcttcttctttttgcatgggctctccttctctgaataatctttagcatccttctcctgctcaaaatattcttgagcatacttcttggctccagtaccacccttcaactattgggttttatgccctaaataaaactctttacaatctgattagt

SEQ ID NO: 127289 - DNA, 921 bp, Cannabis sativa
gagaaaaacggaaaaaaaaaaaaaaaaaaagcgtaggttatattaaaatagataaaatctagacctcatagttgagaagaaaaacaatcttaaataaaaaaaaattaaaataaagaaaaaacgagtaacatgagttacgacatgttatatcccacaaagtgacaaaactacaaaatggataagcattccttctatcccaatgaggagaaagatatgcacctcattttaattaattaattaaatctagtgtgtaatttgtaataaagatggtagatagatactatttatgttatgaatatcttccacgaaagaaatccatacaaaattagaatcaccacacattattcatatacgacaatatatacgtgtaaatggagccaagatctacttaatttggggtactttggtactttcactatatatacttggaagtaggtaggtatgcatgtgaacatggtaggtgcaatcaacgttcaaatatttttgttacgagttataaggaaaaaaaaaaatacataagaagtctttgaaaagctaagaatttttcctttaaaaaaaaaaaaaactaagaattttgtacaagacaaagatattactattaactctatttttatcgaaaattaaattcctaatagacagcgagaaacttaacagggtatgaatacttttaattattttctttttaaataacttgataacaatgaaacgtcttcaatgacaaaaatttaagaagaaaacaatgaaaacatatttcacttcataattaaaaaactgttttctgttttttatttaaaaaataattttttaaaattgagttttaaaaaaattagaaacagataacattacaattcacaatgttgttttcaattttcaaaaataatttttttgtctaacatatattatattttatatttttgtttg

SEQ ID NO: 127290 - DNA, 1072 bp, Cannabis sativa
cctaatatcatcactttatattttttactaaaatccaataaaaatagaattaaaaaaaaaaaaaactacattggagttgataatgtcaaactctcaagtgttgtttgccaataaatgaggcaaaaaaaaaatcacaaacaagattataaaacattatatatatatatatatatttatatataaatgattcatatctgaccaatacagtttcttaaacaattaaagacatgtaatatggcacgaaaactcacaaggatatcttttggccatagattttgggtatgagatactctgatttttcctccttttatgacaagttttgggacttcaaccaaatatctcctgagcttcaattatgctatgttggctgataatttaggccaaacaaattagattgtattaatggaaaagaaaaattcattaaagggaaattaaaatgaaagaaagatgaagataagccatactgatcgtcctttgtgactcgataatacttttccgcatgctgtctttgcccgattagttgagcaaaacgctcgtcgtgagtgataactatcagctgaaaattctcttggcctctcctatcctccataattctataggaaaaaaagaaagagggaaatgtaagaaaaatgcaggtcatgattgaattgttagatttgtttcggtattgtcatacttgaggagtgctgtggcgagactctcggcgtttggaccgtccaagtttgtggtcggttcatctaatgctagtattccacagttcaggcaaaacgtttcggctaaagcaagccttatgataagagatgcaaggacctgaaatagaggcaatgagataaccagtctatgaaataacagtattagtataaaaacatgtgataggtatcgaaatccctcgccttctggccagcactacatctccctctcatttctaattcggcatcaccggtctgcataagaacctgtacaaaatgcaattcatacaaaattgagagagtgaataggaaaaatgaatgaattaagggcttgtttggtattaggtcgtattgtataataggtatgttaaaagtgaatatca

SEQ ID NO: 127291 - DNA, 1861 bp, Cannabis sativa
atcaatatgtgtctagttcatgtcccaatgaaacgttttgacccatttacactaagaccgtcccaaaaaccgaaaccctagttaaggatgtcaacttgggtactgggtgaaaccctaggtgcccaggttggcttctggcgtgcaagttcatgtaattttagctcctcgaacctagattatttgattgtgcttcatgtctttcatggtacagaatactaaaagatagtgagttagaaacaagttattaaagttagaacttctgccgacgttcccaaagtcaacctaggcgtagggctagggacccctcccaagtcggctgctatgattaaggtctactcaactccgtcgtgtcatctttcttttcacatgtcaaacattgatatccacgtcaccagggaaagtttttgagttaacatttgcccccaagtcaactttacacttgtgtagagttgacttaatgacatgaaccgagctcatttatctcaaaactacaagaagggcatcaattttgacaatcttggacaattgtttttgttcttcaagcatgctcaatagaattaggactttgaaatccctagttcttgtgtgaaagaattttcaaaaactaacaaagaaaaaggggaaaaagtaattatttttgcacttatcttcttctttgaaaacttgaaattttccataatcttagctgcattaggaattgacgtaaccttttaaattcaaaatcctattcttattttactaggatttttgaatttaaagcataaagttgaagggaaaagatatagttttatctttttcttatcatttatcttttcctttaaggcattgaatttataactctcaattgctctaggattaggagattgaactcacttataaataggagagctttcaatcaaatttctcacacttctcattcacatcacccacacccaagcctttagaaaagcctttggaattttttcttcattaagctttcaagcactcttcatccttcaaggtaggaatttttttttcgcgccgattttttttgaagtattttcttcttctcctcgtttgttgagcttgcttcaaggattctcaaactcccaaaaacccttgcatatttccccccaaggcctccgaaattccaaaacactatccttgtgaattgaaaatttcttcttttgaaactgcttaaacttctccttttcataaatcaataaaacttttctcgagtcgtaagcaacttgaaattttggagtttccatggctaggatgaagagaagtataagattgcttgatgaatatgatctccatgtaactcagttgattagagctaagttaattgtgcccaaatctaagaacttagacaaggcgcatggtgggaaggtaatgccaaatgaactccttaaagttaccatcgaaagtgatgacctgagagattaggctttcaaattaagacctctcgtgtttagcactcttactaaacatcaaacacaattaatctgggatggttattgtcttcctgaaattgtcgtccagaagccacgatatggtggtcccaatggctcccagaacactaatgtagtgcttggtcgaggttccatacgaatgtgggtgcttacttgcccttgcatccatgcttcatattaattatagattccttcggactctttccctactaaacaaacccaaatgactatagaatccttgcaaccttcttcaccttttactggcttatccctactccccacgaaaaaaacttcctatgtgacttgaaaagaagtcctactcaaaaagatgaaggcttctattgttggatatttattttaccaggatcttagatctactcacaaatgtttattaacatcctaaatat

SEQ ID NO: 127292 - DNA, 1247 bp, Cannabis sativa
tttataaattaatttttgaactttagggcctaggtaggacgtagaagagtcgcattctattaaataataaggaacactatatttgtataaaactttgtatattttattaatgattatgattatatattttaatgcaatgagaattgtattattttacataataaataatttgtattagcatattttgagcactcgcgcagtttggattttttctagaatgatatggcagttgattttgacatattttgtgcgctcgtgatacactaagatctcaatgtgaatgatagttgcattgccacaatataatgttttagggagctagtgatgaacaacaaagtctttcaagaaagctaagaaaccaagtgacctcacaagtggcgttggccattgcgcgatactgagcctcgacaaaagagcaggagatagtaggttgttttttttttacttataggagataagggaattgccaaggaaaatgcaatagtcagtgagtgagagtcgagtgtccacgcaagtcccccaattagcgtagaaaaatactttgagagaaagattgtgtcatctggtaagtttgatacaacatatgcagtgatatgagggggagaagtggagaagaaaaacaagccttgacctggagtagttttgattaggaatggaatttgggccattttcacgggccgggggctcggggcaactttggcccaatgatctagggtttttatcgggctctaagcctggcctggtacatattattttggatcgggcctgacccggcccaatttcagatattaaaaaaaaacctaaatccctaaaaaattcattcccaatttctttagttttaaactttgactcttctatggtctctcctgttttctttctctccgacgtcggatggctcccatctccgaggacggttgactcccatctccgacgatggctgactcccatctccgacgacagttgacagacacgacgacgtcctctgacttacttacccaggtaacaagtaacaactgtaacaatggctttctggatttttttcatatgttgtgtttttatattttgccatgcatgttctagttcttttgttccaatattctaaatattcaaaaaattatgaaattaaactattctgtataattcttttgaaaatttgagttaaaacatatgtatttttgttattgatattttcttgcgatcagggtagcaaaagatcgaagagaaaggcaaatgacgatgttgtgccc

SEQ ID NO: 127293 - DNA, 710 bp, Cannabis sativa
ccttcttttaggaggattctgatacatgtagtaggactaattcccttgatgttagtaatggaccatgtaatagcagttctgtgagctcggagcacccttataaacttttcttcttgcacttggtcgagttctttagcaatcatgaccggtaatgtttcattctctcccaagtaagcatatttcagatgattcggcattgtcttcaattcaattataggagcttggacaatggatggctgtaatttgtcagttaagaatggcaattccacatacgccacctttttataaatcttgttgaagtcgttattaagtgtagttatgacatccaccatctcgttagaaaacttttcactagaatttaacaccaagtgctctcatataacaacttccaaaaaaatccactatgtagatctagtaccctttgtgagaggtcattcatcacatcaagagaataaatagcatgtacatcacttggatacctcatggccgaaaaaatgttgaatctgattgtctttccgtcaaggttcccttgtggacatcaatcttggctattgcagttttcatgaatggtcttcccaacaaaattggagtggagcagaggatggaatcatcttccatatttagaacatagaaatctgctggaaataccaattcattgacttgaactagcacatcttcaatgacacctctggggtaggcattcgacctat

SEQ ID NO: 127294 - DNA, 781 bp, Cannabis sativa
caatgtgacattaaagaaagagaaaatggaacttacatgagcgccacatcagtatggcggtggtggtggcagcggctagtatgggtaccatgacggtggttgcgagaagtggtcaggagcatcggggtccatcctccacatagagaaagtagaatttaactcctggacttgccgttgagaaaagtcatgttgctgctgcagataggagttatagtaagcagcttgggcctggttagactgaataagatactaatttttccttataaggtaatccaatctgtcgtaggtgccctgagtccgggagtcaattggcggttcaattcacaaagtctgcacattttctatcggtaaaaacaacctttacagtggatcaatatgcagatttgtacgtgaaagagataatgaggttacatggcgttccaaagtccattatatcggatagagatctggagtttacttcgaagttctggcagagtcttcagcgggctatgggtaccaactaaaattcagtacatctttccatcctcaaattgatggacagtctaaaagaacaattcagatactgaaagacatgttacgagcctgtgtaatagatttcaaaggctcctggactaagtacctgccactgatagaatttttgtacaataacagctaccagagtacaatagggatggctcgttatgagttgttgtatagcaggaagtgtaggtcttctattcactaggatgaaacgggagaaaagaaatacctagtgttggatatattttaccaagatctagat

SEQ ID NO: 127295 - DNA, 1087 bp, Cannabis sativa
  modified_base (50)..(53): a, c, t, g, unknown or other
atagttcggggagaatttttaacgaccaaaaaagttcagggggcacgatnnnntacatgtcaaagtttgggaggaaaaattactaattagccttatttttatgcattaatgtatatattgttttaaaagtactataattaatatattttcttaattcagaaaaaaatatatatttttttgttataataataatatttatcttattcatttaatttatatatattatataattagtttttatggggtcatcttatttattggactgaatcattgattggtaaggcttcttaaaaatattgcatgattgttagattttaataacactattttaattgtagttgcataatagaaattaaaaatgaaaaataccacaatgtgcaatttatattaatttgtctacaattatattagaatatacttttatatttaactactatttgttaacaagagtcactattcatctaaagaccttatggttatgtgaagtattaatttcttcttttttttttttatgaaaatagtcttaataagttgtcttaggaaggaaaaaagtcttatgattagttatgtgtcctatattgccgaacaatttgaacaaaaaaaaaagcgttcatatgtaaattaataataaacaattaattagattttgggcatactataaatataaatacataaacactatagagttttcatgatcaaattaaacatttagagaatgtaatgggtctctgtcgcgggagagatggtaacataatagaaagtaaaaatgaaaaataccataatgtgcaatttgtattaatttgtttataggtgtaacctttaattgatacactaaattttgttgtcattcaatttaattatattataatatacttttatttttaactgctatttgttgacattttattatttattaattattttttacaacattgataaatacagttacaaattataagcatacatagctaatgatgaggatttgttttcatttacggataatgccagaattgtaatttcttaccttaatgcttatttagttggagaaaatgataagtgtttaggtgaaaattgtcccgtatgctta

SEQ ID NO: 127296 - DNA, 2333 bp, Cannabis sativa
  modified_base (2194)..(2196): a, c, t, g, unknown or other
cacacacacacacacacactcaacttacacactacagggctcgcatgtgagcccctctcctcacgcacacatgacacacacaccacaaacacacatgcacgactcgcatgtgagcccctcacaccgtaccccgctcgtatccttcttccatgtcttcctctattcacgaatcgtcatggtgtcggtccttgtggtgcttcaaactaacccaaaaattttaagcaacacttgcccctagtctacaagaatttttttaagtgttcttatcgactgaacaaattaaggtcttgcttggttgaagtgcaaaccttatcttcttcacgttattcgagaatgtgcccactatatatagaggacctctcttgctagattttcacttcaacaaatcatcttggagtagtggcaaactcccttcacctttcctaagaggtcttgggtttgattctccccaaggtcagtctttgaacatttgtttctttgatagcttatcatcatttaatttttttttgcatatatatatatgtgtgtaaatatatttggacatgctccatgcttgtctctatcatatggcgtgttttgctcttgatcatgaggcatcatcttgatgcttgaattttggtttatgtggcaggcgtcttgcttgctttagagtaattttctcttttagttcaatctctcttgcttcacgaggtattgtatttattcttattctctttatttttgttgttcatgcaccatgcttttagaatacttgtggttatggtttgtgtgttatctttgtggtcttagtagcatcacgtgtgtcctccttagggcgtacacccccatgtgttatgtatagtgagctcaataccttgatgttacctcttaggtggaggtgtcaaggcatcacgcttcattgaacctttcaatccttagcctcatttggaggtaatctcagaatgagatgtcttctgcggccgatgttattgacatatcatcctctgatttgcagggtactcaagagatcctatacgataaatatgccagattaatgtccgagataagggattatttagaacacattattaactatagagagtgtgaggagagggttcgagccaaaatttatttggttttgagtggagatcaaaatggtttgattgtcgattccaacatgtatctttctaagcttagcgcatcccttgttgaagtttagagtcacctgatattccacacccactctctccttactctcgggggtacccagggtcaaggcataggctcgtagggactcccagagaaacaataaatatgaggctcgtgcttaccataatttttgtgtatctacaggcatagctccacccaaacaatcgactcaacctgccacaccttgcgagcgttcctcttcttatgtgcttaggaaacacaatcctcctttgcctagcgatgtgtcctttgtctacgcaagcgccaggagcactatgtctacgaacgagattcacaaggcgatggatacctttaaagtgtgagccacaggtaacttagtgctgcgtaggcctcggcaagatgagtttgaattgtaacgctcaacttacttaggcacgctacaataatttcttaaatactatgtaagcctttgcttatcaaagagtttctcaaaaaacgtgtcaaaataaaactttgaaatttaaacttaagctttaataaatacatgactttacctaatagtcgggatcccgttcaaaagttacaacaacttacagaatatatttctagaaaagtgttgcaccacaactacaaatgtaagcccctgttgtcctaaaactgaacgctccaagcttaactatcttgatatgtagaatcatcctcaagctttggcctcactggtgttcagtctttgcctttctttaatctacacatccgaacatatctatgagtcaatagacttagtaagaaaaaagtataaaacatataaacacattactgactgcatctaggtgcccatacacctatctacaaggcttaacagataaattaagaatgctcttgcctttggtatgcttaatcataatatcagccactaccagcactatagttgcgttgtgaacctggcattatagttgtaccgctataataatagggaaatttacatagtatactaacttttgttatttttttacaaaattactgccaggcggtattttttactttnnnactgtatttttttataagttttatactgtagtatactgtattaagttttcactgttgttctactggtatttttttagttgttctcctgttgttttaagatattctgttttgtgttttactggtgttttataaaaaca

SEQ ID NO: 127297 - DNA, 1244 bp, Cannabis sativa
tccttaggaactaggatagatcttcccttgccagagggaggacacacctttccttaaaggcagaaaaaatgtccagatctcggaaaccaacgacatggggggccagctagggatcgtacgctcagcaacaacccgctctgtccatcctatgggtggtcaaccaccagcaagagtccccatggccagccagacttctctagaagtccccatggccagctagactcctctagaagttcctatggctggctagagaagagcactccctgcccaaggagagtgagtcacccgaaggtcaattttcaacctaagaggactgagcgcgggtggaaacacccaaaaatacaatttgagaagtgatgttcattacttcagacagttagatccaccaaactccagcaattggtgttatctaccctatgtcaatgcacaaattccaccagcaaggtagagaagtgtgggcgacaaggacttatatagcttagggttggctgaccatgtacaagcaccacactcaagactgactgaccttcagtataccctctccctaggctgtagcttaattaaagaaggccaatcaaccatgcctttacagcaacagatccttctgtggaagcacagtctgaccaaatacgagacatgctaacgggcctaacttgtccaaaaccttcagaactcgagctagacaaggcaaggagatcaccgatcacccttcttagcatacatcaagtccttgcccttgcccaaattcaagatgccagatcagaatatgtacacagaaaaggaagaccctctagtacacctaaagtactatgagatccagatagatctcctacaagtatctggagacatgcgatgccaaatttttctagcaacagtagctgaaaaagctcaataatggtatttcaagcttgcccaaggaagatctgattgttgggaagagctctctcgagagttatatttttagttctctacttcgagacaaatagttgctcaactggaggatcttttcaaagtaaggcaaagacaagatgaatccttgaaggactacattcaacggttcatggctgaggctgccaaggtcacaagcctaacagaagaaggccaatatatggctatactcggaggcatcctaccattgagtgacttttcgaaagatattaggaggatctcaacgagtaatatggaggagttccttgagcgagttgatggcttcttaaagctggaagaagttgtttggcaagccc

SEQ ID NO: 127298 - DNA, 1652 bp, Cannabis sativa
  modified_base (1321)..(1333): a, c, t, g, unknown or other
atattcttaattttataatttaatgaattaaatataacaaaaataaacaatttaaaaaataagatatttgatggttaggatattatcaatttttttcttaatacaaatagaaatacaatggactttttctctattccaccgtgttcctcttgaagaagaggaagcttagttggaatattcaagagttcatagtggggttacaaaaatgtgtttgtttagaatgacgaagattaagtctttgatccaaaggtctccatcccaaaaaaaaagtccctttctttgtgctatttgtgaggtatttataggctaactcttttgcatgggccacaattggatggatcactgtagggatgaaatcctatcgttggattggtaggtggcgtatttcccatgtagtttttatgggtgtcagattgtaccggctgtacaggctaggcttcagacgcgtgtcacctcagggcaattctcatttgaatttcccttgctcttagatgttggaacatttagcccagtacacaagacacgcatgctttgcatgatattgtgtcgtgggggacaacctctaacatcatacatgaaaaagcctgatcattgggtttgtagcctcacacgagtgggctgaacctctgtgggtcaaaggcgtaccctggactggtgtatccttgaagtgctttagccgggtttgagaagacttctttcatagagacctttcccgctttttaacctaaaaaatataatatctacatctttttttgcttaattgtttattttttaaaattttgattatttatcttatttttaaatttaaggccagatattttatatttttattatttaaataattttatgaaatgaccttatttgaaatttaaaactatgatatttttaataaaataatctagaaattttgaaaaactaatcaaatattttgtcaactttcaattttttttttattttatttaagttaaattataaaattagataaatgatatttatttatcattttattttacagaatatttaattttattttcttttaaaaataacataaattttgaaaagttagttgataattttgaatagatgtttaggtttgttataaacctaattcttcaaatttataggtttaattttaaattatttattttagatttttgaaaatttaactaattaattatttaatttaaatcaaataaatcctataaccaactatccaatgttgttgcatgtgtgttttatatattgttgatatcaaaactagttttataaaagctattattgtttgatctaaattgctctggttaacttgttgacagatccnnnnnnnnnnnnntaatcatagtccaattgtcaataggtcaaataaataatttgtaaaaggtaaattttgtaatcttctttcatctgtgtataaatctagtaacatgataggatctatccaatcagtgtgtgcctgtgcctatatgtttgctttgggcctagatgcatatagggggcccatttaattttgataattaaaatggattaggttgctaaagtaaatatgctactttcatagtttttatttaggtccaattagtattgggcttattcaatgaataataattgtttaattaaggttaaattcttctcttttgtgccttgtgtgagag

SEQ ID NO: 127299 - DNA, 1298 bp, Cannabis sativa
  modified_base (1190)..(1197): a, c, t, g, unknown or other
atatcattactttacttgatctttaaagcttccatgttgattctagtttcccttctttaatgttttctcttgaacatacaggccatcaccattagattcttactttaactcttattttcttttcaattctttggacattagggcattcttaatttcctcaagagttaaagtctccttcccatacatcattgtatcaataaagtggtcataattttcaaatggcaaggagttaagaactacaatagctttgtcttcatatatctttgattttaatatcaatattctttaaatcaagaatagttttattaaataaatcaataggatactacaagaaaattgagctttgccagtgagtttttgcgcaggcaaagggtaactaataatcttcggtaaacttttgccgacaggacatctcgtcggtaatagacagtcgagaaaggggattttgtcggcgaatatagttagttcaccgagaaaagtagtcgccagtgtaaatgtggccaccagtattgcctcactggctgagctatattctgcccatctttctcggcaagctaagtcggcagcaaaacttttgcgccaatttttgacttcctgtaaaagttttgcaagtaacttcatcgacaaatcttttttttttttaaatatttctttgatgttatatgatataaatataatataatataaatttaaattaaaactagaatttcataaataataatacaataatataatctcaactgcatattataatgataaaaaattcaaataaatattgtaaaactaagtaaaaagtcattctcatagtttataaaaattagtaaaatttatattgaaattggtaaagtaaaaaatcaaactataaattaatagcatcatcgccatcatcgttatcatcatcgttctaagtgcatgggagaggcagcctgtaatgaagatccaacgccagtagaacgtattggtggaattggagtcatcttgggcatgttgaagccaagaatgacgctagacaaatacgtgaattgctcctaaaatgtattcaggtattgctttcgagtctgcatcatttgttgctgatacgcattacatgtttcctgctattccaccctttgcttcagcgcctcatattcctcgaccctgacagtaggttgcctggagggacctaccctcactacaagaaatgtcacttnnnnnnnnacatttttgtgctggcaaaagttagtattacgccggtaaaatagaatttacttgtgatgtgttggcaaaagggggttggcaaatcaatattggtattagaa

SEQ ID NO: 127300 - DNA, 858 bp, Cannabis sativa
taataagaaatgacagtaaaaatattttgtcttataattttattgtcatcctacttaagtgtcaattaagctaataaatgtcaactaaaaaatatgtgaccacatattaaataatttttatttatcttttttaataaaaaatatataaatttgaatagcaaaacaaaattaatttttctttaattaaataaatagaagttttttttaagagaaaaacataaaagttttttttgtttatttaatatgtggtcaaataatatgttgtcacgtatttttgagttgatactagtacaagaaatattatttttgccaacgcattttgtaaactgcattggcaaaaatatcaaaattttaccaacacacatttacagtagcaaaactctaacttttaccagcgcgcatttacgtgctaggaagagtcatttttgctagcacttttcattttgcactgacaaaagttctaataccaacgttgatttgccaaccccttttgccaacacatcaaaagtagatttcattttatcagcacaataccaaacttttgccagcgcaaaaatgtgctggcaaaagtgatatttcttgtagtgcttaagggtatcaacaaaaatgtaagataaggtattttgtcgccactttttttattagagtcatatgtataataattatattgttaaggggtttcgcttcaaatatctatatttattttatataaaatgtggttatgtaacataattcttggcttaacaatatttttaagtttttaatgttaactttaacataatatattacataacataatattctttattaatttaataatattattatatatatttaaaaataaaaattatgtatata

SEQ ID NO: 127301 - DNA, 908 bp, Cannabis sativa
gagctcaactattaaaaaaaaaaaaagctaaaacaagctccctgtttcactgtcaaagttggctaaaaatgaagcttgaaagtggcagtatcctgagctttaaacaagcatctataatgtcatgttagctaacataacattcagttagtttagttagttaatattgtaaacactgtcccacatgaaataaatagtagagtactgagccatatgtaagaacatggactactccactcatcattaattagttttaccatttagttttgagatggaaccccatgattctcaacatggtatcagagctatatcccttagggcacataccaattaattagaagttataggtaattattttctagacaattatgtttttctgttttgacagaattttctttagctcttgcattgtccacttgtattaatttgtgcttataaataaagaatctctcattaagcttttctgtcaagtctttttcttttcttcctcttgctttctctggttcttaccatctttctgaacttgctctagtcaagcttctacatggtatcagtcacctccaatggagtacttgattcatactctgatcctacaactcaaactgctcgtaccactgctcctacgctcgcgcatgctcaatcttcatcgatttggaatccattctctagcttccctatcctcttctcccaccatcaaattagaggccacgagaccttggatgtctagcaaccgaatgacaatgcgtacgagaggtgtgatggctagtaatatatgtgcgcatagtaatatgattttgggctttttccagttttaactaaaaaaataacaatattacaaaatactttcagctggccaaataaacaaatatacagcctaaataaaaaaaatttacacaaataccacttacaca

SEQ ID NO: 127302 - DNA, 1283 bp, Cannabis sativa
atctctgtttttatcagctccatcaagttttctagtgatgaattggttggaattagaattcctgtcattgtgtagtcatcataatttgtattttctctccaatgacccccatatttgatgatacacatgatttgttccatacctgtaatttttttttaaaaaaaaagtaatatcagaatgttattatgatgttttgtttggaatccgttattttttttaaaattataggtgttattgttttggttttaggttttaaactggtttttttttactggttttttggattttgtttatcatttatgtttttgattacttttttgcatttttaaaggaaattattttcaaaatataagtgtaaattttttttaactggtttttttttttaatttttgattgtatgttttgatatatgtttttaactatttttcacgtttttgaatgtttttttaaccggttttttttcttgttatgttttgttatttatgactttcattattttttttaactgttttatgcaaaagtaatattatattattatattttatatttcgaaccggttatttttaaattctatttagagaatcaatgttataggtgagttttttaattggttcttaagttttaactggtttttttaatgttatatatatattttttgtatctgttaaaattttgttttcttgtagcattgttaaatgtaatgttttgttagaatctgattttatttttgtatttggaactggtttcatttaatttttatgttctattgtctaatttaggtttttaactggttattttagttcttgtatatttttgttttgcctgatatgtatgtgattcatacggttggccttaatttggtatattgttttaaccggttatttttttttatttatgttcatcaaaatgttgtgttttatttttttcccagatgatatatatattcctttatacctgtaatgtttatatacctgtaatgtgtattattgacaatttttattctagttttggttctgtgtataattcggtttgttttttctgtttttggttttcgattttaattagcattgatttttcaggttctaaagataaggaagaggatcagaggaaattgaagaacttaccggagctgaagaagacgatcggaggtagcgatcgttgctgaagctatgtcttcagtcgataaaatttttggttttggagaaaacgatcggaggtgcctgatccttgtgtttgagtacggtttgtagatcgaatttgttaggttttatgccttaaataaa

SEQ ID NO: 127303 - DNA, 664 bp, Cannabis sativa
gccgccaatatcccatttatttattattgttagtacatatattttggtaaatggtacatgtattttttgttgtacgatatatcatcttcttaaaatgatattagattctattttttattatatttttgttagcataacatataattttattagcatgctatacatattttttatttttatttgtcgttattatatatatttttattgatgtatatattttttattgtatggtgtataggttttattgtttagtatattattttattttagatcaagattagtttttattttattatatataaatgtggtatataattttatatttatggtgtaattattttaatggttgtatataattttgttgagtaatttgcagcataaatacttaagtttaactcctgattgcaagtaaatatctaaatttaatttttggcagcaataatacttaaattatatttgtagaactctgtaggtacaaagttgttaaatgttaagtaaattgccatgtgataatcccttattggtctaggttacaaatttttatttttttaaaaaaaattaatttaaatataccaacaagaaaatgatacgtgaataatgacttgaaatttaacggtcatgtacctacaaaattctaaaaatatgtaatatccagattaaaata

SEQ ID NO: 127304 - DNA, 912 bp, Cannabis sativa
tagtgttggtgatggtggggctaggtcgagtttggtgactgtgtgcgcggatggactgaggtggtgaagatggtgattttgagagtgatggacggagatgaagttgctggtggtagggcttcgtgtgggctggattggtgaaggtggagatgcggctagggttgttttgctgagagtaatgggttgatttgggggtttttcttttgggtaaagagggattaaaatgaagtaaaaggaaaaaaaaaatagaaaaacaatttaaaataaaatatgattttactatattaaatctatatattgataatatgctttatatgtatatatatgtaagtaatttttttttcaaatccctgcttcaattgaactcttagtatccaaacacaactcaatactcccagtagttacaacatcactacatcattgcttcatcaatttcattttttagccatccctccttcaaaatgttgaagtgatgttgatccaatgttgtattgggacctactacttcaacatacacatctgctcacaccatattgcagcagtccatttttccatcatcccattctttgcacctgaaatcaagatcaccaccccattgcaaattcattagtctcaagaaaattagaattatttatatgcagttatataagtatgtatatatgtatatttatatatatatatatttttctttttttttcttgggggcgccttcattgaaattttttttcctcttttttttttctcagttcaatctttttttttcttttggcacccccaacttacaaacatcaagcatcctccaaggagatagaagtcttttcttgattaacctcttatccccaataatgtttcaatcgttgtccattaaccttgaattctcttccagacttttcatctttcaccacaacagcc

SEQ ID NO: 127305 - DNA, 658 bp, Cannabis sativa
aattaatttattaaaagttgagtggagtcatgtacccttatagagagcttatatttaagggaaaaattgcaattgtaataatagcatggattgatttcttacactatgtttggtagaggaaataaaataaagatggagaaagggtgaagggaacaaggataaattgattgattaaatgaacaaaatccattgtgagatggaggaagactcccaagtacacaaattttaatccctccataagtaggaagaatttaagaaaaagacaaaaaaaatataacaacaataaaatatctcttctacctattaaaatataacatataattatattaaaaatgataaaagagtaatttaatattattttaccaattattctaatttggacttcttttaagttttaattttagtttctgtgttatcttaagatcatttatttgtattgaattcgggtgtttattagagtataatactagtttactttttattttttcgaaagtgtttgtaacagtcaatatagaataattaacaatgcatacaattaatatgaatatattatgagctatagtcagggccggccctgaaatgtagtgggctatagggtaaaaattattttttgggcccttatttagaaaaaaaaaatggtatttttcaaaatcagcaa

SEQ ID NO: 127306 - DNA, 2220 bp, Cannabis sativa
  modified_base (1496)..(1496): a, c, t, g, unknown or other
agatactggtaaaataatttctaacagtttataactcggttggctacacagtgttatgtgagtacaagtgtgcatgacgaggcattgacctcgtctcgcggaagagatacaataacgataaaaatacttagcgtatatgacatgatatacaaactaagtataaatagttttgggggtcaaggtgacggatagcgagacctctatctcgctgtaagatggcacgcacgcgagaaagatcatctcgacaccagaactatagttatcaaaattaaaacaatatcaacctcgggaagttatatgacgaacaccagctcgccataaaagttaactcaattccattcccagcgaggcatccccataagataaggtttaccttatatcttaaatatgcactcatctcggtcaaataaaagtgggatactcatagctatgtgaattctaaataaaaactgcatttacttaccgtgatttgtaatcatatcccatgatttgagcgaataattgtcgtaaagattacagttgttatcccaattttggcactctgatgtggcaccacatactggtgacacgtggaatcgactttacatatctgctcgaaagagatataccctgattggctactgaactggtattttgaatactggagttcttccatcaacatatgttcgaacaaccgttggagatgacacagagatctaaaacctctgtgctgctcttggactcatgcaaggtcatactaataccctgcatcatgacgaggaggaactccgtgctgtggtgaatctttcatttgaagagcaaaggcgtctgttcgctgaatggagggacaaagagatggaaacgttgacggcttagcaagcagccattaacgacagaataagacaggccaccgtgctgatacgaatagcctataaggctaccaaccagcaacctacaaccatcatcccgctgagcgagtcagacaaagatccagccgtgaacgcttctcaaaccctgaacgatcagtcacccaatccccggtcacaggtttcgcctatgggccaagcggtaggcagacagaccttgtctagtaattcgtccggagaggtcatacctaataactctgcccaagttaacggctccggccaactgatcagtcaaaccaacagtcaatgagacaacctagtgtatctatatttaatagattgggaacggctcatgatctcagagatgatctatagaagagaagtatgtcgcaccagttattcagccaggggtccctgctcaaaatctcactcaaagagatcctgatgtgaccctgatcagccaagaggctgaataagttaatccattcgtgcaggcatagttaatgaactaaaaaatatgttccaaggcctggccggttagaagaataatgacctcgagttggaccgagcacgtggatcccctttcttcccagagatcaatatcctagagttgtctcacaagttcaagatgctgacctggaagatgtatantgggaaggaagatcccttatcacatcttaagtattttgaagtgcaaatggacttacaaggagtacgaggagatgtatgttgcagagttttcccagccacacactcagaagccgctcagcaatggtatttcaagttgacccccggaaggttcaactcttggaaagctttctcctcgaaattccatgcacaattctcttcttctcgccagctcccattgcatttagaagacctggtcgaagtgaagcaaaggccaggagaacctctctgagcttacatgaacagatttatgacggaggcagcgaaggttgcacagttgaccgaagtagggaaattaaccccgatactagggggcatcgaagtcctcgaagaactttggaaggatatcaaaagagacggacccgtagattctatgactgacttccttgatcgtgcagatggcttcatcaagcttgaagaggccattccgcgagcaaaagtcgagcttaaacctggccagcaaaaagctccttctgctggaacatccttccacttacattagtacccaagcaattcaagctcaagcaataaacggtccaacaataatggcagacaagggaaagggaaaaagggaaagttcactggcaaaaccgaacagacccctagggaaaatcctaccaagtttatgttggaaatatattttacccggatctagatttactacgaagtatgtttcattaacatccta

SEQ ID NO: 127307 - DNA, 706 bp, Cannabis sativa
tgtacccacggatacaccagggcccatttaccaaagcccagttcctatcttcggccgagccaaatccaaacctgaacacattggatgttctcgagccatccatcatcgccacaacagccacctttttttttccaaactttagccacaaaatccaaaacagaagactcttccacaaccatgggagcaatgactttcccataaagacagcaagaagtgagagcctttagacaagagacactcggagacagcttgaccgaagtttcaaggcaagaaaagcatttgcctttaagaggagatttggtagcattaaaggactccataaataagggactttaagaatctccaccaaccaacacgacacccagagtaaaaaagccaaaggaaacaccaaatacaaagcacaaactgccaaacactcactttacctcacacaagagaaaagggagtaaatcgaagtcaaccaggggccaaagccagcgaaaacaaagggaacacaacacacttactaaacctcacaccaccatagaagcaacaaaccccaactcacctgctcactctcactcactctcactctcaagagaacatgcatctctctctaggccatcaactagcaaccaacttatacttctcctttatatatatactagatgagagttacgtggcgagccccgtaaatattagttttattttaagttgttgtggtttt

SEQ ID NO: 127308 - DNA, 1789 bp, Cannabis sativa
  modified_base (1504)..(1506): a, c, t, g, unknown or other
aattgaatgaactagaggagtttcgtaatgaggcctatgagaatgcaaagatctacaaggagagaaccaagaagtggcatgaccaaagcttagttaggaaagagtgtcaacctgggcagcaagtgctactattcaattcaaggttgaagttgtttcctggtaagctgaagtcaaggtggtcaggaccatttaacgtggtcaaggtgtttccctatggagttgtggagttaaaaggtgaaggtccagcaactttcaaagttaatggacagcgtttaaagctctacttgggaggttaatttgaccaagccaagtccgacattattctagcccctctctaaacaacaactcagcgtccggctatatgacgataaagacagcgctcttgggaggctactcaagtgttttctttcatttttcagacttttagtttatgttttagtatttttagtattttaaatttttagttgagtagaagacattattttttccagttgaatcgtgaaaaccgtgaaaaaaaataaaaaaaagtaattattttcgggaccacgagcccagtggtcgcgaccacccggttcctgggttgcgaccctttttggtagtcgcgaccctggtcgcgacctgggattttacagaaccgcatagaatggtcactccccagtagtcgcgacgagggaaagccatagtcgcgaccctttttcatggtcgcgaccctggtcgcgaccaccacaatttccagagccttcgaagttttcaaatttatgctagtcgcgaccagcctgtgggctggtcgcgaccagctttcgaaattgtataaaagccctattttccccccattcaaccctacacacattcaaaataacctctcagccgccgaagccactctctcttccaaaaattcaaattttcatcaccaatcttcaattttctcatcttttcttcaatttctcaattccaatccatcctaaaacccactttcactcatcaatcctcactttccatcaaaaagcatccaaaaaatcaccaatactaccccaaattcgaaaataccattgtcttcatcttcaaccttaagctttcaagaacattcaacaatggaggtggagtaaaagcttctttgggtttgtaagtatcacttcctaccattttaaggaatttgatttactttttatagattttgggtggtaatagtgcgtgttgtgatagcattattgttgatattgggtttgtttgaattatattgtggtgttgagttattggagatattagttgtacagtttttgagtgattgtgaatttttgggaagtagaaaattaaggggaggtgctgcccaatttttcttagcattattttgaaaaaaaaaaatcagaaaaaaaaagaaaaaaaaatccgagaaaaaaaagggaaaaaaaataaaaaaaaaaagaagaaaaaataatattagtatttctaagaaaatatggcacccaagagaactaggcatgttgaggaaggttcgtcatcaaannnaccaactacgggtttcgatagaactcagtttgtcaatgaggaggctcagaatcgttttatgaggctgaaaattaggccttacattgaagaccggggtattgaattccctgaaaatcccttgaggcgtcaaccaaggttcgaaacaatacgagcccaaattgagaggatgagatggggtagctttgtggatgctcggggccgggcttatgtgactatggcctgtgaatttcttgctaattggctggaccgccggaatggggaggtgaaggtgcgaggaaagaag

SEQ ID NO: 127309 - DNA, 700 bp, Cannabis sativa
ggtttgaaaaaatggttaaaaaccgcaccacctgcaccgtgaacacccctaacaaaaattattatttttgtcgatccccaaatcaatttttttatggaccatcactaataaaaaattttgactatttaaaatcgctggctatagtggagtattcctaacagtttttaacaattgtttaccattgttgacggtttaaaatggttaccgagaccaaaattaaaaaataaaggtgtaaatggaatctgcgacgtttaatatagtcaaaaatagtatactcgatggtttaacactgtcgggaattcccatttaaatatataaaagcccaattattttagatctcattttttatatcttacatccctctctctctctctctccactcctctatcgactctcccgtttgaacggtgagcaacacccacaaccatcgccaccgcctccaccaagtctccatctcttgctccagctctctcttgccccaccccactcttactccacctcgctctttctccctcctcctcgtctcttctcattcttggtcccaatcgcaccaccactgcctcccaactccacctcgctctctcttgctcttcctcgtttcttctcgttcacggtgaaccagaggtgagaatttgatatatctttttattttgcattagtatttttattgtagaaatccttgttggaagttattttacca

SEQ ID NO: 127310 - DNA, 2531 bp, Cannabis sativa
ataatattttagtataaattaaagtttaacatatattatataaaaatatgatatataattcaattcaatacaatacaatacgatttaatacgacgttccaaacgagtcctaaataccttagtaaaaatctaacacagaaaaatcggatatgtaaaacaattaaattaaaaattaactcatataaatcagttacctaaataactaaaataaaaattaaatacagaaaccaattacaataaacaaatatttaacaacccacatattaatgtaatatgaaaatcatctaaaaaataaatcaaagaaaaataacatgaagaaaacaatatcatattatataagtagcctacaaaaatagttacttacatacgtctagaaaatagtaaaatctaatatgtactcatacttaaattcaaaaatctgttaatgttatatatttcacctttttctttttttattattataagcttatgtttaagatttgtttattatgaaacctgttttttagtttaagaaactcgtttctgtgatattttgatacttttaccttttctggttgtgcaaagaagttttaaaaacattaaatatgagatttagaaaatcatttacaacaatatgacaaatatataaaaaaaggttttaaaataacaaaataccataaaaaaggacaaagttaaatttgcaagtaattttttttttttagttttagcatgataaacctgaataatacttaggtagagtcacgaaaaacgtctgtatatacatacattttttttcattacgtgtcactctattattttataccaataagtaattaattctttttatattatttttatttcttttttttttaataattttgtgactcctaataaagaaaattactatattcaacaaatagtactcctaataatttatctttatctttaatttcatttagaaaatgtactataattttaaagatatggggagacgaactctagacctctgactaagtatgggagcatattcctaatgtgctaaagactttttagtctgattttgttacttaaattgtatttgaatatatcctgttagaccttacaaaaaaaaaaacaaagaatatacctgctgaaaatgttttctaggtccgcccatgctacctgccctacatacaaatggatcccttaagttgtatgtttcaatatatgaataataagagattccatattaagctacattataaaaactacctaatttaatcgttgtcatatatattctcacaacatgtagtacattgatattatatatagaatatatatgtaaatcaaacaattggtagtaggtacaattttacctcttcaaccattcacaagaaacttatgtgaaaattttaaatttttgcaaatcattcatgtttatttgttttatcatctaatttctatattatttttttttaaaaaataaaattaaattgcatatgtcttttgagcatgaaaataaaatgtctgattcacaaacaattaaagataacatgcaaggatatttataatatttttttggaattattaagggtactatttgttgaatatagtaactttctttattaggagtcacaaaattattaaaaaaaagaaataaaaataatataaaaagaattaattacttattggtataaaacagtagattgacacataataaaaaaaaatatttgtatgtacagacgtttttcgtaactctacctaagcattatccaataaacctaatgctatttcaaatttttgagagtttgagctgaaagagcaaaaaccattgtaattctctagtgagagagagttagatattatgtccattgatgtattttggagagcttggagggtgtaatcttttctaatatagcaactttgacttatgcattgcctagccttggttgtatctgaacaaagtattaattttggtgcactttcttttaaattttacattttgtttatattgtgtttaattacttgtctctattagttgtttttgtgcatgtattggctggtgttatggaggtcctcgtccccccacaaccaaatttaccctcactggataatggaattaaaattctaatgagaattgttatgtatatcacagtgtcacactacttgcaaaattgaaaggcctacatcattcatcttattatttatcctttccaaaaataaaaaagtccaatacaacaacaataatacaatatgagtaatgaaaaaaaaaatacaatatggtgctgtagggaaattatgctgtgctccactttcaacaatcagaactgtgtgcccctcctttctatggttaatagtaaagggcgaccacagtcacaatactactatccttagaatttaacataacacttttaagtcggattattattaagttttatttcaacaaaaaaaatagtttaggatccgtactattttaaaaaatatagtgtctattttgtcatttaacaaaacaaaaggtccaatctataacttttgtaaaatacaggatatatccaaaatagtatttacccaata

SEQ ID NO: 127311 - DNA, 1342 bp, Cannabis sativa
  modified_base (1295)..(1297): a, c, t, g, unknown or other
tctcgacttcatctttgagtgcttaaacgcgttctttatccaaaaacctcctcatctgttgtacaagacaaatgtttggattaatgttgtgatcatgggtcatcatgggtctcgatgtgaccatgaaaagaggtccaggtttgcctttagaaatattatcaataatgtttttatttctggcgctaaacccttctcgatctttagtcttctagtttgagaagtgggatcaacctccccttcctccaactcttctacaggtgaaaagctgcctggaagatccccaaagcaaggatctatgtctgtgtccccactttgggctggacttcattgccctttactggactcttcttttgagctcttggcgggcatcttctctttcttggctttagatagggccaagttgtaacagtgacggacagattgttggtctcccctcaaacatcctaccccatgccttgttgggaatttcaagcagaggtggtagatggatgttaccgcctttaggtcatatagggttggtcggcctatcatggtgttgaaggccgagggaacgttaaatatgaggaattgcgccatcagagttctggtggttggattttctccaatagtgaggggtaatctgatataccccactggcgcgatgccctggccaatgaagccatatatcacttgactgcagggtgctaaatcgtcaagtaagagccccatctttttgcatgttgatttaaatagagtattagaggaggctccattgcccaccacgtatcttgccacaatcatattcctgatttgtgcagtgatgacccctcactattggagtacctttctttgactaccaggatgtcacttagtgtccaagcatagtgctccctaacgttgctggtctcgcctgcaatatgaggcctactaataatgacccctaagtgacctaccactagcggtggcattggatctctattttgggcaacttgtgcctgaattctgtcgttctgtgcatgacaatgtaggtggggattgttcttccttatgaggaattcaatatccctcttaaaattctgacactcgttagtgtcatggtcgaagtcattgtgaaactgatagaactttgccatgtcctcttactcaactccctttttatgggaaagggctttctgtatgtgactgtatcttgagtggccatgaagatggcctcaagtttctccataaggagggtgaagcatgtatacttctccaccttctccttctggttttgtggcatgggagaagtgttaaactgttggggtttatgccctaannnaaactccatttcaatgtaatccgtattattcaatatcaataaaga

SEQ ID NO: 127312 - DNA, 522 bp, Cannabis sativa
ttagggcataaaacacaacactatcttgaactagctgttcatgagcgacaccatgctggttgtgaaatgccttccaaatatcacaaacatagataaaagcctcatatttttctccattctcttcattgaatgaagtcatcaagatatactttgaatgattatttctttcatgccattgttcaaaggccttccaggcagcgtgacctgattctttggctataagttcgtataaattttccttgagcagtagaagttctatgtctactctccagtcgaatgtggaatcatcatcaaatatagttaccatcttgtacgggtaattgtcaatgttatattattagtgtgccattttattatcactactaaaaaaatgggttttagtgacccacattgaataactctaaaattgtattgtgacacttcaacgcgcgtcactaatgagggtgactggaaagacagtttttagtgacacttcacacgtgtcactaaacccttttacattcattttttgcgtgtcactat

SEQ ID NO: 127313 - DNA, 1573 bp, Cannabis sativa
ttttcgtattgtttttatagaaaattgtaaaaatgtaaaaaaaaaaaaaaaagattaaacgtaaaaatgtaattttgtacaaaaaaattatatttttatgtaattatccctaaataaatgtcaacatggttacatgacctatgaattaaggacatgttttggaaaatttacaagtttatatacattttatattagagttagtcccacattgctaatgtgtagaaataaattgttatataatataagatgaatgagctactcctctcattgtcaattaatttggagatagaatctcaatcatcttatcccaaattataacatggtatcaaagtcgcttgtgatccgttgtgagcccaaagtggccggtccaaaaatgtgagccataaaagagccatttgtgatccattgtgagtcgaaagtgttgggttctttgacttgttttaaaatccacaaattttctgacgtgtacacccataaatttcccaatatttggccttgtaggattctttcaaatgttacgttcggccttgtagtctcttaaaggtcgttcgttatacccacacttttagaccaaaatgtgaggatggtgtattagagttagtcccacattactaaaatgtagaaataaattctaacattcatcttatctcaaattctaacattttattaattaatttgagaaatttgtggtataagttcgtaaaaagtttattttaatacagattagtttctaatttcaaaaaatagcggcaatagtccctaagctcgagattcttgtaagtctgttggttctcattttaacaaatttgttagttggtctaaaaatatcacttgttgatattaaattgcggtgtaagtcccttaaaagttcaatttgatgctaataaatctctaatctcaaaaaattgcagtaaaaatcctcaagctcaagattcatgttaatccgtaagtacccaattgaacaatttcgtttgtagttcttaaaattaccacatgtcaaaattttattggttcgcatgataaaaataattattaaggattaaaaaatatattatataaaaaaattacaaacttctaagatttgtaacccacccttcacggtggtggaggcttgctgctgaccagtaccatccttcatcttcacattcttccttgtcccatcccactacccccaaaagccattactacgaaaaccactattcccgacggtcttaaaaacatttttttggatcgtcgcaaaaaaaattgagtgtttaaaactgtcagaaaattgggtagttccgacaattttaaatactcgtgaggtatcctcgacaatttttaagtgtgccttaaaaattacaaattttttaaaggagaattaccgacaaactatggcctacagtatgggccacggtttcaaatcgtcgcctgtagtgctataggccacggtttttaaccgtcggcaattagtttgaatctgaaaaatttcaaataatgcgtcttcccttgctccaatataatgtgttttcaaatatgaaaattttcaaatctatacattttcattccgtcaatctctctctctctctctctc

SEQ ID NO: 127314 - DNA, 1009 bp, Cannabis sativa
taatttaacatgtttttcaagaaaattctttgattagcaaagattgcactataatttaaaaagcactgtagcgtgccttagtattagggcgttacatatcttgaaagagggattcctattcagtcgagaaatctagttcggcaactggggaaatcttcttcgatgtagatttggttcttgccttggaggatctggaaagccatcgttgaagtaaaaaaaattgagatagcaaaagatgtttggaacaaaaaaggagcaaaaagcaaaggaaaaaaaaatcaaatttgtgatttgggagaaaacatggaacttattagaaattcctttatcattccttataaaaacacatctatattttggaattagaaaaggcgacgatagtttccaaaaaaatagaaatagttactcattaaatcaactagcatatattaatgacacatgaaaatatttatagtaaccagttccatggcatgaaagcttaaactaaaatgttaagagttcaaataccatagaactgaggggcaattgtaagagataaaaataattttgagggtaaataactaattttaaaaaatatataagaagaaagagatgatcttatagtatcgacggcttacagaatcgtttcacttaaaagaagcagagcaaaatcaaagattgaagtgcagagctcaatgaaagaagaaatacggagcaaagctcgaaaaagaagagaatgaaggatgaacaacagaagagaattagcgcacatgggaaatcaaaaaataaaagaagaaacaatcaagcattccttcccgcctacaaatagaagattccatcctttaaaaatgggagacaaattcttgaccacgcgtgactgcaaatttgtacttggattcaaagaacaaataacacatagttgatccattgaattgagaagaaagctgtgtaaaacgattaatcatataactcgactagattgataaaaaaataggaatggaatgaaataaaatttgaaatgcataaaaaa

SEQ ID NO: 127315 - DNA, 1001 bp, Cannabis sativa
  modified_base (848)..(855): a, c, t, g, unknown or other
  modified_base (939)..(943): a, c, t, g, unknown or other
ccaacaaacatcaacatgcatctcaagttcatactcacaacccatatcacattttcatgctctttcaataattaaattcagcaataataacaaagattaaagttgtaaaagctacctcaaattcattccaaaggcaatctcaaaattcctcaattacaaagcttcaatccaagccaaatccaagcaatttttaaagtttgaaatgggttagagaaagagagagagggttcgggtatgagggaggaagaaactagaaaaatcaacccctttcttgccaaaattccattttactaagaaatcaataattaatgccaaaagacaaaaatgccccgagggccaaaataaagcatacgcatcaacaagggtaaaaatgtcatttccaacataaatattctcaaataaatttagattattcaccaacggggtcttaacatgacataattcatataaattcacatatattaaattatataataatataattcctcactaatacataattatctagttaggattttgctaatccatttacttaactctagggtattacgcatacacagtctcagaatcatcacacatgaccttgcccaggcgatgtgggattgcacaacttacctggtatttccccttatcgatcgcaggactactgactgtcataatcaccgcccttacggggtccgacgtcctcgtcgaccacacttccggatgggtcaaggctctgatatcatttgtaacgttcccgcttcaatcctccattaggtccttacacccacacaatgatgactcttatacatgagtacgccactctggcttttcaaccaagcgcgatgaccaattgtgcgaatcannnnnnnntctcgtactaggttgaattactattgcgacacatgcgtcgtttctagcctagattctaacttagaggcgttcagtcataatccnnnnnacggtagcttcgcgccactggcttttcaaccaagcgcgatgaccaattgtgcgaatca

SEQ ID NO: 127316 - DNA, 3336 bp, Cannabis sativa
  modified_base (212)..(220): a, c, t, g, unknown or other
  modified_base (3305)..(3307): a, c, t, g, unknown or other
tgagatcattgacataatatatttcggaaaatataaggattacactcaataaagaagtatcaacacaagtagttctctatgaagataatgcgaaatacattgctcaactaaaactataatgaagaagatggagctaaaggtattttcaccaaattcttcttaactcatgattttaaggagaatgactatattgatgttcaacaaattcaatnnnnnnnnnatcttgcaaacttattcacaaagtcattaccaacatcaacatttgacaagatagctcacacgattagaatttatcgattaaaagatctccacgaatgcctaaatgagggagagttagtttacactgcactccttttctttggaccaagtttttcagtaaggtttttaatgagatagtttttatagacatccaaggaggagtgttatgaaatattatttatgtatgtccaaatcaccatattaattatcaccattaatgcatgattgtctttttctttattacattaatttggtttctcattcctttagtcaatagttttgtataaatatgggttcaccccattagaataaacaagtaagaaattctcattcagtttctctttctcttttcatcttcttcttttcttcttatctattttatattattctatattattttataacatcaatatatataaagaaatttacaagaagagtttagatgacatttaattttttttttaatcttttttttttctattttataacacattctcttattttatttgaaaaatcccacattgtgtagaactttttaagtgttattcatgtaggttataaatagtacttttattattttattttttttttgtcttaaaaatattattttttttagtgagtgattgattaatatattactcaataaatttttatatatatatttcaataaatagttatatatattttaataattaaatatattatgctaattttatattttatttgtttgagttaaaaataattttttacaactaaaatattttttcataaattttaatttgtttaaaagttaaaaatttatttgtaaaaggttacttatatgactatttgaacatattttattatatttttattaattttttttcttcattttttttgttaatttatcatttcaattttaaaatataaaacatatatatttctacaaattgatttattaatattgttttatcatttttcttatttttattttttataagtttagtttaaattatttaaataattaaaattagagataaaaattgacattttttacctaaaaaatacttttgtagttatacattataaattaaaaacaaaaatataaactttaaaatgatttatgtggcattctacttttttttttttttctttccttagaaatacatgtagcttcacataaaattcatcaaatcacataaactcaacatgaatcatgtaaatcacataaaaaataatttaaatccttttaaatctatattttcatgaaagtaaatttttaccatgactctaaggctaggtgttagaacttattttatcaggattttaatttactaacatatatattgattataaaatatataatctaacatcctaaaatataaaattcatgaaacgataaataaatatcttgatgtttaagatcacttacattaatgacagcggaatataataactcctttcgttcagtactctaaccctagaatcctttctatagcattttatcaccaagtagtgaacctggatggctttccttaacccaataaagcgaaaattctttacaatcttctacaaaagtctgagtactatcttgattagtgtaggttggtactcaattcacctttggaacacatttttgaaatggctgaggaaagaaagaattcgagttgcctgacatgaaaagttaggtctctcttttgtctatcatcatgttccttatataggcattccttagggttagtttaacatgagatggacttaaaataaagacaattgggcttagaatctaacccatggctgaaagccattatggttcatagagttagatttttgtcactttattttaacttaatgaaacattgtgtcttttccaattttatcacttatcttatctaattatttaactaccaattttaatttaataattataaataattatcaaataaaatacaatttaaatatatttatttattagacctatgaagagtcttaattaacaaataaacacacatttattttttcttctcaaaataacccaaacttggtgaaatttctcaaataagacatagtatattttgaattctaatagacttattaaatcaactaattaggtgtacaatatcttattgtcccaaataatgtagagatcatgggtctatgtaaccaaactcccaataagtagatctaaaatttactaagtaaatttcctagctgaattattcctcctgattgtactattgatttagaatcccactcttgattacatagaacactctatataccaaatatagatgcactaggaattatccattgcttcaatctaaacaatcatttatcctctatggacaacttacatcaagtaggagcaatttttttgttttacccttcaatgtattttgtttttaaaacacttatctatttataaatgatatttcaataaactaatataattactgaaataagagttcttccatttatatcattttagccaatatctaaggaaactatcgttttacttctaatagaatctataaattctatatctatgattaacactcccactcaattgcactaccaaattctcaagatgaaagtatgggctagtcctacgagtaagctggtaaagaacaagtcaaagaattcatatagtacaaataagctagaacctaaccatctcaagattgagatcaattatcctaaatcaattaaatgacatcgacttagaaaagacataacggaaaaatcaattaaatgacatcgacttagaaaagacataacggaaagtttataatttcttttctactgtatatcagtccaatccgatgtataactgatacatccgatataagtttactttgctaatgccctagaaaatacattttacttatctaagtataagtgaaccacatcatttattatcacgttagtgtaaatctagtgcactgataaatcgtgagactaaatagtttgaagcatataatcatgattattttctaccgtgatgacaatactataattatgaataacaatatgtttgagatttattagaatttatatattaaacatannntcatgaaagtaatcatgtgaaccatgtaa

SEQ ID NO: 127317 - DNA, 1279 bp, Cannabis sativa
tgtaacctcaactcaccaccaaagctttctccttcttgagtgtatttgcacatgtccgaaactatcacactcacgacattgtatgcccttcttctttttatctttaggctttagctgtttgttatttccactagagtttcttctaaattgattctctttcccaccaatagagtttttcttatagttatttttcaaaaatcttgcataatttttgattaacagggcaacaatgtcatctgtcagacattcaaatagatatgagatcttgtttctttcttctttatgaacaaaaacaaggttgttttttggtttttctttctcaaattctttctacttctttcctttattccaccttgtaaaagtcatttcataattctgcagtgactcaatcacctcatccaagtcaagctcttcaacatctctcatttcttctattgaagtgacattagacttgaactttctgggaaaaaaccccagaacttttcgaacaattttagcattagagtaagtcttccccaatgcatgagaatcattcaatatatgacacaaatttgcattgaattcggctactgtctcatcttcttccatagacaaatttacaaattcctttgcaaaagacaacaacctgtactttttcacagcatcggccccttcattatttattctcaactttttccaagcatctttgcctacctcacagttgacgattactttaagttcatttgtagacactgtgttgaacagcgagtgcatagcttttgaattgtaactagccttctgcatctcttcagaagtttatatgctcattggtttggatttggtcactccttccacaatagatggaaaatgccaaccatcttctatagccatccaaactctctcataagccgctctaagaaatgctcgcatcttggtcttccaataaggataatacgcctcctccaacattggaggtcgagaggtagatccacttacactaaacatttccataacaaacaaaaaacacagtatatacttccagagatggatctcagagggggttagttctaactggaagttgcaaaatggaaaaaaattatagaaaaatcaagagttgcagcaacaatgaatttcagtacaacacaacttacaagaatcctatggatcaataattctgacaaaacaaacatgctctgataccaattgtacaccataagtttttgtctaacctatctttttcatatttagattgattttatcttgatttaagcttgaatataaaaagaacaaaatcaaagat

SEQ ID NO: 127318 - DNA, 658 bp, Cannabis sativa
tttgtaattgattatagtggatgttactttacccagttcaagggaacccaagcactactcagttgaaatgtgttttcaatgtgaaggaagcttgtaaattttgtgttctttgattataatttctggttcaattcatagtaataatatgttaagatctatcaattagctttcgtagaaattaggactttcaattggtatcaaagctaattttttcatgtaaaaaaattgtgatcttggatctgttcctaattttgtaaaatcagaactggtgtttgtgattttctggaaaactaatccactgcgagtctactctcgttgtgcaacatagtttctttattgattgtgtgcagatcatcgggaaatggaaatgttcagggaaggtgggtcgacttctagacatcccatgtcagaagggtctaactatccttattagaagactaagatgtgagaattcttgaaggttgtggatgaaagagtctggatggctgttgccgaaggttggtcaccccctactatatttgatgaggaaggataaaagatcaagaaatccaatgaatggacatctaatgaaatggaacgtgctaatttcaattccaaagctttacatgctattttcaatgatgtctctgttggaatttattttatcaggatcttagat

SEQ ID NO: 127319 - DNA, 686 bp, Cannabis sativa
cctatacagtctcaaaatcatcccgcttgaccttttccaggtggtgtgggatttcacagcttacccgatatttcctcttacggatcacgggactactgactgtcacaatattttttaagagtgtattagctagcaacaacaagttaaattgatgaacttgtataaaagtaaacatctatttttattcttaattattttgtattacatttctagtacttactagaaacaagaaagcaaaaacataaatgataaatgatagagaaacaatgatcttatttattttaaagaaaataataaaagatgataatattatgaaacaactatatatataaaaggcttttattgtaaataaacattgacaaaaaataaattagtatttttatcctgatgagataaattaacatattatacaataatgcaatattattttttttgaaaggaataatgcaatattataatttacattattattatatttttaatgttgccgaagctcaactatgtgaccggcgtgagatcaggtcaaatcaagggtctccttttgcttattttttacaagggtaaatactatttttataagggttataaataacatttgaaaattctacaatgcacccccttaaaatgaacatattgatgcacccctatctattttagcatccgaaataattttttagtcacatttt

SEQ ID NO: 127320 - DNA, 566 bp, Cannabis sativa
actgccattgaatttcgagatacgatgctctattttactcatttctagtttaaagttttaattctgatttaaagtttgaatttgtagttcttatgagctgttataaatcacaacaattagtttaatatgaatttaattcacatcaaagtatatataaagaatgaggcagtttagtttggtttgaactacaagcgaaaattttaaaactgtgactgaagtatagaattataaagtcttcattgaccaaacaattgacaccaaattcatttagtctagattcgttggggtttgaaactatggattaagaattatattaacaactttaactcataaacctcattgattcttattacctttattttatacttttttttatttattaatgttgggataattttgttaatttaccccactaaattgattggttggaaaatgtaaaagattaaatatgtctatatatagtaaaaaaaggccaaaccaaacgtgaaatagattaagggcccgtttgacacaacttttggaaaagctaaaagctgcttttcaaaaaagctgtgacaaaaaggtgt

SEQ ID NO: 127321 - DNA, 964 bp, Cannabis sativa
  modified_base (933)..(935): a, c, t, g, unknown or other
tatatttgagtttatttgcttaatatacccccttaattaaaaaaatatcaacaaaattcatttttgattatatcaaatgtataattatataaaaatatctaagttaaaattagagcccatatcatataaaaataagaaattttttaaattagagcataaaaatttaaattttcttagcgtgacttaatcatgagtaatgtcaattaagagtacacctatatgataaatataaaaaataattcttttaacctggagagcaaaaaacgaggacattgttattggcattaatggtggagatggatttgtttgttttagacttgctagagggaactatagcattcttggttgtagagccgatcttaaaatttagtgggttatatgaaaaaaaatatatttttgaggctttatttagagtaaaatatgatattttttaaaattagtaaagaaatgtgtaattttaaaagaagaaatttttttaggcccctaaattaagtgggttctagacacatgcctaatccacctatgtcaagagccggacctgattagttgatgggggatttttatacataaggaggagctgaggaggcagtgatggtaggtggagagttataacataaggtaaagacgatggtgatggtgaagaaggaggtggcgacttatgttgtggagagttgtagtgtgatgggggagaagatgtagtataagagtaaggcttatagtcatcactttcaggcacattggtagtggctattataaaacataatgccaaagcacatgctaaatgaggccacaaatttaccattttttagtacttgaaaaggaacaccaaaacacttaaattttgagagatatttgagaactcctcaaaggtattgtgaacaatgtcccacatggaataaatggtagagaattgagccatatataagaacatgnnntactccactcattgccaattggttttgag

SEQ ID NO: 127322 - DNA, 817 bp, Cannabis sativa
gtttcataattacagggggcattttaggaagaaacgtgtgattcgttattcatctccgatcatctaggcaagattactagttgattcactacagttgactagaatttatcttgctcaaagttactcgttggttgcaaatcatcattatcggagatcaatcgtcgttgaaagtttgtttccatgatgactaagtgtgttttaagaaggcacgtgtgatctgttattcatccccgatcatcccagcgagactactagtggattcactatagttgactagaattgatattggtcaaagttactcattggttacaaatcttcactatcgggtatcaatcatcgttgcaagtccgtttccataatgactaggagcattttacgatggcctgtgctattttttattcataaccgtcccgtcgtgactactactagattcactatagttacctagaaacgatcttggtcaaagttacccattggttacaaatcatcactattgggtatcaatcttcattacaagtccgtttctataatgactaagggcattttaggaaagcacgtgcgatccgttattcaacccgatgatccttgcgagactactagtggattcactatagttacttgtttgttacaaatcatcactattgtgtaccaattgtcgttgagagtccgtttccgtaatgattgggggcagtttaggaaggcacatgcgatctgttatgcatccccgatcgtcccgtcgtgactactaattgatagactatagttgactagaaccgatcttggtcaaagttactcgttggttactaatcatcactat

SEQ ID NO: 127323 - DNA, 1654 bp, Cannabis sativa
  modified_base (1521)..(1522): a, c, t, g, unknown or other
atagaaatagtcaataaatattatcaataattttgtctgtcggtaatataaacaggtattggtccccatttttgcatcgcttcacatatcgtattcttgaatccccatcatcaagaaactcaggttccatagaaaaactttgatgcaaaaattggaaaataataccatttaaagattgattctatggactccggtacgcttccgctactctctaatttattgtttgattctcatgaattaattagggctaaattcagatttacaatattctttaacatagaggaccccgatgctaaagagaataactcttctgatgcctctggagatcccaatcttcgaagatcatagagcttattataaaaccaagaagaaaattcatttcgttgtacttgttctaagtgttcaacatttctagaaagaagaatattcgtatgttctctacatcaaagataataaataattaattatatataaaaaaaattaactatttgaatggtttgaattgaattggatattaatatttaatatacttactgaatatatggtacaatctcagcacggttatttaaaacataccactcagctgtttttttctcttcttcatccaggggtctcaattgtttattaccaattagatgaccttgagactgaaaaactgataattttggaagtgatggaacgtcggggagggaggtggatgatctccaatttttgattttctggcgagggttttctggtctgaaatggggattttcaggttatgagagtttgaagaagtcaaagcagctgaaaaacaaaagaaaataaaaatgtcctcggtagaactactaccgaggacatgtccacggtacagaaacttaacataaaaaaaactgtgaatttttcctgctggtgtgaaagtagcaataacgatgacatatccttggtataggtgttctcgttagagacccaattttttgtagtgattatttatgaattatatataagttaaaacaatagtaaatattaaattttaacaattataatttttcaattctatgtaattattattagaaaattatataaaaatacttgttactataaatatatatatacattgtagtttagtagtttactaattgtaatatacatctagagcacgaatcggagtccgtaaaagaaaacgagttaatctatttagaaaaagctaattggttcgagcaaaggacgacaaaaagcacgtcaagaaaaagatcaggtttaagggtcgtgtcgcaggcctactctataaaattattggcacatgacatgatctgtatttttttttgtcttgacacgacataatttgtatttttgtggagaaaaaaatcatacatgtaataaaatatctgaactttaattttagcattgtagactatttataattttctgagaatttacacgtgcttctgtataattacaacatatatgataataaaaaaagatatatgaaaaaactccaaataaaaatatggaggattactttatatattattttttaannttttttttcaaatttacaatttagcttgctctactaatttctatgtggattattatatggattttagttacaatttaagttgcttcgttagttatatattatgtaaattttcgtaaaattacaaaaaaaaaa

SEQ ID NO: 127324 - DNA, 1794 bp, Cannabis sativa
agcagtgtcaaaaaggttggcaaaatggccatgaaaacagtcagagatgccttgcaaatcattaacaaaatctccattatcagtctggatttttttgatgtgattattggccttcctaccaatggctcgggagtgaaaatacttggtattagcatcaccaactttcaaccaattaatacgagaacgttggtgccaataagtttcttcttgctcaaggagatcatcaagtatttgttcaaattgatggagaccagagaagaaggcttgacttgagagatagaatgctctgaggtctgagactttttttttgtgcatcagatattttcctcttcatattaccatatttattaatgtgccaggattgcagatgtgaagaaatagattgaatattttgaactgcttggtttagtcagctatgatcagaaatggtccagtgatgatctacaatttcagtgccaggatcattaagccaaagagcttcatagcgaaatcgtgatctgaatttctggtgtaaagggggttcattgctggtgtggaattctgttttgagtgccctgtgatccgaggaatagtagtccaggtggtgaaggtttgtattatggaatacattctaataatttttatgtagattgctatataaattttggttgctataacagtttttatgtaaaattccatttaaactgtaaaaataaaaaagttccaaaaaataataattatattttgattattaagaaaattattatataaattttgattaataagcaaatctaactaaaattatgacagaagatagcaaaatcaaccataataaaatgcccaatattttagaaggaaattagatggtatactctttttaagttagtgtatctcatttttacctgttcttcaatcttctttaattgatactttcttttatattatttcttctaattataccccttccttttcattcctaactttcatctctctgaagctttcagcagaaaaacaaaattctttgaaactaatttcgtaaccatttctttgttggagctatacgctctacttgtatctccaagcttcgcaaccctactgtcgttgcactatttctattgtcgcagctcggcatctctgactcctttgcgcactacaacaataactagtgttagagactagaaggtatttgttagaagaccatatttcaatgttggattttgaggtatgttgttgatggtggtgatagtgatggaggaggcagacggttgctggcaatggcagaaggaaccatgtgatcatccctttacaaacatggttgttgacttgagtcgtgtggagatgaatttttttttcttttgcagctgtatagaaaggggaaatggtttgatttgaatcctttatgtgagggtattttgagaacagcactcataaaaagaggtatgtttcaattaaatctaaattgaaggtagatttggttaagtgataaaaaaagaggtattcgttaacttgtcccatattttagtgggggcaaaaaaatatttttttattgagaaaaatataaattttatgagaataaaaaaatatatatgtgagaataaaagtgaaaaatataaattttataagaatacaaataaaatatgttggataaaaataaaaattataaattttatggagacaaatataaaagtatttaaaaatataaataaaaattattatttttgtagagttaaaatataaatcggtaaatactattttggaccctgtgttttacaaaagttactcattagactctctgttttgttaaatgacacaatg

SEQ ID NO: 127325 - DNA, 637 bp, Cannabis sativa
gttcatattcctaaagatgagagacccaagcttgatgataaggtaaaaccatgtattttcttgaggtacggtcatgaagagtttgggtaaagattatgggatccaatgaataagatattattagaagtagggatgtggtgtttcttaacgatcaaatgtttgaagacagtaaaaaatttaagaagtgaaattcccttgttaatgttcctatgagtaccaactctgttccctcacccatagtgcataatgatcacgtgggagatgaataggaaaaccatgaagagcatgtcaatgaagaaggagaagaataagatcgtagtgagaatattgattactatgttcctatacttgatgatgatggtgagccaactaaacaagatcaagaagcacctccaccaccaccagttgatactccagtaaagagatccacaagagagcgtaaaccaacttcaagatacaatccttatgagtatgtaatactcactgatgggggagagccataaacttaccaaaaatccattctacaggagcataagattgtgtgggatggagccatgcaagaagagatgggatccctgcatgagaatcacacatatgacttggtgaagttgcctaaagggaagaaagctcttaagaa

SEQ ID NO: 127326 - DNA, 2726 bp, Cannabis sativa
aagcacataattaaattaatttcatcattttacccttcttgggtcataattactaaaatgcccctagctcaccaacggggtcttaccaattcacataaattgaactatagaataatataatttctcaattattcataatcatctaattagggttttacactataagtctctgtgctcacttggggggaacccacactgtacaatgcatcaaactaacacagagaacttatgcaaagaaattttaatgcttagtataagttactaaacctgcctctaagtcaagtgcaaacatacttcagcttggcatacaaaaaagtaaatttggatacttacatgtcaaggcagtaagaagatagccaagataattatatgtccataataaaaggctttaaggctaaacaatagtagtgttcaaaaatgaagggcctataggccaaaagcaagaacatgaaagccttaaagcagaatataaataaaaaatcagttcaaatatgtaaggctacaacccaacaagaactgtacaaccaaagaagagccagacagagttcctataagaaccacataatgagctaaatctctaaggcaaggcagaggtcctagcaggttgcaagccaaaaggcagagttcgttgtacgttccaagccatagacaagactctaatcaatcgtattcaagggtactttccagataatgttattgtacatggctgggtatcagcgaagtacagtctcaagtgtaacaacttggacacatgttgagtcttaagttgagcattcgactataatagactcaccattaagttgcataaaaagtttctaagggaactacgtattagactaaggttgtatatgcctacaaggccatgacaggattcttgccaaggtcaaaagaggatagaaaattggccacctgcttggaaccaaggcctaggctcgtcaaggttcccaagctttgggagggtcgactagggtcctatgacccagccaagaaccggccaggaacactagaccaaggcatgaactggccagttccttgggtgaaaccctagagttttccaacccccatgattaaaccctagcaccaaccaggtctcaaacaagacccctagggccagccagggttagtttcaaatcaaaatgtgtgtctttcgtgttcttaatgacttaaagagtcaagaataacaacaaaggccaaaatttgaatttttttatcaggaaataacacattatgcattctaaaactatcatgcagattaaaatattaaaaagactacaatctacatgagaatcaaaaagtttctaaaagattaaaaagcttgaaacttatcaatgacatattcaaaggagagacatcgaagaaaagaagatgtggcatatatggagagagaagattaaagatcaaaaagcatgccatgcaaaattccaatacttggctagacaaggctgctcaacaaaggctactgtaagcaagacgagagctggaaagtccctatccgaccaaatgttcaaacagggatttggggagaaaatgttatcccaaattttgtccacctgacttgggatgtccgcataagccaagactgaggatgtgtggaatatagccttgttaatagcaataaaaagtctctgcataaggcatggcaaaactgtcaagcagagcaaaaaaagttaagcaagtcatcaagaagctacataaccatgtctggttggccaaagggagtatgtaggcaagctaggagaagcttgtatggctggctagggtttgagcacaagctggctgacaaaagggtgattgtcagaccaaagagggcccgttcgaccaagaaagtctgacctttgcaaggaaagttgtacaaaggctggccaacacctactaaggctggccaacacatgcaaaggctggccaacacttgccaaagctggttcttggtcctttaattagtgacaactcaagaaatacatttgtgatcccaacaatcaccatgtgtcgtgaacttatctcgagatctagaaaatgaatggaagctcccacaactcaaagagtccctaaagcttgggggtaaatgttatccgtgtttttagacgagtgacacacggcataaaaaagaagagataatctcataatctcactatgtaaaactgctcaattagactaagtcacggagaagcttcactaatcttagaataggttaagaccgaaaggtatgcgaagatatgccttaccttagcttctcagacacagaagactcattatcactacgaaatctagagtggtccaagctcaaaggctgcccaagtgatacccggatgggtactcgaaaggcctatcacggacagtgatcgcccaaaaggatcacggacgtctaccttggaaataaacctggatcgcccagtgatggttatgcttcttcttacacaggattagatcgtgtcccctgtgccaggacatggtagtgcacaaaccttttcgctagacaattattttaagcatttacttttcaaggttaaacctttcggcgacacgtgtccattacatacaatggtccccaattgtctagatggttcaatgcacgagcacaaatccttccaatgggcccaacaaacaactccttttcactactacaatgttatcctttagaggcagttttttcaaccccatttataaaaagggaagctaaagggtgtgaaaatacccgctatgttcgaaattgacatttagatgcggtt

SEQ ID NO: 127327 - DNA, 574 bp, Cannabis sativa
  modified_base (536)..(536): a, c, t, g, unknown or other
caagtatgaatcaaggaagttgagaaccaaagcctccaggttcaccttgtacaatgatcgattatacaagagatcattctcggggcccctcctcagatgtctaagtccatccgaagtgagatacatactaacagaactacacgaaggtgaatgtggaaaccactcgggactaagaagcccatgccacaaggctctaacgatcagatactattggtgaaaatgacgacagattggtatgatttcgtcaaaagatgcgacaaatgccaaaggttcactcaagtatcacacatgccacctaagaagctccattcaacattaactctttggccattcatgaaatggtgaatggacatcgtcgggaagatgcctacagctccaggaaaaagagttttcatgttggcagtaactgactacttcaccaaatgggtagaagcagaagcctacgcacaagttagggatcgaaaaggcaaaagctttatttggaagaacgtcatatgcagattcggtgtgccaaaagaaatagtgactgacaacgnctcacaattcataagcctagactttcaaaacttttgta

SEQ ID NO: 127328 - DNA, 772 bp, Cannabis sativa
tatttagggcataaacccaacatttaatatataacaaatgatccatatattagcttgtattataatatttacaaagggtccatactcaactccaatattcaacccggactcggacccgaaccgagacccgaacctgaactcgaacccgggaacttggaagtggacccgaacccggacccagaccgaatacgtactaggatccagacctgaacccagacctgacctgggactgagcccttactggacctgaattgagccccgagaccatactggacccaaacctgaaccagattcaaactcatgaccaggactcagacccatacccgacccgagacgggtctgaccgaacttggaccaaacctggaccagaccgagacccaaaatcgggacccaacctggaccccaaactcaaacctgggacctggacccaacttaaggatcggaccgaatttacacatgaacctaaaccccaaaccaagaccagaatgggacccgagacctgaacaggacaatacctgggacctagacaggacggtacttgggacttggacccggaccaaaaccctgacccggatctagaccccaaactcggacccaaacctcagacctagacgtcagaccaaaccaataccccagacccgacctagagtcggtgttatggtcgagtttattaaaaatatattataactttacacgacctattaatacaagtcaataccaaatatagtattgtattaaataacattaatacaatacaatacgacgtatcaaa

SEQ ID NO: 127329 - DNA, 1155 bp, Cannabis sativa
aaacaatatttatataagtaaaaaaaaaatacagttacaaaaatgttaatatatatatattttttgattgaacagatacgatacattttttttttttaatttttgaaatttgaacaaatgcattgttgtaagaatattagtaacaattggcaccttaatttattgaagtaattaggcacgacataaaaattttaagagctttttttcttattttaaatgacaaaaaaaaaaaaaaaaaactataatactttagtcacaaacctttgctcctagtcttgacacttgccttaatctctggatctcttcatcttgttggataattcgggcttgcatctctgcaaagctttgcttccagtcctgaggaacttgtaacggattttcataaccacctctatttaatctaccacaacctctgccacattcacagagatgaggatgattttgacctccctgaccgccttctatctcaaccatattaccaagacgtatcatgtttcgtcaggtgtctatattataggactagcctgtgaacctataagtcaggtaggtcagataatgatcaaatacaatccaactaccgcatacatagaattttaggcaatgcactattcatctagcatattactaacatgcttcttatcttgcttttctaatcaaataaattactaaacaagtaaagacttactgaactatgagtcgagcttatctctgaggatgattgtatatatcttgacagtcttcggtaaacaacctggcagctctgatgccaaattataacgccatacttgcttaggcactatacaatgatttttttttaattattgtgcacgcctttgctaatcaaatttcttgaaaaatgcaataattaaaactttaaaattaaactttaactttaatagatacataactttacataatttttgggatcccatttaaaaatttaaaacaatatacaaaatacgttttcacaaaagtgtggccaagtaaaaacaaaataaaagttcatgtcgtcccaaaactgaacactctaggcctaacaattctgatatgtacaatcacctgcaagctctagactcgctactgctcagcctttgcctttctcttacctacacatgtaaacatatctatcagttaacaaactcagtaagaaaagca

SEQ ID NO: 127330 - DNA, 1004 bp, Cannabis sativa
taagtattaagtagcagtagttttgtagtaacagccacagtggcataatacgtaaataagttaaaaaagtagtggcaaaagtaataaccaccctcaactcccatatttccacttcatcttctttctccttcactctctccaaaaacaacacaacactttctctctctattttgctttactctctttctttctctctctactgtgttgaagaagaaagaagaagaagaagaagccgaagcttttttgaactgaatcgattttcagattcttcgctttttttctctctctgcatttctctatcagtctctttctatcacttaccgaaaccaccaccaacattgacgccatcattctccgctaaattttagcggagtttgtagggtttcacatcacattctcttacttatgccctaaattgagtcctagattggctaatctgagccagatctgagcctcgaatcatcagatcaaacattcgtcgtctgtcgtcgggaaaccctagtccgtttgctccgatggaggaagctctcgaactcgcgcgagccaaagatacgaaggagcgaatggctggtgtagagcgactccatcaactacttgaagcttctaggaagagtcttagttcgtcggaagtgactgcgcttgttgattgttgtttggatcttcttaaggataataattttagagtttctcagggtgctctgcaagctcttgcttctgctgctgtgctctctggtgagcacttgaaattgcacttcaatgctcttgttccttctgttgttgaacgattgggggatgctaaacagccagttcgtgatgctgctcggagactcttgctcactctcatggaggtaggtttttgtcctttacgctatttctgcttactagtgttgcatgtaacttgagtatttttaattgtaattgcattcaagagagcgtaaaatttgatttgagttttgttttcttcttctttgtttttggtttgttaacgttgaatttgatgtgga

SEQ ID NO: 127331 - DNA, 1375 bp, Cannabis sativa
atatcgctattggtccaactgagtctcatataatttaatataatagtttttagaaagtatcgctagccaatcgcaacgtgacatgtcgagaaggtgctaggcaccactggtagctaatagtaatgctcattcgcttattacccactcaatttccatctctaaataacacaggctgatcgtatcttttatcatttcctatatatttttttaagaagattaatcacacatcaccatatttataaaaagggatatttgcggcataaataccatatgtttttagttttatacacttaaatacaatatgttttttttttcgacggattaaatactttcagttacatttccgttacttctgtcactacttttctgttaaatcttattcaaacataaaatatttgtggcataaatacttgatgttttaaatttcatacacttatataccacatgttattttttttttctgacggattaaatacttaaagttacatttacattaccttcatcactacaagtctcttaattcctattataagagattttttcaatattacacctaaaattgattttatttacaaaaatatcttcaataagtttatttgcacaaatacgaagaaacaaggaaagatataactataaatagtattttttatatctcaaaaaaaaagatttttttatttttattaattaaataaatattatttaattatttttttaactctaaaattatttaataactttttttttttattaaacaatacttagcaaaaaaatacattttttatgttttatttacagtttaataaattttaaaattttttaataattttttattgggcatatattagtggaccactaatatgttgacatgtgtcaacttagtctattttaatagaatttaacgaattgataatgataaaaatagtgtaaatgtaactttaggtatttaatccgctaaaagaaaaaacatgtagtatataagtgtatgaaatttaaaacatcaagtatttatgtcgtaaatactctatgtttgaatatgatttaacagaaaagtagtgacggaagtaacataaatgtaacttaaggtatttaatctgtcgaaaaaaaacatgtggtatttaagtgtataaaaccaaaaacgtatagtatttatgccgcaaatatccctttataaaatggtataattttggcgtagcaactaccaccaagtatttctttcattaattacacatcaccaagcaaaaatataactagcaagtattactttcatttgaaaaaacaaatagcaagtattacttagggctgtacaaaaaaaattgtaaaccgcctaaaccgaataacccgcccaaaccgaaccgaaaaaaccgataaaaattac

SEQ ID NO: 127332 - DNA, 526 bp, Cannabis sativa
gtggtttgcattgtatagaccggaagggatagcccagcaaatttaatcagagtaacttgtcctgcctttgacaaagtcttagctttccaaccttgcagcttagaagttacattatccacaatgaaattgaaatcaacatctttttgctaggatataaacatgggaagacctaaatatttaatgttactagttggatcttttactcctaggaagtctttaatccctatcttcatgcatttacttgtattattgctaataattaaccttatcgtaagcttttaccaaatcaatttttattgcaagaaagctttctttgccctttctccttcaaaggaattgatgatttcttgaatgagcacattgttgtcctggatatatgttccttcctggaacaaaagccatttgggttgggaaaatgaggcgaggaaggatcgacttgattctattctcaataatttttttagatcaccttataggtcacattacaaagtgaaataaacctgaattgagaaaccttctttggatt

SEQ ID NO: 127333 - DNA, 1398 bp, Cannabis sativa
ttgcataggctctccttcatttatcgacaacggttttccagcaatgataggtgtgggacatggcttcaaatttctcaggttaactttcttcaatatatcttcaatgtatcgggtttgtgtgaggtatagtcctgtcaagtctctgaacacttctatccccaaaaaatattgtagagatccaaggtcttttagtgcaaaaaacttgttgagtttgcagatgaattcagcaactaaggcagagttgcttcctgtcacaactatgtcatcaacatagatgagaacaagtataacaactgtctcagatttgtagaagaacaaggaagtatctgcctttgaattttggaacttccaatctgtaagtgtgcttttgagcttgtcgaaccaggctctaggagcttgtttaagtccatagagtgatttgttcaatttgcaaacccaatcttctttccctttttcctcaaatccttgaggttggaccatgtagacctcttcttccaaagtgccatttagaaaggcattattaatgtctaattgtcttatatcccaacctttggaaacagctatggttaggacaattcttacagtggaagctttgataaccggactgaaagtctcaccataatctatgcctggtctttgatgaaaaccctttgcaacgagtcttgctttcaacctttcaatggttccatctgctcttagttttatcctgaatatccacttgttaccaattaaattttgataggctgctggtggtacaagaacccaagtttgattcttcttgagagctataacctcggtgtccattgcacctttccaacctgggtgtttgagggcctgttcaactgattctggttcagcaaagttagatacggctgttgatgaactgagataggttttatgtcaaaaaatgccagcttttcctcgagtgatcatgggatgagtaggctgtagagcagtggcaagtgttggttgtggttctgtatcaggttcaatactcgaagtggcaccagatgcaatctctggttcaggatcaggtacaccagttgggtccatgatgacattatccgaggagttaaaaccaaattgatcatcaaaatgaccatcaaaatgaccatatgcctcccctgcctgacctgaaacaggactgtgattagtggaatatgaatcagaaaaaggtgactgaacctgtggtgatcgaggtgatgcttctgaggatgctgcaggagtggaatttacagaacctgagggagaaaaatcagtggactcaagagaaggaacaggcagactagaccaggtggaactatggattatgacaggttggggtgtttggtagttgttgaggaagccctttttgaagggaaactcaagttcattgaacacaacatttttggaaatgta

SEQ ID NO: 127334 - DNA, 1542 bp, Cannabis sativa
  modified_base (370)..(372): a, c, t, g, unknown or other
acctttgtcccggttgtgatttagtggatcacttatatgttttgaatccgatgtgattgaggagcctataatttgccgagcagttgttcccctcaggtttgctggcagacctggattcagaattgaggtaagattagtataatgtcatgcatatgttattacatgtttaacatacctgttgtttatgcctcttagattatattgatagcagtaatagtatactttagagttttatagattactgataagtgtatgttggctaaaatactgattgatgttgtcacatcaatatggctatagtattactagcatattgagtataggttgacattatggtcgatagtattgttgtatgaacgttctagactcnnnaccgtgtgggacacagggattagggttatgattgggtgtatgggcgctagtttataacccgagatattagcatgttttatgttatgcttttattacttagtctttcgaatcacaggactattttcatgtgtaaggaagagcaaggctaaagctgaggagtcgtgagaacgagcaggtgaagattgtacatgtcggggaagttaggcctggagcgtacgatcttaggggacatcaaggcttttgctgacagtcgctaggtgacagaacttttgtattaaactagcaaacttttataaatgtattttgtatcgggatcgcaaaattttatatatgtattactttaagtttattaattaaataagaaagctttaattaataacgttttttattaatctcgttgcttagcaacgagcagtatagtaagtttaaaatcacattaacatgcctaattagttatggtgttacacaagatccgagccttaatattacttattgcttcattggtccgctaaactaactcaggacgcaaatacttgttttccccaatctcatcccagttaattagggaatgacatttcctatcgtacaacatttcatagggaagaatccctattgtactttgatagctattttggtacgaaaactctatcaaaggcaagtatttgctccatgaaccgtcaaagtccataacacaggctcgttgtaaatcttctaatatttttattgtcctttcacactgtccaccgctctttgggtggaaagtagttctaaacttcaactttgtacacatagctttctcaagacttacccataactttgatctaaattttgaatttatgtttcaaatgatggatttcaaagtcccatgaagatgcactatctctttttgatagaattccgcatactgatccatggtataagttgtcttcaccaggaaaaaagtgtcctgactttgtgaatcggttcactatgacccacactaaatagtacattctcgtggttctggacaaaccaaccacgaggtccattttaatatcctctcacttccatttaggaagcgctatatagaactagaatttaccaagtaaatccactaacttattaattcctcgttgcatccaccttagaacttggaattgcactctctgttatatagaacgctctatatgt

SEQ ID NO: 127335 - DNA, 1156 bp, Cannabis sativa
aaaaaaaaaaaacattagttaaatagagaaagaaacaaaaaaaaaaaacaaagaagtctatcataattgagcttcataaactcaaaatcatattctttcaccaattaaaaacttaccgcgagtatttatttttattttttttccttcaaatactaaagatatatttattaattattcttaggaatagaatataaattggtaaataaactatgcgtatattaattaatacacgtttataccgttaatataattgtattattataattaccataaatatctatctaatgtaattatgaaagtatgatctatatatattagtgacacataaactatatgtaataaatagaatatatatgtgtttacatatgaaatattataattataacaactatcactcacaatattaattgttagcttatttaactctaaagctattattttaatttaaaattaatttattatatgattaatttttccattaattatttaattaaaaactatacataagtgcaattaaaaaaaaaactacacataagtgcagaactattatgtactaataatttttaatattagacttttcatatttagttgatacacttaataaataataaaaaaaaacttatagattgtaaacacaataaaaattaagagatggtaagtatgttacctacattaacttttttaatgtatagtaattatttattaaattagttaactgttacaaagaagtattgttaaagcataaagtagtgagaggaaaatatagaataaaatatttttaggatggtagctcattaattataattgtgtaagtcttgtacgtgattgattaataagaagcaattatatatacaaatagaatattatactttacacagttttgaaaaaactatatcctttcaatggttttagtcaatttgccaagccttatgcaaggaaaagagaaaggtttattaaggttttgtaactattgtaattataaagtgctctaaatgctaatttaattcattatagaaactcatattgccacctcattttacaaatcacattcataatgtatcaatatcaatcaatatatcatatataaatgagtgttttgaagagggtgatgtggcagcttaattgttgattattttctaatctctcctctcctatt

SEQ ID NO: 127336 - DNA, 2111 bp, Cannabis sativa
  modified_base (1021)..(1029): a, c, t, g, unknown or other
cttccgatctgcacactttatatagaatagatatacttttaatatcttttcctcctaaaaatacccttatatttcaaaaaaacttatctctatctttctcactctccgacgttaatcccgacccagaacccctacagtcgaacgcacagacccagaaccccagtcgcaaggcctcactgtcgtcttttctcacgagctctctcgttttttttgcatttatttcttctagtttaccagttttttgcgatatttagtgatgtatttgcaatgatagaacaaatctgaggttagggataaaatttagcaaggatttacgatatttggcgatgtttcatgatgatattagcgatgtatttgtgatatgagactaaaaaatgcacagcacattgcgaaccatcgctaatcatcgtgaaaacttgagtatgatttcacgacatttagcgatgtgtttcacgatgttgtgaatgagagacatttagcgatattttatgatttcgcgatgtttcgcgacatcgtcaaaaataaaaaaaaaacagaaataagcgagttgaaaactccaacgatgggtagggattttgggagtttcgacgtggttgagctcatagattttggggatttgagttttacgatttctctttgtagtttcgcgatatcctccttgattttgtcctatgttttgtcttcagagtgggttttaccggaggtggtgcggtgttcgtgggtttggtttgggtcaggtttggtctggttctgtggcagtgggtatcaattgagtttggtgagagttagagagagagggagagagggcggagagaaagaaagaatgtatgaggagggtattttgggatttaattaattttagagtattaaattctattgtattttaatgtgacatattaaaagaccataaaccattttaagcatgaattatcaaattttctttatatatgtattttatatgtacaataaaagaatgaattttattgttatacgtattttatattgatctctctatatatannnnnnnnnttagaaaatattttgacaaaatttgagtttaattagagaattaattactttcaaaatatattttatatattcaaacatatatttttaaaaaaataataatagtgatggatacattcttaatttgtagtaagaagagtttggttataatatagtgtacaaattattagaaatatatatatatatatatcattaatcatttttaaaacaaaaggttgtggtgaaattaaagttttaatatatatattagatgtaatttttatttttaaatatatataataaaatttatttttttatataaaatatttacataatttttatttttaaatatataataatattataaaattaataaaaaatattctcttaagtaattggaatattctgttaaaattaacgtagaaaataaaaaaaataatgttaaactaagaattccattacataactagataactagattttatatagaatagataaatctattaatctttatttttatttgtcacgaaattagtttttttgtcacattaatctatatctatatatttatataatggaaagaaaaaaaataaattaggtggcattttatatggttttctttctatttttactaatttgtgaggttttatcattttgtgaagaaaatttataataaatgttttagaaataatttcacattgcttaggaactattttttatgatgtcctatatagtataaataagtctattaatctttgttgttatttgtcacaaaattaatttttttttatcacatataatggttgcataaaacatttttattattcaatctaatattacttaattagttatagtttttttatttattattttattaaaattttagtattaagacaataatatattataaaataataatagtaaaaaaaaaaataactattcacaacatgattatttaacatagtaaaaaaaatcacatgtttactttagattggaggtgagtatcataaatattatttttatttttaatatttttatatattaaaagtgtctatctaacggcaattcttggtttaacgattcttttttttatttagccttacacg

SEQ ID NO: 127337 - DNA, 652 bp, Cannabis sativa
attgctattgctatttaatgtatcaacttcacatacctaatattatattatattatattatattatattatattataccagtacaatgctttattgttaggaaaaggttgataaaatatttaatttctaggagaggtttgataaaatatatgtgtattaggggagatatagcattgctgggaatggtcttaataaatgagggtggtgatgatgagtgatcagccacggaattaggagagaaaagtgttctgtaaaaatagtatttatgaattattatgattgcaaaacgattataaattacattgtgtgatcataaatagttattatgatcgtaaaattaatgatcatagatttacattatatatgcgaccatcatagttagatagaataaattattaagagaagttgttttgtaaattttagtatttgacattgttagctagataaatttcattgagagcagagaaaatgtcaaacaaataatatttttttattaaaatttgtattattttccttaacgatatgtagctcccaatcccatagaggttatcttgcttgataagaactcacaggttcaaatttgtatcttgcttgataaaccacttggggctagctcaagtagccataggtgggtgtgtgagtgttggaggtc

SEQ ID NO: 127338 - DNA, 2168 bp, Cannabis sativa
aaattagaggtaaatttaatttatagattaataaaaagagtattttttaacttaccccaaaaaattatatatcaacagtgaatattcttctacataataagcttgacgctgttggagttctcacgctataatttgatgatggtgacattttttagtggagcaaggtgagtcatgaattatattatatggtcaatttaattaatattcgtaatgtttattaatatacaaccttataattggaaaagtgtattttgacaatcacaggacaatgcaaataagtggtagtggccaattattgtgtaaaatcatgtttaaagagaacactattcttcatcgaaatgatcatcactaccaagttagactttatcaagataaaaaagaaaagtttcaactttttcaatgaatgaaaaagtacacactttatattttttattttctcttttatagagttgccctttttataaaattgctctaatagttaacaactctaaaatttactcacactaatgatccgacatattactttttaaaaacaaaaagttagctagtgataaagtaattttttttaaaaaaataaataaataatatcacatagaaatggcattttaaacaatgatactgataaagtttgtttaaaaatattaatggcattgtacatgtgacaaagaccacttaagccaattcccattaaaaatgctgtaccttataagtgattaatatttctttatattatttatttaattaataataaattatactaataataatactaaaataaaattcttcttctagttctttgggaacgaaaaaatgtacaagttgatcaaatagtgagtaaaacaaaaatagatattttgtatagaattaaaagtgttcggcctaaaaaaattagtgctaaaaatagatcatggtttgaaaagtaagaaagaaatacacatgtgcatatttgatgtatagattatttctcaggtctcggttgagatatgctattaaggtaattggttctttggagtaataataatctcgctgattcataaaaaaaaaaaaaattcttctttaattgtgcgattatttccactcaattttttttcaagattctcattttcatttcaaaatttcagattcaattatatatatctaatgaagtgtacttaacttcatggacaaaatatattagaaaaaaattattatttgacttgcattttcattttcttcttatgcatctctaattattttttatttgatcgcaaaattaaggagaagctccctattccacacttccaccgaatcaacgacatgttaagaaaaaacgtttagagaaaaggcaaaggatagtatgtctatgatatttttgtttgtttttctttttgttgcaaattaaacttttaagaaactttgggtataagtctatagtagtacactctctaaaaggttctttcggttgacctttatctgcttctgtattcggaaaagtttttgttcctttttttttcataaatatgtacgttgtacttattttagattacctgtaaaattttcaaataatttatagcgcttaaaataaggttcaaatattttattacacacgtcagttttgtattttttttatacacttgataagcaaaactatttcaactttatttttgcaactataaatttttaaaataaaaaaattattaaaaaaactaaaatatttacataggtattttaatttattaatattgtacatattttaaattataataatttttttttgcatgattaggtactatccctcgactttaattctggatatgccatcaattcaagtaatatcttcttttttgtgctcctgtgtgtgagttgttggttttattccttctttcagtgtgttactagttgcgtttgtagtcgggtgctttttctctgtttctcccctgttttcctttctcggcctttcttttgtgtttgtgaggttggagatcatggacctaaatcaggggctggttaatggagatggaaaccatgtttcagaagaaaatatagaactgttgagacaatagtttttggatgaagtcacctttaattattaagaatttgtttcatagaaagattttttgatctgataggggtggaaaaagttaagaacaatatgtagttcaatgatcttttatatctatttgaactct

SEQ ID NO: 127339 - DNA, 1040 bp, Cannabis sativa
ctatgcccagggccgggcctgctaataacaatgctctatctctaattagtgctttaagttggtgcatgtcgtaatccgatttagttttaacaacaaaaaaaatcgtattatgtcgtgttataaaaaaatattagtcgtgtcttgttaatatttttaaagaataagtttaacacgtctcatagtcccaatattttcgtatcgtgcttaaattcgtattgtgttttgctcgtgtagctctatatttcttaaacagattaacttgttttcatagctatgcttaaattcatactttaatatttcatattttttttacaatatatgtatataactttttaactacatattttacaaataattatataaaaaaaattattagtatcattagaatttaaatatttacttaaaaatactcaaattttatatcacattttttataaataaattaatatatttaattatataattataatattcattattatatttaaattttattattattttaacttatttataattgataaattcacatattattattattattattaaattataagattttttaatatgtcgtgtcgtatattttgagcttctcgcgtgtagtgattttcaggctagtctatttgtacttatgtgtcgttccttttgttcttcttgtgtcgtgtcatgagtaaggatatattttttgtgtcgtgtcgtactaatttgtagcatcgtgccgtatcgtacccaagcccgtatttttcatgccaagtcgtcctcgtgccttttggacttgtgccagtttcgtgtcatatcaaaaaactcggtcctgtttacaaaactatctccaatacacaaattatcctacaaaatttacaaattatcctaaaatattttttttttattattattattatcttctcttttattcacataaaatttgacgcatattgatacaaaaattactttagggtgattctacaatgcacccccttaaaaaagatgtattgatgcacccttgacttgtttcggaatccagaagaattttttagtct

SEQ ID NO: 127340 - DNA, 1243 bp, Cannabis sativa
atcccaagagctctaccaaacgagctcacactaatgtagtctccatggccttttactgtatggggaatagaccatattggtcaattccctaagggaaaaggatgtgtacaatatgttgttgctgcaagtgactagctcacaaagtggacagaagctgagccactactaacaataacttccaaaaagtccttgactttgtagtcaagaacatcatatgtcggtttggacttccatagaagattgtgtcagacaatgggaaatagtttgatggtgacatgttcactgacttctacaacacacacgacatcattaaaagcttctccatagtagctcattctcagatgaatgggcaggtggaagttataagcaagactgccaaggacaccatgaaaatgtgtctagaagaagcaaaaggcaattatccaaacttacacccaaaagtactctgatcacacagaaccatcgagaagatggcttctgtgtaaacacctttttcattatcctatggctatgaagcaatgatgcccgtagaattggaactaccgtctcgtaagagggaaacctatgaccaagaagtaaacaacatcctattggaaaaatcccttgacgaaatagaagaaataagagaccaacccaacctcaagcttcatgcctaccagtttaaggttgccaggtacttcaataaacaagtcaagggaagaaaattcttcataggagacttagtgcttcgaagagtgtttgtgaataccaaagattttatagctggagtatttgggccaaactgaaaaggcctggaccaagttagagagataacaagtaaaggtgcatacaagcttggcaggtacaacaagaacatggagttagttctcctaccaaggtactagaatggacaacatcattgatttctgcaagaagcatggcatcatcaaaagcctttctatcgtgacccatcctcaagtaatgagcaggtagaagctttcaacaaaacccttaaggacaacctgaagaagggccttgaggaagcaaaaggcaactggcctgaattgctcccaaaggtcttatggtcgcttaagactaccgagaagacaactgttaggcaaactccatttgctctagcttatggctatgaggtgatgtcgcctgttgatctagtgccaccgtctcacaagagaacaacctatgaccaacaaacaaacaacaccctgctggtagagtcccttgacgaagtagaagaaagaagaga

SEQ ID NO: 127341 - DNA, 2082 bp, Cannabis sativa
  modified_base (1310)..(1310): a, c, t, g, unknown or other
aatatttaaaattctgtaaaatcgtatttttgtaattttttattattttttgtatatttgtaaaataatcccatattataaattgctctaaacaaatacgtgtttaagtacaatataatacaacatatatttgtaaataataaataaattaaaattaaaataaaacatctataacactgaatattataatgtataatttaaacgtaagaaaatataaaattgtaactatatattaatatattttgttgagtatcttaaaaatttttagtagttataagtaaactaataaataggtcgtgcttcacccaaagtggttaaattattatataaatattaattaaattataaaataagtatcaactaattttaaatttattttttatgtaaatttttcttttaaaaaatatatgtttattaaaataataataaatttatataaaaaactgtaaagaatttttttttttttaaaaaaatatcatacaatttcttatataaattaaaaagtacacaattttcttaaatgtatattaaagtaaagaaaattagaaactaaataattcttacacaaaataaagatctaaaacagaaagaaaacaataatttatagaaaactcttcatataatttcaaaataactatcatgaccgtatctcatttgtagtcatcgtatatcacttgtaattatcattaatattcggtttttttacacaaaatgagaaaaaatatattatattttacatttatattgccacacggtaattttatcttttttaatgtttatactttttatttatactacttcaaagttttcttaattacaaatttactgatttggtcttccactagtgtataaagcctctttcccaacgacttgactccactcacaccagctcaagtccatatggatcgtgtagaacctcacctgatcaacccttaacctcatgatctagctagtacgagaaaagaaatactagtgtagtgtaagtaatatcatgtataaatattttattttattttatatattaatggtattttttttttttgaagttgttttcatgcctatataatttacatattgaaatggaattgttatgcaatttttttttttgttatttagttttttaaccaagagaaataaatatatacatgtttttttttttcaaatttgtatgttgtttttattttattttttaagttgacgtaaatgttgatgtccaattaattttcatattaaaatggaattgttattgtgttatattcattgctattaggctgtttaactaagagcaaaatgagtatatatatatatanatatatatattttttttttaatatgtagatattttttttagttggtgtacaaatattatgtagttatttttaaatttgtttatagattatttgtgtgttattttcttggatttgatgcaatttgtggagctattttcatgcctttttaatttgtatattatagcattaaattgttatacagttgttcatttgttattatttagttattcaactaagtgaaaatgaatatatatacacatatatacatgtttattttattttatggattagtggtattttttacttacttagagttgtaaagcttatgtaatttgtatattgtagtggagtttatgcagttgttattttgttgctatttagttgtttaaccaataaaaataaaatgtatatatacatgtttttttttatttgtgtgttatttttattttgttttttaagttgacgtaagtgttgatgcccaattaatttttatattaaaaaaaattattattgtgttgtttattcgttgttattaggttgtttaacaaaaagaaaaatgagtatatatttaaatttttaatgtgtaaatatatttttaagtttgtgtacaagtgttatgtagttgtttttaaatttattttatagattatttgtgtattttttttcttggatttgatgtaatttatgaagttgttttcatgcctatttaattgcatatcatagtaagttgttatacagttgtttatttgttgttatttagttattcaaccaaataaaaataaatatatatata

SEQ ID NO: 127342 - DNA, 1136 bp, Cannabis sativa
ctgtgaaaagtgcgtactggcttcatcggcaggatagattctcggcccctactcctatctggaaagacctctggaaacagaaaatgcacccaagattaactttgtttatgtggaaaatcctgaatgactgtctaccgacccttggaaaactaagcttcctaaacatttcagatagatcgtgcatttttttgcggcgaacttgaagatacttatcacctggttactcaatgcagcataaccagaggcttatggttcaaaagcatctggggattgaggctagatactttcaattggaaggaggtaaaagattttggtgcatggtggactgaattggaagatatggacctcaaaatctttgctgtctgcatctacgaagttctttggttctggcgtaattctatcagaaacaacaacaagcagtggagtatcgaggagattttcaaagactgttcgaaacgagcggtcgaattctctaatacaccttctgacttggaggacaatgttaaggaacctatgatcatgaaccactccacagacataacgggttatcatgttttccaggtagatgcttcagttgcagacggcagtgctggaattgctgcagtctataaaagagattccaatgacacagaagacttccttgttgtagatcacttgagagtggaaaatgtcctacagggggagcttgctgcaatctccttggctctttcgactgcaaaaaaccttggtatggaaagagtggctatccaatccgattgcaagactgcggttacaagtctaatctccaattcaatgccgatacaatggcattcctatcctatgttttttgattgtttgtcgaaaaagaaacaatttacagatgttgtgtttatttcaattagtagatctctcaatgttgttgcggactctcttgctaactgggcccgagttcaaaggaaacagttacaaggagcgctaagggaagtgacccccttttgcggccactagtttttcttctccttggtcttaatgcattttaattatcaaaaaaaaaaaagtgatatgatttttatttgattaaaattttgaactgtttgaatttctaaattagtaattttgatttaatttaaatataaaattaaacaacctttattgtg

SEQ ID NO: 127343 - DNA, 765 bp, Cannabis sativa
tattggagaaaatccaaccactaaaattctgatggagtagttcattataatcgacgttccctcagcttcgaatgccatgatgggcttactagccttatacaacctgaaggtgataacatccatctactacttttgcctaaaattccaaacaaggcatgatgtagatgttgagaggagaacaataatctgcccataagtgttacaacttggccttatccaaagcaaagaaaaggaagatgcatctaccagatcaaaagcatacaagcttcatgatagacttaggcctgtactgctacaaagtcatgcctttcaggcttaaataatgtaggggctgaataccaaaggcttgtgaacaaaatcttcaatgatcctatcggccgcaacatggaggtgtatgtagatgacatgcttatcaagtccaaaaaggctgggggcttatggaggacctagacaaatgctttaaaatcctttgcagctacaacacgaagctcaaatccaaacaagtgactagcaagtgaccaagagacttgcctgcatggttgcttgcagagtacccataccgtacaatgcatccaactaggataaagaacttatgtagagaacttttaacgcttaggataaggtactaaacgtgtttataagtcgtgcatgcatactctggcttgatgatcaagcttacacatggaattaaacacaaatatagataatttcacaaatcaagatggaggaatgacaattatgcattaactaggcaaaactttaaac

SEQ ID NO: 127344 - DNA, 739 bp, Cannabis sativa
ctatcgtaagagtatacaccttacgtcataataaccacatgatctaaaatcaatggtaaaaaaaagttccctaccggtagggaacttttgctaggtcctaccatagtcttgccctatatatatatataatgtgctgtcatctttattcacacaaaaaaaaatagttttaggtactagctaggagagagaaaaaacagtaaaagataaagcataaaaaaaaatagtctaggcgtattatatattagtgtaatggaagagtgaaatattatttaatttcagaatacatttcaaagataatataaaaatatatcgatatttgagccaataaaatagacagagaaaaatttattaatattttgaaaataaagtttgtatgcgcaattaattcaaagagtaataaacatttcatcatttaaatatatgaaaaattgtttagtggtgattttttaaaactactacccatagttaaaatatatttaagaataagatgacctattattatagataattgtttttttttttttaaaaaaaagagtggccgggaatcaaaattaatgtattagaataatttttaaaattttcacaatgacttaaattttcaaagtattgctataatagactacaatataatattctatgatgtgtgttattccacatgtcaaaaaattttaatccatgtcctcacatatacttttctataatcttccctattattcatatttgttataaaataatataa

SEQ ID NO: 127345 - DNA, 1075 bp, Cannabis sativa
aaaatcaaatttcccttttagaaactacagggtccatttggtcatttaacaaaacagaaggtccaattggtgacttttacaaaacacaaagtccaaaatggtatttacccaaaattctatgatccaaagatatagagatatcgtttggcaaaattgaaaataattttttaaaattaataggtatcgtttggcaaaattttatgttggattaaacctccacttgcactgataatgggcttaatacaaggatagaacagtaaatacatataaatccctattttgaccttgaagaaaacctagatctatatatacctgcaatcattcacaaccagacacggttgagagacattcttcaagatccaggagttaagaaccttgaagaagaaggagttgttgctctcacatgcacaagaaaacaagagagagttagtatagtgagagagaaagggattaaacactaaatatgtactaaaaacaagagattaccagtcgagaaattacctgtgacttggaatctccatccttgtacttctgaacatcattttatagtggaatcgagctctcaaatttgaggagcagctcaacggagacgtagccaaatttatttggtgaacttcgggaaaatctggtgttttctaaccttaatattttctggttttgtgtgtgtgtttgaggatacatcagatgtagtaagatctgatcttgtgtttgtgtttgatctgggatttctgggttgtttgagggtttggcttcgagtttctcagagagaaactctctgctagggtttcgatctaaacctaaggctgagggattgaatgagaaagttctcgaatcccttgttggttttgtctaaagtcaaaacgaagtcgtattgattctttctgactttgaaaagtcagagcaattaaaaggtcgaaattgaccttggtaaaactgattatttgtttgttggtgtaggccgaaattggaaaaagactaaatttcatacattttataaaataagttttttaaaaattgagttttaaaaaattaaaaaacagaatgttagactatatatatagtgtatgtaatatag

SEQ ID NO: 127346 - DNA, 593 bp, Cannabis sativa
acatgatactctcactcatccaaattttgtcaacttgactattaaaccaaacctagatgagagacttccttccttagtgatttcaaaacctcgttcattatttggattccttgtgaaaaataaagcaatttttgtttttacggaactcgattccgctaaaaattgagaaagttatggttgtttgaaaaattgggttcaatggtgtcgagcatggtgctcgcacgcaccaggtgttcggacaagacgcctatctacgcgcgcgtgctcaaaaatcttgtgtctgaagcccgtgtctcgccctgccttcagacacgcaaggctacatcccttgcccaccttatgctgcacggcccgaggatgcttggtcagggaggctgcaaactcccttgtacgcgcgtggacagggctacttgcagcctgtctgggctggacgtccagcctcctggcagccacactcacatatgcgatttttgtgggatttttccccaaatttcaaatattttcaattttcaaaccctaatttcaaaaataaaatattattttagtatatttaaactaaaatatcaatattaaattaataatatttaattttt

SEQ ID NO: 127347 - DNA, 1266 bp, Cannabis sativa
aatctagaaaataggagaattgataaaattagaactattgagcatggtattatcttaattaagtttggttcatagcactataaaaaactgctacttttagtgacaactttttagtcataatattaattttttgtgactaaatatgacttttagtcacaataaaaaattacttgtgactaaaatatattatttagttataagttgtcactaatttaattttagtcataacaaatattgtgactaaatatacatttagtcacaataaattgtaatttttatgactaatatttttagccacggaccttttagtcacaacataataatgataatttataattagccacaacttttttacctttagtcacaaattttgttgtgactaaaagtaaatttttttatagtggaggaacaaagagatcaagctttgactagaggatatgtgttttttgacaaaaatccgatagttatgagagcttggtcatcacatgagaagtttactaaatttgatgttgttaaaattctaatatggattcacaaactgcgctggcaaaaaggtcaaaattttaccagtgcacatttacagtggttaaaatataacttttaccagcgcatttacgcgctaggaaaagtcatttttgctagcactttttattttgtgctggcaattaaaagttctaatatcaacgttgatttgccaaccccttttgccaacacattagaagtaaattccattttagcagcgcaataccaaacttttgccagcacaaaaatgcactggcaagagtgacatttcttgtagtgatgcgagagtattggtggagattgcgattactcataagctttcgaaccaggtggagtttattaatgagagggatgaaacgcagatgggagaagtttattatgaatggaaaccattacattgtgaaaagtatgatggttatgggcataccaaagaagatagtaaaaaagaggctaaaccgctatggattcctaaaaagaagactgaagaagcagtgatagaaaaaggaaaagataagaaaaagggtgattttgaaggattcatgccagctaaggggagacctcaaaaatctaactctgctcaagtggaaaagttagaagtcactcctattaaaaatgcttttcaggttttggaggaaatctgaaggggaaaattaatagggaaaagttttgtgtgatttgggagttaaacaagggggggggggggggggggggcccccccccccaaaaaaaaaaaaacaaacttct

SEQ ID NO: 127348 - DNA, 1434 bp, Cannabis sativa
ggtaaaagttacttttaccagcaccgtagcgaactgtgctggtaaaagtgacatttcttgtagtgggtggtcccgatcttagattctcaagaatcggtaattattttggtgtgccgatttaagtggtacatgagttgggtttagaacttcgtgagacagttcagttcctttctaccgtttgaattatagggagaactacgaaaagccaaccctagtccatttttggggactagcccgctccccattacttaagaaagaaaggaataaagtaagataggaggcccgcgagtcgtattggtgactccaacaaatgatcattggagaaggcagtgtagggtttagtgcctcaaataatgaggctgagtttgaggaagtgctcaacgaccttcgggcggcactggaatggaaactatacgagatttttggttgagcaactttaagcttcttatctacacaagcaatcaaattgaagtcatggaacatgacttccttaggtctcaaggtgaaagtaaaacctattattttagatcacgacattcttcttttttttttttctttactttataatagttaaataatttatttatcaagtaaatatttttattatattcataaaataatattataataaacaatataatttttagtattatggttagaattaaaaaaaaaaattaatgctaaaataatactctattttagtgttaattttatactaaatttaaattttggcattagaattgcactagcatcattgtagacaatatgttgtagaggagtttgtagatacctcatattcttaatttatattgggtcatatttaggattaaatataaaagcaagccatattgtatttgacaccatataatttgttgtttcaaatttattatctcctaaagctatattctttggctaacactccattataagagttactttttttttctttgttatattttgtaatgaataatttgcatatttaaggaagagccttgatattaacatttctttgtcatttcaacttcttttcacaaagaaaatgagagatatttgtggtgagtgaattatgtgatccttgtctttttaattatctgaatcataatttattattttggtctgccactcccattcaagttaatgaaatttgattggtgagagaatgatactgatagaaccttcttaactatttcttgcaattttgcagcaaaaaagaaaaactattgttgctggaaaagcccagatcttcattgggccaacattttgaaccaaacgtattttaaaaaaaaaataataataataattacaataattacaatagacaccatttttttataaaaaaaaattacattttttatgtttaaaaattttttattacttttttacgatttttcatagaaacaacataaaaataacaacaaaactacataaaagtaa

SEQ ID NO: 127349 - DNA, 720 bp, Cannabis sativa
  modified_base (670)..(681): a, c, t, g, unknown or other
gtgattcgttatcgtcatatttatttctaatttattcaaaaggcctctctagggtgctgcaacacgaggaagcaattggaaatcttgaaggattgtgcctcactcgccatgcaccatcagtgtcacaccttctttttgcggatgacaaccttctcttttgtcatgcaaccaataattcagcacttactattcagagggttcttgatatctaccacaaagcttcgggtcaatttcttaacactcaaaaatcaatcatgtccttccttccaaatacgatgttgactgtccagaatttttttacgaggctttgggtatgccaataagtgagtgccacgaacaatatcttaaacttccttcttattctagcagggacaaaaaagaacttttcagcaatatcaaagagcatatttggaaacttcttaatgcttagaatgaaaaacttttctccattggaggtaaagaagttctttaaagcggcggcacaatcgattcatacatatgcaatgagttgtttatggttttcaaaatatcactgcaaccaactagacgcgatgatggaaaaccttcagtggggattaaaccaaaatgggtctaaaatacattagaagaactggaaacttttatgcatatcaaaatttgaagggggtccgtgttggaaattattttaccnnnnnnnnnnnntactaccatgtatgttttattaacaacctaatatgaatt

SEQ ID NO: 127350 - DNA, 1009 bp, Cannabis sativa
agagagagagagagagagcattgctggtggtggagcttgaacggactagagagagtgagaaatcgagagggagagaaactaagaaggctctgaagggggcttcttagtggtggatggcgctccgaatgggaatttctcgatggtggttggttgtcgttggttgggaattggtttcgtcgtcatcggtggttgtttggtgagagagagagagattgacgcgagaatgagatctgaaatggttttatattattcccatattagccgacgattaaaaaatgtaaagaatactatagccgacagtggacaaccgtcgactatagtattcctcatatttttacaccgttgactattctaattaaaaaatgaaccatttcaattttgtacctattttaaattgacgactattttcaataaatgtttaaaactgttgattattctccactataggttacgattttaaacacttaattttattagcaatggtaaaaaaatgatttgaaaactgaaaggaatagtagattttgtagtagtgagctttgctattggacactagtggtgtccaacaccttttataagtagcgtctcatgattagttaacgatattttctaataaaagttattttcttaagttatatgagacttaatacttaattacactaatagcgataagatgctgaggagaacgcatgggtaccaataatatctttttagcaattttctttgtagtagtgaatgttcctattaatagaaaagacattcaagatgtacaccatacaatttgtgttagatttttctcatttcaaaataagatacttatttttatagatcatggttggtttggtcaacttgttgatagttataaaattgattgtattataacgttatgttttgaataataatattattttcattgaccaaaaagaaactttggtctaattaaaaaggctaattaagatttttactctctgaactttaacatgtatcaaattatgccccttgaacttttaag

SEQ ID NO: 127351 - DNA, 1390 bp, Cannabis sativa
  modified_base (40)..(59): a, c, t, g, unknown or other
aatgttatttctgagctttattaataagtaaatctaattnnnnnnnnnnnnnnnnnnnntagggcacaaaacccaacagatgtcccaatctccattctcaagcaataaagcatcaacacaaagatcattggtgaagaccccgccttttggtttcggggtaaaacctttcaggtgaggaatccagggatccctccaaatgctagtcgcccttccatttgttaccactttacaagcccccttccgtaaaatggatttggcttttcacgacattcttccagaaccaggagtcggagtctttgtagctacagctgagaaactccttcccttttaaatacttggcttccaaaattttgcaacataaagattgagagccttttagcaatttccaaccctatttggcaagaaacaccagattcgttattaccacaattttataatagtatggtataaaattaaaatttgtgttatattttatttatatataatatataaatttaaattttcggagtcatctaaaattatgagcctagagcctaggtgaacgatgcttcactctcttgcgggccgtgtctctcttggttaggaatatgtaataggctgataagtacagttcaatgttcataggctgccactacaactactctactttcaaattagcaccgtaacgaaacaattaatcattataaattagtctacggaccctcccttcaaagaaaagaaaaatagggtaccgtcatataatatcttggtcaaatgaaagagattaattcaatttcatttattagctgtgtgctatagtcaaattttcattgatatatttgttattatgttttttgaaaattaccttattatatggctaagagaggtggcctttattagaaaagtgttcctgagctgttttttctagacaatttattcattaaagatgcttcagcttactaataaatatttcaagcgcttgaccagttgatcgatctaacagatatataaattcgaacttaaaacactacttgcaagttgcaatgaaaccttcaagtggtagacccttattaattttagacaaaatattaatgaacctattggaatcgtgcttttattaggatttaaaattttgatccctataacatttgtgaaatagtctaactaatatactaaagttattattatatttatatttattacacttaattataaatatgctgcaactaatcaaaatctatatatatatatatatattttttttaattttttctaaagaaaacgacggtcctctctcgcctcaatgtagtcccccatgtatatatttatatatatatctattctatataaggtgtgcctatatatctgaattcttggtttatgagaaattcatgggtgtgactttttattt

SEQ ID NO: 127352 - DNA, 810 bp, Cannabis sativa
gggacctaatcgcccgaaaatcaggttcggctacacattttaaacacccgaagttcgaaaacccgaacccgattatccgaaaacccgaaaatctgacccgtgtgcagccctactcagcataggttgttgtatcatttgtagtaatcaccaaatcatgcataatcttggcattcaagctcgtcaagtatttttccttcttgtttaagtctataggcactatacccaaaacttacttggctagtcgatcaaacttggttgtatattccattactaacatattctcaccttgaaccgaatcggtgaactctcttctcttggcactacgaactgcttcaatgtagtatatggaattaaatagatcccaaagctcttcacaagtcattgtagtgacgtcacgagtgagggacaccatttcccaccgcacaagggcatcctcctagaactgaaacatggcacaggttactcagtcattcccaataacaccaataaagttcaaaattctttgtagatccttccggttccgaaaaaagctgcacgacaaccttttccactagtatttagtgaatttggacaaggtcaatgagaaacacatacattttccatcttcagtgacttgtgacacatgacttgtgacacatgtatcaacctattgtacttggacaagtgggccctggtgataactcttgaataaatagttatttgtcatatttttttagcttagtttgtatgtgtattttacttatatttagttcttttcctcccattttgtgagaatatatgttattttgtatttttatgttcttttgggta

SEQ ID NO: 127353 - DNA, 3901 bp, Cannabis sativa
cttattctgtggaagtccaagtcttctttaactttttgtgaaagtgaataatcttgaatcgatttttcaaattctttaattaaattgacttgcaacaaaatttaacgaaatactacaaaataaaacctgttatagtgcgaattttttgcttcgaaactcgagaccaggctcccataagagtgacacatgggctcacatcccttgaggattgctaagctgtcaagaagggactcctcgagaataaacctcacttgaactaaactcgtgagatgatgtgaccatgacagagtctagtcacattattacgcttcgcgtattatgaaataagtaggaccaagaagagtttatacaggcagcgcatatccttagatatgtgcaaccattaagtagccttcacctgggacctagtgaagatcacttctttacataatgaattggtccaaatgacccagtgtactcgatgactcgataaggacttgcatgtcctatgttatcaatgcatataaggtctccatacatgcatcttgaccagaatgtagataccttaatacaaggcctattagccctctttagaatgataaaacacacctcaagcatgcgagcttgtgcgagaatatgaacatacaacttgcaccatagaagtcatatacgttgctgtattttgtgaaataactttaaactattcttcatttattattttacattttattataaattaatgttaatatttaatgtaaaatggttctataaccgattgagttctgtgtaactaaaatgacatttgctttgtatataaaggagtgatccaacatgaataaactaagacaaaaatcttttgcagtagtggactaagcagaccgtgatctgactgaaccactatacatctttgtgttcattgttttttactgttcttctattgtctgggtagtctcattcgaatactcgatattttaagttgagtactcgttgcttttttattaaatatttattatttactttctatttggtgttgtccaaaatctttcgacaacatttggcgccatctgtgggaaatctctcttttgattttggaggagaatcaacatggctgcgaaccaaacaaacggaaacagcaacactggatctttcaatgtcagaacgatgaatgtcccactcccaagtgatagaactgatccaactgatacaatcaatgggggtgtgggacagatcaatgtcacccctctcaatctattcccagaaattactagtcatgttgggaaaacatcggcaccagaagccactgtgggccactttctgcctactacaccagtcgtagtctctgaaggtattatccagcttatgacaacacaatacacgaccatgcatgagcaaatatgggcattacaggctaaggtcgagggaagagtcaggatcgatgtccaccttatttccgaatacgcgttcaggcaatcctcaggtaaccaccacagctagacgacgaaatgagcatcctaacaataatcatattcgtagggaaagtgtgaacgaacaagaaggtctcgatctaaaccagcccacacataactccgtgcgaaatagggagtcgattgcacctgatgctagtcgtggaaatgctggaagagaagacataccacaggagaaagaccctgaacggaaaaacccgcaaagtcgggcccaaccgcgagtagagataaatgaagttgaatctcactcttcttctactaatagtcactctcctagtatttatactaggtcagggtctgtcgagactcgatggggaggtaggtaccatgtgcatagaggcaatcttcgcgatcatctcaatgagatttttcagagcgcaatcccagacaccaaggaatctcaatgatgatgagccccatgatccccaaatgggcgatcaaggcacgcaaaatgtgaacaacccaactaatccaatcgacccgtcgatcgcaccagctacgactacagaagtaatgatccctgccaacatactcgcagttgctgctataccagcggcaagccgacaacatagaccaatcccatcttaccagggaaattaaccaagagagactcttgcgagcactaaggatgatcgagcagtagagaaatcccatttataagcttcatgggacatcaccctttacacaggaagtgcaacaagcaaggttcgtgaaaggctttaggctatccaaattgctcaaatacaaaggtactactaacccaatcgattatttagataaattgaatacgattatgaaagtagaccaggtaccacaactagcgaagtgccagatacttgtcccaactttagaagataatgctcatgattggtttagccaattacctgaggctttgatatcaacttgggaaacctttatagacatgttcttaatgcacttccaggccacgatgacgtacaaatcgttgtacacaaagccagaaaatattaagtaagaattcggtgagtctttacaggattattttaaatgttttaatgctgagataaccaaggtcgacaaggcccccgagtcttcgttggtctgtatgttgattacaggtgtcttgccaagaaccgacttttggaaagaattacaagcgcgacgacctaagtcattggttgaatttttcgctatggcagaaccacataaaagaattgagaattctttagccaagttggaaagaggaaaggagaaatgtgagtctcttgttcccaggttgcattcccaaagcttcagaggaaagaattccaggggtcaaagccccaaaagatgcagtccatcaaggcgacgaattgcaaagctcgccaaatcccccactaaaaaggaagcatccccgaagaggaaagggggtccatgtttcgtcaattacaccgagttgtctgctcctcgcgaccacatctatgtaatagaggagaaaaatggcatttttaggaagccacctccaatccggggtaatcgcgactagagagataccaagaaattttgtaagtaccacaaagatattggccatacaactttggagtgctgatttctctaggacgagactgaagaattgatcagacgaggaaaattcaaccaatataggaagaatggagaaaatcatccccgagcggatgatagcaataatacgaatgatgcgagtggatctcgagcccctcgtaatattctaactattataggaggaccgcatgtcggtggagagtcctgaaaagcgcaagagcgctatgcaaaataggcaaaagaaaaaccccttactaatgtaaataatttgagtgaatgactagaaaagctaattaaataagaatgcgatgacataactttcatggaaagcgacacgaggtgggtacatcatccacatgccgatgccctagtggtagtcgctaagatcggaggagataatgtacatcgtgtcttagttgataatggaagttccgtcaacctcctaaatttataggcttttaaacaaatggggttgcatggaaaggacttgtgaccagtgacctcgagtatttatggtttcattaaagatacaatcacattgaagggaatgataaagttaccaataactctagggactgcacccatcactaccaaatcaatagctaattttgcagtaattgatcaacattctacctataatgcagtgataggtcatcctattcttaaagaaatgaagataatcaagtccatctattatctcaccatgaaattccccacccatgcgtgtgtgatcagtgcgaggagtccaggcagactcgagagaatgttataatccgcgttgaaaattgcaaaaaagaaaaagtcggtaaaattcatctatttgctcgaggctcctctgttgggttttatgccctaaataaaactcatttcaatataaacagatttacttattaatatag

SEQ ID NO: 127354 - DNA, 756 bp, Cannabis sativa
  modified_base (705)..(729): a, c, t, g, unknown or other
aaattaccttagtaaacctgttatatcatagaattaataataataagataatcatattaagccatattcaataaatgcaattgaaatcgaagccctagtttttattaactgttaatttccttaaattgtttctcctttcactgttttttattattttctagttttaacctattcttaatttttatttaaccaaatagaaaaaaaagtttaattttaacgtacttaactacaatcctcatgggatcgaccttactcttagtgagtctattacttgtaaaagataccatgacatcatgacctcccaaaaaggctggaggtgcttgcttacagaactgttcatataaaggctccacgcggttaccaacaacaggttgttttgcttgctccactaaaaccaaaatggttggcacttactgaggatgcatagaaggaagaccatgttgccttagcctctgaatctcttcatcttaggagcatgtggtggattttcataaacacctcttttgaatctacattggcctcttttaagttcacggggatgtgggagattttaacctccctgactgcctctggtctcaaccatattgccctaacttcttatgttttatcgggcgtccatattaaaagacttaacctcgaacccataagtcaggtaggtgtaacaccttaactagaatagacgtgttacgtgatttttaaacgtannnnnnnnnnnnnnnnnnnnnnnnnaggtttatggaaatcgtgattaattaa

SEQ ID NO: 127355 - DNA, 1423 bp, Cannabis sativa
  modified_base (671)..(680): a, c, t, g, unknown or other
tcctaaaaaaaaaaaaaaaaacaatagaataaaaggggtgagaaagggagagagttgaaacttgatcacacaacaacaacaaaaaaaaaagcaccactagtttatgatttaagtagtaagtttcaccttttcttttatcccttttttcttttataaaatatttgtggcctttttggtttttctataatttccagataaaaacacacaagcattttgagagagagagagagaaacacgattgtatttttatttataaagatacgatatattattgaataatttgtttgaaaaatatataaaagcataataatgattgagacagaaaacgaaaagggggaagagatattgtatgtttgaataaacacttttttattttggtcaaaaaggtgtgctacggtttcttcaactctaagcttaaaaataatatatataatatagagaaattttaataatgcacccaccgatacatctttatctgttttagtatccgaaataatttttttgtcaaattttttctcatagttatgtaaattatttaaaacatcctgcaaaattttgagaaatttgaaaaaatttaatacgtcgaaaattacgttagcagtgtgttgcacgcgtggctattttattttatacgcgtgtaaaatattctgtttgaacattattttctatannnnnnnnnnttctaaatttctcaaaattttatagggtattttaaatagctataacttacataaatataaaaaaaaaaaaaaaaattctgaatgccgaaacaagtaaaaagtctatcagtacataatttatatagaaaataatatttaaacagtctatttaaaaaaaaaaaaaaagtagccttttgggtgataaattttcatattataatttatatacgtatgtaaacacgtaccattgaggtgattagtcccatattttcatacaataataacataacttataaactaattaaacattcatagcaccaccaccaaacttctcgtatacattaaactcaagtcattttaatactaacgttgttactgctttttgggattaatgtttggttcactctggttattaatattgtgtcacataaattaaatataaaatcatatataaaaatataagttagtctactaactatttattgattttaagattacatcgtattatatatattatattatatttttaatgaaagtatattatgttttatattaatttgtatgtgataacatgcggtgcatatttgtttagagttgtaaactatgtgtatatatagtactaattaaaataaaaatattgtaaatttgtaacttggagatataattttgtcccgtgatatacttttacggaatgtattccgtggtacatttgatgagtctcatggtacattaaatgagtgtcagggttcgtttctactttttaa

SEQ ID NO: 127356 - DNA, 1252 bp, Cannabis sativa
  modified_base (1219)..(1226): a, c, t, g, unknown or other
catttaggccataaagctttaagtatgaaatgctaatactcctcctctctctcatacacgctcaaatgactctctacctctctctctatctctctcacatgcctccaaggtttgatctctctctcattagatatctgcctactaattcatactttgtaaccttaaagaaagatatcatatcttacctataatgatttgaatagtattatctctaagtattaatataactaaaaggaaagtaggtcattacccgcttactaagggagctgaatctctataaaagtccttatcttatttactttattgtttttattgtataagacgtgacaaacatcatattaatatgacctcgttgtcagttggccactttttcaagattaacaataacatacttaatttcaaataccatagattaatggctatttacactcccattatgtccttaaaatatatcagtaatactttaaaatatttttgacaaattatttgattaatagttaatttgtatattttcaagcgaaaattaattctagtttagtatatacggaattttaattaattattacatggtttttttgggtaagtgagcaaaatttattgataccaaataatacaagtaaaagaaaaaatgcccatcaacaaccaactgcaaagcaaaagggaaacccaaaaatgactcacaaaaagtgagtctcccaaccacctaaacaatgcttagctaccaaaactaatctatatttgcagtttaagttttggaagtaatgaattgactaatccttttatgaactattcactttacatttttaaaaataatatctcttctaaagactaaagattttgtggtcccaaaagacaatatataactacaaaaaattggatcactaacgaggacacctataccgaagacatgtcattattattgctatttttgcaccagcaggaaaaatttgcattttttttggtgttaagtttttgtactgtggacatgtcctcggtattagttttaccgatgacatatcctcggtattagttttaccgaagacatttttatctccttttatttttcagctgctttgtcttctccaaactcacataacctgaaatccccatttcagactagaaaaccctcgctagaaaacccaaaattggagatcgtccacctcccttcccgacgttttcttcgttctccaacgtctctcttgttggaaattattttacnnnnnnnntagatatactcacaagtatgttgatt

SEQ ID NO: 127357 - DNA, 638 bp, Cannabis sativa
aactgtgtagtcccatacctacacagtcttagaatcattacactcgaccttccccaagcgatgtggggttgcacagcttacccggtatttctccttatggatcacgggactactgactgtcacaatcactatcaaccaataatctggttgttaatgtttagttagttaatgcggttatgcaagttgtattgttagttagtttattatctcatcttgtaccacttatcagattatatgaataaaggctctaaactaactaattggttaagcttgaaagtataaatttgatgttgattttgatttaggattgatactagtattgatgtttgttaggttggattaattgcttatagtgatcttgatcaaagcttgatttttggtgtttctaatctactgtattgatggttgtggttagtaaattataatttctgagtttgagcatgttttgttgagtttttggtatgtttgggcttgagttttggttgctaaaaattggtattttttgggtttggaacccaggtgctgcggccccttctatgagcgtcgcgacccgcccccttgaaatcctgggtgtttcaacccaggtgttgcggaatgcttggggagtgtcgctgtaacgtccccgcttcaagcctcca

SEQ ID NO: 127358 - DNA, 1388 bp, Cannabis sativa
ttttatttaagtcgggtctggtcggggtccgaatctgagtttcaaggtttaggttggggtgggagtccaaaatattaatataaaaaaactatttaaaaaattttgaaaatgactttttttttgtttttaaattttttatttttaattaaaaaattaaaaagtaaaaacggttttatataacatgattttagaaattatttttacttttttaattttaaaaacaaaaaactaattaaaaaagtgttactaaatgcaccctatattattctataattgtacgattgattaaataaatgttacaagttatttggtactgaagaggaatatttaagggtgtatgtttattaaaaaaatatattagaaatatataaagggtaaataccattttggaccctgtattttgcagaaatattaattggaccatctgttttgttaaatgacaaaatagatcttatattttccaaaatgttaaaaataggaccctaagctcaattttaaacaattttattttttaatataaccaactttaagatactttttaacacaaacagatacgaaaaatgtaacaagttttgtcataacatctttagattagattattattaagtcttattttcacaaaaaatcaatttagggtcttatttatacaattttgagagataaaagatctattttatcattactaaacagagagttcaattgataatttttacaaaacacagagtctaaaatattatttacctctatatataaatgtgtgataaatatattaccaagaacgtgagtaaaccaacttatttgttgggcatgagatgcatgttgtatttcacacacttgatgtattgttcttgctttctttctggtaattcatgttcttagcatgtaattattatgatacatatttggatgatccatatgaaatccaaatcatctaatatttggatcactgattttcctttttattatgtaaatatctttgatgtattttagctgacttacctaacccatcactataacgggtttttcttttaataaattccttatatataaaaaaaagaatttaggaaaaaaaaaaacattgtaattaactctcattaaagggctttaaacattaataaccgctaataataaagtttggatctcattctaaagacaacacattttttttttttttttttgaaaaaaaaggcaacacaattagtattagaaactagaaagaaagaataaattagaatcaaaattcaaaattgttctttaaagaaaaagaaaaaaaaaaaaaagagaccattttcaaaaggctaattagtaatttttccccctaaactttgacatgtactaaatcttgtcctctgaactttttttgccgttaaaaattcccccaaactatt

SEQ ID NO: 127359 - DNA, 908 bp, Cannabis sativa
atttagtttttacaaaaattgaatttttaattaatatatttttttaatatctaaatgaattttttaataaaaattaaataatttttttaaatcgcttcattaattttaaaattttaatttcttttttaattttcttaatctttcaaaatattttttttaagatctaaacaaattttttaagatttattaaacaaatgttgaatttttcttatttttattttgagggggtacgatttaataattgttaaagtttaaggggcaaagttgttactttacaaagacacgttagcatttagatgaaataatagaacgaaacctaacagaatgattaaatttctgtaaatgtaaaagttcaggaagaattctaaaaaagccatatattttaggaagcaaaatcaatattgtcagaagttcaaaaggcaaaattgttaataattcttttcttaataataaagtaactattataggtgtggatggttattatatcccattacttttttaaaaagaaaaaaaaaagggataagcatcagatttatataaatactagaaaataaatattataatgcatcaaattattttcatattgaacaccagcaatagaaacaatccaataaattagtagtagtataaatatggcagactaattccaccaaaaaaaaaaaaaaaaaccaaatttttggcttttcaaaaattggcttctacatctccttgattaataaccctttgatataatatatttttaaaattgattaataatttattttaaatcataatacgttgtaattacaaacttcctcatgggagaggtttcaatggttatatttttattgtaaccatcatggttacatttgtttaaaccattggattactattaaatagttgtaattgatttagaaattaaataaaaa

SEQ ID NO: 127360 - DNA, 1263 bp, Cannabis sativa
  modified_base (1141)..(1166): a, c, t, g, unknown or other
  modified_base (1214)..(1219): a, c, t, g, unknown or other
ttgattgcaatctagctaggctatctcatggtttagcaggctgttctaatagaatggacactaggcgaaacatgagaagccaaggtaatagggttggatctggtggcagtcaggagttccatttcaccctaatgttcgtggccgaggtacaggccaaaaaggtagggaacatggtcagggtgatgttaacccaccataagtagcctaggattgggagaatagggttgctaaaatgcaatctagaattaatgagcaaggtgaagagattcggcatctgagacagcagggtgctcctaaagtgcagattgctcttgcccatctttgtatgtgggggtgggttatcattgccaatcgaatggaatcactttatgaaaaggttccgtaaacaagcacctctagtccttctaagaggcctacgcgttatgaaagatgagaagtggctaaccattatcacaaggatttttaattttacgggagtcactagcaatgacagagtggcttatgcaatgttccaagtctaggaagatgcctagtttggtgggaaattgtatcccgtacccgagacgtcactggaataaccttggaggagtttcaagatctgtttaatgcaaaatattttagtgaggcaattcgtagtgccaatagaaaagaattcacgtagttgacttagaaggaaaaatatgtcaataagagagtatacgacagagtttgacaaattggaaaggttagccttagtaatagtactaacataatttagtaagaaagagaagtatctagatgggttgaataccaagattagacacgacctgatgattacaacagatgatgccaccacttacgctgatatggtggggaaagcactgcgagctgaaggagcagttgagtttattcaagagtcttgggagacccaaattgttggtggagcatctcctcctcctacctctacttatggtaagggtggtagtgactcaaccactgatcataagagaaaggttccatctgcgttcggtggctcaagtaagagcaaaaggttctaagggaaccatggttgttgtaacaacgattagggttgttttgatgagaaaccgatacacttacccagaatgccccaactgtaagcaactgttggaaattattttannnnnnnnnnnnnnnnnnnnnnnnnnatgttgattaacaacctaaatatatactttctaaaacgatgaaataannnnnnataaagtttaggaaaccttacatagggtgcagcggaatataatg

SEQ ID NO: 127361 - DNA, 630 bp, Cannabis sativa
tgtggcctaaattttcaaaagagttaaaatattatataatgaaagtaattattatgagatggaaaaaaaaacatgcagagccaatatagttatacaatcaattcttaaaactattataagatggcaaaaaaatgcatgcaaaataaatgtgggtgtaaaatttacttggctgaagttattagtgagaactaaggaacctgtgagaaatttttaaaagtgtatataatttttgtaatttttatatcttgttaagaatgatacacaaaataagaaaaaagaaaatacccccaaataatcaaggttggaatctatgaactgacaagtattgtaaatatttaaatggtgaaagtaaaagacagctaaaattgtgactgtcgaaaaataaagatgaatgattagatctttaagtgttcaagcaacaattcatcaatgaaaatagaaaaatactcaaaaccacattaaagtaaactataccatcattactgtcttgcatttcattcataattcttctcattctattagattggacatacatttaaaatactatatgaatggattagtaaagaatttaacttacattgtcgtcatgttgaagtagcttagatgaaagtttgttcactttaatggtgt

SEQ ID NO: 127362 - DNA, 670 bp, Cannabis sativa
tgcgatagaaaggagcaagggttagagatctgagtagaaggagtcattatattccgctataatcgatgtaaggttgtttaaactctcatgtgtttaatttcattgttttagagatattcatatttcggatgttaatcaacatactagttagtaaatcttgatcctagtaaaatattcccaacatgtactagctcttttacactctaatgttgagttggtagaactgctactttaaagtaggttttgtaagttgcttacaaatagtatttgtgaaggttctctccattccaatatattggtaggaaaactagctccattttcttgttgtaccatcccagcttgtaggctaccttactagttatctctgtaacttgataggggccttctcagttgggtccgaacactcctgttgtagaatcattgctactcaggaacactcttaggagcactaggtctcttatgaaggatttcgtatccttgacttgattatttaagtgtcttgctaccttttgctggtaggccgatagctttaggttggcttgatttcttttttcttctactttgtcaagggattctgccagcaagatgttgtttgtatattggtcataggttgtcctcctgtgagatggtggcaccaattttacaagcaacatcgcctcatagccataag

SEQ ID NO: 127363 - DNA, 1174 bp, Cannabis sativa
aaatacaaggtccattttgtcatttaacaaaacagtccaactgataacttttgcaaaacgtctaaaataatatttatccaaattacatcattaaaatctcaatttctctgttttactttaaatttttatatcagagcacttacattagatgcttaaaatagagattctctaaaataattaaatagctaaattaaaaatacgttacatcaaatgttctaaactagttctttatttaaaatttctttaaaattcactattcatgctctacatttataaaacattattcattaatctaaacatatttagtaattgtttgagagttttaattttaatttttatataggaatatgtgtaagtattaatattatatgtttcaaataaatgaaatatattaaaaaaaaaatttacaaaaaaagtagattgatgtattttgaaaatttgatgtatagtgtactataaaagtttgaagtaaaataaagaaagcgaaattttggcaataagagtgcttttacatcatacatcaatttttttaaaatacatctaaaatttttttaaaaaatttaatatattttagtcatttcaactatataatatcaatatttatacatattcttatataaaaagcaaaattaaaactctaaataattaataaaatatacttagaataataatgttttataaatgtagcacataaatagtaaattttagagaaacttttaaatagcgaatgagtttttatttttattttttaacaaaatagtaaatgaatttagagcatatgatgtagcatatttttagtttagttcattaaatatcttaaataatttctattttagagtatgttatatgagtgctctaatcttgcaaaaagcactattcatttccttgcatactacaacaaccgaaattaaatagaagttgtaataaatttaataattatgaaaaattattaataatacaaattagtaaagtgttataattataattaatttactaaactgaaaaaggaaaaaacagaaatattaatataacttataaaacgttagaattataaatagaactatatttattttggaaaatttacacagtttactgtgttttcccattttctttcttttatactgttacacgcccaaaataacttttatactgtttttttttttcgaaattaact

SEQ ID NO: 127364 - DNA, 584 bp, Cannabis sativa
ctttgtacgggtcagctagatttggaggggctgaaggatcatcattctaggcagaaggagcctcaacattttgattggtcggagaggtggaagtggtcgcctcgggatccccgtaggccgactgagcagtgcagtagtcgagaaacatttctttggaagcgcccagataatcaaagtttaccctgggattagccttccaaaagtcataaaaaatctcgagactagctgtctctaaggcattcaccttttccccgagcctcaccacctcagatttttggttattaacctcggcctaaattagtacagagaagagtacggagaccctctcttttatcttgaaggctggtaacgtcccgagacaaagaagcaacatcatcctcgagctgctcgattgatggcatctcctggaattcccttgttagctcggcaactttggtctcaaccgctagaagttttttattgacgtctcctagttccgtctgcacagtatcaagttgagttcgcgcatttgcagcttcctttcttgccaagtccacatccctttgcagtgtgttggaagtggcaagattcttgacagcagccga

SEQ ID NO: 127365 - DNA, 877 bp, Cannabis sativa
  modified_base (820)..(836): a, c, t, g, unknown or other
actgtagcgtgccttagcattagggcgttacagtaatcttttggtaatttgaaattttattgaggaggtaagacttccttatgatttctttgtcaagctgtagttaaaagatctaagctatgttaaattataggtttatttttgcacttagagttgaaattaatgattaaactcttgtttggtaaggttattagctgttgagttagtattagagaggtttaaatggagatttaggtttaaagctcaaactcttcaatgttggattttgatacttgagattaaatatgttttgagctgctagaatagttatattggtgaaatttagttgttatgaaagttttgatttgattggactggtatggaaggaatgaacttgaaaatttttgagttagtgaaccaatcgcacaacaggtcgaccagatgtaggaattgctgaactagttgggtcctagaaatccagtagacttgttgggaaatccacgtggtaactcatttttcgtgtttttgggacatttagggtattttcaccttattcatcaataggaaaacattcgattatgtattttagtattagaaagtgttttagagagacacttacctatttaccggtgatgtgacttagggactctatttgtcaagcagggttccacttagattgactagaacactagaattaataagaaataaggtaagaaaatattcagatgcacatatgcacatatttactaatacatgcatggtatttgtatttatctatcatattagagataacagtattcatgtacataaacgttacacttgttggatatattttaccagnnnnnnnnnnnnnnnnnaagtatgtttcattaacatcataatatgaattctaaaacaa

SEQ ID NO: 127366 - DNA, 818 bp, Cannabis sativa
ttattaattacagaataaaaagaagataatcctctcttataataagtcttcttgttaacactataaaaaacatatttttaatgacaaccttttaattataaaatataaattttttggattatataattttagttacatttagttacagacttttcagtcataacataaattattatttataaaaacaaaaatatttgatagtattattggagaccagttagtgaaaatattcatttactatgaaccacaaatttcatcaccatataattatgtatagtgtgcggttgttaatgggggaccatatcactccggctggttctttagatagttgagattccaaaacattcaatatattattattacaaatttctttcaattatttgagttggacataaaattaaatttaaatttcttaacaaaatttagtaatagagacaaaatccaaaactcattattgattatacactctttattagtggagctcaatttaaattgagaagatgagaatcaatgaatgagtaccggcaaagttatttatttatttattttttttgaaaccgtacggcaaagttattaatggctacaattcaatggagcgttgttattggtatagcactttataattaattaataatatttttaaattttatttttttattatttaattatactaatttaataatttttattacagttctatattaaattataggctaattagtaatttttccttccgaactttgatatgcaccaaatcatgtctcttaaatttttttgaccattaaaaatttcctctgattgagattgttagatttaag

SEQ ID NO: 127367 - DNA, 865 bp, Cannabis sativa
aagggatgtagccccctcatgtggctactagttttctttgctttcaataaaagttttttacccataaaaaaatatatatatatataactaaaatcagtttgcctaacttccccttaaaattcgtaatttattaaaagcttaattcctctaaaattgtaaatttgttgatggcaatgatataattgttatttctttgtaaaaaaaataatgaaatgcgattacattcattcgtacttggtagatttgtatttctccatttatacagtgtaatctaaaaaaaggagggccgtgcacagtggtaacagtgcctttgtgcacacactaaaagtcggtggactaatgaaagcgaaacactattcctacagaggtatgatttggccgcgatataccatgtaacttcatctatgtttcaggcgggtatgacaatgaagaaaaagaaaccaggtatgatttggccttcatctatgttcctctttattttgctgatacttaggccataaaattcttctaggcctaagagatttaaagtgattcttcattctttaatgccttactatactaggcatatccattaaaaaatactctgtaatatatataatataaatatattaatgtggaaaatttagctctgatacataggaattaacttctgtaattctaaattcaagatcacacttaaacaaataaaagttaaatcacaacaaacaaatcaagaacaaaaaaaccaaaaaaatataacacagatgactctaaatggcagttagacacaataacacagagatttatactggttccgatcctaagttaaatgtgaacttggtcatactccagtttgaaagctttaccaccaatctttattgataat

SEQ ID NO: 127368 - DNA, 1847 bp, Cannabis sativa
tgttaaaatctcattttacaactcataacacataaaggccaaattactaaaatgcccttagggccaaataaccttcacataagcatacaagggaaaaaatggaattcatgcataataaattccaattaaatttcagattatcaccaataaataaaagtgccaattatttcaactccaattgcatttccgggttcgggccgaaatacccggttgtgactataccgcgccaacctgccagaacagaacacgaacacacctgaaaaaagataacacaagcatactatataataaaatagttctattaagcacgtaattaaattaattttgttattttacccttctcgggtcaaaattataaaatgcacctggctcaccaacggggtcttaccatgttataattcatattaattcacatatattgaactatatagtaatataattcctcaattattcataattatctaattagggtttcgctaatccacttctcaattctagggtattacagaaagttcatcatttatatgtgctaatcctacgttgcaagtttctataggtacaaaagaggttcttggcagaataaattctccagctttaagtaagatttctcaatcttttggtgaggtataaaaatccataccaatttgtcacttttgtggtgtaaaaggtcacattcgacctaagtgctttaccatgaataatttttttaaaatctaatttttataaacaaaatagtatgagaaaaagaagtttttccagaaatatttgagttaataaaaaagaatctaaatgtcttgctaactttacttgtcataatactcataattctaacagtatgtattttgatagtgggtgttctagtgggtgttctagacacataacaagcaatgagcacatgctcactgactttaaacatttgaaaaatggtgaagtcgcatttgaagatagtgtttctggtaaggtgcttggtagtggtactctaaaatgcgagggactatcaatgttgaaaatattcttttggttgatggacttaaggttaatttaatcagtgtaagtcaattttatgagtaagacttatttgtaaaaaaaaatcatgatgattatttcgtgcttcaaaacgatgggaattgtgtgatgaaaagttatagatcagttgtaattactacatattgtctcattcacacacttgtcacacttacactagagagcttgtgaaaaataaaattcttgtcttgaaatatgttgaaacaagcaagcacattaaagattttttactaatgttcttaattcagttcgctttatttctctaaggaagtccttaggggtttgtaccgtttaataatctattcttgatggttcttgatattttgctttgacttgatgtatataatgttgttgtcttttttttttttttgttccaaaagaaagtttcaaactgaattgcatattattatttttattgctaatttttggtacaatattttcatacaggtttagttcaggaaaaatatttcactcctaggaatatttgagtacttcaattagtattatgtaagctaccattttcgaaaataaaataaaaagaaaatgtgtgtttaagttccattgaaagaatagagcaacctactttaatgtgtgaaagtcgtcactgagtaagatagtaatatgtaattaggtgttatgtagatgatatgctaccattaaaaatggctactgttgaggtagtttgacaacgtctcctttggttacaaatacttagaaaaagtctatttcacaaattaggcaatgttgagtgcttacactttcacacacaaatgcttgacagatttttgccccttgaactttga

SEQ ID NO: 127369 - DNA, 1072 bp, Cannabis sativa
tatatattatatgtatgtgtgttgttttgaggagagacatagctcatgcaaatggagcaaaaaaggtatagtagctgaataaattttgttgattaatattaaactcctgctgggaagcttcaatgttcataaaatatttaactaatttagtttggggcaacacacaaaacatcatcatattatttatagggtttatatatatatttggtgtcataattattgtggcttaaaatatgattcacatttaatagtcagtcttccattaaaaaagcagattgtttaaaaaaatatatgaaaacaacaaaaaaaaattacaaaatatagttatataaaattttaaatattgttatactttttaagatgttatctacataaaatatattattttgatatatttttatgttgtacttttgttattttattatttatatattattttttatgttattttatatagtatttttattatttttgtgttatttttatgaacattgtaaaaatgtaaaaaaaaaaatcggtaaaagtgtaaaaaatttattaaaaataataatttatataaattttccttaaaaaaagtcagccccaattacaagtacagaccagccaactagtgagtggcccaagctcccttagtaaggcccaatatgagcccataatacaaaggaaggcccataggagactttaagtcttcctttagtaattgccatttagaattttaggtaaatgtttacaattttatcctatgaaatttttacaaaaatactatctttttataaaacagtcttaaaatagaataatttaaaacaatcaacaattacaaaacattcgtaaaacaaaagtgaaaacttaacacagtaaatattttaggatttaatcgagttcaaagcataaaataacaaaaaaaaaaggggggtgcattgtagaatacaaaatagatattaacagtaacaaaaattgaaatttaatattgagtgattgtacaatgtacttccttaaaagggatgtactgatgcacccttgacttgtttcggcatccagaagaattttttaattttttattttttttcatatt

SEQ ID NO: 127370 - DNA, 1321 bp, Cannabis sativa
aaaagaaacaaaacattaaaaaaaaaaaaaagaatgaaagagaagaaggtggtagagatagagtgtaatatgggagaaaacccataacatcagcatgaatgaaagagaagaaagtagatggagtgtaatatgagagaaaacccatgacataagcatgcatatgtatttttataattatcaaactttatttaaaatataaaattgaaaaacaaatttttttgaaaaatgtttaaataaccaaataaagacaaaaatgtaaaaaaaaaatggtaaaataagacaccaagtgtaaaaatcccaccctggtagatgggataaataatcccagacagatgaaattaattagattagttatccagacttctaacatgcccaaatacttgattggacaaattagcttgtctaatccaatccagtcctgcgtaccaaacattattttaatattacaattagataaagtataagtttagaactttaagttattatttctaatatagagatttatagcatttcattatgtgtagtatttaagaaatttgtacacaatgtaaagtattatttattaattgaagttactaattacaacttttatttttaaaaattatatcatttattttttagttaattattttttatacatattcggtataattataaaaataaaaataaaatttattatttattgtaaaaaaaattaagtgaaagtaaatttaaaagaaaaaaaagtgaaacaacatattattgtaaaaagtgggataattaaaaggtgtttataacttgtaccttttattccagtttttttttttttatataaaaaataggataaaaagtattatttaacctacttttctcataaaactgggataaaacatatttttttattccaatttttataagaaaaacgatataaaatggtacaatttatctcggtttttatataaaaatcaagttaaaaatatcttttttatcccattgccatgtattttttttcattttagtaattaaaatgtgggataaaaggccttaaaaaccaagattaaaagtctttgcttgtagtagtgccaattattgtgcaagtatgtaactgtactactaacaattctttccgtcgcagaaaacttgttattcccaactactaacaacgatttgatgacgagtgatcaaagaacaaagaataaccaacaataaaacaaaactatgtcagagaaataaaactaaaagactcaaaattatgtcagccttgaccaagctgcacctatgtcaaagatgttagataaattaacaattaacccaagatctatttgtatataacatagaacac

SEQ ID NO: 127371 - DNA, 930 bp, Cannabis sativa
ctgctaaagcgtggccattttattctgcatcgcctgaaaatcaaccggtcgatttgttaagaacgtgcccaccaataaccatctatcatctagtttcaataagccatcagcaacattatcaaaaatcagtccctcctcatcatcatcgattgagagtgcagcaccgaacctctccattgtttccacttggttcattctttaataatgttgagtagttggggtaaagagatcacaggaactctaaatcaccgaataaaaaatgtaaaagctgagttgaagaaagtgaataatagaagagatggagtttcagttaaaagatacaaggaagctaaggatagtctttttaaggctcttaatcaaaaggagtgttattggaagcaacgtgccaagcaattttggcttaaggaaggagaccaaaatagtaactattttcacaagacaaccagtaccagaaaaagcaacaacgcgatcaatatgctaaaagatgagcaaggtaattgggtttcttgggagaatggtctatctcaggttgttgctaattactttgatggtttattcacttcatcacatacaagctgtcaagagataattgattgtgtcccaaatgttgttccggattggatgaatatagatttggggtagccgattgttgaagaagaagtgaaaaaagcaatttttcaaatgcatcccggtaagagtccgaaaccggatgtgatgactctggctttttatcaaaggtgttggcctattgtgaaacatgatgtggttcagtgtgtccgcaacttctttgaacaaggtaactttgatattggttgtggtgatgcgaatgttgttctcataccgaaaaagaaaaatcctgagattatggctgatctgcgtcctattgctttatgtaatgtgttgtataagatcattactaaagttatggtt

SEQ ID NO: 127372 - DNA, 802 bp, Cannabis sativa
taccccaacaatactcatcccatcgaccgctgtcaatgacatctaaatcaaacctagaaacttccttatctagagtattgctaagaagaaaacattggatcaaatacaacacagagagtttcaatattcttagggattcatcatgtccccacctactgcccaagaaagcatcttgtatagccttataatcaattgttttttatgccacgaaaacatacctcaattaactagtttgattcctgggaaaacaacagtttattacaatccccaaaacaataaagagtagtgatcaagtaaaatttttcggcgttgaaccgtatataacagccagcaaccttagcccaaaattctttaggattgggctagtaaacatccctcaaaagaaggttgtgaactacttgtggtgaaaattaaagtcaaagatatttaaaaaatgcaaaaacttcgtgtcttgaaacattgttaacaaattcacagataaagtatttttaatgttagcaataacagagaaattgctcatacatacgaacttggatctgtaaaaattatttggactgaatttgttaacccaatcctacattttacaaagaaagtaaatataatgaatgagcatatacaagttgcaaaactataatacaactacagcacaactataaacaaacaaacaaacagagaaaactccttaaacatcaacatccataattctaatttttacccattgatgatataaaaatggacagaaaacaactagataacaacaaattcgatacaaacacatatagcaaggtgttaaaactataaa

SEQ ID NO: 127373 - DNA, 584 bp, Cannabis sativa
tctagatcctggtaaaatattcgcaacagttccctagtcccaccatccttgtttactgaatcactagggtagtttttccttcccctaggctttaagactttctttccagtcccttttggcgtaacatggcctttctagacataagggcgtctgagcccggaggcatcggtggccttctacgcatgagaaggcctgtttgccagatttgtgttttttcgaggtacgagagatgtagagttttgagggtcaccttctttagccttacccttgtcctatacaggagtagaggttcaatcgttatcagggtgtcccctattatttccatagacacattcctctgagggttaatctccctcgtctagatctccaaactttgcttggaggcaagccataattttctcaattctctgagaagaattttcttgatggctaacttttgctttatctcgagcaacactttggacgctcgaactacttaagggtcatgctcatagtggtagccatccttgtaatatccatctttgatgtattctccatcatcgttgtaaagaccgcttagcttaaatttggaaattagtagataa

SEQ ID NO: 127374 - DNA, 1191 bp, Cannabis sativa
aaaaaataccatacataacagataacactactatgatgttttgatgtatattttataagtagattatattcatgatgatatatatgtatatataatatatatatataggtggcatcgtacatgccaaccttacccatatatcatcatatataataaaccgtgactaagtgtgattaaaaattaattaaaaacgtggttcggaggtagattattggataaaccatacattaattaataataataatactaatatatctactaaaatcataattaagtacgcatcaaactagaccaaaataaggtaacataatattagtttgggaaatgttgaaagatattgcttagtactttttgtttagtactctcttacatattaatattgttattggtttaattaagtgatcatgtctcatatagtttaatgtaataaattttaagaagtatagctattagctagccaattgtaaggcaacatgtttggaaggtactaaacatcattagtgctcaaaatgattttattatgttattattaaattaaaatatgtgagattttgttagctcccgtttatttatattgtattgggattaagcatttaaaatatttatttttaaaataatttttgtctaatttttaatttttaatttgagtttatatttcaatagattcaatattaaattgtattaaatataattttgttaactgaaaaatataatatcttaagtaaatgtccttttaacaattttatttgaaaatgactaaggaactagttaattaataaggaaacataggagttataataattgagaaaattttagttcaatattttactttatgattattttaacaataatgtataattatcttagttaaaataaggagtcccttctacctaactaatctaattttgttttccttttttttcttttaacaaaaattaactaatctaatattctttctaatttgttttgactacattggccaaagctttaaaaatataaagatcattaaagacggctattgatgatgaatcaatattgccaactaaccaaaagatgtgatcgaggtgtctttaaaatcaaaaataaaatcattattttattttagggaaatttgattttctatacttacatatacctaatattttatttctaaactaatacatatcatcattgaaaatatatgaccacttt

SEQ ID NO: 127375 - DNA, 1239 bp, Cannabis sativa
  modified_base (44)..(61): a, c, t, g, unknown or other
ttttagaaagttcatatttatgatgttaataaacatacttgtgnnnnnnnnnnnnnnnnnngtaaaataattcccaacacatacatatatttgtccttatatgaaaaaataaaataagaaatatattgtaaaaaattagtaactttgtaatatatagcggtttaaactgcaattatcaaactcaaaattgtaactcgcactgcaccgtgcaatttaacaaaaatgcaaaccgcaaccgcatcacaaaagattttaaaccacatttttatgtggtgtagtgtggtgcgagcaatttgtgcagtgtgggtggtttattgaaaaccctacatataattgtgaaagggattatttcaaaaataccttaaaaactacaaaaaaaaaagttatgtttaatgaattttttcctttttcttcacattttgatggatttttttttcttacagactattattttttggttgttctaaaaaaggtcgttgtttcatagtaacaatgtggcaatataaaaataatgcataaaatacacaattctgtaaaaatgtaaatacaaaaatgaaaaaatatgtttttttcttttattttatgttttaaaatagtttttttttttaattatttaaacaattaaatgaggtggatcaataaaaatatgttaagtgtagtagtgtacattgtgacaggtctatttgacatttaacagttaaaaattaataaaaaaaagagatgttaattttatttttagcatatttaattgacaaaaatattttattaatttattgtttaatttcgactgtgtgtaaatattggttttcttattttatatgtgaatttaatattaagcaatctatctttggaaggaaagttgtcaagctttcctatttatgaaaaataaggtaaagagggtaagtttaattactcaattcttttctatctaacgagctgtaatatttcgatcttgtgtgagtttctcattttgattgatcagatctcttgaggagaaaataagagcaaaactttccttttctataaaaggaaagtcgcacttactgctcacgatttgtaagtacataaatagaaattcctcggctgattgaagttttattttagagaattttctagtcagttgtggtcttgtttaaatcgtgtatgagctgtcaataagatgtatattgattataaatacaccatataacagctaggtttagtatctctttcatacactttgaattgtattcatatctt

SEQ ID NO: 127376 - DNA, 1127 bp, Cannabis sativa
gagagattttttcgggtgcacttatccatcagttgttcaatcaatcaaatcaggtaaggttgacggagtgcattattaaattacaaggaagagatcttgattcagccaagttgagtttgccttggtgagtgggcttaacatgttacgtggacctactgagtctgagtttaaagagaaggcgacgtcagaccgtttgatagtagaatacttcaatggggatccattcattaacattggtcaattgcgtagcatctttgagtattgcattgagaaggatgatgtttacaagttaggtatggtgttatttgtgatggatgttctggctgagaaagaggagaagactctagttccaccatttatcatgagaatggctgacgatcttgttttttttctacgagtacctatggggaagatttctttcaactttttgaaagaaacttggagtaaggactccgtagcaaagaagaagggtatggataggaagattgaaaagggaacgaatcagaaggaatcaaagtattcggcctatggatatgttgtagcattgcagtattaggcttacgagtccatcttggagcttgctgagaaatttgtgatcagaaaatcgcatcgctttcccagaatgatgaactgggagagtaaggaggtgtcacttggtaaggatgaagtcattagattatttgcaaagcatgtaagttttttaatttattgtatttgttcaagtttattcacttatttcattttaacttaagtctaataatctttttgttattatttgcagttgacagtctactccattttatgttcgtggcctaatgaggccgagtttttgagcaacgtcactagaggtgaggcgcctctatttgtggatatggaagaactagttgttcgtagtgatggacaatgtaacaccctaactagcataggcgtgttgacgtgattttaaacgtactgtgcagctcgttactaatcaacgaggttaatataaatcgtgattaattaaaattttgctattgaattaaaacttataatattacctacaaaatatttcaggatcccatttacaaaatactttacaaaagtttactagtcatttacaaaagtatttgtcgcccagcgactaacaa

SEQ ID NO: 127377 - DNA, 1160 bp, Cannabis sativa
gggacagtttaaagatggtttttacaaacatcagacccatcctgccaatgagactccggtaccctttcattttcagaagaatgtaaaggagtatcgccataggtttttcttctattctgggttcaaagccttcgagcgttcggatctactaacggattgggtcaggatccccccatgcattgtactacccccatccaacacttcctaaatcacgcgcaagtatttgccagttacaagaaggaagacttgaatgtgggtgacctagtaatgatggtcaactataggagggctaagctaattctagagagtcaatctgttgacaattttaacttatccaaggtcctttgtcccaatgtccagaatcctaggagtgagaaggcacttaggccaggcattatctcatctgcggaagacaaatataacaagtatagatacaagggggagtaggagctcgcgtatgctcaccttcaggctgccttcgagagggtctccggggaggaggcatggaaagaaaaatctccaatccggcccaaattttcgttctcgatctcgaactccagagcccctggtgcaagtacctcccgagtctgtaagtctcctttgaatattcacttcgttccttctgtcaaggactacgctaacttaaggctggtggaattcgataagagattgtataaatttcagatgccccattcccagtggggtgataacgccaaaagtttttatttctccaacttaagtcatttcttaggtcggtcccggatgggttctggtcctcctgtgccgatccttttggaccattcctcctacctgacctcaagttagtttcttccttcagatagctttttaggggatgatgacaccagctttttaatttatgaatttgttagggcagaattagatcgccaggttaggattagtttaactgcactacacttgcatttgtaattttttggtgtcattctgaccttctgcctattttggacagcaaaacccatggaggatcttttggctgcccttgctcagactcgcaaccctaattcagacatgctggagcaccctagagtaagtgtgattctaggaggacatgtcaatgaagctatcgggaactaggagctggttttgattgatgaagaggaagaagaagtggttcctctgtt

SEQ ID NO: 127378 - DNA, 1088 bp, Cannabis sativa
acgggactactgactgtcacacgggcctagcccgcctatgcctaaggccgaccctttacccattaagagtgcacctatatatatatatcattccaaataaaaatataaggcttcccaatttatttagtcactatttcataatttgttttgtgagaattgatttagtaaaatcaagatcatgaagtcagagacaatattgactatgatcagtttaaaaattatttatggatgatcaaattggaatgctttttatataagttgataattaattttttcaagatttcgagtagtaaataaataaatatatgtattcatagttggtggttaacactaaaataatgattaattcccttccttaatagtattatatgttcatattacaaaatattttatgattgagagtgtttgaccaaatgctcagtcagtgtgatttttgttgactgacgaccatatgttaaaaatatcataattaacaacataattcatttttacaatatgaataagaatgaaaccaaatccaattaaaaaaaatgattttgtttgttttattagtttgtataattaaataataaggaatgtaaaattgtggagttgttaaacacaaacaaatttttattcaaaagaaatatattctagaaatattctcgtcaatttattaagtaatacaaatataacctaacaataaattatgagaaaaatcatcttatacactaagttttgccaataaattgagcattattctctaaattatacaggacataataataacaagtatttttttctctctaaaaaaaatacaattaattgtgggacataaattgacgtgaactaaaaaatttaccaaatagacaaaatgttttttttggatatttctaacgataattacatcatttacagaattattaggctaatgcttaattagctttaagataatcactctcaagggagtggacactaatcttctttctataaccaatggagaacatctaatatatataaattaaatcaattactactatatttattataaaatagctagtaatcatatatataattacttgttaaatttttgcttttttttttttttt

SEQ ID NO: 127379 - DNA, 942 bp, Cannabis sativa
ttttgattttgcaggaatgaattgaatgaaacaattttttcacaccctagtttggttttttttcttctcacatgtggcacttctcatatcatataagagcatactcaacttttctacatgaatacaaatacaaattgcaaaaggatgtagattcttaaactaagcatatccattcaatatatcaggatagatcatttacaaaactagactattatctcaaaaagataaaaaaaaaagttgcaacattataatagcagcaaccgtactacagtggtacacttttcctttctcacttcctgatctttttctaatatcccaaaaacaaaaagaagaggcggggaaagaccagattctcactctctacatacatacaaacagtatatctacagtctcagattttctcaagttaaacaacggaaagaaagaaaccaaaaaaaaaaaaaaaaccctttggaaagagcctcatgtgtaacttctcatcgaactctgattctggtcttgagtagaaaatttggtgtgttttttttcatggaaccatccatgatgatcttccctgtggttttgggtaagaaagaaaagtgggaatctttttattgggtagtcatgatactaaggcttactatagcctggcatggcttagcacggcatctatgtacactggcttttctcttggatgagtttggaagtcaaaaactacaaacccttttcttttttcttcctattcagtccattgaatttgtctctcctccacttagaatccatgggtgtcctgcattatgcaatgaacaaaacagagatcagtcacagaaaatcaacataaaaattgcatgcaaaggttcaaagagtaatttcagaacaatctatatagtgaggttgacacccatatttagattcaagaaaatatcaaccttagacaagaaattaaaaccaaaaatgcaaaaa

SEQ ID NO: 127380 - DNA, 2091 bp, Cannabis sativa
accaaactgttaacacatatttttttttaaccaaattaatagccttttttgcaataaatatactacagaatttaataataataaaaaacaccaaatattttacgtggttttgtagttaaaatttacatattccacgagtccttattagagatattttctagattgtagaaaataaatctcaatatttgaaaataatggaatttctctctattttttgtcgtcccctttctcataaatttagcccctatttgtagttattttattgggattaattcatttacaactgttgatgaaacgtggacattccccacgtttcatttatttaaacatggataatatctaataactacccaactgcctcttgtttttatcctttagacggttatgttgactaggatggttgtaactcgtcaaattgagttcttcttcttatccatcttaataggaaaaactactaagtgttagaaacacttcatctcgtagtatccctttacttgtattagtgatgcgagatgatcaccatgttgtgataatgcgaggcagttgagtgttgttattttcaccctggtcgtgtaggagagttaatgaatcacgagatctctgatatcttgctactctgtttattccaaggtgaatatatgtctcgtcaattctaatttaatagtttttattcttgtctcgcataaaataagcagttaacgagtttgaacatttctatcaaacttgtagttaattaacacgaattatttgaattgcatttaatgatataatgtcattattatatacattaagttgattcatattttttctgtaggacacgtgtcagcttctggtacatagccaaattttgggtacaacaaaattatttccttaggttttgaactatccacaaaaaaaaaaataaccaaaataaaaaacaaaaaaaaaatacttacacaaaatattgctctcttaatcttgaggtaagcaatacttgtccaatgtttctcaaataaaagaagaagaaattattgcttgaattacaattgagaagttgtcaaattgtgttttacgtgattgagaattttttttttttatttgttattattatagggacaatacctttgtacctaaattacacaattccctaccatatcgttgtgccatgagagaactttatgcataaagttgtcaccttatgtttctttttcaaatacatagataattaaagccattaactttttgcctaaattacacaattccctgccaaatttttatgctatgagaacactatggatagatagcctaagacggcgttcactaaattttttgcggctaccattgttagtagctcattggatttggaccgttatgatttgtgcactgttttcattccttttcttccacattactcaaaatcaatccaaacaaacaacattttgaattgaacgtatcaaatttaacaatgaattatgttgttaatctacttcatttgagccttattgaaagatcaaaagactactggactaacccatttcaccatcattatcataatataaatatgaacatgaatatgaaccacatttctgacattgttatctgaaaccaaaagctcaacaacatttttccattgaccggaaagctcataacgtccgtacactaacatttattctaaagagttaaaaaaaacagaaaatacctttgaaaagagctgagattaaacttaaagggctttgagaatatcgtcggcgctgctaaaggtgaaggcaccaccttcctccaaattgaggaccttaacgacgccgtcttcggccaatagtgcgtatctcctagacctaactccgagcccgactggcttgtcactcaaatctagctccgcaccaattgccctagtgaaatccccatttccatcggataacagaagaacctcatcgtttaccttcagatcctccttccaagccttcatcacgaaggcgtcgttcaccgaaatgcaggcgatggtatccacgcctttcgatttcagctccgctgacttctccacgaatccggggaggtgtttctgcgagcaggtcggggtgaaagcgccgggaacagcgaagagtatggctttct

SEQ ID NO: 127381 - DNA, 553 bp, Cannabis sativa
cacacacacacacacatgtctagattctgacaaccaaaacccgacaaacagtggtccaaacggactttggaatcgcgattccaaccccttaaaaccatagatctgcttctctccctctctcttgtttactctctttccctctttctcgattctcctttgtctcgtttcagtaactcgggtaagttgacctctctctcattttctattgatttattatttttatttgtgatattgagtttagattgtgtttgtggttttgattttgtttgtgatattggtttaggttttgatgtttagaatttatggtggatgtttgaatcgggttagatctgatttgtggtaatggtgatctactttaagggggtggtggtggctgtggtgattttgttttttgttttttgtttttacttttttatttttggatccaagtggagtaatggtggtagctgcggtgatggtggtggctggttatgaagaacaggcagggccgtctcaaatattttggaggccctgttctaattttaaaaaataggcccctaacaaaaaaattata

SEQ ID NO: 127382 - DNA, 1407 bp, Cannabis sativa
aatgtcaaacttgccaagtcattttgctactattttcttggggggaaaagaaacaatgtcatgcatttggagggtcaacatcattgaagaaagagaaatctgcataacgtccaccatcctttactgccttggttgcctgtccagctagggaataagtggtctgtattctccaacattgactattgttgcttatcctatttcattcttgtagttgagtatggaactgaatgcttcagtatttatggtaaaagggaaaaacagacttagagaaaggggttttgagggaaggggtagcattatgattcgagggcatttaccggtaagccccaccagcggaatggcttcctgcaacatgttcatttatgtatttagagctttctgaaagctcatgttacaggggagtttcaggacgataagtaatttttgcgcacatatatattagtgtttctacatgggaggaacttgatgaggtttgatttggatgttacatcttgtttttctcttatagttattgtgtatggatttcttgggtcaatgttttcggcttatacaaaaaaaaaatgtttgatcaaatgaattgaggccctctctccagttcaatcaatttaaccttctttatagatttcatactgttctttattctactttacaagcaaatattatgatgatagaaagccagcataacattacaattcaatcaactgataaagaccatcaaaattacttttctcttgcctggattataattgacctggctcactatatttcaaccaataaagaagccccttttgttttttatattttgtagttgaattaagcaaagtagcttaattgtattattcatcaaaaacacaatacaggcgaactaataacttttcaattgttgtatattctagtaaagctatctttctatacttggaaggatctaatcttgaatgccctcttcttgtgacatagtattagtagagtgtaggaccactttcgtctaagatcaacatcaaattctaggccatcaaggatgcagctaagctaaataacgtctaaaatggggaccaaaggatccctatcactttgtacggactaccaactaccatgcaaattatcgaacactggcctatgaatatcgactaaccaatataccaacagctcattcattacacgaaaacaactacactcgtgtatgttgcagaaaaaatccaaaccacctattacttacaaagcagacgcactggcattcatttcacatatggatgacgatattgaattgattgatttttacatctcataactaaagctcttgatttgttactaatgtagtattaaattcgtaggttaaaacccaccggaaatataccactttcactatcatcacctctatacccatcccaatacctgtttaaattaaag

SEQ ID NO: 127383 - DNA, 1542 bp, Cannabis sativa
  modified_base (1492)..(1499): a, c, t, g, unknown or other
gtattatgatattacatgtaccattaaatttggataatggtgatatcagtatggtgacattatggttgtgagcctactaagcttcaaatcagtggtatcttatcaaatgtgacaaaagagaaaagattgttgaggttatatagtgtagatgcgatgttgatatctgcggctaaggtgcaaagtagcttaatctattatttaacaattgtgggctcaaacttctcacccttacttctatgtactactaacattcaatgggccaagaagccacctaagttttggtcatagttgccacctttaaggtgacttttcttttatcatcaattcattgaattattataaaataataactctcatttatatttgaaatgaaaaagcactcccttaaggaaaacagaaaaataatgggataattacttacattatttttttaaaacaaaattatattttttttaccttcttttaattttttttttttatatttttatagtattctataaaaacaataccataacaacaaaaaaaaaaatataaaataactcgaaaataatatcaaaacaacaacaaaaaataacatataataaattacaaaagtacaagataaaaatatattaaaagaccgtattttctataaataaaattataaaaatcataaaaatatttaaaattttatacaaccatatttttgtaattttttgttattttttgtaatatttgtgaaataatcttaaaaagaaaagagagcccaatttcacattagtaatccccaagctgcctgaaataaaaacaaaaaacaaaagaggggaaaataatttaaaaaataaaataaataaaaatgaagtagaaaaatcaagattcataggattgaattggtgaacgaagtggaaaaaagaagaggttctcgaacaagaaaaatgatcgactttaaaagaattgaacaaggagtggtaagcctgacgaagcaataccgcataaaagtagaaatagatgataatttttataatcacacatcccagtataccaaaccctttattacatctatgtaaaaaagtagtgaggcaatttccaaaaagaaaggacaagatataccaccacaaattggaacaacgaacacaatcacaaataggataatatgtaatgtataaatatataattctcctaatatttacaatagttcaatatatatatttaataaaaaaaaataaaaataaattaaaaaagaatataatgtataaataaataattctggtaatatttaaaatagttatatatataaacttaataataaaataaaaaaataaataaaaaagtagaattaatagtctttcgattactattttgttacagcatacaaaatattattagtcacgtgttaaatagttaattaattatttaaaaattacttttataataataaattttaaaacattaaaaattaaagtgacgtttagtaacacttttttaatcagttttttgtttttaaaattaaaannnnnnnnatatttttcaaaaacatgttttataaaaatgttttcacttttt

SEQ ID NO: 127384 - DNA, 2246 bp, Cannabis sativa
  modified_base (65)..(69): a, c, t, g, unknown or other
tttgaggtaaacttcggatctctatctaatataatggacttcggagccccatgtaacctcactannnnnttcacgtataactctgcatactgatttactataaaggttgttttcaccggtagaaaatgtgtagacttagtaaaacgatctaccacaatccaaatagaatcatacatccccgtggttctaggtaacccaaccataaaatccatggtgacatcttcccacttccactcaggaagtgtcagtggctgcaacaaccctacaggtctctgatgttcagccttaatctactgacaagttaagcatcaggatacaaattctaccatatctttcttcatcctgcaccaccagtagaagggttttaaatcctgatacattttggtagtgttaggatgagtgaataaggagtggtatgagcttcctcaagaatctcatttctaagttccacactacttggaatacaaactctggttttatacactagcatcccattacctaacatcgtaaaatctttagcttgaccagttaaaacctcttctcagatcttcatcagtttcggatcaattaactgagcagctttgattctatctaacagatcaaattataatgccaaattattaagtttgcctacaacaaactcaatacttgatcttgatcatactagttacttgcccgagaccctttctactaaggcatctgccaccacattggcctttccaggatggtaaaggattttacagtcataatccttaaccaactccaaccaacgtctctgtctcacattcaaatctttctgagtaaagaattaattttggctcttgtgatcggtgtaaatctcatacttatcatcgtagagataatgccaccaaaccttcaaataaaaaactactaagacaagttttaaatcatgagttggatatcgttgttcatattctattagctgacgggaggcataggcattgacctaatcggattgcatcaaaatacaccatagaccctgtctagaagcatcatagtaaaccatgaatttctctttatcagatggtagggctaacaccggagttgtgatcaatctttgttttaattcttagaagcttgcttcacacttgtctgtccacagaaaccgctgattctttttagtgagtttggttaaaggttttgagatcttacaaaatcccttaacaaactgacggtaataaccaaccaaaacttagaaaacttctaactctgtaactgtcttcggtctcagctaatcgctgccggattcaatcttccctggatccaccttaatcccatccttaccgacaatgtgtctaagaaatgatacctgagatagccaaaactcacattttttgaacatggcatacaatttatgctctcgtaaccattacagaaccatccggagatgttgctcatgttccgcttttgattgagagtacacaaggatgtcgtcgataaatactaaaacacttatatcgaggaaatccttgaatatcctattcataagattattaaaagttgccggagcgttggttagtccaaaagacatatcaagaaatttatagtgcccatacctagtgcaaaaagcagtctttggaatgtcctcctctcagattctcaactgatgatagctcgatcagagatcaatcttagagaatatggtcttcccctgaagctagtcgaacagatcgtcgatcctaggtaaaggatatttattcttaatagttagtttagttaattcccaatagtcaatgcacatgcgtagggatctgtctttcttcttaacaaacaacatgggagctccccagggtgacacactaggtcgtgaaaaccctagatcaagcatcccttaaagctgaatcttcaattctttaagatctaccagagccattttataaggtgccttagaaactggttctgctccaggtgataaatcgataataaaatctatttcttgctgcggtggtaaactcagaagttcatcaagaaatacatctaaaacttcttgaaccaccctgatgtcttctagtcgaattacctcactttcaaattcaggtgtgtcggccaaccggagtggaatagctgctcgacgatttataggcccctaaatcacattattcaacaaactgatgagtgacacgctaaatagtaagtgtttaaggagaagaaaagaactatgatgaagaacactttgaagccgtaatctctgtctcttccttgctctctctctaagtttctatctc

SEQ ID NO: 127385 - DNA, 1843 bp, Cannabis sativa
  modified_base (37)..(38): a, c, t, g, unknown or other
  modified_base (209)..(222): a, c, t, g, unknown or other
accaagtaaatttcctatcttattaattcctcctgannccactatagatttggaattgcactcctaattatatagaatgctctatatgttcccaacatagatacactattaattatccattgttattatcgaaataatcaaagatcatctacagatgatttacatctagtagggacaaatttaccgctctaccctttaatgtattttannnnnnnnnnnnnnagcttcctataaatgatatttcaataaactaatataattactaaaattagagctcttccatttatctctgttaagggaagctcgaaagaaatcatcatgtcacttctatgtcattatagaagctatagattccgtctatgattagcgctcccactaaattgtactaccatgttcctaagatgtaagtattgggccaatccatttggtcagctttaacaaaaattcaaagaacataaataatacagttgagctcgaacgtaacagtttcaggattaagatctattgatctaagatcaactaagtgacattgacttaaaaagatgtaacagtaagtttataatatcttatccaattttaataccaatccagtccgatgcatactccatacatccaatattatcatactttaccaataccctataaaggacataccacttatccaaggtgtaagtaaactttattgtttattatcacgtcagtgtaaatccaatgcattgacaaatcatggaataaaactttgaatcatataattataattactttacactttgatgacatcactgtaattgtgaatatctatatgttctagatttatcaaaaattgaatattaaactataatcataaaaataacatgtaaacttaaatgacttttaatcttctattaatagtaaataagattattttgaaatggattttattgagggcgtaaaatcccaacactctctggcttgctatttgacattggtgatggatctcatctccatgtcgtagtcacgggcagctatgaagtatttccagaaagtggactataattccttccaggaatgaattgatccgggagccagtcttagccagtcttttccaccaatcctcaacagacttgatgagggttagggagaagcacaagcacttggcatcttcactcacccttgccacgtgcatcattttgttgtatttggctagatggattttgggatctgtgcgcccatcatacaactcgatttggggcatcttaaagttctccaagagcaaagcttccgaaatcctcctaagacatggctttaggtcctcatccttagagtcggtgacgaccccactttgcttctgaacaacctttgttaaggcaataatttgctcttctctagtctcttgtactatttgggagatctcgtccgtggaacttgtaatttaaatgattcccgaggtcgttaccacgtggcctcgccttctcacttttttctttttcatacttgctttcaagatgccttcagagatttattgtggaccaactgtcatcagaatattgttgggtttttgttaggctatttttagcctatattttggatcgattttatgtgcgcttttcactgtgttaggatggaattatgcttgttttctatgttttcaggttctttggaataatagaggtctcgggatgcaaaagtccagtaaaagacgagctgagccaagaaagacacctttttgaggaaagatgcatatctggccgcgactagatacagcttggtcgcgactagatcatgaagcagaggcattgatttttgaggctacagtcaccgcgccgagatacaccctcgccgcgaccatataaaagttacagaa

SEQ ID NO: 127386 - DNA, 1466 bp, Cannabis sativa
tatagagtttctttttataagagagagatatatagcgtatctataataatacatatagctgtggaaccatgcctcatatcccatatacaaaatcttttactaatattgtcatttattttatttcaaattctaacaaatccctaatgtttagaaaaataataaaatatataaaaagaatatactaattttaaaatgaaatctcatttattttatttcaaattctaacaaatattgtataacaataatgaaaatgtgcccaagtactcctgaattactatatatacatacctatatcttcggtatattattcaataccatatataattataccttttgaaggacatgaggtttgctatttcctattttcatattgctatataggtttctaaaacctctaatactattttcctttctccctgcattttcttatgataaatagattttttttaaattgggagtagtggttatatctcaaatcagttatacatcaatcctattattttcaacataaatattaatttcatattttgtaaaacgaagtcattacacaaagacccctccattcaggtcataaaatacataaattgcggattttagttttatattttgtcaacgaaagcgaaaatggttcgttaattttgccgttaatggtggttgtaagccgttgaagttaaatccaatccgcacattgtacatcggacggttattattaaatccattcttcacgtgcatgtctacatcgttcaaatacaacggcacgtaatatttggccaaaattcggtagctctttcaaaactcaattttcacggaggcgatgtaatgatgacctaatggtttccttttccagcagaaaaaataatttcataaatttgttatttattgactattgggtggtggacaattttctaaatggcttgaagaaccatccaacggttgagagcttaagggaatgttagcatgactatacatatttgacttgcagtacctcacatgtacctataattaagaaagatatttattaattatttatatatttatgtatgatgtaagataatgaaaaatatgaatactatataaaatttgaatttgttttccaaatacatatggtaaaatgtgttttcgtgacactaccagaaaaataaatttgggttttaattttcatgtaaatgacaaacaaaataattatttataaaatagtccaacgtgacactatgaattttacataaaactaaatgtttactgagatttttagaagttaaatatttgagaactaaaaaaataataaaatacaaaactaaagagacgtaaaccatttacgtagttgatgtgttaattaactttagtccacaagtcaatctattattaaagaaaaattcgtatggtaaaccaatatatttttttttttttgacaaagtgattagaatcactcatgaatttacgacgcctacgtccgccaccggcgctgg

SEQ ID NO: 127387 - DNA, 1148 bp, Cannabis sativa
aaaaaatatataattcttcgtaacaatttattagtataagactactttatttttttttattacaatttaaattatttatatcaagtttatagatataaaatatcatacattaataaattattataattttaattattttatgtaaataaatcttattatcaatacctatatatctatatatttatataaagaaagcaatgcattaatctattatatcattttattattttttttataattttaatttttttcaaaaatagtaatttcacttcttagtaaaaacaatctcacatggtttgaatattaatgtggtttttatattataggttataaataaatgactatatcttctactttactttgtgacaaagttagtgttacattattctttttgtgggtgattaaagatattagtcttacccaattaattatagtttttttattttttttaaaaaaatacagcaaatatattcttgtattttacaatctttgtcaaagactattttttttttttaaaaaaattgccatttcagctaaaacaaatatatcaaaattttgttatacaaattgattaaaactagaattatacacaataaattacaaatttgtgatgtaaaatattatatttctttaaataagaataatattgttcataattagctaaaataataatcaaaatcaaaatttttaagtgtacaaactattttaaactcaaattattcatagtgatttaaattattcacaatgtgattatttgacacattactaaaaaagataggttaaaattatggataggtatcataaatattatttctattcaacatttaaattttaatattaactgaaaattacataaagactaaactatacgcaaattttgagggtttttagggatttctttagttaggtataatacattcatcaaaaattaataaccaacaaataaaaataaaattaaatatttttcttattatatatgaataaatgcaatattttttaatatatattacatgtaattggagtaaatcgatttttaattagattttgataatttcttctaaaaactaattcaatccaactagaatacaactactcacattgatcatttttcttacagtctcagtggcctagggatgtaagaatacatg

SEQ ID NO: 127388 - DNA, 1100 bp, Cannabis sativa
  modified_base (912)..(913): a, c, t, g, unknown or other
ttattatttgctttattacgtattgttattacgacatatcgtttatcgcttatcaaaaagactcattgtcgttgactaaaagcgaagtcaacaataatcataattgaaaacctattgcttttttttaacaatcagtgtcgttgtaattgtattttctaggatgaaattagttttatgaaattaatactattttttaaatagttgtatttagttattaagttttaatttattcatcatatcaaatacattgcaccctttttaattttatattactataagaaaaatgcaatttattatgtgaaactgttactaaggatatgattgttttatggcaaataataaaaaaaaaaaattagtgtgcattcaattatttaaatattacttttgaaaatataaatttttaaaaaaattattagatgtctaccatatttacaaaatatataaaatttaaaaattatgttattgtaattatggatagtcacaattttttttaaagtgccacaaaattattatcaaaaacacaattttctaatcactttatagcatatataatgttgtgcagttttataataataataataagtgattttgttttacatattaatatgtcaatacatatggtgagaatagaaggaatttttagtaatttaattgattaaggatcaaaaatattaccatttttattaaggtaatagatatatattatctcctcatacatatagtttcactatagaaaaataattatttttagagaataaatttttaatcacaatataatttttttataattaaatatgatttttgattacaataaaaagttacttgtgactaaaatttaattttaaatacaagttgtcacgaatttgcttttaatatattatgattaaaaacacatttagttacaataaattnnaatttttgtgactaatatctttagaaacgaatctttttatcacactataaaaataataatttataattagtcacaattttttttatttttagtcataaaatttgtacgactaaaaataattttttttgtatagtatgtgcgtttggaaagccacaatgtaattggatttgtgtgtaattggaggtaa

SEQ ID NO: 127389 - DNA, 1426 bp, Cannabis sativa
  modified_base (873)..(876): a, c, t, g, unknown or other
tctcatgtctgaactctctttcatttgaagcaagtctatgtaaccacttctcttcaaagtgtactctctactggaattcttttaataagattgtggcatcctcattattaaaatttctatcaataaatgtaaatttttttataaaaattagtattttatgtaattattccatcaatttattgtttgtcattatgtataacaatcaaacacacccttaagcctttaggtaagtacgattattcatagaggaaaaaggagttaatcttgggagccatttgacttccaaaattctaacatcctcccctcagccaattctttaataattaatatcccttaagtttactttctaagtgtttaattaataatgatttcattaaacaaaataaatgaaaaatcccacatttaatataaaatgaaagaaaatgaaataaaataatatataaagataacaaagaaaaacagtaatctaaaaaaatttataaatattataaatattccaattaggagcagaatcgcttttaaaagaattagaaacttgattatctttcattacacaacaccattttgaacaaacaggttcaaaatccatttcgaacaccattttgattatctttccttttggtgtgtttgtccaatctacaactacaaactgcttaagtggttgctttttaccaactaaatctattgtataatagatatttagtcggactttcattattctctcctaatagtagcacttattaatttcttgattaatgatgcaataatagattaatttttagttacgagaaagaattagtgaaagtattgcttatttatagttaaaaatgagaaatctaatcctattccaattctattattattattattatnnnnattattattattattattttgaacggaatcctactctaataaaataaaatatatatttaataattatattcgtgcgaaagattaattgttaaatataatttaacatcaaacaatataatcaaacattaataataatattatcttatttaaggcatcaaatgtaatatataaccttgtaataatcataatgattatcaaacttctctttgtgctcatcccatccctttaatttacacatcaaagaaaagagaaacaaaatgtgcaaggagtttctatgaacacaacttttctacactcttcacttatcttagccacagacattctcctctcatcaccaaataaaaggacacatccctttttaatgagaaatgatgggttaaatgggcctacatgcccaatgtgagggtattaattgtcttggcccaatgggctgaccgaagatgttttagagaggaaattacactctataccacttttatattgtgctcttttatttttaccttctttttaaaggctatcatttttacctctttttttaaacattgtacca

SEQ ID NO: 127390 - DNA, 1250 bp, Cannabis sativa
aattactaaaaactgtgtaattaccatacctagtaattacacagttacttccaaacacaccctaagagattgtaattagcactcttcttctataaaattgtttttacttttcaaaaaatttaaaattttagaaaacaaaaaatgtctctttcaatttttttttaaatagaacccaaacccaaacccaaacccaaaccccaaactcaaaccccagccccaaccctggaccatggcctcaacctctaaacttggacttgaatctggaccccagccctaaccctacccctgactccaaacccggccccctaattcaaagagaaataggactttttcagcgtgggcttatctttcctatctaattcgaaactgaataagttttttgcatgtgctatcttatgttatctttttctatccctcattggctatataagaagtgaactccagtggatttcagtaagcaatctagtaagaaatcgaaagtaatcggggagtacaaatttcgaagagtaaaatcaatattgaaggatttcttaacagggtttttcagcattattttcttcttttattccaaatgaatatgtgtgaaattgctacaatgaacatgagtagctaaacatttcattagggtctagatggagattgtttgatattgatttgtggttttaatatgatttaattttctcttaatttctatgtattatatttcattcgtacttaattacttttaattgcttgatcatcaattaaatgtctatgattttgatgcaagatttgagaagtaagcgtcgattatactatagtgaaatagaactgaattttgatataagacgagagtacctatatggtttagatagtttataggaattctgtgtttaatgcatgttacatatcattttatttttcctattatgaatccctaactaattatcaaaatttaacaaaaagaaaaacaaataactatccattatacataaaaataattatcaaatttaaaatatttttcttaaatataatatttcaaattttaaatgatatacgtgatttttaatatcatgtggcaatattttatttcttttatattttagagatttttatattcttaaaattgttacaaattttttaggtaaaattatattgtaataacttcttagagtaatttgcggcataaatacttaaatttaacactcccagttgcaaataaatacctaagtttaatatatctaagttatatttttgaaactctgtaggta

SEQ ID NO: 127391 - DNA, 991 bp, Cannabis sativa
gtgagtttcgtgccttggcaaactctgctgttgaagtaaaatggataacctctattctctctgaacttcatgttcctctgccatctgctcctataatatgggtcgacaatcaaggaactgcaagtcttgcaactaatcctgtgttccacgcacgatctaaatacattgatatagacttacattttgtacgagatctaattctggccaagacaattgaagctcgatatgtcccttcaatagaccaagtggttgatatcttgattatcttgagaaaggcattgaccaaagacagatttctctacctcaaaaccaaactctaatgtgtcccacaccatttcgtttgaggatactacagaatatgattaattttattttattattttttgttttattttgtcagagttagttacagttgtgactgttgtaacaactctttaaagtgttttatgcctataaataaagatcaagagctcattatatggctcaagcttttacaagactttgtaactaaatatttttcattgtgttcagtgatagccttgtattgataagcttctacaaataataatatttaatatttttgttaatgtgtgagactttaatataaaagaagaaatatatattgcgtagattccaaaaacatatatagtaagaaaccaactaatcaagccttattttcttacccacgtacgttcatattgtaagaccattttattaagggaaaatagcggcataagtacccaaagtttcatatttatataacttaaatacccaaattttttttttagtggtaaaagtacacaatgttcacttctgttagtatttgttagtacccaattcaattctgtcagtttttgtacacgtgtacaactcatattaattcaccaatttactaataggacttttgtttttatctcatcattttacatcttagtaaatgagtgaattaatttgagttgtacgcgtgtacacaaattgacagaattgaatt

SEQ ID NO: 127392 - DNA, 550 bp, Cannabis sativa
aaaaaaaataaaaaaaaataaaatgtgaatatggcgtgtcagaatttaaaatgaaagaggctaagatgaatgaggttcatcttaaaataaattaaagagaagagtagctcattcatcttatatatgacaatttattttcacacattagtaatatgagaccaactctaatgtagcaattgatatttttttaagttgagttatatagttgtagggaaaaaaaatattttagtgattttttgtttatttgttatcttagtttttagtaaaaaattaaaaatagaaaattaaaagatatttaggatgataaatatttttttaattaattaattaatattcataaatttaataaaaaattaaaaagagagcagataatattatttaaaaatattttatagtgttatgtcacatttattatatatagatataaatttgataaactattatcagtaattattataatatagggctttttttatttttacatttttttttttatttttacggaattctatatggaaacccctattgcaactagcgctctaacttaaat

SEQ ID NO: 127393 - DNA, 625 bp, Cannabis sativa
tagtcacaaataactttttgttgtgacttttacatttagtcattaaaaaattatattgtaactaaaatattatcactaaaatgctctatttttgaattcaagggggtcgccatacttgggtttgaaaagttaaaaaatcaattttcgagatcccaaaaatacaaaaaacaaatgcaaactttacacttgtagtttctaagcccaaatcagcgtgaatggaagtataacatcacatagcatttcatgcttcaataattcatccaaattacattcaaagctttcaattcaatttaatttttgaaaaaattaaagcaatataggatgaaattgataccttaaaataatttttaagttcaatctaacaattgtacactaaaaaccaacaaaatcttgcttcaatccactcaaatttaagaactcaaaatgaaaaaaaaaaaaaaaaagagaaggagagatccgtgggggtggtttttgcagaaaaaaacaagtgaaatttaacacttactctattaagcttcttttattgatcttgtaaaagaaaatgtaatcaattactaatttgcccttatactatataatcaatataagggatattggcggctaaatcacctgaactttacgtttt

SEQ ID NO: 127394 - DNA, 1899 bp, Cannabis sativa
aatatattattaatttattatataaaattagaattatataaaaaaataatatattatcaatttattaataatataaaattaaattaaaatagaataaaatcaaatataaatattggtttattaataattttataactaaaattaaaatatattaatttataattgataaatatatagttaattaaattttattattaatataatggcttttataaatttataatatataatctgaattttaaaaaaagaatattaattttttttatatataaaaagcatagaaacgtgtgacgcgcaaaaagtgaatgtaaaaaggttcagtgacacgtgtgaagtgtcactaaaaactatctttccagtcatcctcattagtgacgcacgttgaagtgtcactaaacagatttagagttactcaatgtgtgtcactaaaacccatttttctagtagtgctggtttggcacactagatagctgtgaagaacattgtcaagtatcttcaaagagtgtgagatctaatgcttgtatattctagtggagagttaaattctactacatctactaattctaattttcaatcagacaaagattgtcgaaagtcgacattaatttggatcaatatttactcttggtggaggagttgtagtctggagaagcaacatgcaaagaagtattattgcagattcaactgtggaagttgaatatatagcagcttgcaaaactattaaggaagcggtttgtttgaagaaattatacattgatatagaagtattactagaataagaaaaaccagtggtgctctactgtgataacagtggagcggtggccaactccaaggaacctagaagccataagagaggcaagtacattgagaagaagtaccatctactaagaaatatagtagagagagatgatgtgagggtcttgaagattgcgtcagaacataacctggcagatccattcacaaagatgctcctggtgaaatcttttatgggtgatataactaatatggggttaaaggtgttatcctaatttttgcactcagacgtggcatcacacgatgatgacacgtagaatcaactccatgtatctgcttgcaagaaatatgccgaacacgacaccacatacattcgcttggacgaagctctctcagtcgggcagtgagcgatccgcgcaacatgccaacacttagcaaattcagctttcgcattgtgagttaatgaagaaatccttataactttgggatcagatcatatagatatggcatgctgtctgaatcccttgattagtgtattctatatttgctatgcaatctttccacttatatcaattgtaatgagaagggaaatacttccctcccaagcttaaagccatataaatagtgattcatactcactgggcaaagggtcaaaaatctatctaagaattcatattcagagatattattgtaagacctctaagaaaaggaatcattctccttattcttaagtcaatacaagctaagaggattaggctatcacaaaaatgctcggggctgaaactctataaaattcctgtgtctttatttgctttattatttgatctacctattatactactttttctcttacaaattagactcactatcattggctaaaagcaaggtcaacattttttggggcttttattgagagcagaatcaaggattgctctttatctcaaatctaattgtaaatacaaaggtggtacagactcgcagaggcatggttgatggctcagcaaggagccattgacgaccagacaagataggctaccgtactaatacagaaagcctatcaagccatcgggcaatagcctgcaaccgtcatccccctgggcgagacagatgaagatccagcgatgaacacctctcagactataaatg

SEQ ID NO: 127395 - DNA, 835 bp, Cannabis sativa
tttttggtattattaatttgtggtaagaatagctagctttaggttttgaagattttgaatatacctatggccttgaaagtgctttttgtgccccacctccacaaccaaataccctctccacctttcattttcttctccattcccgtggcgctggtgatctagcttgtttgtcgatatacatgttacatatatagaaataattatttaaaacatggtataaatatgtttaataattgatcattacataatacattataggtatgtatatgattcatatatgtgcagggtcattagtacataacaatattgctcaaaacttctttacaaactagcagcacgaaccatataaatggcctgagtattataatctctatacaattataattgttcaaccagtctattcatactaaaaatcattatccttctattcttaatattctgtttcaaacaatgtaaaagttttggaatggacgaaattttcttctcccaaaaagctaaattattacggctcctccacccctgatacactaccgagacaattgtcattgtataaacctactttcgaaaagaagaaatgcaagatctacaaatctagctatgtcaataatttctccaatttccaactatttgaatgccaaccaagccagatttttacagcctccaagcatccgttgctataagagcactcaaagaacaaatgcttgtcttgacggatattaaagcatattgcacaatattgtcccacatggatcaaatgtaaaaatattgagccatatataataacataagctactccactcattaccaattgattttgagatggaacctcataatt

SEQ ID NO: 127396 - DNA, 721 bp, Cannabis sativa
tattattgtgtgaaaatttgggttgttaaatttatttctcatattataagattgagaattttgataatcaaaaaaacgggtaaccttgcttaaatgaataaataaaataaaaaataacaagaaaaacgggtaatgctagggtgctttcggcatttaaataatatatttttttatttgaatattaacattatagttatagcatctaattaatttttgatttttttattaatttattattttaattttttaaataatttatttcacctgcatataaaaataaaattaaaaaaaagacatatgtaaaatatattgtttgcaactgcatttttaggagtgcaaattattaaaaaatagttggatgcatgctataactaatgttcactaataaaaaaaatagaattaaaactaaaagtgtagaaaatagataaagtgcactaataattttagtttaggaagattactaatgaatttttctatgagtataaatgaacaaaaaaaaaaaaaaatctcaaattatcattcctttttattctctatcttattttaaatttaacaaattctataaacctattttttctcatatttatcaacattttcccttaaataagaatataacaaatttaaggagcggcaggggtggcccgggattctcagggtcgattcattgaaggcttcacagttttacgagtggggtgtgtggattcggctatggctgaattgg

SEQ ID NO: 127397 - DNA, 1095 bp, Cannabis sativa
atttattattgtgattttggtttaaatctcatttattacgattccgcgtcggttggctaaaaatccagtcaacaacagtaaaaaaaataatacttttaagtaaacagacaaaaattatggcttggagaattcaccgtagctcaatattttttaaatatattacctctcttgattagctggtttaattaaaaaaaaaatgatacaaaaattttaattggggtgaagcaggcaacactaattgcctgcattaatgatactctaacaataaacaaaatttctgtgactatggctatcaacacagagtcaaacatgaaaattgcatctccctccatgagtaaggcaaatcataatttaaatctttgggctttcagttagctactaaaattttgagacaacatttattgttataaacttgaacaactctaatgcaataactcaaaaacataaaaatctgtctaaacttctggtattatattttcaatctctataattttttttaatccttatactaatttaccatggtgactggtgatattttaagtgtgctataggaggtgagaaggtctaacaagatttagaacttacataattatataaaaaatgtatgtgaatttcaaggataaatcccatttctaaaagaagtctaagacagttaagagtatatatgtctattgatgcacatctttcttacaagagcccaaatgtcaattcaaaaagatattatgccaaaaaaaaaaaagcatattacaatgatctcatacaacaataatagtttgtttatacatatttaggtattattaaaaatcatcatcattttaagcttaatattaaaaatcatcatcattttaagtttaatgttttttttaatggagtttaatgttgttttaaaattatagtaatttgcggcaaaatcccccaactatcaatttacttgtaaaaaaccatccaatctcatattttggtggaaaatccctccaaagtactgttccgtttatatttataaggtgccgtcagtcagcctcattaagtcctaattttacccacgtggaaatgacaggtcactaaaaaattatcctatgtggccatattttacaa

SEQ ID NO: 127398 - DNA, 1764 bp, Cannabis sativa
cgtggcatatccacgtgggcaagattaatgccacatggagtataacttgtcagcaagaaagccaagtcatcacacataatatatcagttaacggggagtccaagtacttaagcaggacagagagacaacaaacttcaaatttatttttggaactgtaaactattcaaaattttaaaaaaaaaattacagaaataatgttgtaactataacgaataccaccataaaaaaatatatattttaacatgtatttttaaacataaaagttgactaaaaaattataataataacactctacattcctttatgaaaaaaaaagaaaaagagggagagataacaataaacaccttaccaaattaaaacagtaaacaaaagtgtcaattttgattccagtgtatttatgattatatataaattgtactttccttttaaaaaatctaactaacaactacaaaccctatcaaaaactcgcttctggatagttctcttagcttctctctgaaaagttttctctaggattttcaatgtttcgtcgccccgattgttgtcgtcgtcgccgttattttcgcggcgtttgcgtccgtccatggtcttcaagtccttgtggtggtgggaaggagtctgtctcttcaacattaatggtcgatttggctcttcacgaactgggcaaagcatccattgaagatcccctctccaatacaggtaaccttcacttcagcctttactcctctctttttgtcccatccgattattactatctggcattatcatcacatctgcacttctcttacttcattaatcactcccatttacttcttcctttagccttagataataccaaattaggaaacccaattccctctgcacctccttggacaatcatttgtcctacccaattaggtgacccctactccctgatcagaacccctagattcgttttaggagccactgccatttctatttgcatcattgcttcccctgacatgaagaatttatttccttatttggactttcccttggagacattgatctctgtacgttctttctatataaaggattttgtggcttctcataaggtacaatttacacaatatccccaccaatttattcccttcattgtccccattcgtaacctgcatattcccctgactactcaatcgcatcctgcacatccccctaatcctccatcagcttgctccccttattggtctcaaccttttgtacccatggaagaactcaccaacaccctttctgccaatctgaacttaactgaaattgagacaaaaatacattattttactgaaccatctgaacttcctgaagatgagaacagggaagagccttcagctttccttgctgtcaagctgctgactacttgccactttaaccctgaagcttttaaaaagcgtttaaaagaaatgtggcctgaacgcttctcaatcaatgtgctagaaaaagaatccaacttcttcaccgtggaattcggatgctttggtgatcgcaggcgtgtactcattggacaaccatggaactttgattttaaacttattgtgatgtcaccccttgaagctggttcggttgtcacagctgatatgctcacttcgactcctttttggatccaagtatcgggtattcccttcctcaaatgttcccgggctcttgctagaaaacttggggaggttttaggccggttcatagaggttgacactgcctctcttaaggaaacctggggtccttatctccgtgttagaatcgagatcgatgtta

SEQ ID NO: 127399 - DNA, 2571 bp, Cannabis sativa
  modified_base (1351)..(1355): a, c, t, g, unknown or other
tatttttatattaatttttattatcatgcttcaatgtataacttattaaaaatataaagtaataatataaagataaatataatatttaataataataattatgcaagttatttaatcaaactaacatactaactaaaatttaataatgaaatattaaaaagggtataataataaaggattaattgcacggaaagacgtaaattgtattttatttagagatatatgaccacttattaaatttaggcatataccgaatactatctatcctaaattcataaacggtatactctatacattcacatatataacaatatgtttttttttttaattgttgtctctgtcctctcttttagcatgtgttgcttgttggtgttggtattgttattattattttttaaaaaaaatttctaaacttttttttattagttttgctatttattatcaatctctctttttataatttgaaaaatctttttcagctacactgatcattattcaagctttcaaattgtattatagtcttttttttatctttctttattttttttttcaaaagtttaaaaagtttttttagtcacaccatttattatttagactcaaaaattacactataacaatctatttttcaaggtgatcattttaacatatgggaagcatataattttttgccgccacaaaaaaaatttacttaaattaaaaataacactaagatatcttaaacaataaaatcattaaatttaattaacataatttaacttaaaaatttaaaaagtaaaattatgattttaaaattaaaaattaactttttattgtctcagaagaacgaccaatattaaaagtaactattttgtttctttattatattttgtaacaaaaagtaataaaatcttagagttaataaaattaaacatatcaagtaacatcataaattgttataattttttttttttttgttttgctgtatttaaaagttacgatatagtatactaataacaaatttatttaataaaaaattttgatatgttaatatgaaaatttataaagttaccaaatagtatcttaaacataatagaattagttacattattaaaattattatatatattaattttaaagttaactgatcaaagattcaaaataagcaattgaatgtgtatgagaaaaaaattatcttcaaataatttttgttaatataaagtaactaattgatatattatttacatcaaaagcaactaaaaagttacttttttttttttctaaaacttgcaaaacattgaaatttctggaagcgaattttttttaagttttttttattttcggtaattttttaaatttcggtatttgagctgannnnncatatcggtatttgtgcaaataattttgttgaaggtatttttataaataaaatcaattttaggtataatattaaaaattccccaataataaatatacatgtgtttggattgttggaaatgattctactgatgagttttggaactgtgtttggtcttgtgatgatggttgcctccacgggcggtgccaggacttaattactaggagggccaagcagccttttaaaaaaaaactatagtgcaccttttaaaagactatttcagtccttctctatctattttggcattcaggagagttttttagtttatttttttatgatcgcatatgttatagtattttatgaccacctataaatttttagagaattcttaatagtttatagtgcaaaaataaagttcaaatagttgcttaccatacttaaaaaatagtcacgagtatagtaaaatatttaaactttatttttgacattataaattattctatttttttttttgaaaatttacacgtgattctagaaaaatacaatatacatagtcataaaataaaaaattcgactacaaaacttttctgaatgcaataaatgatgaaaaatagatcaaaatgacccttttaaagaatgtacaatagaattaaccaataatttttgtaacatgcaatacatataaaaatattttttataatatacactcccccaaaaaaggtcgttctaatacacctttctcagtttaggcatccaaacacaacaaaaaaatgtcgttttagctgcttttgctggaggaaagaatttggagatgaattttatcgccaagtcttcccatgtgttgataaagttaggtggcagggataccaaccaactctttgctaattctctcaaagagaatgggaataacctgagtctgatggcatcatcactaaccccgttgatcttgaacgtctagcaaagttcaacaaaattagacatatgcgtgtatgggtcttcaaaaagtagtcccccaaactagattgttgattcaaccatttgaagaataggttaattttgaagttgttagcatcaatagcgggtggtcttatacaagactgaactctcgtcattatgggtataacactacaaaaaaaagaatattcagctacaaaaaatttggtagcaaataatgcctatttggtagctattaaactttttgctactaactttttttggtggctacttcgtagctaata

SEQ ID NO: 127400 - DNA, 728 bp, Cannabis sativa
aggatattaatgaaacatacttgttagtaaacctagatcctggtaaaatatttccaacatgcgcatgggcttgagtggaggggagtttgggctttaggagctccttgtgtgaggatctcatctcgtgctttggctcctcctcgtttcggctcactcccttatatgatttgagcctattttcttgtcttctttacattttttaagagtactttgagattttccttcccattaatctaaagatcttcaaaaattacatttgtaatttttgtaatttttggaggtcaacaatagtcatctttgtaatttttgtaattacactttctaatttttggaggtcaacaatagtcatattagttttagtcattagttcattattaaacagttgtgattaatataaaaattaaataaaaataagtaataaaatatcttataaaacattaattacgattaatatatttcgtttccttataaaacattaattacgattaattttatttttaaattaaataactactaattagtttttcaattaatcactaaacaagattttcttagcaattaatttttttgcacttaaattattgagatacaccaaaacttaataataatttaatattaatgttacacatatgattttacttcagaaaatagaagataaatatctcaatcgttaataatatatatttattctatataaaatgtggttatgtaacagaattcttggttta

SEQ ID NO: 127401 - DNA, 2728 bp, Cannabis sativa
  modified_base (90)..(116): a, c, t, g, unknown or other
agaatttatacattaaatataatcatgaaataaatcatttgaaccatgcaacataaaatgtaatttctgttctttattaattagtaaatnnnnnnnnnnnnnnnnnnnnnnnnnnnagggcacaaaacccaacaaagtgttacgcaccatttatagttaaatgattatgattgttatagtctcgattatgatcgagatcccgatatgtgtttgttgtgcctcgattatgatcgagggttggaaatagtcattactgttatgagtaattactcttaaaactctggataggtttcttacttatcgttccaacgatagtgacatacatagcttatggataatgagtggtaagggtgctttatgaagcactgagactgtgtgataataatgatattaaattgtataggcatgttaatatgtgatatgttatgattgcgtacatcttgtcatggtgtgattgcttggatttcatattgcttttggatttagttacttttcttgctgagtctttgtgactcacgggtgcttaatggtccagataaaggaaagggtaaagtcgaacaaccatgagtttgaggtctcttcagtagtgtacatattagtcgcggtgctacgactccagtggacatgattttcctttttgtatgtattttgaagtgtgaactcttttcgtaaagttacttttggaactgattgtaaatattttataaaacattttataaaacagggggtccccataaatattaatagttaacttttataaaaattatgtgtttatcttgattataaattttaattacccacacttttcgtatatttataaaatcagttaaagattaattttgtaaaaagcacacacacgtggcgtccctgtgggacagtgtgttacaatactaattttgtgcttagtgattcggaacgtgaatggtctataggaagggaccagtttatctctttcatctctaacctggttgattctcgaggccttattaacatgcatattcagggtgacaagatgacttgggataatcactgttctggaaagaaccatgttaaatctactctcgacaaaggcttggttaatggggcctggctcatatttattccaaaagctgttatttgtatgtcccaaacgagtaactctaattatcatagacctatgtgccttattactggtgggctggaggccaagtttaaagatgttttaaatttgaagaaggatggatgcaggatgatagaagtaagttggtgattgtccatgcctggaattcggttggtcacttttgggctccgctcctgcccgcatgtttaagaaagtaggagctactcgagttgctctttttcactagaatagatctcaatatggtatgctcaccacggttattaaagggctggagcaacaacttaacttaatataaagttaacctaccggatcccatgattgggatactgaatgtagcatccgatggtccctgaatgaatctttagaaagaaaagcattatactggagacaacgggcaataatctcttggcttaaggaaggggataaatattctaagtttttctttctctcagctgctattagaggaaggagaaattccattgagagtatcttgaacaaagatagtgtctggattactagttgagggttaattggacatgaattcattcatctctttaaagggatattctctgagtctgatgatggacaggttcttaattgcagtcagtttttccatgagaggatctctttagcagaccaggaggagtttctaaagtgccctacacatgatgaaatttgaagaactctctttgccatgggcaaccataaggtttcagttctgttctttaaacactattagggtcagcgggtgaagatttttgtgatgtagtttctgacttttttgtgtctggcaatatgcataagagaattaatgctacgaatatagttcttattcccaaggtccagaacccaaaagaacaaactattttaggcttatttctctttgcaatgtgatgtacaaggtaatttctaagataattgctaatagaattaagcctatcttaccttctctcatctacccaactcaagctgcttttgtgctgggtaggaatattcaagataacaatgtgattgtgcaagacattatccactcgttcaactggaaaaaaggcaaagagggttacttttccattaaaattaaccttatgaaagcttacgatagaccgagctgcagattcattgaccaagttcttggttgttatgggaatcctcacaaattcgcaaataggtctcccagtgcatctctaccaccactctcaatgtctgcatcaatgggggacagattggtaagattaaaccctcctgcggcttacgtaaggtgaccctctctttccttatctcttcatttgggttggcgaagtgttttcaaggcttttagaggatgccctttttaagggcgctattcagggtataaggcttagcaggggtggtccagttttatcccatatcttcttcgtaaattacttaattctggttggtaaggcaaatttgaatgaagctaaaagttactggcactgtcttgagaggttttgttcttggtgtggtcagcaagttaataagctcaaaactttaatcttttttagttagaatatctcctacgacatgaagatagggatcaaggaagctttggggatgttgggttttatggcctaaataaaactcatttca

SEQ ID NO: 127402 - DNA, 1095 bp, Cannabis sativa
  modified_base (1022)..(1050): a, c, t, g, unknown or other
acagattggaacaaaccttcttacttgagatcttatcctttttgaacttactggagacgacatttttgtagcagcagatcttaaatttgcagcagcaggttaattcgctggaacactagatcttacaaattttgtttttccagaagtttcagtaccatttgatccaagaccaacaaagcctttttgacctacattctgaacttcctcaaaaataaaagatccagggttaagcatttgaatattttttttgaaatttttaagttccttctttaatagaataagttctaatgctaaagacaagagtattcactggatgtcatgagaaagattaagtaaacataaaagcacagggggtatgggatttcgtaatctctgtcatcacaatttatctcttcttggaaagcaaggttggcgtttccttactcgtccaacttcgttagccattagaattttcaaggcaaggtattttcctcatggcacttatctcacgactcaacttagtcacaatccgagctttgtttgacgtagcatttgggaggctcaaagtgtggtaactaatggggtgcattagaaaataggtgattataaatcagtgactgttttgggtgaccgttggctaccagatgagaataatccttgtgttacatcctttcatctagctcttaatggcattttggttgaaaatctcttacaagttgatagtgttggctggcatttggatattgtgaatgatctgttcaatgctagagacaaagcactaatatgtggcataccgattcaagctaatgcagggccagattctttttactggtcttctaagatttcaggggaatacacagtgaagagtgcattcaatttgttgtagaaaatgaatggctcttggaaccatgtggctatttcgagctttaggaacaacctatggagattgaagatccttcctaaatgcaagaatctggtgtggaaaggaggatcttactgtctccctacgatggtcatgttgatattaatgttgggttttatgnnnnnnnnnnnnnnnnnnnnnnnnnnnnngatttacttattaataaagataaaaaataacattttatgttgcat

SEQ ID NO: 127403 - DNA, 695 bp, Cannabis sativa
ttactttcatgattatatgtttagtatataaattctattggatactgaacatatagctatttatgattatagtgttgtctacagagtggaaaataatcatgattatatgcttcaaagtacttagtcccattatttataagtgcactggatttacactaacgtgataatcggcgataaagtttacttacacttatataagtgtagcatagtatactagtattagatgtatgaggtattgattactgctcaaatttgtatattttaaccttttgattgtgcgtataaaattaatttaattaaatatttgtattgttttaattgtaatatttgtttagttggaaatattaatttatttaaatatgatgttatttttcagatttggagcacaaatggtaaaattataaataattaaagaagagaattgaagaccaaatgaaatggcccaagaagcaacccacgttcatgcatagtcatttcttcaattgggcctcctatctcatgtccaattcaatgacaattgtactttggtcatcatgttcatttaagtcccactatctcaaccaagcacacgtaattgaaaggataatttacatctacataccttttttgtcttttattatcaataataactcaatctatctaaatattaattttaacgttcctttctaacgttttttaaattattatactgtttt

SEQ ID NO: 127404 - DNA, 1895 bp, Cannabis sativa
  modified_base (1847)..(1848): a, c, t, g, unknown or other
ataaatacttaaaattttaaatttgttactaataaatattgaaattcgaaaaatagtaacataaatcctcatttatagtttaatttttattctgatgtgtgtgttaagttcaggttccaatttattgtgtgtgtttttaatgtttgagttttagtgttttactggggttctaatgtttgagtttgtgtttatgagatctattttatttatttaattatttatttatttttatagattttgagaacttaaaatttgatgttgtttctattgattattgagattgaaagtttgatttttcatacggtaattaaagtttacattttcatttcattgatttaaaaatattagtagaaagtttatggaatgagaattttgaatatatgaaaatagaattaaaaaatagcatttgaattgagaatcaaaattgtaatagaagtttctatgtaaaattccgtaaaaataaaaaaaaaataataaaaaaaaaactattttgaagtgtaaaaataaaataaccctattatttattatttttttcattctgtcaaataaaataggatatagagttttaaatttaaaaaattaatttatgcaatcactcttaactaattttttttatgtgtatatataaattatttttaagtgaccatataattttggttcacatttttattatatagatttttattgtagcttctttcgagaaaaagatataaaagatattttttataagttagttgcaaaattagattttttaattcgttctaaattaaatatagatttttttaattagttacttatttttagaaaactaatatgtatcaatatatataagcaataaaatcgtataacattatcatttaactaaaaatttaatttgaattatcaaatagaattagttgactacatcaatatagagattataattagttattattataatgttttaaatgttggtaattaaagaaaaaagagatagatagatagtgatgttttttcttttgaagactgtagtcaatttggaacaatttatgtgagaaggtatgattattttaattttatgtttttttttaaaaaatgtacaaatttacaacacaaactaagaaagactatacatcattaaggctttcttttgaaaggtaataattgtagtatgaacaatctaaataaaaaattcaacacaaggaaatcaaacaacattttatcactaaaaaaacagaaaaagaaaaaaaaatcagcatgtattgaaaattataaaatgtttcatcactatataaattttctatactaataaatgatataagaagatttgggattggctttaatgtttttatgttgtcaaagttaaacccatgattgatgaatatgtttatctgatagctttgttgattttctctttctcagcaatcatgttcagacatatatcatataataataatataaatgacaacaaattattctaattatattgtttattttgactgaaaataataatatgtgaagaaagaagatttacaacttgagttgatacataaacatttgtaacacaaaatttcttaaaaataaatgtaaattaatctctaaataaaaataacataattacaaaatatttaaaaacaacactatttaaaagaaaaactttaaagctacacacaatgtacataaaattaacatagagaaataatataactaaatagaaataacaattttttttttttgagaaaaagcatttatattataaattccaataagtttagacctcatggtcgttacaaaatatattgtcaggtaaagaggacatcgcgatagtcccaaacacttgatgagcaaacgcccatctagccacgttnngagcggcaaaattacaagttctacgaacataagaaaaattacaacta

SEQ ID NO: 127405 - DNA, 949 bp, Cannabis sativa
ttgaagaactgtggtggtgatgatgatctggtagaacaacggcttcgggacggcgtctccagtcgatgaatagccgctctttatcagctaaaccgcgctgaaaagagactatatcgccagcatcgagcttcttctccttaacgaaacggctccagcctttggtcatgacgtaactctggctgctgttccagtaagagtaacggaatcgccatggcttgccgtttcggtcttcgaaattgagaagaagtcctttctcgtttgtggaagagtctaaagggaagtacttctccgcgtgttgttttgggatcacaagtctgttgagctttcccacatcgcttggggttactactttatcgaacatgtgctctctttcaacaactacttctgatctgctgctactcatcgaaacgacgtcgtcatggccgtttccatttcctgttgttgtagtactcgcgggcgaagagttcattaactctagctttgtatctggaccgttcatcatcatcgtcagatgattatgatcgtcgattgaaccttcagctgccgccgccgttgcaggccagctggctccagctactcctactcctcctggagaaatgaaagactttacagctgtagtagtactggtggatttgtacttatgagtatgagaagaagaagaagaagaagaagaagaaaaaccgttaacactagaaatataattaggactgtaattataattacctctgtcctcatgagaaaaaaccatgcgattattattattattattattatctctcgctgacgacccaaaatccattatcaaaaccaaaacccttactctatattttcaactcacagatcttggccagattacaacgagaatccccgattggggcttttttttttcttggctttgggttcaaaacccttctctctctctctctttcttttagggttaatgatgatg

SEQ ID NO: 127406 - DNA, 974 bp, Cannabis sativa
ttgagtgaataaccaatgaagagcagaaaactaaattctttgctccttactttgtcgatcttgagtgaaaaaaatgttgattttgaaattaaaagataattgcattttctattctacaatatttttgcttctgaaatttactcgacatatacgtgtatttttgtgcagagactgatatttttgtcttggttacttgtccagtgttgaatttgacaagatggaatgaagcggatggacggagggtcaccttagtttccttcgcccaaatgctttcaactgataaaggagagtaccaatttgttatgttgtactcaattttgttttctggatggacaatgtttattttttcaatgctctatttattttgaaaaaaagaaagaaataaaagaaaaatcaacaaaacaaaatggtgtacacgtggatagtctcaattttgtttgttcatattccaacaaacgagctcacatgctctgtggtatttgtactcggagggtggccttcgggcctatcattttgaatgtttacgctcatctatgattgcatagttggacattctatgtgttgacaacatggaacatgcaagttcctgacgagttgtcaatacactagtcagttaaaccaaaacttatgtaaagaaaagatccttactagttgaaggatacttggtcatcacatatactcggtatatgtgcgaccagtattaaatactctcggtcttgcttatatttttgactatacgagacatagtatgcgattacacttgtctcggtggtatcttctcgcaaattctcatcaagcaagattaccctataagagctatctactaacacatcatctttttattaaaaactgggttcacgtatcaattttatacaaggttgtactcatacttcttgttatctctcaaaaaatctaaaataattgtgcatgaatttttactctagatatggaggtccaacaaggtggagcttatt

SEQ ID NO: 127407 - DNA, 1233 bp, Cannabis sativa
gacttagcaaataattcaaatgttaagatcttttgatccacgtgtccttgtccggttggtccacgtatattgggcaaaatcagggacaacaacatacatttcacttatttaaaagaaaaaaaaaattgaataatttactatgtttaatataaagttcaaactaattaattgtatgtgtataaaaaataaaaataaatgatgtaagtgattgtttaaattttatttttagtatgataaattatttataattttttaaaaatatgcacgataacaagtgtctactataattataatgtatagtgtcatatatataaataaattataatttatatatataaagaaaatggcccctataatagaaaccaaaatgataaaaataagattaagtaatttacaatataaatacttaaatttaattctcaattgtaaataaatatataaatttaattttttacggtaataatatctaagttataattcatgaatttctataagtatccgattgttaagtgttaagtaaattgccacatggtaattcttaattggtcaagatcgttaaatttttttttttaaaaaaatagtttaatataccaataagaaaatgacaagtggataataatttgacatttaacgaccaaataccgatacagttttaaaaatataacttaaatattattaccgctaaaaattaaacgtatgtatttatttacaactaaaagttaaacttatgtatttataccacaaattaatctcaaactaacaatcaacttcaacattaaatttcctattgtgattgtgttaaagacatttcattaagtttgttgcatatgtctaatcttcatcatcaaactaccatatgaacatgcaagtactttcatgtttggctctcattagacaaatgggaccattattattggaccactaatcaaaaatcatacaattcaacactccaaattccaacaatattaaaagaaaaaaagaaaaaatatattatctttagttagtgactacgtgtataaatacatatcatacgtgacttaatgaaaaatcaattacaaacatgaacttttgtaggaacttttttattttggaaaaatttgctaaactaacaatataaaatttacaagataatactatttgcttagtgtaaaatagtactcccaaataattatgagcatgtttggtattattttctgttttttgttttcaaaaaattgtttttagaaatgaaaa

SEQ ID NO: 127408 - DNA, 1218 bp, Cannabis sativa
  modified_base (1163)..(1173): a, c, t, g, unknown or other
aaaagtttaaattctgcgttattttaattagtaatcccgattaggggattagggtttcataagcattttgggtagcgcgcctaattatttagggcgttacacttttcatctcacaaatctggcagcgagtcgaagagttggaggtgatgatgaagtttcgggagactaaaatcatcatgagctctagttgccctagtgaggaagttatggttagagataactcaagaggtattttacgaagctttctattttttctattaaaagcttgaacgagaattcatttcaaggcatgaccgctatacttagacatgagattagtgggacacttagcactaattaattcgactatgtgattatttatacattttatgctttatagaccctattttcatgaaaatatgtgttatgattattatttctcaattctagagattttattaaattataggtgtgatatgcatgctatatgtgaattttcataattttacatttttatgcctggtaatactagaaatgggtcgcgtgacaattttagtcacatagatacaaatttgtatcaagtattttatgggacaatattgttggatatcttaaaatatcggggtttaacgaagtaacagagttggaccattttacccctagggttacgagataacttagcggggaagtaaggacattttagtcttttgccctaagtgattaatcaccttttttaagcgtttctagggttgtgactcaccattttattggtgatcatctgcttatgaagaaaacaaaaggaaaaacaaagtaaaaaggaaacctaagcctaaagtaaaagtcaaaagaaaagaaaaaggtaaaaactaccaaatgacctcatttttcttcctctccttcgtggcttctgaactaaggccaaaacccaatattttccaccattttcaagcctctccttagctggaattcatcaaggagttcaacccctagctcctccaaacttctaagataagacctaatacttaaattgttagttttcctaagttttgattggtttttagtagctgtttttagtaggtgttgtgataaatctaacacgcaagtatatgtatcgttttaacaagtaatatttaagtaaatgagtgttggaattattttacaaggatcttagatttactaacaannnnnnnnnnnaacatcctaaatatgaacttttaaaacgattataaataaacacat

SEQ ID NO: 127409 - DNA, 830 bp, Cannabis sativa
  modified_base (484)..(484): a, c, t, g, unknown or other
atatatatatactattattaatctcatggtatatcatgaagtgttgttgtttcatttactcttctttttaattttaatatatgtagttatgtttactttcatctactactttgtaataaatgatttaattttattttttcttgttatgtacactcaagctttgatttatatatgcatttaaaattatttatcattttaaattctaaattaactttaccttataaatatttattaaattatagtatcaaggtagatgaaagattctctcattcagttcaaaatatttatttaatattgaatttgaaataaatatatgtaactaatgaagaaatatttttttttttaaaatagttgagatgttctctcaaagtggttgagatgttcctttttaagtggttgagataggctttcaaattggctgagatattgtggtcgagatcttatctctaggagtatctacaatggtaatattttttaaaggtgntatatatctccacatcatccaaaaatatattattttattctatctttcttccacatcattttttacacctttatttctaaaaatattctaatggtataacacattttaaaaatactataattatgatctcacacattataatatatataattctttttccttattaaactattacatatatattacacttttaattttttatttaaaaaaaacaaagcatgaatgacattgtgtggcatcaatacaaatttcaagaataacattattttatctcgagtaatttgcggcataacctccttaagtggtcaggtttttacaactaacccccaattgtaaaattttggtg

SEQ ID NO: 127410 - DNA, 1656 bp, Cannabis sativa
atcaaaatcataaacagttaattggtgatcagacaattaaaagtaattaagtatgaatgaaataaaatacatcaaaattggaaattaaatcatattaaaaccacaaatcaatatcaagcaatctccatttaaaccctgaataactgtttagctattcttattcattgtagcaaattcacacatattaattttagaaaagataagagaataaagaagaaaagaatgttgaataccccgttgaaaaaaccttcgcgattgatttttatctccaattttcgtcttctttaattgcttcttgaaaactattgaagttcacttattttatagccaaaaaatgataaaaaaaaaagataaaaaatgctgaaaaaacctattctgcttaggattagaaggggccggccgcggcatgagattttcatgcctaggcatgacccccgtttatttgggcagtgagttttctactttgtcgactgatcgtattttggccataactctctcgatattgctcagaattgaacgattgaagatgttccaaaaagataaaggagagatatagaacttttatgttttgactttttccaaaatttaatcaaaacatagtctgaagtttcaactttattgttttacacaattttctctattttatagattatcttttttaaaaaaaaaaattgaccaatttatacattcaagtgttgaaacttgaaattaaagaaaacaaacataattctatttaaaaaatgataataaagattaaaattaactctaaaaataacataaataataggttaaaaatatcctaacaatatctcaatggaatatcttaaccatttttagaaaatatctcaactactttgaaaaaataatttcttaatcaattacaaatatttatttcaaatttaatatttaaataaaactgaatgagagaatctaatcatatcttcaattgaaattaaaacttaaccgattttttataaatatttatttcaaactcatatttaaataaatatctttaacaaaatgagaaaatatctactttttagagcaaatatatcaaccatttagagtgaatatctccaactacttagagtgaatatctcaaccacttagagtgaacatctcaactactttgagagaatatctcatccacttaaagaaaatatcttaaccactttgagaaattatctcaaccattttaaaagaatatctcagctacttaaaaaaataaatatttcttaatcatgtacaaatacgtatttcaaatttaatatttaactaaatatctttaactgaattagaaaatctctcaactagctctagaaatatctcaactattttagtaaaatatataaagcataaaaatatttataataatatcttaaatttaaatttaaagttaaccaatttttgtataaatatttatttcaaactcatatttaaattaaaatgtttaactaaaaaaggaaatatctcaaccgcttagaaaaaatatctcaactacttatacaaaatatctcagccacttagagggaattttcaaaccactttaaaagaatatttcaaccacttagaggaaatatctcaaccactttgagagaatatatcaaccacttagagcatctctaatgaagaatgcttgatgaggtggaaagctta

SEQ ID NO: 127411 - DNA, 1395 bp, Cannabis sativa
ttttaattttaaaaataaaaaactgattaaaaaagtgttaccaaacgcattctaaattagtcaccctagtttggtattgttgtaagggtgatgtgttgtattcaatttggtttagagttgtaaatttggactgtaaacttaatttgctttgttgattgagtttttattgaatcattttcttgtcatgattttactgttacgtttttaaaggtttcttgtttgtggttgtttagatcacaacaacactcacattgttaggtggcgtttggttagaaggaatgaaaacatattaatgagaatgggaatgggaataagaataggaatggaataaaatttaaaatgcataagaaattgataaaaaaaaattattaaagtttttctcatcatgcattggaatggtctttccattttaaaatagaatagtcattttaccaaaatggtggaaaggccattccattggaatgatattccaatactttaatatacaactaaacaaaaaaatagatggaagattatttcttttcttttctatttcatttcattactttcaaccaaacattcaaacaccaccttaagtttatgagagacaagttgttgaatagacacttcgaaattctaaacttgattttgtatgctatcaattataattaaaatcataaatatggttttgcagagcaaaacagaacccaacaagcaacatgtcaattatggtgtgaaattcatctaacttggcaagttgctttttttataaagtactacaaatttgcctaaattcatattctcaacaagaattaatagttttgagttctaattagtttgtttatacattgtataaccacaccaacttcacacataatacaaaagaataaattgcagcaaaaccctaaagtataaaagtgttagcaatttacatatttcatccattttaggtgtgaagtgttatattaaactgtccaatatacatttacctgaacacaatgtacacatgacaccctaaagctaatgaagaggtcactgcccctgccttcctgtttacatgccttttaaggggtacgatggatataatgaagttgagcaacccatgactgcacgagggaaaattatgaaggagatgtggatctcttcgccttccgtcctcacatacaagaggctggtgaatttagatatgaatggtctcgttggggaggacgttgtggctttcttacctttcaacgaccgacttgctaacaatcttggtgagggcttttgtgcgtggtccggcccgcaagctcaataggtagctttgttgccacttcacctgtacttccaaaggttgaaaaattataacatttgtccgactcaattcacggcgaaggcaattaaatactgttggaaattttattttaccaggatctt

SEQ ID NO: 127412 - DNA, 1957 bp, Cannabis sativa
ttaaaaccaatatactttctcaaaaattggatttgccattgcaacaaaatactctaaaacatcgtacttgaaagttaaattggattgtcaaaactaaactaaatgattaaacactctaatttttttagtgttaattttattgttaagtaactaaagaaataaaggttgtatctaaatatctgcttgataaaataaacttaatattccacactatcatataccttgattgttttgtttgtaggtggtgttagaattatattgccataatattcctcggcagtaacatccccgatcaccccctgcaagaaaaaaaaatcagctaacaacaatatagaaattcatatctgctagataaaataaaattaattttttccacactatcacataccatgcttgttttgtatgtaggtggtgttacaattgtattgccaaaatgtttctcagcaataacatctccaatcaccccctacaagaaaaaaaaaatcagctaacaacaatagaaatttatttaaaaaaataaattgactttacaataattttcttatatttaaaaatatacttttataatattatcaataaaagctttgttgtttatggcagcaagtattttctttatgtcagtttctaaattattatttttttttagaagctcttcattttgtttgatcagattctcattctgctgcagaattttctcgttttgttgaaaaactttatcattctgttgcagaagcttctcattttgttgcagaagctcagtaatgttgatcatgccctcaactttcctcgatgtctctgcttcttcttcgttttcctccatgttttcctcattgaattcagcatctttgaattcaaccatgtagtgttgcttcaattctgcctttgttggtatcattgttcgcaaaagaaccttaaaataataaaatacaaggtaattactcacaaattatatttcacacaagtaatatagaattataataaagttaaaatataaaagtgctatgtttggtattacttacatcgagatcatcaaatacatcggtcttaatatcataaaaagtgatcccttttttcttttcttcggaggactcttgttgttttttacatatccaatttgtaatcctaggcagcttatgtcctaccttatctacataaagactcaattttccaatgatctcaaaagcaaaaacttgaagggcatatggacatcctcccaaaaatagatttgaattttcagtgttctttgttgggcattctttagactttcaaaagtttcttgaaaggataatcttccccaatgataatcatcaaacactctgaagttatctaccatatcaatatgcctgctgtcaacatttttcttcaaagggctgggtagcaagaaattttctaccaagtgtagtctaatcaacttgaacaacacctgctcatcttgccccgtacattcattaaatgcattttgtatgtctattttttttttttacttttttctttcctataaacacctctgtccagagagaacctcttatgaatgtccttttggcaatagaatcatcaactgaggttttcaatcccataatcatggtaaattctttcaatccaaaactgaaaacttccccattcatcatatagtctaattcattttctgttgaaactgatgttcgtaacaccatatggcttcacaagggatttattgcctgaaaatttatatccaataagtgcccaaatgcactgttcctcagcattccacgctgcctatcagttaacttggatgttatacttgtaattattgacaaaggtgcgtaacaccggactttctttttcgtccattgatctacaggtataacatatggcatttttatgaatcctacataaaacacatgtgtaccacaggtcatatatacagttctcatatagagtatatacaaaaatcaaacaatataaaacatattaaaac

SEQ ID NO: 127413 - DNA, 1189 bp, Cannabis sativa
ccagaatgacgtactcgataagagccattcattctgtggccattcattctgtgggtataaattctgtgggtataagggcgtgggtataagggcccaaggtataagggcccaatggaggcttgaagcggggacgttaaacatttggctgaagcttggagatagaaactccaaatttttccacgcttcagttgcagtaatgaaaagaagggattatatttggggactgagagataagcaaggcaatctgtgggattcaaaaggtaaagtggaaggtattataaacacttattttaatgatctatattcctccattgatccggaattctcagagaactttgacattcaaaaacaaattagcagagaagtaaatcaagatctagttgctattccttctgcagagaaaatacgaggtatagtttttgagcttcatccactcaaggcccagggaccggatggcttcttggggtgcttctttcggaaatactgggagattgttagaccgttggtactagaggcaacccaggagtttttctgtactggagtgctaaaccctctggtgaaccatacttttatctgccttattcccaaggtagatcatcctgagttaattgagcaattcaaaccaataagtctatgcaatttttagtacaaggtgatagcaaagattttatccaataggcttcgaccggttatggaggatttagtgtctccagtccagtctgctttcattccagggagatggatagctgaaacttcaattctaattcaggaattagtgcataaaatttgccgaatgaaagggaaaggtggtcttatggccattaaattagatatgcacaaggcctatgataagatggagtggagtttcctagataaagttctcgagaggaatggattcagcgagaaggctagaagtctccttgtggcctgtgtagcgggagtttcttattcggtattactcaatggaaatcccttgaagaagtttgttccatatagaggacttcgccaaggagatccgttatctccttttctatttctattgtggcaagaagttttatcaaaactaatcttgaatgccgaaggacgaggtaggattcatgggattaatattgctagagatgcccctgttggaatttattttaccaggatctcagatctactcacatgtatgttgtttaaacaccctaaa

SEQ ID NO: 127414 - DNA, 815 bp, Cannabis sativa
tttttaataatttcttattatttttaaacatttcatcaatcaatcaagtaggatgcttagcttttgaacccccctttcaaacttgaattttggagttgaaatatgaattagatagcaatatcatccactattgtttagtatatttgaataggatgatcatgccctttgaattttctagctgttaaaaatttttcggtgattgtctgtgcaataaatgatgacactctcgaactttgacatttaccaaattatgtctcttaaattttcatccatgtcagacttctctaagtaaaattagaccaaagttcttaagcaaatagtctctatagtttagggggaattttttttctgttgaaatcattttcttaaactaatagtcttatgttaatgcagtaccgctgatcatactaaatgggtgggagcatttcaccaaaagcaagatttcattgatgtagtagaggtacctatttctttgtgaccatttgtgattcattaattgttcttgagttgtatgaatctgtactatagctttcttacctttgattttttaaactatctgatgtatgtctttatgagctttgatttgaatatctgcttatctttttggtaggctatatatagaggagccatgaaagggaagcttattgtgcattgtcccttgccaccagaacgaattccgaaatatcagttattatacaaagatgtatagaagaaggtgagttcattacaaaagccttcatatatgcacagattgtcaatatgaaactgtttggaactttcttcatgcaaagtcaaaacattttttaatcgacggg

SEQ ID NO: 127415 - DNA, 675 bp, Cannabis sativa
  modified_base (521)..(521): a, c, t, g, unknown or other
  modified_base (613)..(617): a, c, t, g, unknown or other
agagagagagagagagacttttcactttcttatttttcaatcccaaaattgtatctctcagtgttacatactttcactattatgtaaatcattatatatataataattaaaatctttttaatcctataaaataaaaagataatattattttaattaaaattcaaaatgaatatcatatatttgaataacataattcaattatatcattttattttatattatcttttaatttaaataatgaaaaaataattatcatttattttaatttatcttattaaataaaataattaaaataaattaattgagcggccaaaattaattttgccataaatcaaatattggttacttctaatattggttacttcaaaatgtggggttgtcttgcttaatgtaagaagatcgaactaaataaaaccaagttgggttcaagggccataaaatgtgcatttgttggttatgccaatagtaaggcatatatataggctattagatgtaaaatctaatgttgtaattgaatctanaaaagtagaattttttgagaataagttgtatgagaacaattctcaaagtttcatacctctaggtgagaatattttatatgaaaataattctnnnnnttctacttctaaaagaggatctcaagaggagaacactgctaaagttgtagaacaaccc

SEQ ID NO: 127416 - DNA, 1422 bp, Cannabis sativa
  modified_base (1383)..(1385): a, c, t, g, unknown or other
ccccccggggacatttctatcctgaaaaacaaaagttaatagtctgaaccaaaacctatttcgcttctagcccaatacggtagtcctaacttgtctaacgaatttaaccaaagctaatactttgagtgtcaactttgcaaacttcaaaggaaatcacacactgttcgattctcttacgcagctagttgaagagaaaatccaaatgaaagcccttgataaattggaaaacttcttcctcagtaactttccctctcaagattcaaacttgtcgttctacctctccaactatactgaatgcttgcttaatgacaaaatttgaggaagaagaagaaagaaagaaagaagaaaaagaaaaagatcaaaccttgccgtcaggatgaaaacaagggtggataatgccattcatgtcgaggtataaattgtcgaattccatgccattggggttaggtctggagacgtcgataggtctggcgacgccattggagtcctcgttcggctcttcctccaccacatccacgatcgagagtgggtaccgatccgccagccagcggtaaaacgcaggaacgcccattaaaacgacgtgtcgttttgagttggtacagttggatctaactctgttgctgggctgcggagccttgaaagttagaaagggagaagaaaagggtacctaaaaataatgactcaaagaagaagatgacccgagatttgcttgagtatatgctattatgaataataatagagcaagacaagcaagaagaacggggtggaattggaaatgtggtaagaccataatgcccttttcttgaatttaacttttcattgactccctgtttggataacataaatattagggagttgtatgtcctttcccatatatgacgtgtcttaagaagttaaatcctttgtattgtatgtagctcacaaaaatatcctaattagtcacaagttttgttattggtattgttatatgaggagattaccttttttctctttgtaccacttgcgaatttgaaatcgtggttgctaacctttgagtctctctaggagactctgagtcgttcttcgccggactatgaaggtttttcggtgtcttctcaggggtcgtcatacagcttctggcctcctctggttgtctaccatctaggcaattacaatacttgagatgttatcagttcatgcagttcagtctgatgggggttctgttgggcttccctatttctgtctagtgccactctgcctcagcttaggttttttttagtgcagtcaaagtgtgtttttccttgatttggattgtttctttcttagcttctttgtttgagtttttgttggaaatattttaccaggatctaaatttactaccatgtatgtttcattaacatcctnnnatgaattctaaaataataaaataaacacatataaagt

SEQ ID NO: 127417 - DNA, 2200 bp, Cannabis sativa
ttccataacttactcaattttaatctaaattgagttttgtaagaagcaaacttgcacaatgtttcaccaaatttcattctaaaataattttagaagtaaatttagcaataaaggctcgattaatgtctttaaatcttcaaaagcctaagccacctcaagctttaggatggtaaatggaatcgtaggctttagaaacacataaatctcgactactcattgccacccgtccaccaaaactttataattgaagcatccatctgtctacaaattttcttaggaattaagttcgaagccacaacataagatggcaagctctaggccactaccttaatgagagtagatcttccatctttagcaagtaacttcaccttctagcctaataatctaacatttagcttgtccaaaagaaacttgaaatccttacatccttctgtagacctcaacaaagggttgccaaggtaaatctcatcaaaaggtaagatattcatctgaagagctctagtcaccgaacactgattgtataaagagtattgttggaagagaaaagagctccagatttttggaaattaaccaattggcctggccactgttgatatctcaggatgcaatctttaagaaccaaggcttcacctctatttgcacaaaaaaaagagaagattgtcatctgcagacacaggcaagttatggcgagagatttggatgtcgtggatgttcccattaacttcctctttatgcaaaagtttagagagaacttcactatataaaagaaaaagaaatagggataaaggatcacattgacgaagccccctataaagaaataatctttttagcacagattttttagaaggactaataaactgactgagctaacacaaaacataatcaattaattcataaactcctcagagaaaccattgcccttaagcacagagcaagaaatgaccattcaatgtagtcataggccttactcatatctgttttgattgccatcagaccacccaaaactttttcctcttaaggcaatgaatcacttcttgggcaaggaccgaacactctccaatccatcaggcagggataaaggcagcctaaaatgactaataagatgatatgtaatgcctttaagatggttagagataatttctactaggaccttataagcaaagtaacatagacttatgggacgatactgattaaaactttcagcattctgcttcttaggaataaggcatgtaaaggaatgatttaaatccttgtgaaactcgccactttaaaaagcctcctgaatgaaagtaattaaaggaccacccacaacttcccattgagacctatgaaaataaccattcatattgtctagccccagagatctagacatattcaaagcccatacaaccttcttaatctcctctgcagtagacatcgccattagcttctcattctcagcacttgaaatgttttccaagaaagagtctcaaattatcaagaataataggacagaaggaagtaaaaagatataaaaatttaagattgtagtattcccatatgtccactcgattgaaaatccaggacccatcattttatttgatctcccaaatatgatttttcttgcgtctaaaggcattgaagaacttcatattttgattaccaagtctgagccaagaatcaggagatttctgtctccacattttttcttgagtttcccacagctcctacagtttctctttgatcacaaatttctcaaagtaaaagtccaacaaactaggaggactttgaatcgttaaaagacgatcttctaaaatgcagatggtctctcttatctttgtcgaaggtggccctaatccaaattctaaaagcttctttaacgaatttcaaacaagaattgagttgtttccattgattatcataagcccttttgcccccaagaatttgtaatgatcttcccacactctgagttctcagtctagaaaacaaaaagcaaaagggagaacccttttatctttgtccagatgcgtatccagaataatagggttgtgatcagagcccacaataggaagattaaaaacacccgccttgggaaattcagtacaccaagctgataagcaaatagcccgatcaatttttgttgagattttatgccctaaataaaacccattttaatctaatctgatttgttatcaataaaagattagaagtcatttatgtt

SEQ ID NO: 127418 - DNA, 996 bp, Cannabis sativa
  modified_base (273)..(277): a, c, t, g, unknown or other
taaacaacacaaaaatgggaagaactagggttcccaaattttccccaaccagtagaccagttctacaaccggaattccggttctgggacgaaacccaggaaacaaaccggaatttcggttcctacaggccactttgaaccggaattccagttcagtgcaggaaacactaaaaattccatatttcaaccaattcaaccccaatccactccaaactttccagacctgatctaaacatcctagaggtcaaaaacaaagcaataaaacacagcttcnnnnnccataacaaaattcaccattgatgagtaaagcttgagtttaaaaactcaaagcttgctcatccaactaattagctatcaaaacctgatcaattcaccatatataaccataatataactccagaaaacaaacccaaacacaaacaacaaccatagcagctaactcaacattttaccataaaaatcctaagttttgagtttaaaattccaaacttgaacaaaatcaactagcatgcatcaaaacctatttcattccactcaattaaacataaataaatccaagaacacaataacaaacacaaacagcagctgcagcaagtaaaattccaaagcatgcaaatattcattttcttaaaattcaagaaactaaaagagagagtgcaagagctatacgtagagcttggattgtactttgaatggatgtaaaatacagatttgaagcaacaaaataaatcagaaccctagctggtcccaagtggttcgaaaatgagagagaaagaggaatgaaaatgctattttttccttctttgatttttttgaataaaagatgaaataaatgaatcttcttatttcatttcattaacttaataccagccaacataaaataacttacgaaatataatcaagtccactaaaggacgaaataccaatggggcaaaatgaccattttgcccctccacacaaaaataacataaaaggggtactaagggtattttgggaa

SEQ ID NO: 127419 - DNA, 766 bp, Cannabis sativa
tgcaaaatatgcaagctactgaataacataaataacagtatcataaattaatcacaattaattgataatttccaaattagctaagcgggctttacagtattcctgatccatgttcgtcggacagccattggaactgcacatggattagctcggcatgctcttcaagtggatagagaactagtatgatttgatgagattccttcttttattgagatttcttaagacttaaagtttgtttgagattatgatttctttttccaatgaagttattcattgctaaaaaaaagtatacatattttaagagagtgagagagagagagtttctatatttaatttaatatattaaaattttgctaattagatgtggtaaaaagaattttcttttcttttctcgcgactttaatgttgatttgaattactaataatacacactttcttatcgatatatatatttatatatctatctatataaaagagaagtataagacgttgacatggcgctttaaaagagaagtatatctatctatacaaacctatgtatgcaaagtgttaacgaacttattagaaagttatatcgagattttatattattgtacacgtataacattgattctcataatttttttttttaattatgtgtgcttagtttgcaacaattataaatctctacaaattaatacttctttttttttagtcaattatgataatcatggtacaatattatctattaaaaatatttgattaaatttaacttcaaatttaatga

SEQ ID NO: 127420 - DNA, 1437 bp, Cannabis sativa
  modified_base (1258)..(1260): a, c, t, g, unknown or other
tgatctgcttggtaagtgacctgataagagaaaagaagagaaaagcttagcccaacaaactaatattcatccaaacagtaatgaaaaatttgagggaaaatggctcaaagcataattaaaacaaacaaaaagctaaaaaaacttacttggtaaggtaacactagttaacagtgttaatgcatattgattataccatgaccttgtcaatgtagagttcatgagctattaaatattacataatatttagtgtttgggtatagagatatggctattcttagttgggtttagtgtgtattctagggttggatatccaacccctatatataaacaattactcttccttctttatctctctaatatggtatcagactaagagtgagaaaaccctaaccaagatccactttttgctcgaccaagatccacatttcacgctgcctttttgccatggctcgcacacgcagtggcctccctccggtgtcagctctgacctttggttctcttgccagcgatcctccacgacgtgccactcccaatcccattcgtgaaactgtccaagaaccggtgcacattgccaatgtgatttgtgctggttcttctccgatcgcaggcacctcgaccattccagaccatgtcgtagctacgattgaaccttcagatcttcctccaatcatctccgagcaagctccagctcctctgtctgtcgctccaccggtcagactagctcctcctactgtttcttcaacaatgaacgctggtgatgtttctcttggaaatcttggtcactgtccagaccgtacgattcctccttcttctgtcacttttagagctccatcaaggaatcttgctgctcatcatcgtcatacttctactatctccatgtctcattcggagtctcacgatcgtctggctagcgaacacaatccgcatttcatcagttcaggcgatcatccagatctcattcttgttactcttcctctttcggatcataattttcaacagtggcgtcgcgacttcaatctcgctctttgatcagttcttcaaacactgaaacataaattaaaaacaaaactagttccacaacaaaatacttcataacacacaatacctcataaaaccggttataatttttttaaaaaaaaaattggggaccaattccaaaaaatattgaggtataaatataaaaagagccggttccataacaaaataaataaatacaaataataacacacaataaactcaaatataatataatgaaacnnnttatatttattaactagttaaaaatttgagacaaaaaaactggttccgtaaagaaactaagataaaaactcacacaaaaaactagttaaataaaataaataaatcaaaaaccggtttctttaattaactaataaaaaacctgaaaaactgtgtttttgcaaatgtcagttgtatata

SEQ ID NO: 127421 - DNA, 1011 bp, Cannabis sativa
tactaatcctatgaacggatgtaaatgtattcacaaatttgagttgatcctctctttttttttttttttgctgggttctacttgctttgttggggttttggttcgattttcttactctgctaatgcttactctttttttttttcctttaattataattattttaatttgtttatttacacatgtatgcttacttgaaaattaaaaaagaaacaggataagaagaagaaaaaaagctgtgatgattgcttagttaattctctaacaatggtcaatttgaagtggattatgccttttggttggtttttgctgtttttattctgaataatttgaataacataaaagtaaaaggactgaaactttttacagtttttattggctcattgacattcataattatttattttttgagtggtattgttgaacagctcaatttttgtgttgtaattggcattggtggagatggagtcatatgcaaagaaattttttaattagttgtagcttaaagctttatcaaacgatttgtagttggcttacttaaatttgaagctgcccttaattgtaaattatgcagctgtgacacttgtttcatagctcttgagacttgtctttgctttatcatttaagctgtaaaccaaagcaaagacgaaagcatttgtgtgttataattcgttttgatattattgtaatttttttgtgtttattacaataaagataaatgaatataatgtttataagcaatgaaaatcaatagtaagagagtcattctttatatttgtttatttaatttattaaatttaggaaagggaacttgattaaataagggcgcgtttggaaagccacaatataattggatttgtgtgtaattggaggtaattacacaatttgtcatgtttgtctgaccatgtaattacaatgttactgtgtaattgtaagtaattgagggtatccaattacactctccaattctcatagcccccatgagaattgaatgtaattacactgtgtaatta

SEQ ID NO: 127422 - DNA, 1401 bp, Cannabis sativa
  modified_base (26)..(36): a, c, t, g, unknown or other
ataaaatggattacattgaaatggannnnnnnnnnnggcataaaacccaacagatactgctttaattctaaactttagttttgggtgtcgggatgatctttctcgcatgcatgccatcttgcaacgagataaacgcctcgttgtttgtcatcttgacccaccaaactatttatacttagtctatatactacataatatacgctaagtatttttattgttattatatctcttccacgcgatgaggttaatgcttcgtcatgcacacttgcatttgcatggtttctcgtcgatacacaagttaacagttagtatatttttgtctagcacaagactgttcaatctgccgagttataaacatactctgcaaattgtgtttttaacgagttatcccatgccaagtgtacttacaattacgtgtttgagtccttcgttcttcccgactcgacacgttgtctttctctgatgtgctcacctaatttcaggtataacatgcaggctaatggacttatcactctaagtgattcttacataattgagatggaagatgaggatgatcccaatcctacatcaactctatttgggagacccttcttactcattgcaactaaaaagttggatacgaaagtaagaatacttaaaatgaaatttgatggtgcagtaattacgtataatgtgttagattccattgataaatatataaagaatgagtctttgttagaagacccaacgtgaagaccacatgagcacaacatacagtcgagctaacgacattaaacaaagcaagcttacgggagttttttcttacccttttctttttattttgcattaattttatttgattgagccttgaggacaatgcttatattaagtgtggggggagattagttgtcatgtctatccaattttttcttagttgtttagttttttattcatttattttatcatttttttagtttatattaatttttcttgctttaattttagtgagtgtgggttgaatgaaattctattgacaataactgctcgtgtttgatgtatgattttactttgatgtcttatgcatgatcttgtggaaaaaaattttgttaatgatgaaattcttgattgtgatagttatgattctaggaaaatgatagactctcatgatttgtgtgcttaactcatgattaattactactcaagcttgatttttaaaaaaaatagaaaaacttttgcacatcagttgaattattatatttgctaatgtttcgaaagatgaatgcatgtttgacttttgatttaaagcctcaaccactctataacttgtttgatgatcatttgaagcgaaatcgacaaattacacatgattttaagatatgataaaggcaatttttttttatcgattgagcttttcaagtctac

SEQ ID NO: 127423 - DNA, 733 bp, Cannabis sativa
ttgacatgggaattctttttcattaaaaacaacatgtctagaaatatagactctcccagttgtgctcaaacatttataacctttaaatgactcactataacccaaatttacacatttaagcgagtgaaattgaaatttatgggtttgataaggtcttaaacaaggaaaatatgttgcaccaaaagttctaagcaaatgataatcaggtttcttgtggtaaacaacttcaaaaggagatttgttgcttagaacaggtgtaggtaatctatttatgagatacacagatgtttgaaaagcatcaacccaatattttaaaggcatgctagcttgagcaagtaaagttaaccccatttctactatatgtctatgtttcctttcagctctcccattttgagctgaagtgtgaggacaagaatggtgaaattgaattccatgagtagttaaaaactgatcaaaagcctgaaactctcctccccaatcagttctaatgaatttaatttttgtttcaaactgattttcaaccatggttttgaactgagtgaatgcattaagggcatccgatttctgttttaatggatacagccatgtaaaagcggctgtagtcatccaaaaaatggatataaaatttgaaattagtgttggagttgattggagcaggcccccacaaatcggtgtggatcaactcaagcattttggttgctctactattagacaatttaaaaggtaaggcatg

SEQ ID NO: 127424 - DNA, 1429 bp, Cannabis sativa
tttttgacttggtgttggtggattgttgaattaagtcacattgatgtgtttgtcattacttatatgctctttagtcctgtgaatttaatattttttaatagggagattgaaacaagtttctatgcttatgcagttatgctttaaacatgtcatttcctatgttttctctgtttaatcaatggggttaagtttttagtcttcttatagaatccatgataaaatctctcgtatgaatgaagcagctcatgatcgacccattttagttggttaagcttcatgaataaatcatagtactaaaatttggactgaccattttgtcttagtcactaacactggcaaagttttgttttgtttcacataagaagtttttcctagttatgaattatttgacagtaaacagcagtagagacctctgaattgttactgagttcacacaattcatttaataaacagtaacaagcagcagtgatctgaattggttcattgaacaattggttatctttatcaacgcagaatgtcaattgaaatggtggcatggcatccatagcttttgaggcgatatccatattggaacagatgcattataggcgatatctattttggaaaagatgcataaaaaatatggtatttttgaaaaaaattccactagtatgtagtataaagttttcttatatatttacatctacaatcaaacaacattatagttcattgctttttattttgttgaagcctcttcatatagtgatatgtattttttgttctatcttggtgtttgcttatattttatttttaattaaaggagttttatttcttttctgatggtggttaattgtgcataaaaacacaagcaaaacagtcactttcaattaaactggtcagatagacgaattttatctaaaatgatgtgtagttctacaggccattgtttattttgataataatggttctatgatttttctgtcgttattcttgtagatatgtacaaggattgttcctgcagatatatacatgggttacttttagatttcattgagtattatggcttacagattggaatactgcaaaatttgggctaaaccttttactgaaaacattgagtaacatttcaggtttttttcaattgcttttctttatgattttttcgtataaaaaaagtctaattatctttttattttgttggtttctatttgataattatttgtgaagaggagaataacaaataaagaataaaagagattagagaaattagaatttttcaattgtaaagttaaaagtaattaaaagaatacaattgataagaaggtcttatatagacaactaatataaaagattaaaataattctaaataattatttaacacccttgttgtaatttcagcgaaaataactttgaggattcaatcataaacctgcaataatctcaacacttg

SEQ ID NO: 127425 - DNA, 983 bp, Cannabis sativa
ccccctcatgggcttgcacgggagccccaacacacacacacatgcatgcacgaccttacctacttacgtcctcactttttgtcattctcttatttgtgaatcacgacggggttagtcattgaatcgcttgaatgcatctcgggaactgtaagtactgatgttgagtttttaaaatacatggcgactaggtaagcttgccaaatgcgctttcgttagtctcttggcgattagtcaactaaccttgaaagttaatagtgctaatttttggagttaacatcaactaactatcaaatttgaagcgtgcatcaagtttccacgcgcgtgcatcaaggctctagcctagaaatctcagctaaccctagatgcttagggtagcctaatgtgaaattttcaaatttccataacttccttaattttaacccaattttaattttgtagaattctaaattgcatattttttaaccaactatcattctacaaaaatttcataaccaaattaaaattattttttatagaaaattttgcagtaataaatacattcattatatatattaaaccaaacacgaaacatccaaattaacacaaaaaataaaacaatatcgttttaattctatatttcatgaatgtaaattattaccatgattttgaggccagttgttagaaattattttaccaaaatcttaatttaccattcatatatgtttgattataaataataatctaatgtcctcaatattaacaatcctaaacgacaaataacacatataaatttaagaaaaccttatattgattacagcgcaatgatctaactccttctattcagatatcaaactcttgatacttttcttacatttaatccaaattcatacatgtcggccaagcccaagtggagaactatcccggatgatctcggccctatgtcacaacaatagtaaaccaataagtgtttatcccaaaatactgcttaacactcgtgtaagaca

SEQ ID NO: 127426 - DNA, 903 bp, Cannabis sativa
  modified_base (867)..(872): a, c, t, g, unknown or other
ataagaaaataaattattaggtgactattaggttataagttaattatatattatttatttttatttaatttttaaattatcacaaccattcaataataattaatggctacaaaaaatgtaacgatgatggttacatatttaatataactattggaacctcctccatatcaatatatatatatatatataaaggaaagtataagagtagtctatgtggcatcttatctctttttcttcttatttttctaattttatggcacattctccttattttgtatatatataaatgtatcaaagtggtaaacaataaaacctacaaaattacgtgtttcgacaaattgcttactctacgctaagcagttaatattattaatctgagtaggaattatacagaatacagatacagatttcctacttataatatctttcgaagtgtttcccaaaatcaccaaaatatttttcaaaatttggatatacaaatgctctttctctcagattttccaatgaacccaattgtacaaagttgtacccaaatgttgctttttcattgagatacatattctgaattgcaaatgttcttctaagagcatcttcaatagagatgctattaaggatgcttgatcataacatggattcattttcaacattttttaattgatgcttaccatttgaattgggggtgttcatcaaacagctaaaatagcctgcaccacaccgcactgctaaaaaaatgcagtttgaaattctttgcggtgctgtcgcggtttgaatttttcttaaaccgcgcggtgcggtgcgatttgtggttttaaattgttattatgcagttcaaaccgcaccgcactgcatattataaaaatactaatnnnnnnatttatttaggtccaatatgtaaaggcccaa

SEQ ID NO: 127427 - DNA, 1106 bp, Cannabis sativa
  modified_base (657)..(665): a, c, t, g, unknown or other
aatgttgattacaattaatagtaataaataaaaaatttggacatccatataattattaatatttataacacaaatagctttttttgttccttgaacgttttatactaccaagttatgtcccttatattatatgagtcgttaataacacttctcgaaatttaacttttacaataatttggtcgttctatgatattctatttagttttatcgtgaataagtgacgcgataaatggtagttgataaatagatgaaaactaaatacctttcacattttttttactttaatgattaaaaaatattaaataattattaactatcacgatcatttcacttgttttgcgataaaattgaataaaatgttatgagagaactacattattgtaaaaattatattttaagtgatattattaatgagttgtatactataagagacataacttaatatagtaaaatatttaaaggacaaaaatgttaattattttattaaaattggctaaaaaaatgtatatctactacttttatagggatgctacattaattgatgttatcaaggtgaaatcacgcatatctttaaaaaattccttttttaaaaaataatgtatataaaataaacttaaaaaatttttgtagtaaacttttttagtttttttttttttnnnnnnnnngtttatatattataattatgttttagttgggactcgaactcaggacctccaacactcacatacctacttatggccacttgagctagcctcaggtggttagtaaactttttttagttaaacctcttgtttgtttggacatttaataattttttttttcatcgtgaggaaattttataaaattataaatagtttaatatttaaaataaagtttaaattattatataaaaataataaccacacctgcaacaaattttgttttttgttattataaattatttaaatttttttaaaaacattacaaataatcttaataactataatagaagaagatgtagtggggagtaggggtgggcatccgatccaatccaacctttttttcctcatccaatccaatccaattagtaattggatttggaaaattatcatccgatccaatccaat

SEQ ID NO: 127428 - DNA, 689 bp, Cannabis sativa
attttttggaaaaccgtaaaaatgtaaaaaaaaatattctttgaacgtaaaaatataaatattttacaaaaaaatggtgtcttatgtaattattccaaaactaaatcatatatgagttcttaagtttcttaaggagttttttaatgagaaatttttactaaatactaacttattttccaaactttacatttatactttgacaagaaattttttacatttatacttttcctacttattttttttttctttttgactctattttactaattaaaggttcaaaaaagtttttattttcttttctttatattttgtttagtcagcttcttttttttttctctattttttttttcctcttatctatctctatttctcttttttatggaaatagtagtaaatgaccctaaattcttttttattgaaacttaatgtccctttttaaaaataatatagcaaatggcctttattattttttagtacctaaaatacccttagttatataagggtattattcattatattcattttccaaatagaaacagaagctctgctccaaaatctaaatgacaaagcctccctcttcttatttttttcggttagtttagatttcttcaaatttttatggtaaattatcgtgatttctcccaaaaggtgatgaaatatttttctctcattctttttttttttattta

SEQ ID NO: 127429 - DNA, 1747 bp, Cannabis sativa
  modified_base (91)..(96): a, c, t, g, unknown or other
taatcatgaaataaatcatgttgaaccatgcaacataaaaggttatttctgatctctattagtaagtaatctgattatattgaaatgggtnnnnnntagggcacaaaacccaacagtgctatgcttggatcctctgtcatttgcaaaaaactgacatccttgctatggaggaaagagattccaagtagcttaagcttggagagcctgccatctccttcatagagggagatgttggctaggtcaggttccctcatcatgaccccctgttcataactgcacaaataagaaacatgacagtttctaggtaaatgattgacaatggagttatgtcaatttatcaccttatgcctaaatttcccaaaaaggcatggggtaggggtgcctaaagggagataaacaatttacgcgacattgctacaacttggctttgtccaaagccaagaaagaaaagatgtttggaaagagctctaactaagagcctgacaaagggcaaggaacttgagctcaaggtggagaggaaaaattagatcattactttggggatcctacagaaagctttggactagtagaggagttagaagaagtagaaattgaccccactcttccaaccagaagatcaaaaataaggaagggtttagcgccagaaataaaatcataattgataaaatttctaaagccaaacctcgatgtctttgcttggtcacatgaagacatggtgggaatagatccatcgataatttttcatgccctgaacatagatccaaacttttgacctatacacaaaaaaggaggttactagataaagagcaagcacaagctataaaagacaaagtcaaaaggctgagtgacgacaacttcctcattgaagctttcttctcgctctgggtatccaatactgtcttggtgtccaaaccaagcaacaagtggagagtatacatatattttattgacttgaataaggtgtgtccaaaggactgtttcccacttccaaggatcgacaagatggtagatggtacagctggtaatgagatcataagcttcatggatgcttattcaggttacaatcaaatcataatgtatccaccagacaaagaacatacaagtttcctaatggacatgggcctgtactactacaaagtcatgccttttgggctgaaaaatataggggccacttattagagacttgtaaataagatgttcaaagatcttattggccgtaacatggaagtctatgtagacgacatgctggtcaagtccaaaaggggtgggggcacatagaggatttaaatgaatgcttcgagatcctttgagagtacaacatgaagtttaaccccctcaaatgttctttggagtaggctcatgcatgttccttggaattattatgaatgtcaggggaatcgaagaaaaccctgagaagatccaagcccttttggacatgaagtctcctacaaagataaaataagcaagagtaagaggaaaagcaagagcaagaaaatttagcctggaagttgcatgttgacagatgttgtactaaccacctatatggtgccggcattgccatcattaaacatgggggaaataaagttcagtttcgaagcctccaaaaaagaggctgaatatgaagctctaatttctagcctcaagttagaacacaaagtgcgggaagattacctggacgtatacagcaactcccagttggtcgttaatcatgtcctaggtgaatatacaacccaaggtataaaaatga

SEQ ID NO: 127430 - DNA, 1235 bp, Cannabis sativa
  modified_base (1133)..(1133): a, c, t, g, unknown or other
catgtaatcataatcacttcaaaactcttaaattgataactatcagattgtaatgggttttatttacggcacaaaacccaagacttttgtgggttgttatggcccaattcacagtctagcttgcagtatacgtgtaaggctttgcaccaaagtcctatcaggtttaatcttggccagccatgcacatggaggatgtaggttgatcagcttagtgctttccagaagctggccagtgacagggtcggccaggggtggccggccagcccctatgagggagctagcctgtcgctcgtcatcccgtttgagtggtgggcctcgttggctaaggtgctgacttgaccttcttgttggtgaactatactaccacgtggccctaatactatccatgtaagcatgccacgtcatgtgggcaaaaatcaagatatattttcccccaagttcttgtgcagacatacgtgcggataaggacttactagctatgtttgaacggatgtagcctttactgaataaatattgcttgaatttttgtctttgaaatatcttctgtttactgagcttttttaaaaccgattaataagagcttaaagaattacaaaatagtaaataatgaataaacaaatattttacgtgatttaggcgtgaatgatccttagtccttgagtcaatagtattagttttctttggaaagttttggtgtattacaagtttttacaatggtaatctctatatttcttttgtatctctctaagaagaaaactctccaggaatattagaagagtctttgtaagtaaaaattgttcaccccctttacataaaaagtggaggtatttacaggctcgtaggtgggaaagggcttaccgtattaccccactagggttccttactcagcacgcaaatggggctgtaaaacactacaagacaatctaaccattgatttggtaggtagaaattccatgatgtggtgcttaattgatgtaggttatcgcgcgaggacatgaacgtgtgtcgttcaatggtttctcctttaaaaatatcttagacaagtctttggacaataagcaccacaaaggcacgtacacacccaaccatggtttgacacaagggagaagatcttactgttgggttttatgccntaaataaaactctattttaatgtaatctctatcttttaaatatcaataaagaaatagaagtattttcatcacttattaagtcatttggttcatgttatcatt

SEQ ID NO: 127431 - DNA, 1410 bp, Cannabis sativa
ttgaatactcgcacttgtcttttcacgtaaattgcttcttgtcactaataatagcgaaattcactcgacaacacttgtcttttgacatgtcttttatgtgaaatttgagttgttgagtggcgagttcagtgctgagtgtttggtgtaacgacttctagcagttggatgatggaggatttgggtaataggtgggcagatctgaacgttgacgatgaagaagatgcgggtttcatgtttaatcaggtggaaggattgatggatgactttgatgctcgatggtgtttagtggggagactattgtcggataaattgatagattttgattcagtccgaaacgtaatgggatctctttggcgtccaggaaatggcatgtacgttaaggagttagagaccaacaaatacctgtttcagttctttcacgaagttgatatcaatagggcccttgaaggcacaccatggacattcaacaagatacctttgatcattaaaaggcttaaggaaggtgataatcccaggttatgtgttttgaatactatggagatatgggtccaggtttatgatttacaagtggggtttaagagtgaacatgttttaagggttgttggggcttacataggaaaatttgtttctttctgtccaaagaattttactaggatatggagattttattttcgtgtccaggtgttaatacatattggtcgacctcttaaaaggagaatgaagatatacaagaacaacgaagagtggtactgggcaaattttaagtatgaacgggtgcctacgttttgctttatctgtggagttataggccactcggagaagttttgccatagattgttcgaggaatcgctagaatccatagtcaagtcgtacggattgtttatgaaggcctctgatcgtaaacaacatcgacaaataggtgcaaggtgacttcgggatagcatgggacagcctatggaaggttcttttgatggttcatcgccggccactacacaccagaaaagtgctggagcaagtccaagaatcatggaggttgattttggggataacacaattcatgggggcagggatttcagaggtaaaggaggatatgggttggataaaaatcagggagagaatggtgggattgatattaatgagcctatatcaggaagcaagtttaaatttcaaaaataagggttagtcatatatgatttgaaaagcaggcgtgtggaggaggagggtaatgcgggctagctaaaggaattagaattgggccaaagagaggagaaggaggtaatgggccagtctaataggggtaagaggaggggaggttattaacccattaaattgggctggaggtgagatatgttaggttataattaacctatatttcgggtctttaaagttagcattatctcgtctattggt

SEQ ID NO: 127432 - DNA, 1965 bp, Cannabis sativa
tgcggtgcggtgcggtgcggtttgaaccgtatattaaaaattaattgattaacacccctaaaaaaatatacacgctaatgaaatagttaaattcatcgaaatatattatttgtaacacttaattcaaaaaaaaaaaaaaaaaaccatatactacatccattaattaaaagtaactcataaaaaaaaattaaaacattatacatttaacattacacatttaagcaaacatataaaattaaatccagatacacttaaggaaacaaaacaaacaaagaggttaaacaaagttaataaaactaagatgataatgaaacacactaacatgacaccaaaacaaagcaacatataacttagaaaaaaaattaactaaatctaaaaatgcagaaagtcatttccagttccgccaagataattataaaattgactataatcttttgatggattttcagatcattcacctaaagatgttgcatcttcagttcattgatgttgagatactcggtattgagaatcctgatattcagatccttcaccttattcttcaagttgagatgtctgtgctcttttttttagtattcttttttttcacattgaatatactcacgactctctagatcggatatagagtttaaattcatgaatataattttattttcttctctcattgtagccatatcatttttttgcttttgaatcctattttttctttttgaatttcatttctatcacagttactctttcttaatgcttcagcaagtcattcactctgttccattagttttttatactgttcttcacttttgactttttcttttgctttcttcacaccaataggtctttctgttaaattaacaccgatttgttcattagttatattgagaacaaataaattcataccaggggatgccgatgtcgatgactcaaaaccgagagagcctgattgggatacagtaaagtttccaccttgttgttgaaatctagttgctccattggcattgttatttgtaaatgtctcacaatctttaagaatgagccacacatgatcgtatgtgaatccattcttgtattttggatcttgtgataataacatttttgcttgatttatctataaaattaaaatactttaatgatatgaatataatttgaaggcaagcaattataaattaactaatataataaacactcacaatatcttgctctgaagtaccattcggatttttgttttcaatttgattaatgcatcctctgaattttgaaattgcagcaagaattgttgtcattcagctttgcaaagatcttctaggtctacgtagagtcataacatctcgggtaagtggtactcagcttccactcttgcccaaaactgatctttggattggtttattcctataattggattttgagaaatgtcaagatatggacgacataaatgtacatcttcttcaagtgagtatgacaaagttctagttgaagacattttggaagataaattagaagaagggagagaaacatattgaagatgtgtattcattcaaagagtagtatgctcttatatatgggtgtaaaatggcttgataatattatatttcttatcttcaaatttttgagaagagtaaaaatttggatatgatttaactataccattcaatggttgagatcgtagtcaaatgaatttatcggcccagatttattcgttagatattttatcttcaaattttggaaagagtaaaattttggatataatttgctataccatccaatggttgagatgacgatcaaataaattcagtggtccaaatttattcatcaagtattgttacttcaaattttaagaagagtaaaattttggatatgatctgactataccatctaatggttgagatgatgatcaaataaatccagtggccaaatttatttgtcaagtatctttacttaaaattatgggaagagtaaaattttggattt

SEQ ID NO: 127433 - DNA, 870 bp, Cannabis sativa
gtcattgaatttgagtatatatactacgggactgtacataaatttttgtaaatcgtcaaacccgaataacccgtccaaattaaattgagataactcgacaaaaaatgcaaatcgaaaaactcgacgaaaatataactcacccaatctttatattgggcgggttaaaaataatatcaacctgcccaatcaacccgaactaacccgaccaatccgattaagagtatttttttatatatatttttattatatataatttatatacatatttataaaaaaatagatagttcaaactattatatttttttttttgagagatgatttaaactttaaattcaatctttatatttatctcattataacaataactaaaatataacaattgaatgtgaaaaaaaaaatattagtgctcggtttggacgggttaactcgactaaaccgacgaatttattaggctggttaaaactttctttttttcttaattggacgggttgcacctagatttttgtaacccaatctttacattggattaaatataacgtaaactgatcaaaccaaccgacgtacatccctaatatatacataaggaagatgttatgggaatactgttttgaatgtagaggaattcttaccattaccaatgatgtgatcatcccattgtatgacaggcaaaacaagtataaaactaccaataagcatcatttcagttgtattcttcttcccctcttctacactcacattgcctactctaattcccccaagctttccctcactaactaacccttcagcaagactcaaaattctattagcagtgcaaccacttagaattttatcgaaattaggcattaaaagttcattctgtttagtgacaaa

SEQ ID NO: 127434 - DNA, 1881 bp, Cannabis sativa
  modified_base (43)..(60): a, c, t, g, unknown or other
aatattggggtccacaaataaattaattcacaaataataatannnnnnnnnnnnnnnnnnctaattgcctttactaattcataaactagagcggtcattacaggtttcgatcacccaaatgcaaattatgctctgagcattctatttgacatggtcaaaaacagggtaggagacctcgtactcaatttcaagaaccttggaagtatcaaaatgacatcctataagctccagaaagagcacccaacacccaagttgatttgtggtttggtgcgttgtgttctgcttatccgattctagttttgtctcgagctttcgtctagtttttcatagtaactaagagctataaagttagacaagtaaaattcacaaattcatatttttttactttttttggcaaagtgacttactcgcaaattaagcggtttcgagtttcccaattatgcaaaacaacaacatctccgagtattggtgaatagtttcaccataacacaaaaactagctaaatgatgtcaaaacatcacttagaaatcatcaaatctatccacatcatgttttcccactcacccatcgtccaggttgacgtcacatcatgtcaacctaggcgttggtcttagaatagccttagtaaaatgataataactcactcaatatttatcaaattgatgcgattcaatttaagttttgaaactatttcaatgctacatcaagtcatgtctcacattctaatctcaattctgaagtcatcaactccaaattttatcctcaagagagttacgaatttaagctacaacttacctgaagtgggtctcgcggacgggactcaagttctgaaaattgatgaccaacctccagagtcaatttcactattagatcatcatcactggtcagaaatagcctcaatttatttttttcatattttttgaaatatttcattattattttaatagaaacccaacacaaccgaaacgaaaattcaaccagaaagagaaccatcattaatttcggtgacttcacctgagaagacgaccagaatcaatcaaaacaggagctatttcaaatttatgaaaaaaaaagtgtacaaaaactactacaaaactaaaatttatccggaaatccagtttaaattggataaaattaatgtcctgacttcaattttcagatccatgaaatgcagatctcaaaaagttgaactggagtttgcaaacaatccaactcaagtataatgcaaaagaaattacatcaatactattataaaatgtttatcctggtgtattttcgttattttctaaatttctaatgatcaatttgtttatattaaatcatgaagagacatgtagatagagttacgtacgtgaaaacactgttatgatttttaatgtttcataacagttgtgttacaattacataaacattttcctaacagttatttcgtttgattgaaatcttcgtctaatgcaactttcggccaaccacccaacaacctttgtctgattgaaacattcgtctgatgcaaccttcggccaaccaccctacaaccatcgccttattgtgtaagtgatagtataagaggtattttggtaattaaaagtatataaaaggtgtaaatattgtctacaccttatgaaggtatttttgtaaataaaatgtcagtttatatttttcatgtaataattttaaatataaatatgtatattactaatataggaatatgattttgtcccgtgatgtacttcacggaatgtattccgtggtacataagatgggtctcagggtacataaatgagtgtcagggtacgtttctactttttaaccctaattacccctagatcaatctcaaccgtcagatcaaataactccctcatctgacggctaccgtacatc

SEQ ID NO: 127435 - DNA, 774 bp, Cannabis sativa
actgccaaattcagtgatgacgtggaaccgaaaattcggttacggtctggtcggtttgatggtcgatttcagtttatcggtttttatgaacacccctactcttaagtactcacatttcatcataaagaatacaagaagaaatttctttataaatagagtttagaatccaacaaatgacaatattattgtttctatactaagcactatacatcatgtaatcaataggtaaaggtttaaggatagaaccattaaggaaaccaaacttgctcttgattgagattgccaattgttttgctctactcaaagacacacaattgtcttgaccaattaggagttgagagaccaaagtattacctggattgtcaccatggtaaaggtaatacgaatctgtagggtcttcgataggatttcttgaattgatcgtttgaacattctgattgccttgagtggcagtcatttgtggatttgttatgattattggatttggagatctgactttggaatggacagattgatcatcatttgacatcgtagaacaaaatgaagaacaagggaattgagtacaccagaacaagaaaaagaatcagagaagcagataggaagaaggagccaccttcaccaaagaagaattcacaacaaggtaagaagaaaataagactaggatcagttgagattgatgaatatgagctgtagaccttacaggctcttgtatactttatttatatagaacaagcaatacagagataacataattctgttatgaatgagctgtgc

SEQ ID NO: 127436 - DNA, 968 bp, Cannabis sativa
atacgaacagctctgaacattttcttttaacacagaaaaagaaaaaatatgtgtgaatttacaaatataccaaaaaatttgggggggaaaaattacattgatataaaaaacaaattagtgattaaagaaaacaatggtacctggatatagctgatgttgaaagattctgcagcctgaggctgtgtttgtatgctgctagatttggcttctgagaggcaaaggaagaaagtcaattgaagcaggaaatagaattttctaaccatttccacagatttttcttttgtttcttgtaattgtcttcaccagaaagtgaaaattaagactttgagtggctcaaatagtgggcgggaattaggaatcgttgattaagagttgtaaaacaaattgggaatgaggcggtgtttcatagcgggtcagccgacacacggtaaaaataagagagacgcagcgcagctcaaacagataatctgattctgagttctttgagatctatctacccataccaattaccatacgtgtcatgacacgtttctctatttcacaaaacaagtgcataaacgacatatgcgttttcgaacgacttataactgtgcaaacgaccattaatgaaaattggcaaaaccaatgaactaaaatggaaagatagttaattttgcttttctccaagtttcaaatttattacttaattagtaaatataactgggtccgttgaaaaaaataataatttaatttgtgattaatttaaggttttattgtttcccatatttttaaggtgaattttatatgatgtaactgttataatatgaataaaataaaaatattaaattataaaaaaaatgtagaattaatttaaatataatatttttatatttttataattgatattatgtaggatcggttaaaaattaattaattattaatattaatagacataattgagagctatatattttaaaaattagaataat

SEQ ID NO: 127437 - DNA, 508 bp, Cannabis sativa
ttattttgttgttagttttttattgtatattttttttatgttatttttttgttaaatttatattatttttgtgttatttttataaaatattataaacatatataaaattaaacttataaaatttcttttttattttattaccaatgttattttaactttacacaaaatgtgggaccctgaggattggggcctccagatgactgtctcactcgccttaccttcacttaatatattttttagtatgtttcttacaaattttcttgtggaaatttcacttttgaggtttttattttatttttacaatttaactttttatcataactttgctggccagtagatttagtttgtaccctggcatttgatttttaaatttttttttttttaagacaaatatattaagaaaatttcaaacaacatgactcttttatttaatataatggcacgtttactatacagtaatcataatcggaataaattaatggagaaatgtaacggaataaatgaaaaa

SEQ ID NO: 127438 - DNA, 710 bp, Cannabis sativa
agaagcaatttgatataataaaaactagaaattaacattcaataataaaattaagaattcatgtctcgggttttgaaataacccttaactaaaaggaaattactccaaactagacattataacgataatcataataaatagtaaaagtttaaggagaagaaaagaactatgatgaagaacacttcgaagccgcgatctctgtctcttccttgctctctctctaagtttctattaattcggtagctctagggttcttaaattcgtagcgtaaagaacagcacctggattatcacaattggagagataagagatcattggatcagtcgatcaagaattttcactgagaataaagaacatgttagagccatttgaagtgttttctgattcacattttcttcgagtttggactcttccacctcgagtgtgggctcctccatcgcatgccatgaacaccaaatagtcaagaacagaaagaagaggaagaagaaggagctcacaacagtggctctgataccatattagctcataagagcaaaatacagtagaaaacgagagagaaaaaacaatctatttattattgaatgaatcaagttgttacaaatgagaattcaactacttatagtagatgagatgtaatgtcccctcttcaagcctccatcgggcctttccccatattggtgactcttatacacgggtatgccactctggct

SEQ ID NO: 127439 - DNA, 513 bp, Cannabis sativa
  modified_base (46)..(49): a, c, t, g, unknown or other
gagaatcaaagaagatacaactcactttaaataatgagctttattnnnnttaagatattcgatctccattgtcaccactgaaccagaatgtaaaatgggaggttatagaaataccttgctgaacactgttggagcaactgcgattagcctgtaggaaaaattccaagtccctgcacacttcttcttgtcttatgatctcctgtagtgataatttaggggatagagaagcctgaaacatatccccatcaccattctgctctaggctaacgttcttttccacaccattcgagcaatgaccctgctccatatcaccatctctttcctccttcgagaattcaattagttcaacattaatgattgaatcaattgatttagtcttacgaacatccacagtagaggaaggacctcactttctaggttttttttttagctctgatcgaagctttccctgcctcgccttagtcttcgccatagcaccagcccgtgagcctgcacgagagagagagagagaga

SEQ ID NO: 127440 - DNA, 1393 bp, Cannabis sativa
acatctcgggaaatcggggtgttacatgctgcaaattactctttaatgaaaaatttagtttatttaaatgttgatactagttttaaaagtttgtattgtttttaggttataaatttttgcattgtgttttttcattatgttgtagataaactggttttattttttgttcaaattttattattcaagagtctaaaaattggtttcattttttaaaattgattaattatgtttgttatcatagttgctatattatttgaattatatttttgaattttgtatttattttttaacagatggaaatattctttaattctaatcagctagagctttgtaagaaagttgatactgctaagcaaaataaagatatgaaagaaaggagcaggtcgaaataaagtatgtactatgttattattgagattggttataatgttttattttctgttcggtttttggtaatgatttctcatgaatctgttgttttaaaactgggttcctaatgcatatttatctttaatatgttttaatgttcaattgtaatttattatttgattattttgtatattgttttagagtaataataatgagaatggtaagaaggaatctacttgtaaagaagattttagttatttaggtaattggttaatgtgagttaatttttaatttaattgtcttacgtagccagtttttctatattaaatttttgctaaattatttgacgtaacatgtttttgttatttagtttataagtatttgttaaaaattcttttttgatatatattacttcttttttaagtaactggtttttgtaattgatacatctttttattactttaggcgtcatatatttgtttaattttagttatgtcatacgaaattggtttctatattaaattattgcttttgttattatacgtaactagctctaagatttagtttttatttggttaatatacataaccgatttctcggtcttatatttttaattagctgatagatattattgatttctctttgtcaaattgaaaggtccaactccggcaacaactccaacgttaaacattggtgacaatttcgatgtctatctacaatgacttttcggtagcgacaacttttccgatgatgatagcgcaattctgtcgaatattctcattctcttttctacttttcttacagttattattatttttttttattttagtgggtagtaattgttttgtgtagtggttttgatggtcgagttttgaaacttctcataaatttgtatctggttttaattttggtcttgggttggtgattggttttttggtagtggattggtggtcaagtattaaagcttctacgaagcaagtaaaatttatatagggattatttcacaaaaacataaaaataacaa

SEQ ID NO: 127441 - DNA, 1547 bp, Cannabis sativa
cgtttactacctgattaaggaaaagttctgtacgtgtcaagcaggaaaccaatacatatataatttcgaagaaaatatgatacaagtagatgaaccttatcttttaacctcatcccaccttgtctttctccaatcttacccacttatgcaaaatggttttatttattttcaacaaaacaaagaaattcatctactaccaggaaatgtactaatgggaaagagatatccattcatcccctaatgaattttaaccaaaatatttataaacttagttacttaggactttatcgagctcaaaaatatcactcacttcgaagctcttcagcttcatcataatcttccctttcatgaaacccaacaacgcttaaactaattgtccccaaatgcatccctgatgtaaattctagggagcaaattaacgtactagagaagaaaaaacaatcacaaaagctagaaacaagtgaaaacttaataggggacaacaactgcaacaaaacaactccgcttcaaaattaacaaaaaaaacaatacatattacatgtttatagaaatgattcagtaatgatctaaacatacaaagtttttgaaccaataagatcagagtaaaatcttacatattaacatctccaaaagaattgggaatttcttacaataaatgggagcagcccaaccggaaccctaaaaacctaaccctagtctcagattgtcgataaataagataaatgatcacggtaaagctttgtttggaagacgtacctttgctcagagaaaatgggtcgggtcgccggagtagatgatccgatcggattgaagtattgaacagagctaacacagcaccaactcctcaaatcaattattctttccttactaataataattatatggttttattcgagagagcaactcagctgagctgcagaaccaggaggaatagctatttgtccattaaaatcacgccacgtttgatttaagctacgtggaaatgaatggtagggtcagcacggttaattaacttgatttatatgtggtcttgcactcaggagaaacaatgcctcagactcagagtaagtccaccaaacttttgttaaaagaaattgtcaatctagtatactcctattttctttagcatttaagaaagtttttggtaggttggttttaggtgtatttataaagtgttttaaaaggtattttttaattgattatatttatttagtgcagaattaagtttattttttatttattttaaattcaaatagtaaaattcataatgtaaattgaaaatgagaagaaatatggcaaatgagatgaatatgatgaattatcatagaatttagaagtctaagatataagtagtgaaaatttttaagttttgaatactcaatacgctccgtttgtgattgaaaatcaagtctgaaactgtaagtgaattttcgactatgatatgttcactttgaggaaaaatattgtgaataattccaaaagtcaagtgcccaaataaggttgctgactttcggcctataagtctttgcaatgtcagctataaaata

SEQ ID NO: 127442 - DNA, 1055 bp, Cannabis sativa
  modified_base (36)..(47): a, c, t, g, unknown or other
  modified_base (121)..(133): a, c, t, g, unknown or other
gaaggagacattttatttcgctgcacccaatgtaannnnnnnnnnnnctttatatgtgtttacttataatctttttagaatttcatatttagggtattaaataacatacttgtgagtagannnnnnnnnnnnntaaaataattccaacagatacaaccaatcctatttgccatacacgagggagaatgcgaaagccacgccagggggtaatccatgtctcgaaagattttaaaataagtacactattggccctccttagagaagatgtaatggaattcgctaaaacatgaaacaagtgccaaaagcacgctaactatagctggcgtctacctgttgaactcactagcttgaccagcccttggccctttgccatgtgggggatggatcgaatagcagcactaccaacaggtaggacaggagtaaaatacgcgattgtggcaatagactactacaccaagtgggcagaagttgaacccctagaacacataatcacctgctaagttgtctgtcctaaataaaactcatttcaatataatcagatttaataattataataaaagatcagaaatcgtttaatgttgcatggttcacatgattcatttcatgattacatttaatgtataaatttgttatactcgaagttcggtaagcacatcagaggaggacaagtgtcgagctaggacgaactcaaacacacaaatgacaagtacacttagcatggaacaactcgatagaaatataattcccagggtaggtttataactcggctagctggatagccttctgcgagaaataaacatatgaactgctaatttatgtattgacaagaaaccatgtgagtgaatatgctcatgacgaggcctcaacctctctacgtgaaatagaaagcgacaacactaaaaatacttagcgtatattatacgatatacaaactgagtataaatagtatggcgggccaagataacaaacagcgaggcgtttatctcgctaaaagatgttttgcatgcgaggaagatcttctcgaccccagagagtataaccatcaaggttaagac

SEQ ID NO: 127443 - DNA, 983 bp, Cannabis sativa
atatatatatataagtgaacatcacaaataatataaaagattaatatgctaatgttgacgctagaatctcatcaactaaattacggctaaaaaatcaaaatttaaacacaagacttaatagaagatgaaaatatgaaaatatgagaacttaaagaaatattcaggacaacaatggaaaaatataaatgttttaatttcttggggtgaagtattacaattatttttcaatttcctcttcaatggaagagagatgtatttatagagagctctaatggcttcaaaatataagttgatttcttggtgctccccaagtgttaggagaaggacattgcaggctacaagttgcagttgcaggaggtggtcctacgtcttgtgctattgtcgggtgtcaggttgtcccaagagaaggagcagtggctgaagtgtacctcttgtcgagacactagagcttgcaagtaagatgcctccattactcgtcctatcccctatcttaggtgttgcaagtagcatggccataccttcatgtgtactcgttcgtgtacttgccttggccttttgattgtttgtctaacaactccccaagtgttggtcatttcattgagggacgttacaagatgttgcaatgatcaagcgtagggcatgtacgctgagtggccgagaggccttatggtcgagtggttgtagccgagagtccatgtggtcgagtggctcttgttgcaggttagctgaaatgctcatgttgcatcctaatcaagatgatcatattgcatgctagccgagatgctcaagttgcatgctagtcaagatgcttatgtttcatgctagccaagatgcatgtgatgcatgctgccgagatgcttgagcatggggctaccaagatgcatcaaggcatgatggccaagatgcatgcgatgcatgcaaccgagatgcatgcaaggcatgatggccaagatgcatgcgatgcacgctaccgagatgcatgc

SEQ ID NO: 127444 - DNA, 514 bp, Cannabis sativa
tactaaccctaaccctatcattcttggtcacgatgttcaatttttttatcgatacaatatatgtcggtctatcagaccaacataattaacggatatctgagtttcaaacccgcgtaaataaacttttttttctggtagtatagtggtttctgaatagtgattagtaactttaacttttacttttacttttactttattatgcatgtgattccagctggagaaagcaacttgccatacacaagttgatttatactccaactttttctcaacttgatcactaataataagaattcttctatatatataacacaacacttgatcattaagttgtatcttatatcaacacaacttgcatggtgctatagcaatggatcaaaatcttcaggatgatcaggcttctacttctagaccaactccaaatccaactattcctccccaaatcaatccacttacgagtaaattacgccctcttccttatgaagtacttcacaatatcattatgtatatatatata

SEQ ID NO: 127445 - DNA, 747 bp, Cannabis sativa
  modified_base (700)..(708): a, c, t, g, unknown or other
gtaaaataatttccaacacgattaacttccggttcttggatttctacaatttcccccgccattcctgccaatctagccatattcgattttgttatggcctttacttggagattataaacccgcccagaaatggtaaatgacctcaactctttttcccatttcgttggaatacccgtcatttgatccaaaataagaaaaccagcattcaaaacccatgtggatcttcccaggatcctctccaacgagttgttctccgagaaagaaagaaccaagaacatggctttgtcagagatcttctttattttcggtcccaatcattgtcccccaaattccagagttgacaaaggatattcttcagtagagatcgggtgaaaggtttcatggtgcacagacgaccaagaaggcaagatttgccaatgtcctccacccttgcctcgtttatctcccagtcgtcttcatttgtgacagttaatttgctggtgcgatctaacaattcctccatttgagacaggcttgaagagcacatctttagattaggctcttccgaagagagcatagacgaaacgcagaaccttcgaagagagagagaaaaaattagaacccaaaaaaatgctactacagctgcaaatttcccttatatttataattatatatataatataggggaattaccccaaatattattttttttaattttttnnnnnnnnnttacggtttgagtttctaaaatggttgcagcgctagttg

SEQ ID NO: 127446 - DNA, 535 bp, Cannabis sativa
cttcgtttggggccggtggttagttcaggcagttcaagcttccaagggagccaccaaaggtcggaggccagtgagagacaagctggaggagttcaatcgcacaatcagcgatcaagtatcaatatccctgattttagggggttggtgctggagtctccgacagatatcatgttcaagaaatcactgggggtaatggaggagatttggagaaattgaaggggcttcttaatgactctgttaataatagtgtttccctccaactggctgattcaaaaaaaagaaagacaactttacttgagggtccatgtgggcttattgggccatctatgaatgaacctacttttatttggcctaatgaaggggatggtaatgtttttgataacaatgaaaggaacaatacaagtatgatggacacaggtgacttgggcttgggttcgaaaggtgatggtaactcaaaaaacttgtttggggcgggtactggtttgcagtcccgccatccattatgaatgttttaagctggaattgtcgggggctt

SEQ ID NO: 127447 - DNA, 1176 bp, Cannabis sativa
agtttaggaaaatcattaaagtggtcatatatgaccaattttaatgattatacatttaggggaaaaattatagggtatttaaagcatggaatttcaaatttcccatttatatttatgtactcttgagacagagactaggtccagtatacacatgtgtactgtatacaatattccaacgtgttagttacagtaatagacgacaaagtactagatgttaagtgtgtgggaccacaaaattaccagttgcagatgcagtggtactcgttaattatatatcatgtactgtgtgacatttttagttttttaccaattcttttgttttgttattatataaaaacatgcatggtctttgcacatgaaattattagtaggtgagaattccttttcatactctatcacgtatatatgatgtgtttactaattaattaacttaaaatttctgaattaattagttttaaaatataattagtgttttttttttcaggtattatagtactgctaaatactaagaataaatatcgatatacaattatacatatacttctcaggtcattgacaataatctgagatattgcaggggggcctactattttatttttttcttgttaagagagagattggagggtaaaaggcctatggggattggggtggttaaatagtagttttactataatattattttgaactctctaatttataaaaagtaataaattttctattttcttaaataataaattagattatattttaaaaatagtataaaataatattatgaatagtagtttttgttaattattttttattataatcaacttgaaaataatttttagaacaaagaaatgcaaaaaatgtatttaatattgtcgtagcacctctaaataggtttattattaattaagttttatttttgacaaaaataaatttataatattattttgtactattttaaaaaatacagaattttatttaattattacttaagagaagagagttttattgataatttttgcaaaacataaaatttaaaatatagtatttatcattctgtaactacggaaaaaaaattatttacatatataacatttcacgagattaaccatttttggtgatacatacatgattactagtaaattttatattatttattaagttaaaatatagggtaaatatcatttt

SEQ ID NO: 127448 - DNA, 630 bp, Cannabis sativa
  modified_base (35)..(53): a, c, t, g, unknown or other
  modified_base (570)..(571): a, c, t, g, unknown or other
cacttagttgatcttagattaattgatctcaatcnnnnnnnnnnnnnnnnnnnttgtactatacggattctttgacttgttcgttactagcttacctgtaggactagtctatacttacatcttgggaactcgatagtacaattgagtgagagcgttaatcatatagatggaatctatagcttctacagctatttagaagtgaatagtttccttatagcttgcctaaacgatataaatagaagatctcttatttcattatttatattaatttactaaaatatcatttataagcagttaaatattttaaggataaaatacaacaaagggtaataattttttccatattcgatgtaaactatctatggaagattattgtttatttaaattgaaacaatagataatttatagcgtatctatatttagtatatagagctttctatataaacaagagtgtaattttaaatttataatggagtgaggaagaattaataagttaagaaatttacagtaaatttcgtatatacttattgaaagcttgatttcatagggccatggtccccacactaactnngataatattattttgtagtttcaattaatcaattagaattctaaataagactatgtctt

SEQ ID NO: 127449 - DNA, 766 bp, Cannabis sativa
  modified_base (737)..(740): a, c, t, g, unknown or other
tcacatcgatctatggacttgaaccaatatatatcttggtgttgattttatcgttttactgctttaatcatttctaaatttaatattctgttcatccatgttttccccgagtactgttttgtgtttcattaatcttatcattgctaactggttggtgattgaaattttaatagattttttttagcaaagtgatttgtaacaatagataaaacaaagaattcagttacaaaatcaaaagatacaggaattggaaccaatacaattccaaatcaaatatctatccgttcctagagcctttttagcaagtgtatgcgccatgacattgctttctcttgggatgtaataaaccttggcactaggaaaagaagataaagattccaccactttaccaaccaaatatgaaagagaagatctatctttccaattgttgtttattttgttcactaaaaccagacaatcagaacgaatggagtctaaaggaaatttgacagtgtcacaccattgaaggccttccaaaagagcatgagccttagccaaagttggagaaagaacactagtcttagatgaacaaaaaccagcaactacctcacctccgcaatcttgaacaacaacaccaaatcccatctttaaatcctctcttgaaattgttgcatcggtatgaaggacatacattccataagctggagaaggaaatgactgctgaacaaggaggtgaagctgttgggttttatgccctnnnnaaaactctatttcaatgtaatccaga

SEQ ID NO: 127450 - DNA, 652 bp, Cannabis sativa
aaaaaaaaaaaaaaaaaaaaaacccagccgccacagccccaacctcatcaaccagagcaaaatctacaaaacccctcgctctactaggtctaggaaggccccagcgcacctgaaccacaccacgacaaccttcattaagtatttgctcctagatcaaaagtcggttgtgctcaagaaaacactcctccactctctaatgtagcaagtcaaaatccattggcacaccacgatggaaaatcccctaaaacaaactactacaatatatcaaatgatgatctttaacgataagcaatttctcaacttcaatctctaagtttcactatacatcaaacaaaaatattgcataagtgtttcttaaaaaaacactatatttaaaattattgttattactacatctcattgtattcgcactatattcaaaattgatgtatttcacttatacttatagtgaccactatattcaaaatcactattatctatgtatcttacttgtaattgtcacattcaaccatttataaaaaaaaatctcaaattctaaaatatagtgtataatatatataatatagggaaattctataatgcactccttaaaagagatacaccgatacatctctatctgttttagtatccgaaataattttttagttaaatt

SEQ ID NO: 127451 - DNA, 742 bp, Cannabis sativa
cagctagaccctaaaaaataggcttggccaaccaccttctgcatacaacttctaccaactgagcaaagttgcgagacaggcacaatagcccacaaaaatagggggtttccctcgagatatcaatcctattttctaaggatttagttatccttttttgtaacttaaataatagataaaagattaaatatcccaattttaaagagatgtctttacctacttgcattagatcttttgtaagccctaccctatataaagggaattatgtctctctaaaaacctaagtcattccaagtcattccaagtcactccacttgcataacaaggccttagctacacatgaaagcctctctctctcaagtatcgtacttcattcttgccatcaaaatattaagtcatatcttcttaagtccttcataagaacttattagttcttggtctacaacacattattctcgccattgtaacattcaaagagagccttagctagaaataataaggttttcacctatgatttgcatggtattatctctagaatcaatacaattaaaaggggagtaggtcattacccacttaataaaggggtcgaacctctataaaccgttcttatttacacgtggttgttgtcaatcataaataaggcttcgctgctagttgaccaaattttgagtcaacattttggtgctttcattgagagcctttttctgatcaatcaccatggttctaaatagaagaacttcccctt

SEQ ID NO: 127452 - DNA, 982 bp, Cannabis sativa
acaagtaaatgattttcctaaacttacaacaacaacaacaacaattcatgacaccaaaacggccaagaaataaaaaacagtcaaaacaggaataatgtccataataattaaaagggaacaccaagtttaaagctttgtaaatgggttatctacaaaccttaattatgattctgtccctggtcgggtctcccagaaaaatgacaaaaatcataaccataataataaataagtaaaaactcaatcacaaagacaaaaccattttaaaaaaaaagaaaaggcatcttgatgaagcaaaacagttttagaggagaaaaaggagctggctttgagttcaatacctgaaacagagggtgacctcaaatgaaatccaagaacgagggacgagggtagatgagagaattgataagctacccttttataataataataataataatgacaataattaattaaataaataaagtgttgttataagtaaagggttactattttggacggaacagagcacaaactatatagtatactatgaaattgaaaacttaatcaacgaaacttccagacccaaagataagcatcatttcatgtgtttatttttgtttgattattattgggtttgggtcccaacccaacccaatccctccccaactccaactaccttaattttgttttgccttttagtttttcttgtcttttacacatccatatggaatatatatatatgctcactaagggtgtttatcaaaccttccacatcacacacacacacggttactaccgcactacaccgcataaaaaaaaaatatataatttcaaacagtacggttgtagtttgtatttttttatcaaatcttgcaatacgatttgtagttttaaacttaacaattattcaaatcgcactgcattatatattacaaaattattaattttttcaatataattttattctttttccatataataacaaatatatatctttatatat

SEQ ID NO: 127453 - DNA, 702 bp, Cannabis sativa
tttttttttttttatctttttgaattcaattgaaaataacttttgatgaaaaatgtttttgatctattttaagaggagtgctactatcaatctcttattataatttcttactcaacttctgtgctcgaaaatacatgacggaatattttttttcattgcagtgttcgttatgcttgcaacatttttcctgtgaatttttgaaaaatttcaaataatttacaatgtcaaaaatatgtttgaatttttttgaacaatcgcgtgataaattggaatatcggaaattctattttcgacattgtaaactcttcgaaattttttaaaaatttatgatactgtaattatataacgaatatcattataaaaaaaaaaattgaaaatatttcggcaagtgatttcgagcgtgaaaattaactaaaaattgtaattagtaatccttttaaaataaaattaaattaaatttatactaaaaaatatttttatatgtaaaaagtacgtattagtattacccgatccttatgtgaatgaatcttaaattcttatttttatttttatttgtataaaaaaaaaaaaagaaaaaaaaaagtgatttaagaacagactgatatgaaatcgtaaatttatggcatgtttactaataagtaatgggaatcaatagtaaggtaatcattcccttacatttgtttacttgcattattaaaatta

SEQ ID NO: 127454 - DNA, 1131 bp, Cannabis sativa
acatggtatcagagctgtagtcgtccctgtcatggagcgttcctcagctggcatcaatggaagatcgttgactcctccaaatttgtctcaacaaaactctcttccaaattcgtctcaacaaaagtctcttccaaattcgtctcaacaaaactctcttccgaaaaccaatcttgtttccttctcgcattccctttcagttcggctagatgaatttaactaccttccatggaagcaccaagtgcttgctgcaatcaaagggagtcgattgtagaaattcctcgatccgaaccttgctccgcctcaatatcttaccactgaagatcgacgacagaataatgtgaatttggagtttgaggactgggaacaacaagacaatatcctcgtctcttggctcctttcatccatgtccgagaaggttctcaccagaatggttggatctgattccgctgcccagatctggaccaatctgtgagaatactacacctcacttaatcgagctaagataggtcagttcaagactctcctttgcaatacgaaaatgcagtcctccctgggtgactatctgctcaaaatcaagagtattatcgatacgcttgcctcgattagtcatccaacaactccccaggaccatatagaagcaatctttaatggtctgccagctgaatacaacgtattcatcacttcatttaacaccagaactgatgcgtatagtgttgctgaaattgaatctctcctaatggctcaggaagttcaattagacaaagcagccaaagagcttgacatcaccaaaaatgaagccaacttagctcatactaaagctcaattagggaaaggcacaacatctatggcacaaagcacaactgctcctggttcaagcagcaatttcagaggtaattccccctcctttcctcagtttaattcctcacagtatggcctttctatgccagcttccaggggtaccggatattctactcgtggccaatttggaaattttagaggtggtttctctcgtggccgtggcatcactactgtttggggtcaaaaacctcaatgtcagttgtgtcataagatggagcacactgttcaacagtgtttttacagattcgacaagtgttggaaatttattttacc

SEQ ID NO: 127455 - DNA, 586 bp, Cannabis sativa
gaactcggacgggtcgtaggtgacttgggccaccacggctggtgggtatcgccggatttcgtagtcggccgtggctttaattacttcgtgattgggagtttcgacgttgatttttccaaataccatacccatttgagcaatgaaaattggttcggtttcgatttctcgagaaagtgtttttgttgagcaaactgatgttgatcgataagagtcagaaaatggagaagtgtatcacttatatatattggcatttgcggtgattttgcatggctgaatacggtgggtgtacgtggacaatcttcttccattagtttttccttttaatccaatctaaatatagtcgtgagacttagaatcttggtaaacaagtttagatcattcattaaaaaaaacagggaaatttgtggctttgtttgttttattactaataagtacccaattttttaaaattaccacattaatactcaaaactttatatttctaaatttcagttggtctccactaacttctgataatttaatgtgccaaattatttcatttttattttatttattctaatttaataattattttagattgaaacaaa

SEQ ID NO: 127456 - DNA, 539 bp, Cannabis sativa
agtgtaacgagatcaaatcacacatgaactgtatagctcaaaattgtatcttaaaaaacataagaacgagtcttttattaagatatgtaaaatttaaaatttaatacctttaaaataaagtttaaatatagtttattttatacgtatataaaataaaaaaaattataaatgtaactaattttttaaactctatttttatcctcttattttttttaaaaaaaatttcacaattttttaaatgactacaacataaacaactctaagtaaaaaaatatgaattacaaaactcactcaaatacataaacaaataatacatcactagactcattttaggaaggaaaaatactaaaaaatactagtagtacataataccctcttatatattaatatcacaataactttaattatgtatccagttcgatataatttaatgtaggctaattagcaatttttcccccgaatttgacatgtactaaatcatgctcccaaaattttttttgccgttaaaaatttcccatttaaggacttttatctaattt

SEQ ID NO: 127457 - DNA, 1114 bp, Cannabis sativa
  modified_base (893)..(899): a, c, t, g, unknown or other
agagttaacatccaatcattaatttgagagaattgaatattcatgtatacggttagagtttcaaatctaggtgaaagaaaaaacttagggtgtatgtataaagtataataatatgtaaccatataattaataattccgttttgatatatcgggtaaataataaaagtaattacaaatctagtgaaagaaacgtaggatgttaaaatttaagacgaaggtaagatgtatgagattctgtctcaaaattaattggcaatgagaggagtaattcataatttttatctatagtattatttttctacacatctagcaatgtagaactatttctaatacatcatcttcacgtttgagcttagaattgagaatataatgaacgacatttaagagactagagagtcaaacgtgacatttgaaagaatctcataaggctcatgtcgaaaaatttgtggattttttaaaataggttaaagattccaatactagaaagttacacacataattggtcgaaagttcccaaataaaggtcaacggcgaagacaacgaaagtgcttttagttgctctgataccatattaaaatttggaagtatttagttaaggtgcatctcaaaatcaattgacatgagtgagaggagcaactcatgaatcttatatatggttcacacattggtaatgtgagactatttctaatatagtattaatgaagtatattatgatctttaccacatgtaacattaaataataatcaacgtataacgacttcttttaatatttttctaaacaatcacacatttagaattaattaagaaggaaacttgtgatatatagtttatctcattttaaaagagagaaaactagctagtaaagagaatagacactacaaaaaatcttactnnnnnnnacaacaaaatttgtgactaaagataaaaaagttgtgactaattataaattatcattattgtcactacaagaaatgtcacttttacttgcatagttcgctactgcgtaaactgcagtggcaaaaagaggttaaagttttactagcgtacatttgcagtggcttaaatctaacttttaccaacacatttacgtgctgggaaaagttatttttgccag

SEQ ID NO: 127458 - DNA, 806 bp, Cannabis sativa
gtcaaaaacggtctaccattttctataggatcttgtggctgtagggtttttagtcatttaaaactcaaatttcttcctataaaacctattctaaactctcacaactccccattctgatcttctaacactaaatagcagcccccattttctctctaaccctttctcactctttaaaccaaattcctttcatctgtttctcaaaacccatcttcttcttaaatctcaatactctccatctctcttctatcttcaatgattgcttcataatctaggcaagtaaagaggacaagactttccatgcaacaagaagagcaaagaaccaaggtttggcatgagctcttctctcatggaagatttgcaaatagatttcatgaagatttttcgtctagagaagtactccttggtaaaaatgtgatctatatgtccttgattatgttaacttttgagatctttttagagattaggggtggaaaactttgataggtattcaaacatatatttaccttaggctagtgaggctttttatgcttgcattgaaatttcttgtagtccatatagtatcaagggaaccctcaagggagttagattcaccttaacagttgactctttgaatgcattcctagatgccccaaacgaaggtttcttacttgaccctacgcctagacttacaaatgatgcctcatataaatataccctcttttctaataaaatttgtgtaggagaaggttttcttgataatctaaaacgcaataatcttactcttcaagaaaaaaatcatacactctttcatttgtaacaacctagct

SEQ ID NO: 127459 - DNA, 899 bp, Cannabis sativa
aaccatgcaacataaaatgtaatttttgatcttttattattagtaaatatgattatattgaaatgagttttatttagggcacgaaacgcaatagggccttggtgggttgactttcagagtatgggtcacgcctgacatgacccgtataataatttattataaaaactgatttttgtaaatacagacccaggtcgacccaacatgtttgtcagacccatttttagttccaatcacaagttttttttttttttttttatataattttaattagttgctcatatatataggggatttacaaaaagtgtacaatcttaatagatgtttaattttttttttctaattttatagacaaaaagtgtataatttttttttatctttttaatttttgattattatttattaaaaacacataaatatattagtaataattttgtaataatataatatatatatattaataaaaaatagagaaatgccaaaagaaaatattagtgtctagtaccttcctaagtgtcatatggctattggtacaattaagtatcaagtctcatataatttaattaataacttttaaagtgtatcacttaaccaatcataacgctacacttgtaaatagtgataagcactactaacgtccaataacaatgctctataacaaaatgtaagtagaaaataaataaaatgtaaatttatgattaatacttaatataagttttcaatcttatcaacaaaatatataactatttttttatgattttttaattagcacataaacaataataataatagactatttgtgattcttacctcccgaactttaacgtgtactaaattataccccttaaacttttcaagccgttaaaaattctctttgaactattgagatcgttggactcaag

SEQ ID NO: 127460 - DNA, 1396 bp, Cannabis sativa
ttacggaattctacatagaaattcatattgcaattagtgctgcaacctaaattgaaactaaaaaattgtatagaaactcataaccaaaacccaaatcataaatttaaaaaaaaaaattaaaaaaacaaaaaacaatatgggataattccctttttattattattattatttaaatattgttatgaatgtcaactaactgaatttgtttagttaattactatttttattgctaaatacaatccaacattaagttcaaatgatatattttttgaaaaaatgatgggttatcatgtttctctcgttctataaattgttttcacacattttcttatagagcttcatgtctatataaatatccatatataggcacaaaaaattggagaacgagggagtaaattcattgaagaagagttgaaaatggagtatgtgtatgattttatgcttaatattctaactgaatatgctaagctcttaacatataagcccactatacctccacgagctactgaactttgtagcgaggcaatggcttgcgaagcaaatggattagcacaagaatttatgatggaatcaatggagaggagtcctacacatactatcccctgtaccatgccacctccttataatgtttcatctttagcttcttttcttgagaaaaagaatactttaattaaagaggtagagttatgggaaacttactctaggtagaattaataatattcagaattgaacaccatagagattttctttttatgaatcaggtaagttgtattgtctcaatcaaatatttacaacttcataacagcacctctttggttttgaaaaagctatttcatacaatatctcctttcacatgacatttttctctattttttacaattctataatccaatccatatctatattattgatttttttttttggcattctaatatgtattctattttctaacctcagttttatcagtttcaaagattactcacggtacctaaattttttgggactgaaaagttaaaaatgcagagaaatgattttggtaatgtttagctcaattcaatcgtgagccagagtattgtatttatagtaaaaggaggcattacacatacataagaaaagatggagcgaacggctctattacagccatccaataaacaaatccctagagaatattcttatcctaacaacctttacaatgattgcacacaatacagtttcataatcgaattgtcagggaatcaaatctttctatgcttcattgttgctgcagtgtattgcagtgcaatgcaccttcagggatgacacctcatcaccattccaagtttgcttatttctcaatatctcctctcaaacggaagggtgatgttctcactccaagtttgtcaacaaggaatgtgaa

SEQ ID NO: 127461 - DNA, 1338 bp, Cannabis sativa
cccatgcatctggtcgtagtacacaatcccatgcatctggtcagagtacacactcacacgcatctgttcgtagtacactattccatgcatttggtcatagtaaatactcccatgcttatggagttatggtcgtagtacatactccacatgcatctggtcatagtacatactcccatgcatctggttgtagtacacactcccatgcatctggtcatagtacacactcttatgcatctggtcgtactacatactccccatgcttctggtcgtagtacatactctcaatgtatttactcgtagtacatactcccatgcatttggtcgtagaacatactcccattcatcgggttgtagtacacaatcccatgcatatggtcatatcacacactcccatgtatttggttgtactacatactcatatgattcaggttgtagcacctactttgacatgcatagatcatgagaaacataaacgacctgcttggagtggtgccaaaaagcttgggaaggcaacgtaaaataagtcagctttgggtaaaccatgaaaaactgacttagggggaaattgtcatacaatttgttggagtatttaataaaaaagttgaattgaatgccacgttacataaataataaattctcacaataaatacattgtgggatacgtcgaaaaaaactcaagactcaacctgtgaggtgatatcatctaaataaggatcacaagattcatgaattgaggtatttcaacgttgtcgagatgttatttcgataaatattcaacatcttgcaacaaagatcttgtaggttctcgtaatacaaatatcttgtagctactcgtaagacaaaaatctttaatcacttcataatacacagcagtgatgaatcacctcgtaatacataggtagagatgaatcatctcgtaatacacagcaatgataaatcccctcgtaatacatagtaatgatgaatcacctcataatacacaagaagtgataaatcacctcgtaatacatagtcagttatgaatcacttcctaatacataggagtgatgaatcaccctgtaatacgcagtattgatgactcacctcgtaaacacaggctgtgatgaatcacctcgtagtacacaaccactgatgaatcacctcatcatacaaagctagtgataaatcatcttgtaatacacatcagtgatgaattacctcataatacatagctagggatgaatcaccttgtaatacacagcaatgataaatcaccttgtaatactcaatcagtgatgaatcaccttgtattacacagcagtgatgaatcacctcattgttggaaattcttttaccagg

SEQ ID NO: 127462 - DNA, 603 bp, Cannabis sativa
  modified_base (26)..(27): a, c, t, g, unknown or other
ttacattgaaacagagttttatttanngcataaaacccaacacaaacttggctcaacaatggtagtttttaaatttttatgctatacctagttttgttgcttggatttagtttataatgatgtttataggtattctagagagttttggaagatttgggtttgttttggttcgaattgggggagttttgtttttctgctgtgaaaaatggcaggccgcaggccgtttctgcagaaacggcctaccgtttttactggtgcaaacccagagaaacggactgccatttttcgaaaaatagcctgccatttttctagcgggttttccatttcgttgttttttttgtgttttctcaatgcctagtgccttgccatgccattttatagatagataaactttaggatttgagtttagaaccctgaaaaggtgttagaaggttctatacccattttccatttaggtcaaccgacacacttgaatttggaaacgaggtaagattagcatagaatatatatatgtatatgcgtatgtatgtgttgcccctgaattcgcccaaaatacgtggaccagtcgaaaagggacacgtggatcagataacttgtaaatat

SEQ ID NO: 127463 - DNA, 1447 bp, Cannabis sativa
tgttttaacttttgattttggatattttaggattttattgtttattgattgagatctacattttgtttgagctaaattctcaggtttttgaaagaaaatcgtggagatttgggatgggtgtggttcggctgggtcatgaagaaggagaagcttccttcattgttgtggttaggcccatatttttggaaatagaaacttttattttctatttttgtttatttttcctttctagggtttaaatgtaaaatggtgcccttagttgtttatgtttactgagtttttgagcaactgaatatttttagagcttaagaaagtaataatggcggaaataatgaaataacaaacaagagatgtttacgtgtttcaggaattaactatccttagtctacgagtctattttattaagctcattggccagtgaccatttacacaaatacaaatacaaggacttttacccctttccaccgtgttcctctcgaaaaagaggaagcttagtaggaatattctggagttaataattggattacagcaatgtgttttcttaatgaagagtaagtctttaatctcaaggtgacggtccaaaaaaaagggtcccttcctttgtgcttcctcttggatatttataggccaatctccttgcatgggttgtctttgatggatcctcctagggatgaaatcccaccgttggattggtaggtgacatatttcccatgaggcttttatgagtgtgagactgtatcggctgtacatgcaaggcctcgaacgcgtgtctcctcaaggtcattccccttatccctaatcattggattgtttagcccagtgcacaaggacacacatgccctgcatgagagtttgacgtggaagacaacctctgacatcgtacacgaaaaaacccaatcattgggtccgtatcctaatgtgggctgagcttctgcgggataaaggtgtacccaagaccgttacatcatggtttgagaagatccctatgatttgcatgaacaaatggtctcatcttctggagtggaatgaggctttagttgacgaatactctttgcatggacaacattcggggagacttccttcacagagacctttctcacgaagtcgatgccttcatcctctcggagtgctaggcaaagtgtttgggtggcttaatgctcattgtccttctttaattaatatccatgtgtcatgcttgaagaaatgcagataacatttacgcccaagcttctaggacatcccatggtccgggaccttgcaacatcttttcttgaaagaactttacgcacgtgggacttctgataagtcttttaatgcactacgtcatcagccgctaaactagagtatctttgctcaataggcatgattacttatattatttttttttatgaatcagagaagttgtattgctcacaaacaaagttttttacaaactaattgcaccttt

SEQ ID NO: 127464 - DNA, 912 bp, Cannabis sativa
ttgataattatatacttaaaaaaacactataaatcttgtttataataattatacttcataaaattaaataaatttactaaaaaatgattataattttgaagtagccacaatattttataacaataagtaaactaagctcctactcgcaaaaattttgagtatgttacttttgtagtatttttctcattaatatgattagtgttattccaaaatttaagtgtaaattattaaagttactgtcctcttttaagtgtaaattaattccagactttcttgagatttccacgtgtaattgatgtacaaaagaaaaataataagtttcttgatttatgcactattaattttggggaactaaattaatgtaataatttcctataaaatgtggaactttcattatttagggatttaaaatctcacctttaaaaagagtatttatactgcttaattctcggtaaatactttcggaaaagatcaaaattttcttgcttcttattttataagtgaaatataactaaaaaggtagtagattataccacaatcacaggtgtgagcctctataacaatttatgtgttcttttttactttatattattcataacctgtttgaatttaatcattctcaatcactttaaaggcttagtgttattagctaaaagcgaggtcaacaattagatttttagtttgattttgaacaagccattaaaaacgagtctaacccattcttgaaaagaaatgcttttggtgcaattcatttcactataaaatttcatatcgatattagagcactcacatttgatgttttaaaatattttaagaattaaactaaaaatacgctacattagatattctaaacttttctttttttattttggagattctttaaaattcactattcatgttctgtatttataa

SEQ ID NO: 127465 - DNA, 710 bp, Cannabis sativa
aaaattatttacattttctgtatctgttcgtattaggaattgttttcaagttgattatattaagaaaaaaaagttgtctaaaattaagcctaaggttttatatttactattttgaaaatatagagtttatttcgtcatttaccaaaatacagaatctaatgggtaacttttgaaaaacacagagtccaaaatattatttaccctcctttattttcccttattaaattacaagattgaaacaagtactgatagcaactcatgaagaatattttctcagccgtgtacttacacttgagagagacggcggacggcctcgctcgtgaggacttcaactgccgtctgactgtctgacaccttcatcgtcaactcctctccttgcaactctcactttgaccattgtcttttccactcaattctcatttgtaagtcaatcgattacttattaatgctcatgttccgtaaatttatatactgtctaagagttttcatatgttagttaaatacaacagatggtaacaactgaaacacaatattatagttgcaatagctttctacttcgaatcaactttttgaaaaattattgtttttattttttcaataagtcatgtagggaaggtgtttgccaaaatgcttgagagaaccatggttacgtgagctactaatattgcagcaatttttgtatacattgtaatttttcggtggcttctgtc

SEQ ID NO: 127466 - DNA, 2072 bp, Cannabis sativa
  modified_base (1054)..(1059): a, c, t, g, unknown or other
  modified_base (2024)..(2027): a, c, t, g, unknown or other
ccatgcttcctgggcaactatcacacacgcagcaacctaacgcaaccgaaataaaaattcaaccagaaagagaacaaccatcaattccggtgacttcacctgacaagacaaccagaatcaatcggaataaggctgtttcgaattcatgaaaaaaagtgtagaaaaactactacgaaactaaaattttaccgaaaatctagtttaatttgcatagaactaatgttctgacttcaattttcagatccatgaaagacatatcttaaaaagttgaactagagttcctaaacaatccaactcaagtataatctaaaaaaaattacgtcaatactatagtaaaatatttatcctggtgtattttcgttgttttccaaatttctaatggtgaatttgttcatattaaatcataaagagatatgtagctagagttacgttcgtcgaaacactgatatgatttttaatgtttcacaacagttgcataaatattttactaagtgttatttcgtctgattgaaaccttcgtttggtgcaaccttcggccaactacccagcaaccacacagaaactttcgtctgatgcaacctacagccaaccacccaacaaccattctgcaaccatcgtctaattgaaacctttgtctgatgcaaccacatcgcaactacgcaacaatcaccctccaactatcgtctgattctgtaagtggtattttggtaattaaaattacataaaaagcataaatattgtccacgccttatagaggtatttttgtaaataaagtgtcaattttattttctatgtaataatttcttacaaaaatagaaaaaaataaaaatattaaaaaatgtaattataataattacattttcttatgatgtgctataatagtaaaaattttatttttaaactcaaattaattatatatttaaaataaattattttattaattaaaatatgtaataagatatttttcacaactaatgtctataaataattttttatttataagaaaataaataaaattaagttagaatcaaattacaagtaatttattaattannnnnntttaatttttaaattaatcacaatagtctaataatgattcaataattaaaattaatgtaacaatcataattacataattaatgtaataattaaaacttcttctatatataaattaaaataaaaataattaaagaataaaaattgtcaatggctacagttcggcactgtacaccacaaaattttgctgcaaattaaatatacagtgccatatgatttagcatcattattttgctgcaaaagatagttctagacatccactatacatacaatattataattttttaatactctaaattatttattgatttatttattttttaaaaaatatgcatggagtttgttgcaaaatgaacaatattataaaatataaatttttcgtattctgttctgtatattcggatattctactgtagtattctattataaaaaccgagctagatctttaatgtgactttagaataatcatgtaatcaatatatttgtattttgtagtagtattctaccattctttatttttgaaactttgtacttcttctaatacgacgacactaataagaaataaatttgaaaaaaaaaaaaaaaactagatataatttataggataaataattgtatacgtatcaaaaggtttgaatttataagtatcctaaactcaattattagtatctgatactacatgtttctgtttagaccgaatgatctaacgtataagttttatatgtgttctatttaaaataataacatagtttataataaaaaaaagttggaagaaaattacaattttacaaaaattgagtacttaagtcacaaaaaaaaaaaaagtttatgtctcttataaaccaaaattttgcatatttgtgtcgctattacaaatattaaagtaaatagcggcacaagtatctattttgtgtttgtaagtttgtaaccagcataaggaaattgtactctataccctttttatattnnnntcttttatttttaccttctttttttaaaatctatcatttttacct

SEQ ID NO: 127467 - DNA, 1695 bp, Cannabis sativa
tgaagttctacccatttacctcattatttgattgagttattgttgtgtatgcgggaggagttggttcgttcaaaatcaactgtcgttggattggttgttttggatatataatacttggtcttttgcttagtgccattaaattaccaaaatatagtatgttagcttggatgattgagcgattgcacaacctgaaaaatcctaattataagtaaatatgcataaaagtcaattggtgcaaaaatgagaaaacatcactcttgcctaaaaaaacacaatataatctttaatttaacctttaattcataaaaaaaatgtgatattaatgtagtggtgtatttatttaaatttagataacaaaacaaataaaatgagataaaaaaaaaaaaatacataaattagagaaccaaaatccaaccaagccaaaacttaacgttaaatttaacacaaaaaagaatttaagtttaaatttaacataaaaaagaatgaacaaaatctcaatttaaattctatttgttttacactaattgaaatagagaatgatgctcatgaatatgtatatgattgtttgtataaaaaatatgtatatatatatattgtattatttgagtatatatacatatataatatgatatatttatataaattagaaaatatatataataaacttactagaatggtgattaaactaaaaaaatttcttgagttttatatatggaggttggatagattacaaattagggttttatttttagggactttaagggagtaaatgataaatttaaggagaagagatggagatgaatttatgaaaaaaaatcttaaaaagaaatagtgaggtgaatagaagacaaaatactaattgagcttattattggggttggttgagatgaaaagatgaagaagagaagaagagatcaaaaaaataaacaaaagaagaagaagaaacgtggggattagggctggggtttaggttctgtttaggtaggtatattagttatttactttattagttaataaaaaaagaaaattaaaaattaaaataattttataagaaggttatttagcaaaaatggttttgaaagagggttatttaactaaatatccctacttttagagcataaaccctaacaaacactagcaagtgtcccaagcactctattgtatacatacacagagttcacaaactgttctttctctctttttttcttatctgttctctctctactctctcactctaacaatctcaattctaatacaaatgtatgggagaacaagtatttacagccaacatggcctgagagaaccaagtaacaaacttaacagaataacagaaaaataactaaagaacctaactaactaactaccaagaatataatacatgatcttggatgaacacgtgggactagttctagttagagataatccaacactctccttggccaatttgaacttgatcatgaagttttcacctttaagggcatttttaacttgtacacactttactacgatagatctttattgtgtattttgtttatctacatcagttatagaacttttaacatatgcaaacttatcaaatacatttatggcagggaaatttgaattaatatacttacattaccctataatttttcccctaaatgcaaagttattaaaattggtcatatatgaccactttactaattttcctaaact

SEQ ID NO: 127468 - DNA, 2443 bp, Cannabis sativa
ttatacgggctcaaatttttgctccatatttttgcatttttattacaaattgatgaggtataattactaaaatttatgtgtattttatagttttagttacttttacatattttatcaacaatagtacttatacacaattatataaaaataataattattattattagaatttgaatattaatatcatttcaattgataaaataaatatttatcattgttactattatcaaaatattagtcattttaatgtgtcgtgcttttgagttaatctattctaacttttgggattgttgtgccctgatttagcccatatttttttcatattgtgtcgtgcctaaatattttttttttgtgttaggtctcgtgctctcgagctcgtaccaattttgtgacgtactatcaaaaaatctaacccctatttacaacactagcttacattacaattggacatctattgaaaagtgtttcatgaacttcattgtaaaatcaccacagtcaataatactataatagccttttgtcaggcacaaatttgtatacaacgagaaatttattgaatttaaaatcttgaccgaactccatcccaatatctctctctagtaactcatccaggtattaacagaatataaatagtaatcattagaatatatatggattgattttttgatagtattaccatttccattattgttcgtactctattatccattgataatattgagcgagccggtggaaggttgtcctatatagggccttattgactttcatgtcagcatccaccatgaatcaatgagctcctcgcaatggttgggatcccaatttacatacaaagaagagactcatagtacttgggtttctatttatttttataagtaattccaagtaaaagtacaatactagtttgagatgtacatgctgagtctgcccaagtcatctataagatctctagtattgcttgtagttgtatgccatactctttacacttcctggtaggtccttatactttttttgtattatcaaaacatcaaggagtctgacacacatttatactacataaaactgctcattaaaaatcaaagtaatgaatttaagctgataccaaaattctgcaaggaagaaaccagtagaagtttatgatatttttttccactatcaatatcagttcagcccaatgtaaactttatacacccgatagaagtttactttgttaatgccctaggaaagacattctacttatgcaaatataagaaaatcacatcgatgattatcacatcagtgtaaatttacactactacaaatttgggttttagaggtagtctttaaggcctttcaacatcggttttggcgaaattcgctactgacgctgatccaagcgacgctatagggttaaaaataaccgatgataaagtgtaccctattgcatcagttatatacaaataaccgacgccatatacactaataaccgacgttaaaagcttaaaaactgacgcctaaactataataattaatttttttttagtttaaaacctattattatttcagaaatttaatttatttaattatatatttattaatttataataaatatttatttttttgaaagctaaattaaataatatttaaattaattttatgattagaattaattttatagaagtgattgaaaaaatacaatatattacacaaatattttaaaattagtccaagtgttaacaagttaataaatctaattacaagttaacctaaaaaataagctagggaaaaaaattcttatatatttcagcatcaatcgtttaagctttcgtgaatcaccgccagcaatcattctatccactgtcgctgtaatggtaacaattcagtttttagattgtatgtcttctttttcccaaactgtaaaaagaagtaaaattgtatattagtttatatatatatattattatttgttaatgtaataaatacaataattaataatcaaaacttatagttttttgatcatgtatataacggttagggtttgcccgtgcgacgaagtcagtcatctatttcaaaatataaaaaccacattcttggtttttaggttgtcttggataatttactagtgaaattcctggtcacggtccaagatacgcatttgatgcccctataatgttgtatgctctgttttaaaaattatgttaacatttcaattcattaacataaatatatataacttagttaattaagaaatttgttacagagtaattaaattattacatttctaacatcgcattaatttggagagaactttgtggccacgtatagggtctaaatagataatttttcctggcacaataatctctagcatccaatgcgcactaaaaaattatatttggatgtatataagatagtgtaaaagtaattttaagttataatatagaaaacaatgagcactaaaaaattaaat

SEQ ID NO: 127469 - DNA, 945 bp, Cannabis sativa
  modified_base (422)..(425): a, c, t, g, unknown or other
ttgggttgagcgtagctcctattagttactttgtaagtgaatagttgggttgagcgtagctcatatcacttactttataagtgaacatttgggttgagcgtagctcctattatttattttataagtgaatattctagttgagcatggctcgcttgttattgcatttactttacattttttagctctaaaatataacaaacacttaaaataattgacatatgtatttacgtggaaaccctttttggaaaaaaccacgggcggagcatgcaaaaatccactacgtaaaatgagagtgtacaagtggggcattgttttgccatacatgtgattagaaatggtatttcttaaggtgtacgacgttccagctatatcttatgtttcttccatctgctgttcggagtttgtatgctccttggccaacnnnntttgtaatctggtaaggcccctcccaattaggtcctaatttgcctactccttcttccttcatgttttggaacactagtcctagtacccattttccttccttgaattgttggaccctaatgtttttattgaaatgttgggccaccttttgctggtatgctactattctgataagcacttattctctcttttcgtctaacaaatcaacttctgagttattgatttagatcatccgtcgagtgtccaaatctgatggttgttatttcaatttctgcttggatgaccgcttcagttccatatgtcaatgcaaatggggtctctccagtcgaggtctttgttgttgttcggtaagaccacagtacccctggtaactcatctgcccatctcccttcgactttctctagtcatttcttgagcgtgttgactattgttttgttggttgattttggtatcgtggagttgagaatgataattgtatcccccattctgcacaaaagttttggaagtcttggcttatgaact

SEQ ID NO: 127470 - DNA, 1456 bp, Cannabis sativa
  modified_base (700)..(706): a, c, t, g, unknown or other
taatttgacacgttttttgagaaatttctttgattaccaaagattgcacaataattgataaaagcactgtagcgtgccttagctttatggcgttacagacttaccctcataaactccttcatgactcctcccatcacaagctctaaagaaaggtcattgtcagattcggccagctgctcattcacctcaaggaccgaccgagtcatgtaatgagtgagcatatatttgccgcttttagtctctaaaagcagtacaggaggtggggcaggggccctgatctgctcatatctgcttctgaccagcttggatctgccctttgattgttctagcctgtccgagctgcctcgtcgggagtctttggacttagtcacctttggggcaaaagggattacgacggttggtttctcaaagagatcaataactacttttgctggtgccttctctctagacggggttgtctcactacccctggtcctggatatgaatatcttacttcacaatttattatatgtatattgtgtttgttttatttaaattatttattaaaaaacctttttttagcaaatctattatttatttgatctaaattgctcttattaacttgttgttagatccaattatcttattttaatcatcatccaatagtcaatagatcatgtaaataatttgtaacaaataaattttgtacttctttcatctnnnnnnncctagaaacatgatagggcccatccaaatcaatttgacctgtgtgagcatgtatgtttgctattacgcttagatgcatataaaaagcccatttatttctagatatataaataaactaggttgctaaaataaaatatcaccttatgatagttttatttaagcccaattagaattgagcttatttaatgaataataattatttaatgaaaggttaaattcctctattttggtctttttgtgagagttagggggccgttattgttgggtacgacatactagatccaaccctcactcacatgaacaaccctaactgtgaaagcccatttgccttatttaaataattaaattaggctatttgtactagtttaacctaattaaaattgaatgaacaacataattaattttgaaattaatttttcattggattattttacaattaatttagaaaaacacactatgtttaaagaaaagattcaagatagtgatttctagtaactatgatatgttatggtttacgtcgattgcaggtatatggtaatcttcaaacttgcctgggttattagtctcgcttatgttagatggatgacactataggaactttcctcgtagcaagatggttatctcgcattcttgtactccgagctagtacgggtttgacacttaatttgcttatagtaagctaaggtatgtgttactcttctacggtgcctcactattctcctttagcgatatatggtttctcgttaataca

SEQ ID NO: 127471 - DNA, 675 bp, Cannabis sativa
aacgatgtttcaaaatgttaaatcgagaccaaactagagaaacataccaaacaggtgtagaggaggcaagaaaaagagttttacaaacctaattgatggaactaatctttcttataacagttcttcaccaaatcactacatggattatcaatctccaataccaactaatattggtttttaaatagactgtatatttaactcaaaaattatccttcaattagcactcaaattctaaacttatttatttatttttgtaaggattctaaaattattttaaatttattaaaagtattaaatttaagagtatattcgaacacaatttttttttaacaaagaaaaattcattcaatcaataacattcagttgttacaatagttataagagcaggaggagcattcaactcattaaaaatacaatctgacataaaataagacgctcttacagcaatgagcaaccctatttacaaaccgatttaataaaaattaagaaaacattatttagacaagatagcaaagaacgacaattaatctcaaacactatttttaattaagttaataattaatatataaggtatagcgacataagtacagactttgttttgaatatattaaaggaacatttaatagagcttgtaacttaaaactttggtacttagtgttatgggatttgaaccca

SEQ ID NO: 127472 - DNA, 736 bp, Cannabis sativa
ttttttttaaatggaatatttatgtgaagttgtttatacataatttactctttaagatgttagcacatctttgagcttgggagtatgtactaagtgttagtgggatcaaggaaaacaagactaccatccgcaaataggagatgggtaacctttgttccaataaaccaaatctcaagttatgaattctcccagcccgttcagcctcatgaatcaaacaagacaaccctttagaacataaaagaaaaaggaaaggtgatagagggtcgccttgacgtaaccccctctctagagtaaaattacctctaatcgaaccattaagaataatagaaaaagagactgagcggatacaattcattaccttagttatccaatcatcttcataccccaaacaagacatcatagctttaaggaagtcccattccaccctatcgtatgcttttgacatatcaagcttcaacgccatttttgtcccattaccaaatctcccttttctcatacgattgaggctttcataccctaagataacattgtcttgaatgattcaaccaccaataaaggcactttggttagcttaaattgctgtgttcaaactctgcttcatacgattggcaagacacttcaataccactttgtaaactactgtacagagactaataggtcaaaattcagacatcttggtaggcttttgaaccttatggatgaggcaaataagggtctcatttatcaagctgcagtc

SEQ ID NO: 127473 - DNA, 2042 bp, Cannabis sativa
  modified_base (379)..(388): a, c, t, g, unknown or other
  modified_base (1001)..(1001): a, c, t, g, unknown or other
gacatgggaaaagcttcagctcgcaactagggttattgttgctgttgagtattcaagtaccaagcgagatgccgcaggcgaggtacactttacagcgtatataaatccacatcagtgttgacccattataaacggtttaaatcacaactgtataattttcaaatattaaccgcatttatttacgtggagcgtaattaaggcccacaattttggggaaatattgttgtgcgattcgtatctgaatgtaattaattgttaccctatgacactatatataggggcagaatgtacagaaaaagggacgagaactcttgagagaaaagaaccctagtttgtatcagaaaaatctgaataagattgactcgtggactatgctgannnnnnnnnnaaaccacgtaaaaacttggtgttgttttttctttattattctttcttagatttcaaataatttttgtgttgatcttatcacgaaaataggcttattatcgttcacgaaaatttgtgttaacaacattccattattgaggggtcatcatctgatcttctccttcatctagatctccaaacttagctcagagacgagccaacattttctccattctttgagaaaacttctcttgatgggctaacttctgtttagtctcgcacaattcattgaacactcaaactacttcgaggtcttactcgtcgtggtagccatctttgtagtacccatctttgacgtatgctacatcttcgtcttcctcctcattcttagcatctctctcttcatcaatattggtgtgctggttgtttaggttatcctcttgattgttaatgtaggacgtatccccacccctcgaattgctcgactgggcgtgctctgacgaggagggtttacttcctccatgacaatgtctatgcctcctagaagaatctttttaggaattgtcttttgtgtaaaaaccatggtagcatcaacactatgggtttaggcctttcctcaactctcaatgaaagcnccaaaatatttactgagattttcagaaactaaatatttgagaactaaagaaataataatatatagaaataaatgagatggagatttttacgtggtttagatgttaattaaccttagtccatgagtcaatctattagcctctaagggtgtgtttgatgtgtttaaaatatttggtaggaaaccctaactctatattttgaacatttcttgaagaagaggaaagcttagagcaatattgaaggagcttcgactatctagctcgtgatctccctcttcgtatggaaataaaagagtatttgtaggctaagggcaagtatatatggacatgcccatgacccacttagggaatctataaaaagcccactaatggggtaaaatacatacaaaaaagagctgactatgggggcccttagaaagaattgtactcgtgcattgcagtagttggacaattagggaccattgtacatagtggacctgtgtcgctaaaaggtttaacctttaaaagtagaagtctaaaataaccgtctgacaaaaagatgtgaggtgcgcacactaccatgttttggcacaggagacaagatctgattctatgttagaaaaagcataaccatcggtgagcgatccagattacataaaaggaagacgtccatgacactcttgggcggtaagcatccgcgataagcccttcgagtacccatctaggtatcagttggaaagactctgactttggaccactttgggacctgaagtgataataggtgttccgtgttttggaagctaagataaggcgaggtagactccttcttatctctttgtcttgacttgttcccaattccatgaagcttctctatggctaggctttaatggggggttttaattagtaagattataagattatctcttccatcttatgccacgtgtcacctattcagaaacacaaataataatattaaacctataatcatgtaacaaacatgtgaacaaagcatatgactaagttatggtatgatttttgatctttatgttagacttttatttgggc

SEQ ID NO: 127474 - DNA, 1303 bp, Cannabis sativa
  modified_base (1216)..(1239): a, c, t, g, unknown or other
tatatataatttttttaatatatataaatatgtgtagattgaattagatctgtgtagtataattcttttaaataaaaatatctccaatatcattcctgaaaagtctttcctaacaagttatgtgtattgtatagcaaacaatataaattatgagacacttttttctgatttgaattttatttcattgggtttactgaatcccttatacaccttagcatttctcctatgtaattaagaagattaatcattattcttaaccaagaaaacccttagctaggttattttgttttagtagaaaagccttttagccaagcaacaaccgcgtgtatatcgatatataaatatatttatgtatttatgatgtcggtgaaataatatatattgatgatcgagaggctgtattagatagagacatagaaaagggaaaaacgcggtaacagagtaagattttaggtgtcatataatattggtaagtgtgcactaagtgtatatattcaaatgcaatgaatagaaagagataaattaatgaaatgaaataatggaagaggaagaacaaacatagtactagtaggctttgtttggaagacattagtattagttgattttgaaagtgtatgttagtgttggttagtccaacctgtttgttaatttattatgttaagcttcttcgagtttgttatacaatcgtattttgtatcaattcttctgcatgacttaactatataaataagtaacaccagtgataattaaagtttacgcaatttaattttatgaaatttttgtaaagttttctcgtacatttctcttcttatttgaatttttttttcattgtatcagagccaattaactaacgttcatggctaactccttaaacaatcctcaatctgaatctgatgttaatgatggtcctacaatgaagacctctgctccgaaaatgaggacctctacttttcctaatcaatcgtagaatccatatcctctaatttgtttataaattgattatcaagcttgatcgtgtgaacttcttggcttagaagtctcaagttgttcctactgtaatcagacatgatcttttattcagtagcgataaacttcttcaattctcaatcaaaggtgatctgaatccagcttttagtcaatggaaatgtaaatgtcaattgttgttgttgtcctgtttatgatcttcaatgacaaaagtgttgggaatattttaccnnnnnnnnnnnnnnnnnnnnnnnntgttgattaacatcctaaatatgttttctctaaaacaatgaaataaacacaaaagggttcctta

SEQ ID NO: 127475 - DNA, 1943 bp, Cannabis sativa
  modified_base (1428)..(1430): a, c, t, g, unknown or other
  modified_base (1490)..(1491): a, c, t, g, unknown or other
  modified_base (1591)..(1613): a, c, t, g, unknown or other
tatcatactgtgatgttgtcttgcgtttgcttcgcccaacaatacttatagaaggacgcgagaagcattaattaaattatacttagtcgctcacaacccttttcagaataaagtgtcttgagaagattatttgtattacgaaattataaaaaaaaaaaaaaaaactttgtataagagttttcccataataacaagttcaattaatatacattaataaaaatttaaaataattaaattaattaaacttattctcaaaattgaaaagaacatcataaaaattgaatttgtgggatcctgaagtaatagtgaatctaaattaagcatgacatcgtcgggattgtaggaactaaagaaacaactatcccgctgaaccatttactttgtcaaaatatatatattggtcaagcatatatcgatccttcaatataagtatccaacaagcttctctatcaagttgttgtctccctatcgaccagacgacaactcgcccttaagagaaatacctctctgtagaatcttaatgtgctgacgagatacaatcttatgataacctgtcttgctacatattacaattttgattgcacgtcatacaagccaaattttgagataacaattatattgtgcaactgtttatcttaagatacaagggtagcaattcgataattcagtacgtctgaaacatgtcctagttatctaaagttatcatatactatccaatttcattgagatcaatggtaatcgagatcattcagatttttttagtacaaacttttttatccatttattatgcatgcttttctttgacaaagagccataatttttcatttgaatgttattagttaatgtatgtgttattttattgaccactattataattcataatacaaccatcaatatatatattaacaataaaaaatataagacttcccactacgataattaccaccttaaattttttatagtataattatttcatacattattgtttaaaataagaattttaaattaattaaataaatttataagtcaaattaataataaataaaataaaataaatcatgtctttacaagggtaaaaattcgatcgtttatagtacgtttgaatcacctcattattatctaaaatttgttaggctttctgccttaaataaaactcatttcaatacaatcagatttactaattaataaaatatcagaaatcgttttatgttgcatggttcacatgatttaattcatgattatacttaatgtataaattctattaagttcaaaacatatatatatatatatttgatcatgattatagtgtcgtcagcacagttgaatataatcatgattatatgttcaaaagtttaatttccataatttgtcagttcactggttttagactgacatgataatcgataataaggtatacttacaccttgnnnaagtgttatgtcttttctagggcattggtaaagtttgctagtattggatgtatggagtanncattggattggaccgatattgaacctggataagatatcataaacttaccattatatttttctaagacaatatcactggttgatcttaggtctatggatcnnnnnnnnnnnnnnnnnnnnnnnagcttagttgtattatttatattcttagaggtgttcgtgaaagcaaacaaatggttttggtagatattttcatcttaggaacatgatagttcaattgaatgggagtgctaatcatagatatagaatttatagcttttgtaagtattaagaagtgaacgataattttcttcgagcttggcttgatagacataaatgattgaggcctcatttcactaatataaatttcactaattatattagtgaaatgaaatatcatttataggtagctaagtattttaaagataaaatacattgaagggtagaacgataaatttgtccctatttagtgta

SEQ ID NO: 127476 - DNA, 924 bp, Cannabis sativa
  modified_base (706)..(708): a, c, t, g, unknown or other
tcgggctgtgttaactcaaatcttcgggcttccattactttgagttgggcttacagatttgataaatagtatgagagtagtgagaaaatgagttctgaatcttctcatacagttctatatttatatatggactcttaatttttaccccatgccgtagtttttttactaataaaattaaagtcaaatatatatatatatattttaagaaatcaaatacatattattcggtatggtagtatgtatacataaattattttttttggctaaaaaaaattgtttaaaaacaaaaaaaaaaattattttttctggctaaaaaaaattgtttaaaaaaacaaaaaagagggttgctaatttgtttttttcggctttagtgggtttgttattttaatttttttattgaaaaaaataaataaatatgttttaaaaaaaatatacatataattttaaaaataaaaaaaatatatgttacaatatgtcataaaaattatattatatttatataagaatgtgttagcgaatgcaatttatgacatttagctaaacaatcaaaatttgtgtataaataaaaaaaaatgtatgaatctgagttgtatagataataacattaaagagagcattaaaaatagacttaatcttgtataagaaaaaaaactgataataataattttttaatttataattttttttataatttattattattatnnnttttattttatttttttatttatattttttttaattttaaattaattttaattttaattttttaatttttttcaataattttttacgtggaccaataaaattgtgccacgtgtatactgtgtccaatccaacatgccacttaacacctaaaatggacggaatggattaattgctaacagaatacaagtattaggggttttaccgcccaaatttgag

SEQ ID NO: 127477 - DNA, 987 bp, Cannabis sativa
ctatttagttataacctcccaattagaatataatatacttggtcccaagtgtattcttggatagaggttctactgtacaaatattttgacttacgcataaatatttaatttaattataatccgcaagcttgatatattctaacttgaagaatgaaccttgctaaaatttcaagaactcgaactccattcaatttacttaaagagtgactgcttcctcctgatgaaagacttgtagaaattttcttccgaagatagtgatgtttgcttcctcccgatgcaagatttggggtatttttcttgggaatctcaatttttggtgttttctcgatatttagtgtattgtcatactatctatcgatagggaaacttttaggtgattgagcacatcacttatgaattttttgtatgttgtgacgtaggtactaattagtagtggaataggcatattttgctaccttgcataactaaagatttggtgctatattggactgtttgtgacctgatctagtgtaggaatacattgctgaggttataaatggtgtattgcaggttttgggaaaaacttgcggggtatttgtgaaatctgttaactctgatatgattgctagaccattgctaactcattgctctaacaactggagcaaaccagaggagaatcaaccatccaaatctactttctaaaatctgaaatttccaaaactttaaaaattttgggcttttttaattttggtttatttagcttaaaatattatttctaaactctagaattaaggataagaaaattttcttttgatttggttattttatttaattttactttaaatttgaattgcttttagttgatattgcattatttagtgtaaaagtccctatggatacgagctttgatacttatcattatattacttgtttgtgattgtgtacacttgcgcaattataaatcaatataattttcacaacaagtttttggcgccgttgctggagact

SEQ ID NO: 127478 - DNA, 1719 bp, Cannabis sativa
atgaaatctgtgaatgtgtgaacaatatatacattatacaaaatatagaggtgtacttaaattaaaacatatttatttggtgaacatttaaatctggtgtatatatatgtgttaaatattttatataatcaattttttattttttgtataaaaataactgctcacgagtttgagttgctctatttttattttctaaaattgtatttcattgcttggaatccgtttcttttaatactagtatcatcaaatgtactagtcaattgatacatcttcatattgagacagtaaataaaaagtataagttctttaccacttttgtttacagtctcaatgatgaaaatgggaggaagattctttggaatgatttgcgtagtattgctactcaggatccatggatagtttttggtgattttaatgacattctctttaaagaagaaagaattgggtatatagagctaagtttgggaactccacggctttcctagattgtgtgaatgactgtcatttatcagatgtgaagagtagtggttgtttctttacttggaataacaaacagcaatcaaaagatagaatctattccaagattgatagggtcatggctaatcaatcttggatggatctatttgaaagggttgaagctgtgtttcttactgaatgagcgtttgatcatactccggcaattctaaatacttatcctgatttcgcaagtggcaaaaaaccgtttaaatacttccgtatgtggacttctcatccaagttaccatttggaagttaagaagatatgggaacaaaagatggcaggcacaaagatgttccaagtagtgtcaaaacttaaagctctgaaggttttctttagaaatctgaataaagagcactactcagacatccatgtagcagagaaaaaggcaaggcaagatctggaaaatgtgcaaagtcttctacaccagcagcctttgaaccagcagctacaaattcaagaacaagaagtaagagaacggtttgtcaagatccataaagattactgctcctttttgcaatagaagtctagattacattggctcaaagagggtgatgaaaactcagcaatatttcattcaagcatcagagagagaaggcagcaaaataatatcttatctatagcagatgcgaatggaacaaggcatgaagatccggagagcatcactaaagctttcttagctttttatcaagaattattgggatccaaaatggtgaacagaatgcctgttaacatcagcttaatcagaaaaggagcgtgtgtgactgagcaacatagtcggatccttaatgctgcttacacaatggaggagttaaaagatgttatctttggcataccagcagtaaaggccccggggctagatgggtacaacagctcgttctaccaggataattggaacttaatcaaacaagatatctttgaagcagtaacttcatttcttcactctgtccatttacttaaggagctgaactcaatgataattaatcttgtgccaaaaagtagatgcccgaatgttgtaagtgattatagacctatagcctgttgtaatgtactctacaaggttgcaactaaaatgatttgtagcaggttgaggcttatactgccagattttatagctcaaaatcaaggagggtttgtaaaagggcgattcattgctcataatatcatggtttgccaagatttaataaggcactatgggaggaa

SEQ ID NO: 127479 - DNA, 1614 bp, Cannabis sativa
cacgcttcaatcaattgcaacaaatttaagtctcacttttctaatggtcaaatagtaaaaatggtcatttagtgtatcattatgcattgttcgagtcccaaatcatatatggttgtaatatataaatgcttaaatacaaaaaaaatagtaaaaataatcatttagtctatcattatattattcatagcaaaaaaaaattatcattgtattattagtggtatctagtacttttcatagtatcatattgttattagtgtaattaaatattaaatctaaggctaaacatcaggcatgtttgtcggattttcagttcaaacagttgtactcagactcagcccgtaaaatggtcaggtgggcctgatttgcaggttcgcgagtcacgagttcgcgagttcgcaggttaacctggtcaactttttttttattataaaaataaacttaaattcaatatagtttattttatatattaaattaagcatcataatctatattcgatagataaaaataaaaaaaaatattaattttaaatttaaaatacaaaaattaatttaaaaagttataatatattatataatttaatatattatgtatgtaataaaaatataaagaattagaatttaaagtttttttaatatattatatatgtaataaaaataaaaaattaaaaatttaattttggttgggttggcgggcgggttcaggtccaatctgaaactcgatgactataaaaattcaactcacgaacccaccctgaaagtgtaccaggttggacctgacttgcccgaactaaataagttgactaagccaggtccgggctggttggtcgggtctaggttaaactcggtctaaatgttcaatcttaaggccatctccaaccgacttccaaaataccaaaaatagtgtggtttcacactatatataatccaaccggacactatacctaaacttataaatagaattgcctatattgccccactaaatttagtgggcactgtagagtgaacttttaaattaaataatagttgaataattatatttcttgaatatatatatgtatgagtgaacttttaatgggtattacccatgggtaatattagaaaaaattgactttttaagcttcatttttttatccaattagaaaaatctctcatttttacattatataggttatgattgttccatcgactaaaaaaaaatcaagataatatttttttttcaaatatatttttaatatagtgtaaaattaaatatttttatattttttttattaagtataaaaattcaaaattttcttatattagtccaccttggagtaataccttggagtaatgcctattgaaaagtattacatatatattacttgtatttatatatgtatataataataaaaaaatatatttttagtattatggttggaataaaaaataaatttaatactaaaattatacttttttggtgttagtttaacactaaatataaggtttactgttatggcatgtttacttaaaagaaatggaaatgaatggtatggtattaattcccatacaattatttattaaattttggaaagggagaaactagtgggaccctcacaaattagagagaaaacaaagg

SEQ ID NO: 127480 - DNA, 1175 bp, Cannabis sativa
cccgctcctaatgatgagtcggggtctaattttggatgcgggtatggtttcaatattcatacttgagtcaagttaatagatactggccctataatatatgtatatatttaaattttaaaatctaaactattataattaaaataactttatgttttaggttttttattcattaaattaattaatgagacatttcagtttttatgaaaatacatgtggtgatatatattaataatcacatttaactgctttaaaaaaatgatacttaactttgtcaattctttattattatacacactatttcacttatgtttatttttttaatgaatttttgtgatttttttttttaattttatttgagacattatttttttaaattatatatatatatgtaataggtacttgatgggaatccttcctctgctgggtaatcttcgctccgtcctcactttaatttaaacaggtattggggcggatatgagagtaaatttaggaagcaggtacggggtgggggagcaatctccgcccatgccctacccgcttagatccttatgtttgaactttgagttcacttttcagttttcatctttgatttttttgttttttttttttccttttttaaagtttgattgctaatttatttatttatttttaaattattcttaattcattattttttttaaaaaaattattagtgaaattaaaattttgtataaaatttgcaatttttctccctgaacttttgatagtattaattttgctccctaaaatatacgacttgttaagaattttctctgaacttttacatttatagaaatttagtccttctgttaggttctgtttcattatttcgtttaaatactgacgtgtttttgtaaattagtaactttgccccctaaattttgacaactatcaaatcgtaccctcaaaataaaaatgataaaggttcaatattttttttagtaaatcttaaaaaattaatttatatcttaaaaaaaattatatcgaatgattaaaaaattaagaaagaaattaaaattttaaaactaattaagcgacttaaaaaattatttatttcttactaaaaaaattatttagatattagaaaagatatatcaaaaattttattttgtaaaaactaagttttacgggaacaaacttgagtctattttattttt

SEQ ID NO: 127481 - DNA, 1469 bp, Cannabis sativa
  modified_base (40)..(42): a, c, t, g, unknown or other
  modified_base (1356)..(1365): a, c, t, g, unknown or other
  modified_base (1412)..(1434): a, c, t, g, unknown or other
caacgagctgcacagtacgtttgaaaatcacgtaatacgnnnaagatagttagggtgttacagcccgagtaggtctactggccggatttgtgtttttttaaggaggtacgggagctaaagggttctaagggtcacctacttttactttttccttatctgtactagagaacaggttccagcattagcagggtttttcttattatttccttcgacacattctattgagggttcatcatctgaatctccctcatccagatctccaaacttagcttggaggcgagccatgatttcctccattctctgagaaaacttctcttaatgggccaacttctatttagtcttgagcaactctctggacactcgaaccactttggggtcctgcttatagaggtagccatctttctaatatccgtctttgacgtattctccattgtcatcctcttccttatttttagcatctcgatctttgtcgatgtggtcattctggttgttcaagttaccctctccattgtcagcgttggatgtatccccacctctcgcatcactcggttgggtgtgctctggcaagagggggtttacatcctccatgacagcgtcgaggccaccctgaggagtctttttgggaactatttttcaagtaaacaccatggttgtagtagcactatgagtttaggtctttcttcagctctcaatgaaagcaccaaaatatttattaagattttcagaaactaaatatttaagagattgagaaataataaaatgcataaataaatgagatggagattttacacggttcaggtgttaatttaacctggtccactagtgagtttattagcctcaaaggtcatgtttgatgtttttacagtatttaagcaagaaatcctaactctatattctgtgtttctcttgaagaagaggaaagcttaaaataaaaatagcagagcttcgactatctaggttgtgatccccccttcgtattgaaatagaaggatatttataggctaaagggcgggtatggaaatgcccatgaccttcttgagatttctgcaaaaagcccactaatggggtaaaatacatacaaaaagagatgattgtttgagccccttgaaaggatttgtgctcgtgtgtttgaagcggttggagaataggggaatactgtacgtaatgggcgtgtgtcgccaaaaagtttgaccttgaaaagtaaatgcttggaataactgtttgtcaaaaaagtgtgcgcgcattaccatgtcctgacacaggagacaagatctgattatgtgtcaaaaaaagcataatcgtcgctggacgatccgagtttgtatccaaggtaaacatttgttggaaattattttnnnnnnnnnntagatctactcataagtatgttgactaacaccctaaatatgaacttnnnnnnnnnnnnnnnnnnnnnnntataaagtttagtaaaccttacatcgggtgcagcg

SEQ ID NO: 127482 - DNA, 1215 bp, Cannabis sativa
tctctctctctctctctcggtagtggaaaaccgaaccacaccccaatcacttaagaatcattcaccattataatgggtaagttgtgttttaagcattttgttatatattagtgatagtatgtagtttgtttttcgttatatgtgtgtggtatttgctgaaactctgaaatggtagtctggtttttttatcagaatctgggttttccaaagaatatcgattgtttgtcgatacaatgtcgataatatacgaaggaaggtcaggaatgaccattatcgacatgatatcgatagtttgtcgacatcttgtcgataactaaaataattttaataaagcattgttatcgatagtatatcgacatattttcgataaaatttgaaaatatacttttgtcgattatatttggcagtgtattgatagtttgtcgatattttgttgacatgttgtcgacaatacacctaattaatttaaatcgttgtcgatatttaggaatatttcctggtatttatgtttgtcgataatttatcgagtgaatgttgatagattatcgacgttaagacaaaaagattgaaaacttttaaacagtaaacatgaaacaagtaaaaagtttgaaacataagtaaagactaaataaactttaaaactaaccactaaacaatcataacaatttaaaagtttacactgtgtcaatgagactcgcaatacaagcacaacgggtcaggcttgaccggttcgccattaaaataacttaatttgcaacgacaacacactttggggaaccctggtggtggaggcagccattcattttttttttgaagttgtaggaactgtcatttgttcgccagcctttcattttcaaaacgtttaaaagtttttatatattcttgtatctctatagtaacttcgtcactaggttcttgtttgatctcttcactagacagaagtttttgtttgatctctttactagacatttagaacttataagagaagaacaccctatggataaagaataagaaacatatgtaacttatgaagtagaaattttcttttatagagcagaatagttattaggaaggtaggaaaaaataattaatattaaatgtccaattatacacgtttatggcatgcaatgtgcatttatcaatattatatcgtgtaaagcccgcttagttaatttggaaattagcagttaatcttgattaattatgaaattattt

SEQ ID NO: 127483 - DNA, 538 bp, Cannabis sativa
aaatgtttaaaattctgtgaaactgtatttttgttgttttttttattgtttttgtgcatttgtgaaattatcccttcttttaatcgtttgtcacgttgccttttttttttttctccaaatcatttttttaattattatttttcattattctaattgatgaaaatgtttgaagatataatataggaatgaataagtagataatgttatattattttatatatcatataatattcaaattaaataatttagtttgacaaataatatttatcaaattatgtgaatgatgatctaaaatgatttataaatttttaatattaatgatcacaaagtttataacttgtattcattatcgtttctttaaaaattagtaaattaagttactaaatgtaattaaatgtgattaaatggtagttatgaaaatatagttgttgatgatttatttttagggttaatttcacaaagcacaaaaacaacaaaaaaacaacaaaaatacggtttcacggaattttaaatattttttcgatttttttgattttat

SEQ ID NO: 127484 - DNA, 1103 bp, Cannabis sativa
aataaatgataagcaaaagatcaaaaattttctcttctttttctcttcctaatttttgaatggcactatcaaataggattaggattcaaatctaattaatcctaaagtcataacaaataaaaaaaatcaaattttcaaagaaaaagataagagaaaaaaatgataagtttttcttctttttctttgttaattaattttcaaaaattcccaaggaaaaagcaagagaatctaaaatcttaattttatgggaatacttgaagaataaagaaaattgcctaagaatgtcaaaatgatgcccatctggcagtttcaagagaaacggctcggttcacgtcatcaagtccacttcacacaagtatgaagttaaattgggagcaaactttaacttggaaactttccctagtgacgagaacattaatgcttgactcatggcaagaaggatgatatcaaaaagttgagtggacctgagtcatagtagtcgacctgggatgggaccctagtcatgcacctaggttgactctaggagctctgagatggaagttcaaacaaaataactttgatccaactcactatcttccagtattttatggagacatggagcaatcaaatccaagtcttgggagctgaaattacacgaacctgcactctagaagccaacctgggaacctagggtttcacctagtgtataggttgacattcctaactagggttttagttttcaggaccatcgtagtgcaaatgggtcaaaatttgcattgggacatttactaaacacataccatagacatagttgaggaatcagaatcagattcgaagcaagttcattttttaacacccggtgcttgggcaccgagcacccagattgacaatttatcaatctgggtgccttccaagtttcaaattaaagatccaacttttgcatcttctttgtcttcataaaaaaatgaggaaatatgtgagtttagggaagaaactgcacttcctgaaaatgcaataggggtattcataaaaatcgataaaccgaaaccaaccagaccgtaactgaattttcggttccacatcatcatcgaatttggcggtcggttttgattttggtttttttg

SEQ ID NO: 127485 - DNA, 1515 bp, Cannabis sativa
tctttagagcttaccccaacaatagaagtatttttaaagtttcagaaacttaaaaacaatttttaaaagtctagccaaccaagacttataaccataactagtagtgctttaacactttttataaaataatgctcaacgattatttaatggtattccttaaaagttattttgttaaattatataagacccaatacttaattacattaatagtagtattacattaaaaaagtactagatactagtagtaccttttatagttctcaatttttataaacgatccagggcacatatgcagtggtgtcttttaagacagcattatggttcgggatgactccacagggtaacaagccatcgagccacgatgttatcatagggcggtggtcaccatcccagagtgaccgatcagccgggagattaccaacatcatcaatggtggccttgaatgtggtcatggccgagatgatagggtggctagtaggattggattctacaagagatattgcgatatttttagaattggctatggacctaacttggatttttacaatcaaagtccttttgcttgatatttcataatcatatatgttctctaactgtatatatatatatatatcctatttggattaattgaaataaggagatggatcgtaatgagtgagtggctatatatatatatatatgtatgatttataagagaactaatattaatttgataataaatctccattggctagctaacttattattagtgaatgaaataaagaaagattaattattcttttactattgtgaatcattctatgttttttttagaattagctatgggattgttatcaaactcctttttgatcaagattcatattcatatatatcctatttggatgaaataaggagatagattgtaaaatttccaagtgtgaaaatcatttaacaaaacaataaaggctaatactttttttaaaaaattattttttctataccaaactaataaatattatttaaggataattaaaatttttgtccctattaaattatactgctgaatattttaaatcgtttaaaattctctctgaattattgaaattgttagatttaaggatttttatctaatttaatttaattttgctaatatagcaattattcatgtactaaattgtgcccctaaactttgatatctattaaatcatgtcttttaaattttgacatatattaaattgtgctatcaaaattttcatccatattagatttttttagtaaaattagacaaaattccttaaatctaacaatctctatagtttaagaaaaaattttaacgacttaaaaagttcaagtgacattatttgatatacgtcaaagttaaagaggcaaaaatcaaatttatccaaaaaaaaaaaagtaaacgacatcttgtttattattatcataaacgacatgtcgtttattatgtcttcctcattctcctgcccgaaaaccctaaaacccttgcttagggctcgaaactgaaaataaaaaaaa

SEQ ID NO: 127486 - DNA, 1872 bp, Cannabis sativa
  modified_base (324)..(328): a, c, t, g, unknown or other
aaggccctacaagaacagtatagcgagagaagtaccagacagagttcctataggaaccatgcaccgagcaaaggctaaggaagagttcttggtaggttctaagccagaaagcaaagttcctggtaggttccaagcaaaaaggcagagttccttccaagttccaagccatagacaaaactgtagacaatcgtacctaagggtacttgccagaccatgtcagcgtacaagctgggtatcagcaaactacaagtctcaagtgtaacaagttagacaaaatgttcagtcttaagttgaacattcgactataatagactcaccattaannnnnatatagagtttctaagggaaccacgtatgagactaaggttttatatgcctataaggccataacaagattcttggcaaagtcaaaagagggtagtatgctagcgacccacttggaaccatggcccaggtgggccaaggttcccaagccttgaaagggttgcccatggtcccatgacaaccaagaatcgaccaggttcaccaaacctaggcatgaataagctagctttataaggagaaaccctaaggttgtccaactccaacaattaagtactagggctggccagtcctcaaccaagtcctcctaggtcggccaaggttagctttgaatccaaatgtgtgtttttatttcaaaacttgaatatgtgcctcgtgttctttatgactcaatgagtcagatatcacaacaaaggccaaaatcaaatcatttccatcaagaagtcacacattatagattcaataactatcatgaggatcaatataccaataagattataaactaacatgagaatcaaaaagtttctaaaagcttaaaaagcttgaaacttgtcaatggaatgtacaaagaagagatatccaagaagagaagatgagatgtatgtatattgagaagatcaaagatctaaaaacatgccatgtaaaaatccaacacctcgctagacaaagctgctcaatagagactactacaaataagacaagagccaaaaagtccctatccgacaagatttttgaacagagacttgggggcaaatattatcccaaattttgtccacctgacattgcatgtcaatgtaagagaagatatagtacaggtggaacacaaccttgccaatagaaagatagggtttccttacaaggtatggcgaaaccgttaagcaataagaaaattgaactaaacgagccatcgaagagctacaacatgtcgaccaagggagcacaagttggcagacaaaaaggtgacttttagaccaagggagcatctattcgaccaagggaacctaacctctgcatgttaatggtgtacaaagctgacctccacttgccaaaggctgccctcaaactcaaaaggctggcctcctctcaaaaaagctcggaggaacatgacctataagatcctggcaggcacatggccagctagaccctggcagacacactacttgcaagactctagcaggcacatggctggccaaaccctagaaggaacatggccagccaaccatttcctagcaagcctttggtgtgcagccttcaatcatggatagcaagctaagttgcggtttggaccttgacaacccacaaaaatagggggaaatgtcagtaaatttcctatatttgagggataattatcttatttattatttattatttaattatgtaaataaggctttatcttcttatttttaagggacgttagtgtttaatcttcatgtaagctctactatataaagagcattagtctaaccctaattctctaagtcactaagtccctacctccccaagagctctcaagctcaaagtctaaaaccctaactctctctctctctctct

SEQ ID NO: 127487 - DNA, 896 bp, Cannabis sativa
aacgtcgtattaagtcgtattatattgtattgtattatattaaattggattatatatcatatttttatataatctatgttaaactttatagtaaaatattatatatttaaatatcataaaaattaatatcaaatataatttataggaatatcaaaacaaactgtaatagtgtattttaacaatttttaatatttagtggtggggtcccacaagtgctgacgtcagctcagtgtgtgtgggacccagtagccgaaacgcgttacataccatatttaaagccttttcagtgtttgtgtagcttagctgctaaaacggtgatccacgcgtacagcgactccgctcaacattaactcttcaaacttaaaaatagaaaataaaattggggtctatattatatccagctgaggtgtaccacagaggattacttaccaccacccttgtgtaaatgaatgcgcctcttctgttttcctcgctactagtttcgagtttattttaaataacgttctagaaggaaaagaaaaatttatgacattatggttttacgtgtttcatatttaatgtcaatatttagagatatgtatttgttgcataattaatcaaaaatttaaacaatttcatttaatggccaaactacctcaaaatttactaaagcactaattttgtctatttttttctttttcatttttttcatttttatattttaaaataattttttaaataaaattttacacaaaaatctctataacaactaacagagtaacttaaatctcaactaaaatccgtatgtcaacccatataaaaactagacaaaagttcaagaacataattgggtagatatcaaagtttgggaagcatggtttagtacataaacaatcactgaaatagtaaaattgaat

SEQ ID NO: 127488 - DNA, 1100 bp, Cannabis sativa
ttagaagacacaacacagttgtcaaaaatccacaacaaaatggattggctgaaagaatgaatagaactcttcttgaaagagtgagatgcatgctgaatagttctggtttggaaagaaagttttcgggagaatcactaaagacagcttgttatttaatcaacaggtgtccctcaacagccataaactttaaaactcctcaagaaatgtggagtggtcaaattcctaagtatgagcatttaaaagtatttgggtgcacaacctatgctcacattagacaagataagctccaacctatagccattaagtgtctattcataagctatcctgatgggatcaagggatacaagttatggtgccttgaaactggttttaagaagtttattataattagggatgttgtgttcagagaagatgagatggccatgaaagtgacagcaagtcaaactgaagctgcacctacaaaagaaacaaactcaagcagattataacttgaggtggaaccaagtaatgacttagttcagacacaagacaagcagattgatgatagtcaagataaatcagatgatgatcaagatgagttcagcaactatcagctggctaaagatagagatagaagagaaataaggctacctgatagacttggatatgctgaatttatagcctttgcactcactgttgcagatgaaattgacagttcagttccttcaagctactttgaagttgtcaatggcaagaatggtaaagcctggttacaagaaatttagaaagaaatgacttcactcaaaaaaaaaaaaaaaatagaactttgattgtggttaagaagcctgctggtaaaagggttgttggctgcaaagggattttctgagaaaaggaaggtgattcaaggataatacaaagaaatttaaggcaagattggtagataaaggtttcactcaacaagagggtgtagatttcattgaaattttctcactggttgttatacaagcctcaataagaatgatcctatcaaaggctgcaaaatttgatcttgaggtggatcaaatggatgtgagaacaacctttttacatggaaatctagaagaagagatttatatgcaatt

SEQ ID NO: 127489 - DNA, 1418 bp, Cannabis sativa
ataaaacttacacagtattttttaaaaaaaaaatcgccccgaagtaagaaaagttaaaaatttcagtatgtaatgtaaaaactcctatatatcaaaagccttattttatatttgggtttcaaattcatttaattaattgtattttttctagggattagttcataaatacaaaaaaaaaaaaaacaacaaaaaaattataaaaatacggttgtatagaatttaaacatttttatgattattataactttatttacagaaaatacagtttttttacgttgcacgtttgttaatttgttgttgattttttgttatctatatattattttctgatgttgtttggatgttattttcctattgcttttatgtaattttttttgttgttttcgtgttatttttatgaaaatttgtaaaaatataaaaattaaatgtaaaaatgtaattttttttatttatgtaactattcttttttttttatgtctagatttgtatatcttttatttttttcactcattatattatcttttagcaacatgttttgtagtgatttttttttttttttgaacaatttaataaaagattttaaaacaatatttaaaaaatatggcattcttttatatgcccgcttttcttggcattttatgtctttaaatttttttgatagtattgacatgattaatgctctcacccaattacactatcgagttcttgtatgtaagtataggctagcccgtaaggtgtgttggtagcgagcaaaacaaagaacttagataatacaattagtttgaacttaaccatctcaaaattaaaattgtattgacatatgatcaactatataaaattaacttagaatagataataacaagaagtttacttatttaattaactgttaatatcaatccagtccaatgtaataaatatatattcaatcatgtctataataaatatatattcaatcatgtctatttcactaatgccctggaaaggacacaccatattgtatgtagatcttatatagttgattatcacgttagagaaaattttgtgcaatgatagatttttaaaagtaattaatttaaaatgtataatcacaattatttttaattgtaatgacattacaatagatgaatagttatatatttagaatttaataggagtttatatattaaataataattaagaaaataaaacacgtgtaaagtgattgattaagtaaaaatatgaatttcaatttttattgataataaataagattagatagtatacagatcttatttatgccataaaaccctaacaccaccatggattactggtatgattaatttttttgaggattcgatacaagtgtccactaatgacattaccttcaacttggaccctggagaagtggatgaaccacaagaaccaaataagatgctatt

SEQ ID NO: 127490 - DNA, 1450 bp, Cannabis sativa
  modified_base (1353)..(1355): a, c, t, g, unknown or other
gtcagcctttagaggtgaaggccagacttcagagatggaggctagcctttgaaggcaggggccagacttcagagatggaggctagccttctgactgcctgttgttgacttgccctactgagatgtctgaccatgcattgctttgggagttttgatagaagagttaagcaaacaaacttctcctccttcttccttgaacttcacggcataaagggatcgttaaatttctctctttttcctttatgttggtcagagccatcgttgttgcgcttgcctccactattctcgttgtttgagaattgatagagatcgtctgcgctggtcagtatgctggatagtgtttggggcgctacgaggccctgtgtttgttcgtcattctcctaccctcttgtctgggcttgtcggtcagcttcttctaactttgtgaagccatcagctcgctcaaggaactcctccatattgcttgttgagatcctcctgatatctttctcgaagtcacgcaatggtaggatgcctccgagtatggtcgtatattggccttcttctgtgaggcttgtgaccttggtggcctaaaccatgaaccgttgaatgtagtccttcaagggttcaccttgtctttactttatttcgacaagattttccagtcgggcaggtatttgtcttgaagtagagaaatgaatgtagaattcttgggagagctctttccaagaattaaatcttcctagggccaacttgaaataccattgttggcctatttcagctagagtttccgaaaaaattcggcattgcacatctctagatacttgtaggagatctgtttggatctcagagtacttcaggtgtactagaggttcttcttttctcgtgtacaccttccaagacaacatcttgaatttgggcaagggcaaggcattgatgtatgccgagaatggtgatcccctcaccctgtctagcttatgttctaaatgttttggatcagctaggcccttgaggatgtctcatattaaatctaactgtgctcacacaaaaggatctgctgctgtaggagcctagttaactggccttctttgactgagctgcagccttggattggccaaagcctggtcggccataccttaggagagggtatgctcaaggcccgccagtcctgagtatggtgctggtacatggtcgccagccctaagttgggtagggccttgccgcccatacttctctgcctagctagtggagttgggcatccacatggagtaaatcacaccaattgctggagtttggtggatccaactgtctgaagtgattaacttcacttctcaaattattgttttgggtgtttctattggaaattattttaccnnnatcttagatctactcagaagtatgttgattaacaccctaaatataagctttctaaaacgatgaaataaacacttataaagtttaggaaaccttac

SEQ ID NO: 127491 - DNA, 1760 bp, Cannabis sativa
ggatggagattattgaccaatgagaattctttggttagcatgatctacaaagcaagatactatcctactggtacttacctcacggctgagattggcccgaatcctagttttatatggagaagtatcttagaagccaaagaactagtttgtactggtgcaagaagatcaattggaggtgggacatctgttagcatactgagagatccatggctcccccacaaccaaaatccctacattctttcaagccaccctgcactggtaggaaagctagtttctaatttattctcggttgggcagaagagatgggatatagaggtgctgaatgacttatttgaggaaagggataaagagttaatcatgtcaatacaacttagcgattcagtggaagaggatctctggttttggaacaagtcttcatcgggcttttacacaattaagagtgcttactcttacttgcagcagaaaactgccacggccgacttggtacagaacacagaaggctttaaaaagctatggcaactggatattcctcaaaaggttcaacacttcttatggcgtgcaacatcggggtgtcttccaactaaagtacagctgaacacaaagcatgtgaatattgaaatgatgtgtccgttctgcaatttatctgctgaaacaatatatcacattctccttggctgtagttttagtcattcttgctggtctttatctgtagtgagtgctgctggtgtaaactatagtgagttcaacacttggttgtttgatttaatggcttctaaacctcctgaagttgtgcgagaagcagctatggtaagctggaaaatttggacagtccgtaatgagcttgtgtggaatgacaaaacttgttcaacgtatgaagtggtgcgatcggctagggtcgtccttgaccaatggttaagtgttcaatcacaaaaacatggggcattattaatagatgatattaataatgttaatgagcactggcagaaaccaatgttaaatagggttaaggttaatgttgatggtgcctttttcaagcggagaacaagttcggctttggttgtacagcaagggatcataatggacagcttattgaagctatttctggaagccgaattggcttggttcaatctgaagttgcagagataattggggttaaagaggcattaagttggattaaaagaaagaagtggttaaatgtggtgatcgagaccgatgcattgatggttgttcaggcaattaaaagttcgataagtatgccatcacaatttggtctgattgctagagactgtcgagagtttctttctactttaaataaattttctttaatgtttgtaaaacgatctacaaacaaggctgctcattgcattgcaagagggtctagtttaaagtcagattgtattttcagtgggactactgttccttttaagttaaggtctattgtagctaccgaaagttattgaataaacaccatcttttattcaaaaaaaaagttataatgtttggtttgtggttggaatgagtattgtaattaaaattattgtgtttggtttggtgtggaaatgtaatggaataaaatgtatattgaccaaaatatccctatggtttttattttttatataattatataatatttaaataaacggggtaatatagacttgattttttttattataatattatattaattttgtaatggattgtaattttaatgaccattatttttaggtgatgtttgttttggtgtaatagaaatgtaatag

SEQ ID NO: 127492 - DNA, 878 bp, Cannabis sativa
tctaacatggcacttaacacctaaaatggacggaaatattaaattgctaacggaataggagtattgagggttttaccgccaaaatttggggtttagggttaagtgaagccaaaatgaaagttttgagggttttggcgccatttacccttttgttaaatggatttgggggaattcagacatagatcatattgtgaggatgcattcaggctttaccctttttagttttagagatgaagttactaaagatattgtcttggaaacgggggtaatacattttgataagaagttggtggttattagaccttggacgtctgatcttgattcattgaatttaatcaaatctatcctcgtttggatctatcttgatggccttggattaaaatattgggggaaaaacatcctgttatacccgagatttggctatgtaccaaaagctgacatgtgtcctacagaaggaatgtgaatcaactcaatgaatataataatgatattgtaacattaaatgcaattaaaataaatcgtttcaattaaatatatatgttataccagaaattcggttggaggacacgtgtcaagatatgtgaatcagtgccatatcttttttggaataactcattaattatgtatcagagtatatttgtaacccgctgactgtaagatcttaggcgaggaatcaatgtacgaactggtacttagtgtattaacgagaaaccatatatcgctaaaggagaatagcgaggcaccagagaagagtaacacataccttagcttacaataagcaaattaagtgtcaaagtcggaccggctcggagtaaaagaatgcgagatgaccatctcggtacgaggaaacttcctatagtttcatccaactaacggaa

SEQ ID NO: 127493 - DNA, 923 bp, Cannabis sativa
ttacttgtttctgtttttgtatttcgcgctgatgtggatatttgtgtgtgtaaaggactggttataagtggaatttactcaacagttgagtattcaaaatgtatgtcaatttgtcaaatttctatttttctcacttaaagcttcaataacagcacaacttcaaaaggatcaatcgcaccaactgtgccaggtatccacatcatgcagaagatacgcatacttatcgctaaggtatggtatcaattcaatttgcaatgaggatgacatattagcaacactacaaaactgatcaactcgaagggttctactagctccaggtctttaatggagaagagaacatcctcataaacccatacaacaagccctttatgtggcaaagttgtctcataccctgccatacagaaaacccacttcttaccctagaataacaaggtaaggagcccattgcacatgaggatgccctagagatcatctgcatccccttcctttccgaccaacttcttcgactcacctttcttttttcctcttcaacaatctcagaggaacagaggagaagaagaagagaaagaaagagaaataaaaatggtgtgttggttctgatttattagttatataatcgccaatcggaaattatatttattactatagtaaattacacatgttattttgaaacctgtattttgcaaaataaaaatatttaaaattgagttcaaggtcctatttttactattttagaaaatataagatttattttattatttaacaaaatataaagtccaattaataatttttacaaaatataaaattcaaaataatattgggtgatcctacaatgcaccccttaaaaggaatgtattgatgcacccttgacttgtttcggcatccagaagaactttttaggctattttttttttcatattcat

SEQ ID NO: 127494 - DNA, 566 bp, Cannabis sativa
caaatgagcagatatccacaagagagagtgaaggcccaagagagagtggaaaggaaaaaggttgttttttgatgaagatactatctaataatataagtgggagtatctctaccgaaaagagaagagctataaacgaagtaatttgtaggatccagatatcatagatctacaagagactaaaagagaggtcgtggacaaaaggttagtacgaaatgtaggagatcaagatttaaaaaaatagttgctactatcattaatcgggagagcgagaggatttgttaatatttgggattaaagacaagggaacatcaatgactcattggtgtgagagtttagattactgattcatgcagagcaggggcatgggaaatgggccaggatggtggttttcaggtgttctgggccttgtagttatggaggaacagatgaattttgggatgattattagaatcccccatcaactaagtatgggaatagcctggtgggctgtttataaattgctaggatcagtggcagacccagaatttaattggagggtgggcgtaaatttttttcatatataaaaa

SEQ ID NO: 127495 - DNA, 1782 bp, Cannabis sativa
tctatatagatgatattcttatcactggaagtgaccagaaagccattgatcaacttgttgtgattctgaactctgagtttctcaaaaaccttggagagttgaactaattccttagagttgaggtcaagtacactacaaaagacatccacttatctcaagggaaatacatcagagatcttctctataagaccaagatgcaggggaaaaatcaaagagaacacctatgacaagtggttttaagttgtctgcctatgggagtgatgatataaaagatgtttgactctacagataacttgtagtagctctataataccatattatcactaggcttaaaatttcgtatttgttaacaagtttttcagtttgtgcaaaatccacttccagtacattggattgttgttaaacgaatcctaaggtatctaagtgggataatggatttcggccttcacctcaagaaacgtcaccaactagagattattgctttctatgatgcacactaggttgcagaccttgatgacagaagatcgacttctagttttgccatttatgttggtcctaaactttttgcttagtcttgcaaaaatcaaaacactatccatcgagaggtagagtttaggagtttgactatgttatagaaatctcttgccttaaacctttgtttacagagttacacatctctatgccaaggcctccattaattaggtgtgacaacttaagcacaatattattaactgtgaatctagtactgcataaaggactaggcacatagagttgggcttgtacttggcaagagagaaggtgatttagcaattggttgaagtgaagcatgtccctccaattgagtaaattgcaaatagtttaacaaatgccatctcaattaacaagtttactatgtttagaaacaaactcagaattgaagatacatcaattctaagtttgaaggcggttgttaagatagctaattagtaagtattagtttactagcagtagttaaggtgagttgttagatcaaatccgttagtttgttagagtcttggactctaattcaaatgttatataagtaatcacattggtactttgatctaatatgaaatactctatcgatttcttcatctttctctctatctttctttcctttctttctctccgtctttgtctgtcttaagttaaagaatgtctaggaaatctattatgtggcaagtataagtgctttattatattatatttgggaggttagaaatatttgtttgtgggaccaaaaagtatataatgtacaaattatagatcaaaagagaaaaagaaaaaagaaaaatattgtattataggttttctcattttaaaagagcaaaaataaatagaaaagatagagattggtttgaggctttctccgtcttgcttgtggtttgtaagtagtatttttgagcattaaaacttctctaattcataatatataaatatatatatatatatatcactacaaaaatttttacttttattgtgactaaaagtgaaaaaattgtgacgaaaagtgaaaaaattatgactaaaagtgaaaaaaattgtgactatttataaatcatatcattcttatgttgtgattgaaaggtccgtagctaaaggtaatagtcacaaaaattacaatttattgtgactaaacatgtatatatttagtcacaataatatttgttgtgactaaaactaaattagtgataatttgtatctaaatactatattttagtcacaagtaatattttgttgtgactaaaagtcacattaatttag

SEQ ID NO: 127496 - DNA, 647 bp, Cannabis sativa
gttgcggggcatattttttttttttggtatggttttcctcgatctcatcacgggttctggatttgctcccgatgaaggctcaaatgtagtaattcttttctttctgttttttcatgacgtataaaaagactctcgaagtcattatctgcaagaagagaaagaaatgagttaacacttgttcaaaataaataataaaaaagtgggggaataaactcccacttagaagaatttaccatagtcatcagacaaggaggaggaagaactataatatgtactaaactccctagagccagtgatcatatatatttcataacgatttattggagacatatcccattcagagtctggatggctcggcccatccaaatgagtaccatactgctcggtaattccaaagtaagaactatcacaacttaattggacatgaaacttggggtaccaactatcaaatctatgagttatatgatttatacagaaattatcccaactataaaaattgtactgcctatccttgaatttaactagcaaggtacacttagccctaagcactgtaggggcccatccacaattattatctcaggatgcttctcctttagcttcttgagggggttctttcttcatgaaatggatgcgagccacatagtctc

SEQ ID NO: 127497 - DNA, 1668 bp, Cannabis sativa
atattattcttttactatataataaaaaaattataaatttaaatgatataaaaatatttattaaaattttaatgtagttctataattatgaatttttttctcttaaattttagtaaataattaaatatcatagtttttcctatggactcattgttgaaagggatatatattgatgtttgatatttttatttatttatcttttatctcaaaagaaatttgtgaattcatttttatataaaataataaataataaaattttctcttaaatatcatattacaccttatattacattttttttttaagaaatgtgattagtgcatgttttttattttattataaaagtataatttttatgatgttataaaagtctcacataatatagaaatatgtttgttgttagatttgtaacctataaatatatcacccattcttttttcattatatgagtgattgattaattaaatgttaccctattaagtataactttttattatgatgtgacaacatctttgatatttggttaaataaataaaaaaaaaacaactaaattttttttaatatttaagatatttttagtcacatttaattatttgtgttttttttatatttccatataatatggatatttattatagagtttttattttttttaaaaaaaaaaaaattctcgcatagcttaaaaatgtgattagtgttagacttgtaacttatcagtgagtgattaactcaatcttacccaattaaatatttggtaaaatgaacaattaaaaaaacaaccaaaatttaaatttaaaatatcattataatttagtcattctttggactcctttaaaaaaaattaaaattcatgtaggacaaaagtaagaaaatagtcacaactgagtaacctaaatagtgttggagaatatttagtatcgataatagttcaaatacatgatttttttcagtaataatttagaaaaaaataaacctatttattgttataataatttaagttgtacaaccctgaatttaaacataatattaaaattattttaaatatattgatattgattgttttattttattaattaacaatgagaaaatagataaaagaatatcaattaaaattaatttaagatgccatataaataattttaaagttcatatttttttttttaatttataatgtaaactacaaaaagtatttttttaagtaaaaaaatgtcaattttcatttctaataattttaaatatttaaataatctaaactaaacttacaacatataaaaataaaaaaaatgataaataataataaaaaaaatcaatttttgaaataggtatgttttgtattctaaaattgatataataaaatagttacaaaatctttcaaaaaaaagtaaccaaaaaaaaaaattatgataaaaaatgctcaaatttatagtcatataagtgtgtcacctcttacaaatatattttttaattttgaacaaattaaaattttaaaaatatatatattttagttgtaaaaaaatatttttaactcgaacaaacaataatataaaaatctagaataatatactttataaaaatctagaacaaactaaattaatttcgtaaatatatataaaattaaaaattattataaaaaatttaattattaaaatataaataactacttgtagaaa

SEQ ID NO: 127498 - DNA, 1679 bp, Cannabis sativa
gggcctttgtgctgggagttgagttacttcccatacttcatcgtgttttatggccccagcgtaacgctttagttcgtttctggtggttcctccgatatgaggcccatcggagatcatggccacgctcccatttggctgtggtggcaatccaggtacctactgggggagtgctcctacggggggtacactgggtacttgttctccgggcatacctcctagtcccccctgaggtaaagggtctcctgctagagccgggtttagatggggtaatctgttcttgatccattcatacaaatgacctaatcggattaggttctcgatttcgtctttcaggttcttgcactcattgtttgtggccaatgttgttgtgatattcacaccttttattgggatccctctatgagctatccctatataggggaggaggcttccgataatgcgtattctacatggttgcaaagtatacgtgctcctgtgtgtccgtgagcttcatgtattgagtgtattgaggggtatacctcctccgctgtcgcttgtcctcagtttgggtgctaccctttgaggaccttttgctccgggagctcagaagaggtcttgccaggctggtggcaggcgcggattgggacggggttcagacattcatcctcgagggattgcccatgggtggcccaaagtgtgatgatgtgggagctagggcgaggctttgattatatcccggggtagtggagaatacaattccgctcatttgaggagtggccggaggtagggctcccaaaagctgtgctccagctgcatatcctaatactccagtcgggtagtatccttcgtaagccactatttgggcttcttccaagttgatgtacttttggacccttttttggaaatcttggagattagctgctcccccttgttgtagttcattccagaaaggagtcccgggggccagctattgtccatcatctaccttcttggtctttgaagcctcttctttgaatctttttataaagttctttagagtttccgaaggcaattgttttatattagtcagggcgctgacttcaaggttaatgtttctcgccgtgaaaatctgcctccagaaactgacttgtagcttgctccagctgtccactgatcctggttccaatttcttgaaccattcctcagcaaaaccgcttagtgttagtggaaagcataaacacttcgcgtcattactgaccctgatgacaggcatctcccggttaaatcaggacaaatggtcgctagggttcgaatcttcgatgtaagttgtcatttcagttatcttaaagttcttagggagctctgcatctagtatgtgccgagcgcatagttcccggtcctcaccatctgagtccgagtcatcgcctttttgtctccgggagaccctagaaatgtctttgcgtagtattgtcaactcaaccaggattccctcattcaacgtgtctccagaaattggcagtgcgtgtttcttcttttcaagatggcctcttaagtcaccatgcttttcattgattttctgtcttaggtcagctggagggtaccttcagtttttcctccctctttccccgggctcttggtgcacggatatgcttttttggtcctctcgatcctgagggccaagactcgctcgagggagcttgtgttggaatatgttttaccag

SEQ ID NO: 127499 - DNA, 1662 bp, Cannabis sativa
  modified_base (27)..(40): a, c, t, g, unknown or other
  modified_base (1524)..(1530): a, c, t, g, unknown or other
aggatgttaatgaaacatacatggtannnnnnnnnnnnnntggtaaaatatatccaacattaccaacatgtggagtggctccttgatgaggaggcatgttggtgcggctaccaacatgaggattggctccttggaaaggaggaatattggcatggttaccaacatgagggttggctccttgaaaaggagggatgttggcacggttaccaacatgaggatgtgttaaattagaatcttcttttttagagatgcccctatacatagttttacttggtatttccccatggtattgaggattagtggaatgttcttgataggaccaatgttgaatgtcatcataaatacttatggagtaatttagcgagtcggtgctatcgctatcttcgaggaaggtttgttgatgattttattgtgcccctagttgggaatatgtagcggtagtttgtgaccttgaagggtaactcggttcttgagtaggttgttgcctttctcggtgagggttctcccttttttctttgacgtcgacccctatattacttggagcatgaggtagtcgcggagatgggtcatggctaccatgtgccacaaagttttgattacccaatgcatgatttgcaacattgtgacacaaactcccatgtcccctctatggaggttgtcactcaaaggatgctccatatttccttgggattcatgctgaggaggaaaattatgtggattgggtcctccttgattcctcatggggtcatatgtggcacaactaccccaataaacattttccaagcaataaaacaactatccaagctcagaattgaaaaacaccatcacagctccaagtttgagttctaaaattcaaaacttgcctaactctactaacagccattagatcatgctcaaatcaacacaatacaacataattaaccttcaaaaaacaatattccacactaatagcaactacaacagctaaaatcacaattcatgcaaaaatccattttcttacaattcaagaaatcaaagaggaggatactagaaacttacctatagcttaagatctcctaacaccagctggaagaagctttaatatgcagaaaaacaaccccaccctagctagctctaggtgggtttcgaagagagagaggaaggaaagagagagaaggagctttcttgaatttttcttatttttgaataaaatgaaaataacaaatggttttattaaaaataatcagcttattaaagctttaaaattcagattaatacatcccacaaaagacaaaactcccacatgcaaattgaccagtttgccctttcacactaaatatcataaaaaagtcactaaggggtatttttgtcaactctaaaatctcgactattctcagcattcccaatgtctaactatattgtcccgatatactaaaaatactatgatgtgattctaatagccaaacaccacgttccaatgttgtcgggcacaaaacttgcaaaattatgaaatttctatgtatgacatataaaatgcattctgannnnnnntaaatcatcataaattaataattctaaactaataaataattttcataattaaacctaattatctactaatttccaaattaaagctaagcggtctttacaaataatttaattatataaatatcttacttcaca

SEQ ID NO: 127500 - DNA, 605 bp, Cannabis sativa
  modified_base (44)..(65): a, c, t, g, unknown or other
  modified_base (559)..(579): a, c, t, g, unknown or other
ttttttaactgcttaccaaacacctttttgtcacagcttttttnnnnnnnnnnnnnnnnnnnnnncaaaagctgtgccaaacgggcccataataccatatataaactatttattgccaattaattttgagattaaactttatacattttattgcggttaaactctcttgactattatttcacttgtatttaaccttctaaaatcaaatttaatacttaaattctcaaaactactgaaatgtttataaatttaaggtgtcattgtacacgtgacactcttatataagtacatataatattatttaaaatatattttaaattttataatattttttatttttataatttcgtttaatttttaaaaaaaaattaaaatattattaagggtaccaatataaaattgtgtcatgtacaagaatatagataatgacataaacaaatataacaattaacactgaataacatcttaaattcccttaaagaattttggataaataccattttgggccctatgttttgtaaaagttatcaatttgaccttgtgttttgttaaatgacannnnnnnnnnnnnnnnnnnnnaaatagtacaaataggaccttgaatt

SEQ ID NO: 127501 - DNA, 687 bp, Cannabis sativa
acagttgaagagagcttaaatggattgattggtactacctatattaacaaggtgcgtcttgttttttgtaacccatcacgaatgaattctattaacttgaggtaatttcaggatgagtgacctcttgaaaatttattgagtggcctttcgtgtggtaaatcggggccgcccatagttgtttgattactaacaaattttcaaaaaatgaggcaggtgttattcttgttatcccccgagcgcagattcctttaaataatttgttagtttggcattttgagaacttggacttgtacttagttaagagtggctattggcatataacccgtgtccttggtattggacaagattttagttctagcggtactcctaatttgtgggataaagtccaacatcttaatctcccacttaaagtgaagtacttcttgtggaaagttgcccacaaatggcttcccacttatgataatttaaaacactatggtgttctcgtaaccatttacagtagaacctctatccaagaatacacttgggaccaagtaaattatattctaattgagaggttataattaaatagagttacactaaaaaattaaaaattaaaaatccaaaaaatatcaatgtcacaataataacaataaataatcattaatactatatcataatagaaatattttttagtaaatataattt

SEQ ID NO: 127502 - DNA, 544 bp, Cannabis sativa
  modified_base (166)..(181): a, c, t, g, unknown or other
  modified_base (478)..(483): a, c, t, g, unknown or other
cgccacatgtatgtttgaaatctaacaaaatattcacttacctttaagctagtcaatataagcatcaattacaaatacacaaccatcctaatatttaaataaatgaatctacaccaaagaggtcactttggcgacatattgtttcaattaatttactcaaaatatnnnnnnnnnnnnnnnnccaaaatttgaattaaattgtttaaactaaaatgtatatatataaatatatatactaaactgtagatcaatatatatatatgacacaatatcaaaatatttacaatcatatatatgcaatatgtggattgggcatttaacatgtatatataattaaacaaattaatatatatgaaaccataattattatcaaaaagctgtaaatcaagaattgatttatatatacatttcttatttcaccaattgtcaccaggaagacacaatttaaaaaaattaaaaaagaaatatatatatatannnnnnagcaaaaaactacgtgcgaggcacgtatattaaattttatgctaggttttttctatgttat

SEQ ID NO: 127503 - DNA, 607 bp, Cannabis sativa
tgtaaaaatgtcaaagttttaccagaacaaatttgtgctagcaaaacatatttttatcagcacaactagtatttgtgtcgacatagtaagccttctaaacatcattcccttgatacttaaaattacactggtaaaaatctattttgccaatgcaacaatacaatgcactgataaaagtaagttttaccagtgcaaaaacataatgcgctagtaaaagtaagtttaacaagattagataaataattttaatatttttttggatttttttttatttttgaaacttttacaattatttattattataattaacattctaatatcttcataacattaataaaatataaaattttggtttattattaaattaatgatgattaatatttaaatgattctttataattagtgtcttttaaattaggttcattattcattttcataaatatatatataatcaataatttattaattgtgggttttttatttttacatttcaaatcggtttatttttacactagggaactaagccgcgcgaagtgttgtctaatttttgtaatctttatatatattgcaattatattgagtgatataatctaaaatataatatttt

SEQ ID NO: 127504 - DNA, 1540 bp, Cannabis sativa
  modified_base (1500)..(1508): a, c, t, g, unknown or other
atttatatggagcaaccagaaaactttgtggttggtgacccaaagaatatggtttgcaaattaaaaaaatccatctatggactctagcaagcttctcgtcaatggtgtcacaagtttcatcaagtaattgcctcatttagttttgagatgaatattattgatgattgtgtatatcacaagtttagtgggagtaaatacataattctggttctatatgttgatgacatattgcttgcactgatgatataggcttattgtacgaaaccaagagatttctatctttgtaatttgagatgaaagagcttggtgatgcctcttttgttttaggaattcgaatacatcgagatcgttctcagagttttcttagattatcaaaaaagagttatatcgataaagtactcaaaatttttataatgcaagattgtagaccaggtgatacccctattactaaaggaggcaaattcagtcttagtcaatgccctaaaagtaaccttcaaactaaggaaacacaaaagattccctcagcatcagttgttgggagtctaatgtatcttcaggtatgtacgcatccagatattgcgtacattattggggtgttaggcaggtatttaagcaaccttggtatcgaccattatatagtagccaagagggttatgaggtatcttcagagaacaaaagattacatgctcacatacaggaagttagatcatttggaggtcatagggtcttctaattctaatttcgctggacgccaatatagcagaaggtctacatcaggttatatttttctattagttggaggagctatatcctataaaagtgttaaacagacacttatagcttcctccactatggaagcagaattcgtaacatgttatgaggcatcaaatcagggaatgcggcttaaaaaatttgtcactaggttgtgtcatttggagaatataaaaagaccactcatgatattttgtgacaataaattagcagtgttgtattccaataacaatgggagctcatccaagtcaaagcataattgacataaagttccttgttgtgaaagaaagagtgcggagtactggaaagatatccatagagcacattgggaaaaactccatgataacggatccgctcacaaaaggattaccacccaaggtctttcatgggcacacaactcatatgggtgtagtattgcttgaggatatcacgatttagtgggagtttgtattttctttgtttaatgtttgtttaagacatttatgtatttgattattttctgatcagaaataaagttttcaattcattcactctgttttgtcatgtttaagtctgacctcactttgatttaaggaggaccagttagaataggcatgttcggttcacattgcatgtaatttttgtgctacacattcatgattgatctatgttatttgactatatttgtatatgtgactattaatgggtttagtactgattgatatgacatgttatagtgagatttctctnnnnnnnnnactcgagaccagactcctatttaaaggacacg

SEQ ID NO: 127505 - DNA, 1493 bp, Cannabis sativa
cataaaccaagaatttcagttatatagacacactttatgtagaatagatatatatattagggcaccgatttggtcacgcccaatacggaagcagaagttgtgccgcccacaaatctaagccatccattatatacatccataatcttgtggttaagaaagtgtatggaaataattcccaacaaataataacataaggccagctaacaatgctattggttctaaacatcaactttttttttgaataatgcaacattattttatttttaaataataaaatatcaacttctgaaaatattcgtttctacaatttattttaatctatattttatttcaaattttcaactcattatatagctaatcaattataaacgtctttttttttaaaaaaaaaatcattatataactagatgaataaaccattccaataaatgccaaaaacataatgcacaaataatactgaaacccaaatttaacattatatttagtttctcatatataaataaatatatatatatatataatacaatttcttagtcaattgtgaccaaaaatatatgtcaaaatatattttttttaatttttttaatgtcggtattcattatagttagaacattatttttataaattttttaaaatttttaaataatttacagtattgaaaataagtttgatattttttgaacacgcgtagtaaactggaatatcaaaattttattttcagtattataaattatatataattttttaaaaatttactgagaattatagcgaataccggtatataaagaaatttttaaaaaaaaaaatattcccatatgtgatttcagaagtaaaaattaactaagaggttgtaatataaaattgtacttagcactcctcaaacaaattatacccctcttgagaatgaaatcattaaaattaatttttgaaataataaaattcactcccaaaatttaattttatattcttacagaaaaactaatataatggtcataaaattcactcaacatgtttacgacatacttcatgcaaggcatatcattttaaatggatctatatttattttcattgaacaactatcattttattttatttggaaaaatattttttaaaaaataaaaccggtataaaccttctaattttatatgtaattatgataatctcacttatttaaaattttttttaatcattgtcaatatttatattattttacaacaatttcaacaaaatttaaatatataattaattaatctaaagaagaattttacggttacacagatgagactgaaaaatatgcaatttcacaacaccgcacaagtgtctagaataggagattgaaatctaaaaaaagagagtttgaactccttacactcaacgacatcacaagcacaattaataattattagcgcctacctgttgcccctgatttcacccaatatacgtggaccaatcgaacagggacacgtggatcagataacttgtaaatatttgct

SEQ ID NO: 127506 - DNA, 562 bp, Cannabis sativa
ctgttattactaactaattctcccatgtgtaattattggctatataataccaatattcattgattgaataataagattgctctttattctacaatcttctctttcactgcctttccttctctttcttcttctttctcttcgtctctgtttttctctacttttggttgttcttgtttgcttgattgttcatcaatggcgaagagattcaacatggtatcagagctcattcctctattgtcggctaacatggcgaacgttggagttggcaccaataacactcagaataattcgtatctcaacagaccagtcaattaacctaatggagcttcgaatcttaatcgaccgagaaacaactcgatgagtttaatctggtatacttcagccataatatgtccattaaattaaatgatcacaatttttttttgtagaaacagcagcttcttagtgcaattcgtggaaacagattgctaatgctcattcaagatcgtgctcctcctccttagtttctaaatgatgttgatcaagcttcaaacactttcaatccagcttttcttgaatggga

SEQ ID NO: 127507 - DNA, 802 bp, Cannabis sativa
aatagtcaactttaatgacttaaagccctacatatcttctaaagaaaaaattcgtaatttaatttaaatatgctaataatatttttgtctatgcgaattccttatttaaatctaaaatattttaccattcaaaatgcaaatatattagcgatcgcaatacaagtcaagcaacagaaagatgtaacaacaacatatgaaataaaaagaatccaagaaatatatctaattgataagaggtaagaaacaaacttacctaaaccaaatttctacttttattaaaataaatttaatttcctaaattaaattatattatataaactaattaatcaaatattttaaattttaagttaatttgtttaatcatatggggtcgctttgtcaatgatgaagcacaaaaagtatctcacatgatcgatgaaaaactaattatacttgcaacaaatatatctataaaatcattgaaagataattactacaatccactatatctattctatataaagtgtggctatataaccgaattcttggtttatgagaaattattgggtgagtttttttttaaaaaaaaatttattcaaaaataacaatattttttggctgaggttaaattcaaaaaataccattgactattgaccgactcttctccctcttttattatttgctattgcccaacaatccgattgccaagaaaactcaagaacgatcgagtctatttctaaaacgtcaataacttgtataaggctcttcttctctctcttagcgatttcattctttctggtttcgaattctgagaatttggggg

SEQ ID NO: 127508 - DNA, 574 bp, Cannabis sativa
agtaatgtaatttaaaaatctactctatctctttaaagattataccactgcaataaaaaaagatattcctacctttaagctacccaatacgattttttcccataaaattgtcactatgaatcctctttttctataatcatagaaatcagcagacaatatatttccaaaagcccttaattcctttatgccaaaaccccattttttattttaatttttatttttttgttgttggaaataatgcattcactatagaaacgcataacaataatattaatatttgtatatatctattattggaatatggggtgtgctgtttttgatgtttaagtttcactaaattgttattttaattgatttttgtttgtctagacgttttgatatataagttgaaataattaaaagtaaacacatcaaaatgtttgaaaattttcccattaagcttagattatgttaagataagaaagcatgcatacacagtcaagttagacaattgtgagatccagctaagcatctactgttgtgtataaatattcatctaacaccattcttatttgaggtttttataaaaatatta

SEQ ID NO: 127509 - DNA, 626 bp, Cannabis sativa
tgttatttgtaaaaaataaaatctaaattgtcatattaacaaaacaaaatatctatttagtaatttttacaaataacatggtcgaaaatatttaataacaatactcgaaagtatattcatatgtatttatacttatacaaaatttggtgcaatgaatgtaggaatggattttcacgagttgctcgatatcccacaaggggaacgccggcgataccacgatgacatatccatcattgttatttctttggagggaagaatatggcgttcgtctgtgtaaataccaataaaaaaaaaattacaaacaaaaatatagtgtagatacaaagaaaagttgaacttttttttttttgctagttcatctccaactcccttgttattttttttccttggaagttctagcattgttcattttatacgaatacatctttgatcggtgtaaagagaaatcatagtatcgttttgttatatactcacattttcattgttttttggaaaatttacatccaagtacatcaattataatttattttcaaaaatacaatgggttcattataatactaaaaatgtaccgttttataccgtttttaatttaattggtttttattttatgtttctgacatcaaccc

SEQ ID NO: 127510 - DNA, 887 bp, Cannabis sativa
cttattttctatttttctaatgaacaatttcatccaactaaactaattcaatttcaacaatgacaggagcatcaattaagacaatagagctcaaaaaaaatataatcatcatttaaaagagaagctcttacaatttgatgagctactcgattagaatttttctattttttagataaatatttattttatgttaaaaatttttatattaatttagactacaacatttttaaatttgaaatataaatagtatacttttatttttattaatctaattatttaaatattaaaaactaataaataattataaaaaaaaaaaaaattgcactttatattctatgaacaaattgcgcttaataacaaattttttaaagttgttgaaccaaggaaccataaaaagcaaaaagttgataaagatcaataaacatatctatgacacttgcattttggtcatattggctatgacagatttgagattacatagacttaccaagggtgatacattgagataatattgtcattacacagacttatcaagggtggtacaaatttataacttcgcatttctcattttttgacatgggaaactcacagtattgagataatattatcttgtagacttaaatagttgatttattgatcaattcgaattttgaataagactatgtcttatttatgagtttcactaaacacgagaaattttgagaagaaaaagaaattttagagtttatttattaattaaaagaatatgaaaggtctaattaataaataagttaaatgataattttatttgataactagttataaatattaaatggctaattatgatttttgcccttgaatttggacatgtaccaaatcatgctccttgaacttttaaagtcattaaa

SEQ ID NO: 127511 - DNA, 857 bp, Cannabis sativa
tttcttctcgtctctttcgtccatcgatctccacccacccctcctctcgtcggtctccatctactcttcgtcgcatacgtcggaccaccaacacctcccgacgtcccgtcggtgtccctctcatatttgtctcgtacgtcgaaccaccactacctcccatctgtctccctctctctccgagcccagtataaatatatttatttatttatatacttatttatttattatatatatttattttgttattgtataaattaaatgtgttttaaagttagttattattgtaacaaaattaattagttattttattttaatttaggtaatattataaaactaatgcagaaaaaaatgggagaaaatatagatttttctaccattaatggcataaaaatatgtattttttctcttttttttacaatcccgatatttttaaaccgtcgagaagtccacataagcgacggttattttgccaattttacgacgatcatataggcgacgaaaatactttaaacgcaccaccattctcggaatctaggacactaaacgccgctttgaaggacagaatcgaggatccccgtcgacctagactccctcggccacaaaggttagttttttttttttaaaaaaaaattattgggttaagaattgtgttggttgatttagtttaatttgataattgtatgtattgtaatacactatgtttcttggatttagttcccagcactgacattaacaatgtaaaaatatgaatttgaagttttagcatccattttaaaccatacagatactaaatatatatatggaattctttttaatggttattacccataaatggttactaaacaaatttaactata

SEQ ID NO: 127512 - DNA, 611 bp, Cannabis sativa
cttttcaattcagttattgtaattgtaatttggacctatttgctctatcattgaaagttactttacctatcaaaaaagaaattaaaatagatgctactttttttttccttctgcctcctaacctttacttaggtccgtctatgtgaacccacttccatgcctagagtggaggtatgtttttgtgggtgggattctttaatagaggtaataatagtatagtatgagtaggtagttaggtaagtaacggtgaaagtattttagaagaattatgtaagagtagaaaagtcaaaaaaatgaggcgttgaccggaagaagggagattcacacgtggaagattcagattgggaagtaattaacagtgaactcaagttccagttaaactgaacacgtaatcaacacgcaacctccccacgtggattcctcttctatttcttttctctacttttggccacacaattatacttacatttggaccctctgttttacaaaaaaattattattaaattaatttggaccctatgttttgttaaatgataaaatagacgtccctgtattttcaaaaatagtacaaataagaccctgaattgattttttatcaaaataaagtttaa

SEQ ID NO: 127513 - DNA, 1257 bp, Cannabis sativa
aaaatcgtaaaaatattcaaaatttcgtgaaaccgcatttttataattttttttttgttgtttttatgtttttgtgaaataattcctttattttatgtatttatttactttattaaaaaatattaattaatttttttaagagaattacttcatatactagtttttaaaatttgtttttctatttttatagtgtgaattgttccgatagttactgagtttctatgtggatttaagttgcaatttaagttacccaattgatttaaaatgtgtaaataaaaaaattattttatttttaataatgagaattatgttttaaattatatttatatatatattttctttttagtgaaattcatccaaaatgatagaccaaaaatgttgagtgtattcaatccaatttaataaaaaaaactagttaacacatttaatagttggaatcgatacaatctaatgtatccatcgaaccagttgactcaatttgattatattgaatcaattgacaaaatttaatatctaataaatacttttgctaaataattaaattagattgaatggattggatccaaatctattagatgtgatctaattaacaccttacgactaaatgtctttattttttaattgaaataaataattataaaagaatttattttgttttttaatcaatacttttattatttgttttgaaaatttatgtaatagaccccatttcaaaaagttcgggtagatcttttatctgtttcactgttcaacattcatgagagctttctagtctaatttttctttcataatcatatatgttatagctatttaagaccacttgtaaatttttaaaaatttttaaatagtttacaatgttaaaaataaggtttaaataattatttactacgtgtataaaaaaaataatcgcacgtgcaacaaaatatgtaaatcttattttcgttattgtaaactatttgaaattttctgaaaattcacaggtagttttaaataaatacaacgtatgcgatcataaagaaaaataaactaaaaaactttcttaaataccaaaaaaataagaagtctaatgaaacacctttttaaattaatgcattatagactaacccatctaattttagtttagataactttagtagctagttaaactatattttattattattttaatcatacatcaaattatttaattaaataattgtatcttaactttgaaaatattatataataaataattgtatcttaactttgaaaatatta

SEQ ID NO: 127514 - DNA, 985 bp, Cannabis sativa
tatataatttttttttttattttagaaaatatttaataacatttttaaagcaattaatagaaaaaaaatattaataaaataatattaatttttcactaatcatcaaaattataaataaacaatgataatttctttattaatttcttttctaaaaccaaaatttacaacaaacaagtttagaccagaaaaaaataaaacaaaatctactactccaaccctcaatacatacttcaaaggaggagttacaaagatatttctgggaaaaatgaaaagataaaaaaaaaagtttagatcccttttgtgcgcccaataccaagcctcagccctccgacaacgatgaacccaaagatccacgacgaaattcaacgacatccacctgcagagacattttcttgagaatttttcttttccttagcacttttgaaagtgtaagatagatctatgcaagttaaaatgagaaaaaaaaaattatatcaaataatgaaataactagataaccactattgttttgacaaaaaaaaaatcaaatatatatatgtatatatacacaaatgagaataaataggagaaaaaacccagagcaccaccaacaagttctccattaaaaaaaagacattaaaacaaagaaatatatacctgaaaatggagctctaagggtcaaacacgaagccctcgtcgaacacgaacggtcgagaactgctggtcgccagagaaacaaccccccgtcacccgccatcattccagtgtggtatagtagggaggtgagatagagaaagagatggaaaagttagaaaaataaattatggtttttctgatacagtggtggtggtggcatatagtaaagaggcggcagagagttggaaagtttgaaaataaattagggttttgatataaggaagataaatagagagagaaattggtattatattcaatactaatttcttataaaaaaaattattacatcaatctgttggaaattatttta

SEQ ID NO: 127515 - DNA, 999 bp, Cannabis sativa
caaacaaaattctgggatcgaatcgaatcaaataatctcctctctcactgttaatcctatttaaatttaattcttttaagtaaaataagattaaagattcaatgtcatgagacacacaaaatatatagtgcacatacatattacaaccaattgccttttgacatttagggtgtctactgataggtctaattttaaggtgtctattgtagaattaccctattctttaatatgatattgacttgtattaatagcttgttcaaaattatattatctttaccataaaattgaccccaacttcgactgccatttgggtccgagtctgggtctagggttcggggtccagggccaggtcagggtcagggttaggatcaaggtctgaggttcaaggttcggggtttggatctggggctgggtctgggtcggggtcgaggtttggggctgggctggtctaggtcggggtccaggcctggggttgggtttggggtccaagtctggggacgtgtctagggtctaaggacgagtctgggtccaaggtctgggtatgggtccaaggtctgggtatgggtccaaagctaggtctggggaaggtgactccgaccctttgtacatattataatacaagctaatacgaatcatttgttattaattaaataatacaattcacattgtatcaaaatttttgctcgtaataatgaatataatataatctttttaacaaagaataacaaatatataattaaatagtgagttttatatattttaatttaatttaaaatacgttaagaataatatgttaaggagatattaggcattataaattagtttagcaataatagtcaatgataattagtattttttgtgttatcgttacaactaggggtgttcatttaatttaatccgcactattttgctcttagtgcatccgatttgcactaagtgcagattttatattttgaatccaatccaatctgtacagtagctcaaatccaatccaatcca

SEQ ID NO: 127516 - DNA, 754 bp, Cannabis sativa
tatatttattggtttaatttaggtctattcaatatttaagacctagtctttttgggatcgggtcacttccatcgatccagtatgtattggattggactgaatctattcaatccaagaaaaaaaaagagtaaaatttcaatgttcaattttatatacatatagatatgtaacatataacaatataaaaactaattactcatctaaactaaataaaaatactaattaattcgattggatgttaaatgtattggatttttgaacacctcgtccaccatccgatccgatccaattggatatttgaaaataacatccaatccgatttgatcacaattggatatccaatgtttgacgaccgattataattaaatcagtcggttctcattggattggatcaatttatgcttacccctaattgctaaaaaaaaaagatacaacacatgaataaatttgagtataatatttatgtccccagtatcacaatcacctaaaataaatagctaatcaacaatgccgcaatgaaggtttttgacttctgatcaactttaatgctttcaccaatcactatttgctatttatggatttttttttcttttcacttttggctctaatgattttagaaagtgattgcattacctgctatggtgtttgaaatcatgctactgaaaattctgaatataggagctcatttcacaaatcttttagtgattgcacttgaaatctctctctctccctctctctctctatatatatacat

SEQ ID NO: 127517 - DNA, 1103 bp, Cannabis sativa
tagaattttctaaatatttatgggaggtcttaaatagttataatataagcaattataaaaataatttcgaataaaaaatatttttaaatgtcgaaacaaatataaagtctaccagaacattcttttagagggttgtactaaagaatttttttttttcataggcatttacctattattattttgaaaaacaaattggttacaaatttttttcctcaagctcaattataatctgaaacttttctttttctgattttttaacaaataatcttattaaaaatacagatgggtctaagttaataatatgtagtttgaaaaaaaccatgggtgtgaggacattgatatttcctgtgtgctcagcaacttggagctaaactaaggtacatagaagaagtttgcttgtgaggtcatgagtataaaaaaatattatttattttaaacttatataattcttttaaataatatataattgatgggacaagcatacaaaggattcttcatgctggaattaatactatcagaatatttaaataaaaaaaagattaaagaaaccacctaacatgatcaaagtggattaatatattattgagtgctcctcctagtcctagtcataccgaagctaataatgctttattttattatagaaagaaaaaaagattcctgcatttatgaatctaagattctattaaatatgcttttaaatacaccatcatcaactatgaaatatatatatatattatattgccggcaaatataacttggccgtgacgttaagtagggtacttatggcgcttctatatatgcttggtggggtaatatttcatcttttattctggatttttttttttttgataggattttactacggtaaattataggaatgactcaaattatataaataaatatttttatttcaaaagttacaagataaaatttatttatttattatttatattattttttttgtcatataacaaattaatttttttaatacatattttttaacttaaaagtaaattatcatacttaaagatcatgatatatttatattagttttgtaatttttttttaattttgttagcataatattttaatgtatgtatata

SEQ ID NO: 127518 - DNA, 2622 bp, Cannabis sativa
tactcaaccaaccatacacttcgtaccaacattgtacgagtgttggtagggattatttcgtaccctgaataccattaagtgttataccacacaccccctatactttcccgtacttgtgatagtaacaccgtaatgtactctttaaacaatatacactatacgaatggactttgtaccatttccatacaagtgttggtagtgtaccaaccataacaagcatgcatatacatttcacacatacattcatttgcatatatatcacatattatacgctgttctcacctctttcctgaattcaagtgagttggccgacctgaatggaaagtctcgtgctggatagatgccttaatcacataacataactgtataaatcacacgtcaaaatcctaatccgagaaactcgaacctctttgctacttgacatctctcggacggatcttttaatcctatgaaggatgcttgaattccattaaggatggagagtcctagagtggcactctttgctacgtgacatctctaggaaggatctttaaatcctatgaaggatgcttgaattccattacggatggagagtcctagagtggcactctttgctacgtgacatctctaggacaaatctttaaatcctatgaaggatgctcgaattccattacgaatggagagtcctagtctttgctacgtgactattcgaggacaaatacttaaatcctatgaaggatgcttgaattccattacggattgagagtcctagagtaacactctttgctacgtaacaattctaggacagatccttaaattctatgaaggatgcttgaaccccaatacgaattgaaagtcctagagtgacactctttgcaacgtgacaattcttggtcggatataagaatcctaactagtacatgccctatttgtggcaaagattcatgctacatgattaccttgtagatacaaaagacaaggaaaaacttaaatcctccatccgaataaaacatcccatccaatgaaaatgcagtgaatgatactcataatcctacatcaataaacaacgataaacaagctcaacatatagaataaagtggtgcatcaaagaggtctaatacacatcaaaaaagctcaatccatagagcaaagtcctacatcatgaaggcttagttcactgaacacaaatccacatcaaaagagctcaacataaagcattacacataaaatcaaagtccaaaaaatgacaaggttcccatcataaataagacaatacatcgctcaaataaaatgaacatacaagaagtagaaataacacaccaatgagccaccttataatcaaccggaacttcaatggtacctttgtcaaactcggcaacctaattgcaatcttcttcagcctcgagaacaccagtgtcaaactctgaaacattagattcttcatcaccagaggtaactaaatcaggaaaaattttcctataaacttctaactcctcatctaccttccacgtagtagacctaccttttttaaaatttgtgaacaactctaagtgagctttacacatagctttaaatgcaatgtcatctagctgagcatacaaaccagctgatttctccttttcatttgcaagctctttatcagtttcttcaatcttcttctgtaaagtgttaagcttttcaatgaccctcttgttttcctcctaaagtgctttgttaaacttcttaagggcggtgttctccttgtcaagctatttgcgatctcgacgaataaaaatcgcatcggaaagagcctgtcaagaacaaacaaatattagaacaaataaaaaacctcaataagaaagaagcttcgaaaagaaacttactcgatatattgaagagaccaagtcatcaaaagatgcagcgtgtccaagctcatgcaaatgcctctcatctagaggactcaagagagcctcaacatgtccttcaatcgtagacggattcgagtgcacacaaacatttattggaataatagtgccctcttcatcgtcgctccccaagtcgactttacatctcttatttggatctttcctggtattagtttttcgaagtgacaacacccttcggagacgcaaaagcgcctgaacgccccgtaattgatgattgccccttggaactaattttctgagtcgtggccttcttggctcttgccaaaatatcggaagaggacgacattatgaaagacatcctcttagtgtactggtttgctagaatccgttcttcctctattaaatgagtaagaatagaaaacttggcaccagtaaactctaaagctcgcttcagtaagaaaatagagatccgaccactcggttgaataaggaaattaccttctatctgccccttgactttgctccaaagaaaacttgaagccaaatcttttttcgttcaacaattttttccaccacctatcctcctgagagattgcaaaaatctcccacagcttttgcttgttctgggatgacaaagaaggaacggtccttgattctccacctacaacggagaaatgcaaattaattagaaacacaagaatcacatacaaaatgaaagatgccaaaaaatataatggcctaatgtgtggcacccacctaactgttgggttttatgccc

SEQ ID NO: 127519 - DNA, 2259 bp, Cannabis sativa
  modified_base (2145)..(2162): a, c, t, g, unknown or other
  modified_base (2220)..(2220): a, c, t, g, unknown or other
caatattcaacataaatgaattaaagaggaataaagaaagaaactgttggtggatgaattttggatcttcactttgaatcactccgctcttcctgttgctttctgctgtgtttttatgtccccaaatcgcttcccctgacttccaattgcagttttctatttataagtgatttttagggttcgtcggacaattttacccttgggccgtacgggatatcgccgcggccagatagatgcttaaaattacgcttctgtagtttttatatggccgcggcgagggtgtatctcgccgcggtgactgaagcctcaaaagctctgggttctgccttcatgatctagccgcggccagatatgcatctttcctcaaaaaggtgtttttcttggctcaacttgtctttcactggacttttgcatccggagacctctattattccaaggaacccgaaaacatagaaaacaagcgtaattccgtcctaaaacagtgagaagcgaacataaaatcaatccaaaatataggctaaaagtagcctaacatatgcaaaggggggtttgctcccaagacatagcacactattgaaggtttccagaatgtgatttcctcctcaatgtcatctaaagtaatccttactttgctatttctagactcagatttcttaaaggaattatcaaggttatgcaccacagaaccagatctcaaaattggaggagtcgggagttaccttacgcaatttcactgttgcatttctcattagctcggagaaagtgcacaaaatcgttcttggcatcctcttgtttctgaattgcctcaagtgaggatttgggagataatggaggttgaaaaacatctcatagtgcaggatgatcttccttcacccctcctcgtccgacatctccaaaggagttatttcagtaagttcatcttccaaagtagtttgaattgcctcagatcgaagtttcacacctttcttcttgcttatcttagtagcagattgagttctcccttgaatttttgaccttattttagccatagcactagcttctcagctgcaagagcaagaacccgcgagaagaactttactagacaccatgattgttatttagtatttttcataatattatttaagatatcatatcgttattagtataattaaatacctgatcacataataaaatataaattttataaaatattactaatcaatttttaagcatcacctcgtactagacacattgctcatagaaaagacaaaattttaataaattgacaaaaatagtatatatgtgttttttttttgagaaaacgtataatcttactttataaattttaagaaattaacattagaaatatatatatatatagatattatatctatattgttaactcggaaactagtcctaatgacgtagacatcaatatttgacatgtagcaagaaagataacatctcaaagttgaatagtcctaagtcacagcaggtagacctgggaggggtccctacccctgcgcccaagttcactttgggaactctgaaatggaagttcggattccaataacttgaatccaactaatcatgtttcaatattttgtaccatgaagatatggagcagcttaatacaaggtccgatagctaaaattacacaaacctacaacccagaagccaacctaggcacctatggttttcacgcggcccccaagttgacatccttaactagggtttaagttttttgggatcgccttagtgcaaagtggccaaaacttgcattgggacctcgacttgacataccatggacatgtttaaggcatcggaattagattcagagcaagttgatttttgagcacccagggccccgagcacccaacgtcgaggttgacagattgtcaacctgggtgccttccaagcatccgatcgaagatctgacttttgcattgaatctgtcttcatataaaatggggaaataggtcattttagaggaaaaacaacaagttggggcataaataaaagggcctagcgcccaggttgacacttggggctaggccacaaaaaatggagttttcctagaattcttccgagcatcaagcggaacttccaaaggggtagaatggggacccagtgccctggttgacattgttggaattattttaccannnnnnnnnnnnnnnnnnaagtatgtttttaacatcctaaacatgaacttcgaaaacgatatgaaataaacacatntaaagtttcagaaaccttacagtgggtgcagtggaatta

SEQ ID NO: 127520 - DNA, 1086 bp, Cannabis sativa
  modified_base (963)..(967): a, c, t, g, unknown or other
ggggcatagccaacctgtacgccacttccctatcctctcaaggacttcaaaaggtccaataaacctcgggctaagctttcctttcttactaaagtgcttaatgcctttcataagcgatactcggtgaaatacaatgtctccgacctaaaaatcaatctcctgttgctttggatcagcatacctcttctgtctgctctgagttgcgagcattcacgctcagatttttataaactgcctcacttgttcttagaacagccccgagacccaagaacttcctttcactcacttcatcccagtgaataggtgatctgcactttcttccatacaaaagttcataaggggccatcacgattgttgcttgatagctgttgttataagagaactcaatcaggggaaggtactttacccatgatccttcaaagtcaagcacacatgcctgaagcatgtcttctaaaatctgaatagtcctctcggactgtccatccgtctgaggatgatatgctgtgctgaacttcaactgagtacccatagcttgatgtagactctcccaatatcttgatgtgaatttcggatctccatccaaaacaataaactttgggacacgatggagacgaaaaatttctctaccataaagcgcaacatacttgatcaatggagaagttcgtctggacaggtaagaagtgcgctgactttgtaaaccggtcaactatgacccacgcagagtcatattgtcacgtggtcctatgcaatccaaccacgaagttcatggcaatatcctcccatttcacttggggatattcagtggctccaacaaccctgctagcctctaatgttcagcttttacttgctaagaagttaaacacttagcaacatactgagcaatatcattcttcatgcctggccaccagaatatggccttgaggtcttgatacatcttcgttgaccctggatgaactgagtaannnnncgtatgagactcattcatgatctctcttttaatcatcatccataggtacacaaacatgttggaattattttaccaggatcaagatttactaccacgtatgtttttaacatcctaaatat

SEQ ID NO: 127521 - DNA, 898 bp, Cannabis sativa
ataatatatctaaagtgagtataataacaattattttagaagaactatttaaaggaaaataaaatactactgctgaaagaaagaaaaaatattgaatttaaattaaaatattgagccactaaaaaaaatatgttggtaaataagaaatctaaattcttttaaaaatggagaatagaaatatatatatatatatatatataatatatttaccttaattcatataagggaatagaaaatatttaagcatgactatgataaaatgagagcttatataaagttttaaatgtgtgggtgttgttataagagtcatattatttacatgttaagacaacaaaaaaaaaaactcaaaaaaacaataataatgcattgacacttggatataggtgaaagttctactattattacacgtgacgcttatatagagtatatttaatcgataattccctttaacattatttttttttaattatttttaaagcaagtaggtgaaaaagaggacattatgacttattaatatagagagatatctatatataacccttaaatttttaaaatagcagaaaaatgggggagctaggaatcaaacccaacaccagtatactcaatcttccttgtcagttgtgttataactcttttattatatttattgaactactatatatattatttttatttttatatatatatatatatcaattttaattttttgacacttccaaaattgtggggtctgaggctgtctcggctgccccaccttttggtcggccatgatgatcagtgggactttaatagggaaatttcaatttttgaccctaataaaataccccatttcaaaatatataccctccactaatttatacaaattaattccactattactcatttgtacccaaaatac

SEQ ID NO: 127522 - DNA, 1382 bp, Cannabis sativa
aataagtaaatctgattatatgaactgagttttatttagggcataaaacccaacagcgcccgacacatactggatgcaaagcttcccaagaactttaagatagccttgatggtagcatacaccagagattcggaccccagtgaccatttgtcatgtttcaaccaagtgatgactgtcatgagggtcagcaatgatgcaaagtgtttatgctttccactaacgctaagcggttccgctgaagaatggttcaagaagttggaacccagatcagtagactgctgtaacaaactacaagtcagcttacaaagacagttttttgcaacgagaaagactaaccttgaagtcagcgccctgactaatataaagcaattacctgcaaaaactttaaaactttataaaaagattcaaagaagaggcttcaaagaccaagaaggttgacgacggaaaacaacttgccctcctttaagcttggatccgtacgaggactcctttttagaatgaattacaataggagggagcatccaatgtcaaagatttccaaaaaagggtccaaaagtacatcaacttggaagaagcccatatagtggcctacggaggatattacgcgaccgaagtgtcaggatatgcacccgcagctcaactcccaggagccatgcctccgaccactcctcaaataagcgacatacaattctccgctaccacaggatataatgagagcctcgccttggctcctgcatcatcaaactttgggactcccatgggcaacccctcggggatgaatgtccaagctccgtctcaatccgtgcctgccaccagcctgacgggacctcctcagagctcggaccaagaggtcctcaaagggctgcaaccagactgaggataaacgacaacggaggggatacagccctcagtatacttaatacacggagcttacagatatgcaagagcaagtatacttttccactaggcaaaatacacattactggaaacctcctcccctgtatagggatagttctcggagggatcccagcaaaaggtgtgagtatcacaacgacattggccatagcaccaatgaatgcaagcatctgaaagaggaaattcagaacctaattcgagtaggtcatttgtatgaatggatcaagaactgattagcccatcttaacccagctccagtaggaggccttttgacataaggagcaccagggggtatacccggggaaccagcgctcggtgtaccccctagaggagcactccctcaccaagtccctggattgctaccaacaccgaatggaagagtggccatgatctccggtggccccatattaggggaaccaccaagaaatgagctaaagcgttatgctggggccataaaacacgatgaa

SEQ ID NO: 127523 - DNA, 1058 bp, Cannabis sativa
aaaataataaaaaaatacaagttggctatttttaaccgtagatgatgatcttacagtaaaaaaacttttgaggttgatcgccaattttcggagcccgggtcacgatggcgagacctgctctgggtaagttgtgacttatttttgtacctccattaagagtgcaatttggagtctataacttcagaattgcaattgaagtgtgagacatgactctatagaacattgaaattgcttcgaaacgcagttgaatcgcgtcaagcagatcaatattgagtgagttatggctgaaggttgttttgcgcccagtgtaacgtgtgtgccaagaacgcactttacaagctaggcgatgcccacaagttggccaagtggtggcgcatgttgttgtgcatgctggtggcatgctgatgcttagtttatttggtagtggaattttcgtagatatattcaatattgtctagatggggacagaacttagtattcaccatttatatgggtctacgaatacaatggcgcaatcagatttgagaaactctgtgatttggtatatggtggtgaccatatgtctacagagcaaaaatcatatatgttcccggtagaaggctaaaagcttagaatgctctttaaggggggagtatcttgtgtcagctctccaccaccccttggaactttggtgttaagtgagctactaataagtgagtgggactagtagggaaggcatatgaggaccacgagtgggctcatatgtctccatgagttggaatactcatggagattatccggccgacccggtagtacatctaagaatgctgctagaggttagcgggtacatttctattggcttgccagtatgccgcttggaccaagcgtgtcctaaacctccaagagacgttgtggttcgtcttggccactagtgtcaacacgagatgacacgggtagtcatccgtgggctagttttcataccagcatgggacggatgcaccatgatggaaagagacagaggtctaatgtatggaacaagtttggtggcttgtcttgagggcctgccaacatgcgtggag

SEQ ID NO: 127524 - DNA, 699 bp, Cannabis sativa
  modified_base (649)..(655): a, c, t, g, unknown or other
tttacatgttaattcaaattcgaacttggtttgtggtaagtactgtcattatcgcttttgatattcttctcaaatttattataatttctttgtcaaatttattacaaaaaaaaagcttattaattagttaacgaaaatctacgttaacaagatgcattttagattggaatattacagcgatgtttaaatatgggtgggctattgctaaaaaggaagataatttatgggtgaaatgggttcataatatttatgtgagcgaagaggattggtggaattataaagctaccgcccaagctagttagtattggacaaagctggtttcaataaaggaaaaaatgaagaatttaatcgaatcaaaccagttaactggcagcagctataagatagctcaacagtgtcaattgttatgtgcaaatccacctagagtagcatggaaaaacattgtttggagccaattcaacattcctaagcatagctttattttgtggttagctatgcttagattaatcaaaactaaagataggttacagaaatttagcattattgataacgcttcttgtctcttatgtaatggtggagaggaattgatagaacacttatcctttgagtgttctttttctatgagttgatggtgttgggttttatgccnnnnnnnaaactctatttcaatgtaatctattttattcaacatcaataaag

SEQ ID NO: 127525 - DNA, 1061 bp, Cannabis sativa
  modified_base (885)..(896): a, c, t, g, unknown or other
aaattggtgagcccattccaatcggctttcctttcggggagatggattactgagtgttctgtgttagcttcggaagctttacatactctccgcaagattagaagcagtcgaggatttatggcagttaaaacagatatgcataaggcgtatgatagaatcgaatggagtcttctctggcaggtgctaaggcaaacagtttcaatgatcattttagtaacttgattatgtaatgtgtttcgtcggtgactttctccatccttctgaatggtgcacctctacaacctttctctcccggtagaggattaagacagggtgaccctattgccctatctactcattctctgcagtgaggttttgtccaagttgttggttcgggcagaagatagaagactgatctcaagaatcaaagttggtaaatcagctgcgcttgtatctcgcttattttatgctgatgatgccatcttttttagtcgagctatggtcgatgaggctgagtatttggggaagtgcattgacaaatatgaagaatggtcagggcaaaaagctaacaaaagaaagagtggtctggtttttctctccgaaggtcaagactgaagaaaaagaaaccatgcatggtgcactaaatattcatttacttgacaagaaagagaaatatttagggaatcctttcttctactccgctaggaagcgtgatgatttcaagtatcttaaagaaaaacttttgaattggctggaaggttagaaagctaagaatttgtcggttgcaggaagacaaactttgattagctcggaccttcaaagcattccctgttatgccatgtcaataatgaaaattttggtgtccatttgtgctgagatggacagtatgttgggttttgtgccctnnnnnnnnnnnntttcaatataatcagatttacaaaataataaagataaaaaattgtcttatattgcatggttcacataatttatttcatgattatacttaatgtataaattctattaagtccaaaatatatgtatttgttcatgattatagtagtcgtcagcacagtggaatataa

SEQ ID NO: 127526 - DNA, 844 bp, Cannabis sativa
gctgtaataaattaaccttgcttggtcttcaggtatgcatgttggagaaaagagaagacttactgtacccccaccaatggggtatgtcttgtttttatttacctttttcttagttatttttatgctgtgatgttttactctttggggtgcaacttttaattgttagtttccatggatttgcagttatgggagcgaaggagatggtaaaaatataccaccaaactcatggctggtttacgaagttacattggtcaaagttcattgattaaatcacctattaatggcttcaagaacagactattaaagtgagtgattggataatttttttgcaatgcctgagggacaatccccaaattttgttatagattctttttttttttttgtaaatttgtttcacatgtatttcactttcttttttccattcaaaaaaaaaaaaaagttgaatatgtgtattatggaaaaaaaaaaattgtaagtggtactttgtagtgatgacaattgacaacaaacatatataaacgataacagaaaagaaaactaaggtgcaaaatgaaaagacgactggagctcagatgatgatataaggccgcagtaatatccattattgacagttttttttttaatgcatttaaacactctcaaatatcatttattttttgcagtcagtaaattttaatgcagttagtaaatttaatgtgttattttttttcagttaattattaatataaactgttaatatatatttttacatatatatcacatttatattagtacaagtgaattattatttttagaatataaaaattattttaaaatttataatatttttttatttttatttaat

SEQ ID NO: 127527 - DNA, 1760 bp, Cannabis sativa
tgctcctcacctcgacctcttcttctcctcagcatcgccactttggcccatgccgaagtgatatgctctaacacacgtgttattataatcttttttagatatttattttgaaaaatacttttcttgtcattttgtattttaaaattaacccgactacagtaagaagaatgtttatcttgggttaagagattttaaaccctaagagagtcctagatgaaaacctatataaaggtgatatcaattttaaagaactctactttattctcacgaactctcactccctcattctataaactcacttgaggattgaactcttcgagaacatttctcaagcattgagatcaataaggggggtgaattattataaaatttttcatgttcgtctttgttaaatttctttttgataaattgatttactttgattgatgaatactgttgagaattatttaatcaggatcttaatttactattcaactatttgattcttgcgcataacatccattcctaaaacaataatataaacacataaagggtatagagattcttacattcattctagcagaattaattgataccttcccttcaattctctaaccattgatcctttctgttagagagtatgatcaagaattgaccttgaattctccttcagttaacaaaattgactacacaatcttccttgctagcataagtatttccttgatatatgtgggcaatcactcaatactaagtccctccaaattttgagaagaagaataagagaattttgaaattcactatataaaatataatctctctctcctttttattctattttgtctgacaaaattgagtcaaagtgttgtggaaatcaaaggctagctatcatatatattcatagtgtatcaatagggttatatatgtttagaattgaaatagatttaaaaaaatgataaaatgagttaattaaaacctatggccgaaaactataatgagtctcatgggtttcaattaattttatcattttattaaaaattatcattttcttcagaaatactatttttcaattctaattgtttaaatgctaattttatctatttaatgatgaaaattaattattaaacaaaattatcatttaacttatttattaattagactttctaacgaataaatcctaaattctctttttttctcaaatttttccttgtttagtaaaattcaataataagacatagtttcacttagaatcctagctaattgattaatttaatcaattaattgagtatacaagataatattatctcagatagtgtggagaccatgggcctatataatcaagctctcaataagtagttttagaatttacttagtaaattctctatcttattaatttctcctgactccactataaatttaaaattgtacttgttgccctaagttttccccaatatacatggtagtctcaatataagacacgtggtagaagtaggcccattatccggagatgaacaaaacacaacttaatcccctctggaagaaccaatagctatgatccaagggtaggctcccggacatgaggaaatagctccacttcctctcctggaggtgaagggcaaatgaacccctccgaactagcaaagatagaggtgaacggtcactttacatttaatgcaacatggggaaaatgtctgagaatacccataagaggacgtgtcagacgtcataaacccaattttgggcgattacacgataatcacgggtgcaagtgacgaccccattat

SEQ ID NO: 127528 - DNA, 2183 bp, Cannabis sativa
  modified_base (26)..(27): a, c, t, g, unknown or other
  modified_base (217)..(227): a, c, t, g, unknown or other
agttcaattctatatttatagtggannaatcatggaattaataaacaaggactatttggttgatgagactcaataaataatctagtttattgtagcttagaattatacgtccatggtctctaaatcaccaccttgaaacactgtcaagacaaaataatagtatagtgtcgttcgaaaagaaaaatctattttgaattggaaaaatagtaattatttnnnnnnnnnnnaaataaataattttttcaaattaattaaataggaaaaagataaaaattattaatacaaaatttgtcaagacaagatttgttgagaaaaaagacaccattcttgtcctaaatagacaaggataggtgcctactatgtagctgttcctatgaaatttatcgttttgcattaattaattatttaattaattcaattagataaatatttgaatttaaaaaatagtttctaagttgttgagatattgtctcaaatagttgaaagattctcatatatatcagtaattgaattcggttatagatatttatttatttaaataattaattataatttaattataggattttaactaccctatataaaagagaaattagaatactctagttcacatatatatatatatatattttcaaatattacgtttaggcgggctttttttcctctaaaataatcaccaacgactttatcgttggtgaaaaacatgcagaaaaaaataaaagccccgcacccctccttcttctccccatttctattttcatttcatcttctcccttctccttcatttcatttcatttcatcttctccccttaccattttatcttctcccatcttcatttttctctccaaatatgaaattctctccattttttcctcttttcatattcttcatttcatctttattcttccattcctcttctcattccaaatctcctcttcatatccaaacccacaaaaccctttgtatcatcggaccaccgcatgccgccgcctcttctccaccgcctgaaaatttgtcgaaccacgatttcagtaatgtaaagttattattctcattcttttcttatatattaatgtaatatttatatatattgatttgtaatttatatatatgtgtatttatattaatacatttttttatactatttattttattgtttaaattatgttaactatagtgttcttgtgtatataaatttatttatgtgtatttttattttttatatttgtaatttattattgtaatttaaaatattttatttttgttattttgtagattgggcagaagagtttaagtaggatttttagcagcttggaggaggtgttcacaaaatttcttttgtgaaatgtatatttttttattaatatgtgtaaagtaaaatgaaatatgtgtattatttattttattataggtgtattaataatttatggatttaaaatttaatatgaaaatatttagtttgttattatgttttactcttaatttaattattttgtgtattgtttaattaaaaaattatttaataaaaaataaatgtttaatataaattagtttttataaaaaaaaatcaaatggatttataatttaattaattaaataatttttatataattaaaaaatagaaattttaatataattaattaacattcattaaacaattttaatataattttatagattaagtaattaaataaaaataattttaatatacttattaatttttttagctagtcatcaatgacgacagtgtcgtcattgataatataatcaatgacgataaaatcgtcgttgatttaccaaaattaaaattattatcaacaacaattttgtcgtcattgatattattaattgccaacgacattaaaagtcgttgataatagcttttgccgacaaactattcccaacgacttttcaccaaagaaatgtcctcattgatagataatactgacgaaaaaggggcttttttcaccaacaaaaattgtcctcatcgatgtacatatttcttgtagtattccttgtgtgtggtggaacgatttgaaaggtactggtgttagactaattgcatcatcatcattaactggattaagaaatacaacatactaggagtgaaaatcggtcggttatgatcagtttttataattttataaccgaccgtttagaaattataaccgtataaaactga

SEQ ID NO: 127529 - DNA, 626 bp, Cannabis sativa
  modified_base (50)..(66): a, c, t, g, unknown or other
ggcccaaatcgggacttgatttttctataacaaattagaggttattcttnnnnnnnnnnnnnnnnnatagaggttctactgtattatcaattctatatagtcatcaataagaaattaataaacaagatttatattcgtttattgcggtagtttagaacatgttttagagtcttttatgttaatttggtttagttttatactttttttttagttttaagaaaatataataaaaatataaaaattgagaaataagctaagatggcgtttggtaatgcttttgtttttaaattttttaattacaaaaataaaataaaatttttgtttttaaaattttgattttgaaaaaaaaaaaatacgttctatataaatacttttattttttaattaaaaactgaaaataaaagtgtgttatgtaaattttatttttattttcattttttaattttatttatgtttggttcaggttcgaagttgggatcgggggccgggttcgggttcagggttggggctagggtccgggttcgggttggggctagggtccgtccgggttccaaagtttaggttagagtcagaatccaaatattgattaagaaaataataaattgtttaaaaaagtttgaaaaagt

SEQ ID NO: 127530 - DNA, 1335 bp, Cannabis sativa
cttatttataactggcctaaattgggacttgatttttttataacaaattagaagttattcttgaatagagtattcttaaatagagattctactgtacatgagttttgacaaatttttaagagtagaataatttaaaatgtcagaatcatgatttaaatagtttattgtatgcccatataaatattgaaatgcccaaattaattgtttaaattataatttaggcctcctaaattatcaattttattttttttttaaaaaaaaaaacaaaaaattgtcaaaatccatgtaactatattatacaccatccaataaaaaactaaaattacaatttatttaataatttctttttaaaaaaaatatttatatataaatagtaataattaaaaataactacctatcatagacataatctaatagtttcacacatttcttcacaaagattaagtttttttttttttttttttcttcaatacaattcattaattcaagaaagattacaaaggatttagcgaatcccgctgtaaagctagattcacacaagaggtattaatctcaatccacaaagcattcactttgtttaacaaagcttaatttgctaacacatgagctaccccattagcttcacggtgtacaaaagagataccaaccacagaattatgcagcatcaagtttcgtatattacaaataactctgtcaacatctctacaagcttcctcctttttttagattaattggacgacctcaagacagtcagactctatacaaaacttcttgaacctttgctgaattcccaattgtaacccagcatgtatgacaagcagttcaacagttaaaggagaataatcttgctgcaataacgtggcagtggccactctcacctggcccccagtcactaaccacacaccccaaatcggagccaccctcttctttacgaacactggcatctacattgactttcaatatattccgggtaggaggacacaaagattaggttctaagttcaaattccccacaccaatataagaaaaaataataataataattatcaactatttacttgttacacattttattaaagaataataattgtaactatcacattttttttttgttaggcactaacacatccaaattcaacacattctttagaaacaagtaattaattttaactatgcattaaattttttaatttaaagtgatgtcatccttatataagagggtaaatatcattgtagactatgtgttttataaaaattatagattagaccttttattttgttaaataacaaaatgaactctatgtttttcaaaatagtacaaataagatcatgaact

SEQ ID NO: 127531 - DNA, 753 bp, Cannabis sativa
attaattaataatactgattatatagtacacatagtagtgtcagtgtgtatgcatacatacaatgaatgcagcatactcatctcaaagtgttgaaacaaaccaacaaattaatatatatttgatggtaattataatagatatgatttatcacatatttatttgggttagaaatatagcattctttgtattcttttttatatttttttttatttaagcgtttatatattacaacatacataacttgggactcgaacccaagacctccaacacacatgcactccctatgaccacgtgagctagcctcaagtggtttcctttttatattttatacttacgacttatgcattatttagttgaaagtaatattagaattttctcctgattattgtaaacaacttaatgaatttacttttgtaaattttacttcataaaccatttcttagtataataggctatgtacaattttccaattaatgatatttccatttaccttttaaaaaaatctcggcttattataaatatagcttgatttaatgattatagtacaattttctttgaatagatccaataaaaaaggctttcattcattagggaaaatcatgatactttgtaccatatttgctcagctcattaatcatccatttaatcttattgtacaaaactcatggtattacctacccctaaaggactagcaagttaaaatttgagcttttgaacaggtagacataaaatgcagatatatatatatatat

SEQ ID NO: 127532 - DNA, 1522 bp, Cannabis sativa
ccaggaagcagccagagtggcgtgctcgtgtataagagtcattattccgtgggtgtaagggcccaatggaggattgaagcgaggacgttacacatttattgcaattacaccaaatggaggacacaaccgcccctaaaatagcagaagaaatcacagccaacaaaatcattcggaagattactgaaatttttcaaccaatcttcaagactaaccgactaaacaaagtggccaaaccaacaaaagatttccaaatgaaccctcatcgagaagatacggttaaaaaaaaggtgagagtgagattcagatgttacctcgcaaataggacaggaaagcgactaaacctgaataaatttggcaattagatctcgagttaaaagcttctaattaacggtttgccaaacgataaagcgatgcttcagaatttttaattttctaatttattttttaaaaataccttattttatattttttctattatttattaaaaatatatttaatttctaaaaaaatacgtaatttatttttgtaagatactacgttaatttgatattttttaagaaaaaaagtccaattatctttttaaaatactatattttatatttttaccattatatataaaaaaacaaatttttgggataattaaaaaaaaaaatacaaaaacaataaaaaaaattataaaaatactgtttgtacagatattttaacatttctaccgttttttagattttatttacataaaatacaatttttttgtgtatttttatgttgtattcttgttattttgttgctgattttttattatttatattattttttatgttaatttgatgttgttttcttgtgtaatctgcagaataccgtaaaaatgtaaaaaaaaaaaatgcgtaaaaaagtaaattttttacacaaattggtgtttcatgtgattattttcatatataaaaaaacccaattaaatattttggcccaagacccccaattgacttgagacgtgtctggtttggatatgatatgtttattacttatgaattcctaatatcttgtttgataaaataattagtaattacacataaaaataatgatttttagtacttaatatttaatgtaatttttttagtaattacatgtctaattaccactacaaatttttttacttttagtcacagtaaaacttgtggctaaagtaaaatagctgtgactaagtacaaattatcattcctaaaaaaatttatattgtgactaaaaaattgtcactaaaagtaactgtttttttgtagtgtacatctaattctcatgagatatgagaattggagaatgtaattgagatctctccattacctttaattatacacatacaatataattagggaaatttacatttacaaacgtaaattgtattttattattaataataacgtagtaatatctcattcaatactttttgtaccgtaattaatattattgtgccgttttttaattgataaactctgacaactactttttttgtcttttgtcttttctt

SEQ ID NO: 127533 - DNA, 939 bp, Cannabis sativa
  modified_base (869)..(878): a, c, t, g, unknown or other
gatccaagtgttaattcacttgtgattgaaccttgtaatctggttgtgttctttcttttcttgcttctggtttgatggttgtttttctggtttatgttttctgtcctactggtttaatttgatcttgttttaatgttcttgaatggtgattgaatcaccacaatacaaaatacacatctcttgtcttaagatagagggaggccacctactctatgtccagacacaatgtaggcgccacctatatatataaggtgtctctaatagtaaataataaaagagaaatttaaatttctatgcttaattttgctactaaatttaaatttcaaactcaatttttttttatgtcaatctcaatacttaattatacttataacaatataatactttaaatagtattaattataattaagtatatgagaattgtttttaacatttctcatatagtcttgttcttgaataatataataagtttattgattggtcatgcaggacaaaaaacttgcacagcttaaaattaagactttctttaaacatacattaaatgaaatagtattaatattagcaataaataataacgtgtttgaattttcatctaaataaatcatctatatatatatataaataaatatatatatagctattttagaagtatgttagttatattcctaccaattaattaaattgagaagtagactaatatagctagggttttattattttgcaccgccttggtagttattacaacctaatttaactccatttcaggaaaccaataaattaaacaagttttataaatatttaacttcattgtttccaatttaaccttctaatcatttatatatatatatatattaaattattgttacgtnnnnnnnnnntacatatatttaattatatttttaatttttatttttgttatatatatttttaaaattttat

SEQ ID NO: 127534 - DNA, 1233 bp, Cannabis sativa
tcaatttgtagtcaagttatctcgctgttggtagcagcaaaagttatatattctgctttggctgaattcttgaaaatgattggctatttctttgtacacattgatatgaggtaatcacctaagaatatgcaaaaaccagttgtggaaaatcttgtaattagacacaaagtccaatccgaataagacagaaacctttgagatgaagataggatgtggctgagtagtgtaatccttgaccagggctccctttcaggtaatgaaggagatgtgaataatctgaataagtggagtgggaggtgtagacataaattgactgagagtgttgattgcatatattgtatatggtcaagataatgtgagagacaaaaatcgaccaattaatgaacgatatgaggaagggtcatctagaaaagttccctgtagattatccaacttgactcgagaatccactagggtcttggcgagctttctacctgtatagctagtgtcgtctaagagttgacgagtatatttttgttgagagataaagagtccttttttttggctttagtattctcaaaacccttaaactactttagttgaccaagggccttcagtttgaatttgatgtgtaatgagtcttgaagttgatgtagcaactgaaggtttggtcctgtgatgatgatgttgcctacatacacacctaggacaatgaaagtattgttagaacttttggtgaatagggtataatcagcttaagattgtgtgaaaccttcgagaataagagcatctgagatcttcttataccattatcttaatgattgccttaggccatagattgatttgtgtagtttttgtaatgtcttaacccgtaagaatgccacatgtatgcttttataaattagtttataataataaagtaatagcataaataaaattgtagtttaattaaaaattatattaattgtttgaaatataaaatttattttggcattacaaactgtatagggttggggatccctttttaaaaatttataaaggatatagccatacgatattacatcaaaatatacttaattcaaaagcactgtaaacaaaatccttacaactcgacactactagctgaataagctgataagcacatttttcggggaagacctctaactcatggccatcttattaagttctttcccttacctgcaccaccaagcatccgtgagtcataaaaacccaacaagacaagcaataactcaa

SEQ ID NO: 127535 - DNA, 1085 bp, Cannabis sativa
  modified_base (57)..(84): a, c, t, g, unknown or other
ttgtaactaatacttttagccacggaccttttaatcacaacataaaaataataattnnnnnnnnnnnnnnnnnnnnnnnnnnnnagtcacaaattttgttgtgactacaagtaaacttttttatagtaaagtatttttccaacttgtattaaaacacatcctaggccctaccttgaagcatcacaaatatacaacaaacttttttcttatctaaggaagagtacacaactacatcatcaatttatcttaaaatctttactcgcaactgtcactcaaaacaaactttggattcttcttggttagttttttataagggcagtgttgtaagtttagaatggcaaaagtaattatttttttagttaattttccttgtagttacctttttcttgtgaataagtagagcacgtggtaaatgattcaaaaagattttattaatattttattcatttttctttctctctcttgtttatgctttattaattttatataaaaaaagatactttcataaatacttcaaaatactttcataaatacttcaaaatacaaaaaataattaaaaatacggaactataatttctttcaatatttttagtaatttgactttgttgtttaaaaaaaaaaaaatatattaattgtttatttttacgttgttttcacaataacattatattatgtagtttctatgttattttatacattgcttttatatttacatattgttttcatgatatgtaaaaaaagtaaaacatagtccctaaaaatgtaaaagagaaaaaaattgttattttaagaacttttttttatgaaaatcccataaaaagtattaataaaatattatatttaaataaggtaaataaaatatagagaaattgacgtcttatgatataatttaaaagagtaatttgcagcataagtacttgagtttaatttttagttacaaataaatacttaagtttaaatttttgacgataataatgctaagttataatgaaaaaccgtgtttttgtaaatgtcagttgtatataagaaaatattaaaactgtaaacgtttgcagcagcagaaagaaattctgctacagcaaaac

SEQ ID NO: 127536 - DNA, 1200 bp, Cannabis sativa
  modified_base (28)..(39): a, c, t, g, unknown or other
atatgatatataatccaatttaatatannnnnnnnnnnnacaatacgacttaatacggcgttctaaacgaaccctagtgttttctatgttgatgagtccatgaccatagaaattaaaacagtagacctactactctactacacatacgtctgaatgtgaaaatgagtcattaaaaaagagagatcatcattaattttcctaatatcaggtcaaaattattagtttatcattgcatcatttattatgttttgtagaaaattgatgattaagtgatcagtattcagtggcacacaagaaagatgagttgacgactaggacagtaacaaaattcaaaaattttattataacccataggaacaaagataaatattctttttggctcatttaattttacttttaaagccactaattaaggagtaaatttgtcactttctagatttcgtacgaggtgtaaaagtaaagtaattaacgatgattattaagaaatccttcaagtaaatttatatgtatataatctgtatgaccaaatcaagtactagcgtagtgcattcaatcagaatgaggctttagaattgttgtgactcgtgaaaaaggattggttcactaatttagctaattaaaacgcatatgatgataaagagaattcatcctaaatcaaatctctgagtaaaatcaataaggtttcatctttcataatgtcatgatgctctgactatatttaatttactgaacactttgctcttaacttcttttggcagcccatttcgctcgtcgccctactagagactggataacaatacctttggggcccataataggtcattgtgcaggacatcaaataagattttctcttaatgaatttctattgcacactaaaactcatttcactactaccattacttacactcagattaccaaattaaattttcatattcttttactttgttctacagattgttcgttcttaccatagattccatctctaccataaaaaatgtatactatattaaaaaaaaatatatatgctgagagagaaacaccatcatttcaatttcaaaaactcaattagcaaaatactgaattgggtaaatgtggaaataagtacctttatagttggggtaagttgaaaaatgcctcttttattaatcaattaatcaaatttgcctctaattttatatttatttgaaacatacctctttt

SEQ ID NO: 127537 - DNA, 796 bp, Cannabis sativa
catgtcatcaaatatttttaaaagtattttcattggagataattttatatttcattctcctttaattaagttatcagtatctactttaagagtattcatctcattaagaatgacactgccacaacaaattaacctcttaaaaggtcaaacttaaactctttcataaaagcatattcatatcattacaccacacaacacatagtagaagacattttatgtaaagtattgctatttggcatttaagatatctttggcaagaagtaaatttagccaaataataataaaatcaaacagagtgaataataaaaataatttttcaacaaattactattattattgcatgaataaacataaaccctagaaaatatattcaatgaaaaaaaaaaattgtgtcagttttaaaataacaattattaccacaactagaagaaactaaggggggctttagccaaataaccatcccaaaaacatttcaaacgattagcgcactcacaatagttagataaaagaaacttttctttcaaatagagaataaaataaagagaagaggtaaaaaaaaattatgtccatcaaattatataaaaacaattttaaaaatagattattaaaaataatcttagaccaaacaaacaatttaatgctatatttggcagttcctccaaaaagcttagaccatattttaaagacacatccaaaaaaaggtcttttgtggccaaccactcagccaagtattagggcccgtttggtacgcaggactggattggattagacaggctaatttgtccaatccagtgtt

SEQ ID NO: 127538 - DNA, 857 bp, Cannabis sativa
aaaaattaagcccttactataaagataaatgatatttttaaaaaaattattaaaaaaaaatatgtatattgtttaaaaggtaatttttttatttagacccttaaaataaatgaggcctaggtgcgggcctagttcacttatgcctagggccggccttgtcgggcactacaaaaatgaataaaaaaaatcatcagttttgcaaaaaaaaatatcatcattgcacaaaaagaatatgaaataatcctatagatactcaaataaaatttttgtacaatcaattattttttatttttaattggctcaattttcctccctatagcatgaggtaaaaagtatatcccttactataaaatttctctatatatatacgtagtgttttgtatattaaaagtcaaagtgtatcatagctaaatatcattttaaatcttgtgttttacaaaagttaacaattgaactctctgttttgttaaatgaaaaaatagatcttatattttctaaaatagtaaaatagaactctgacctcaattttcaacaattttattttttaatagaactaacttcaagacaatttataacacgaatagatatagaaaatgtaacaagttttgtcctaacatctctagatcaaattatacaaaaaattagttcaggattttatttgtacaattttaaaaaatataaggttcattttattatttaacaaaacaaaaaatctgattagtaacgtttacaaaataaaatgtccaaaataataattaccctataattatataagggaaaaaacagaaaaatacaaaaaaggaaaaaaaaaattacaaaaatactatgggccggcccattaaacatttatacagtcc

SEQ ID NO: 127539 - DNA, 627 bp, Cannabis sativa
aagcgataactttaattttatttaatgtttacaaatctcgaccacaaacagtcagactctactaatgacaattaaactctttagaaatctcgaccatatacagtcgagctctactcatacagttgagctatataatttataatggtcgagctctacacagtatagtcaaactatataatttaatatggtcgagctttgatatttactttagataaaaccatatattttataatattataatgtcagttgccacattctctactaataaagaaaattaataatagtcttgatgatttaatttatttaaaaaaaatgtgtttctaaaatattgttgtgacatttcatatttactatagacaaaactatatattttataaatgttataatgactattgcaatattctctactaataaataaattaataataattttgatgatttaatctatttaagaaaaaaattgtgtttctaaaatattattgtgacattttatatttactttagacaaaaccatatattttataaatgttataatgcttattgtcatattctctactaataaaaaaaaattaataataatcttgatgatttaatctatttaagaaaaaaattgtgtttctaaaatat

SEQ ID NO: 127540 - DNA, 667 bp, Cannabis sativa
atttattaaatatctcatttattacgactccgcgcgtcggttagctaaaaatccagtcaacactctccatacaaccccttcttcttttactgctaaaaacaccaccatacttcttcttcttcttttctgctatttcaacttgttcttcaaagtaagtttctccattatgagtgtaatctcctctgccatagtcgtaatcagtgaaaaaaataaaagagtctatatgtgagttatattctattgtccaagctaatattgggtactccaccagtgggttgaagtcgatggcagccgaagatggcgtccacttagaatgagtttgaagcaacgagccttcaaggagacctttatggtgatgtctaagttgaccaacaaagtttgtgatttaggaatacattgattttgtgatttggaatttgatttatggagtttgggtttgatatttagagatggcttatgaattggaaatttattcttagtaaaatgggttcaagtggttctcattcaaaaaaattaagacatagtatttttctttttaatttttttcggttctaattgttctttatttctatatctaaaggtggatggaatggaattaatttattcatacattaaatagttgtaaattgtgagctatgttaacattaaggattatttcacaaataca

SEQ ID NO: 127541 - DNA, 798 bp, Cannabis sativa
  modified_base (764)..(766): a, c, t, g, unknown or other
tgtagaggcaaagccacttagaatatgtctttattttttgttagattaaattgtagttgtatgctgatgtggatattttgtaaaaggactgcttataaaaggaacttattcaacactttcaataaattgatactattataaaaaatatataaatttgtgtgacttatttttactattttagtatatgattatcaaataaaaataaacatatttaattttttatgtgatttttttttttcaaagtggggctatatataaacatgattggcttaaatgtatatttccattaactaaaactaatatattatgtatgacataaatatcattaactaaaagattaaaaatgtgtattgactttctaataaataagttcagcttttactaaactaactaaataagaaagtatatataaaaggactattaaaaaattgtaagtaggaaagaatgatcaataaataatttattgatgactctattgcatgctaatcaaaatattattatgtaagcataagatttcagtacaaacttagatcaatatcaaaagctgaagataatacaacttgaactaataaggtaattcgaactttttataatgtgagattaacattttaatttatagttttgtaactactatttttatactttaaccatatgttattgaaattgaatggtatatgttattgaaattgaatgttattgaagggaagttgttaaatttaataatttcaataatttagtaaaatcaatatatctattctatatannntgtgcctatataactgaaattcttggtttatg

SEQ ID NO: 127542 - DNA, 685 bp, Cannabis sativa
ctgcctatttatgattattatttcttgttgaaaaggtatcaccaaaagcttgtggccatactcaagggaggagagtagtatcaagagaggaagcagtgatgcggataaaagcagcggttgatgctcggaaggagagtgattcggacattgttattgtagctcgaactgattctcgccaagccctgtcttttgaagaagcaatctggagaacaaaggcttttgctgatgctggagcagatcttcttctcattactgcattaacttcaaaagaagagatgaagagtttttgtgaaacctctccctcagttccaaaattggtatatactatatatttcttttctattgtagaattgcagcaaatgaaaagacatgactctataactttcataatgttccgtttttccaattggaatgtggaagaaatagtcaaccaaatgcactgttttcttaacatggatatagattttgatcattaaaagatgtccttgattcttgttaggcgaatatgcttgaaggagggggcaagaccccaattctcagtccatctgagcttgaggaaattggatataaagttgtgctctatccactatccttgcttggggtttcaattcgagcaatgcaggtttatttatctaaacaaacttattcatttttcaagaagttgcattagacaaaaaaaaaaaaa

SEQ ID NO: 127543 - DNA, 2460 bp, Cannabis sativa
  modified_base (2400)..(2401): a, c, t, g, unknown or other
ttttcaatattactctaaatctatgtatcaatcacgttttctactttttttttttaaaaaaaaaaaatcaaaataaaaatcttctatttttattaaaataaattacttttaacaattttttcaaaaaaacaaattacttatctaattaattaactatttatactataagtaattaattatttttcaaacactataaatattaacttaactcctatttatctctcattcttatatgatatatgatctccattatatcatctctcaaatttaatttatttctctctcattcttattcttatatgatatatgatctccatcatctctcatatgtaatttattggtatttctttttctttttgcagattgagaaactaaagaaggcgaagaagttgtcgccgccatcaaattagtacgtattgtattagtgtattatgttattagcttatttctattttaattttctctattatcatatgaataaatatttaattaattatattatttataaattattattgttgttattgcagtactttcttccaaaagaaattaaaatgataaaactctgaagagatcatagtttgtgtgtagtaatcgaatcagaataagcagattatattcaaggattttttcaaattgagaaaccaaataaggcaaaaaagttgtcgccgccatcaaattagtacgtaatgtattagtatattatattagccctttttctattttaattttctctatctttatatataaatgagagataggaggcggtgacataacactctaagatctctctaatcatcattatttgttcactccttattaattctctattttttttattagctttataaataataactccaaaatctatatttaaaattagcattattaagtatttaagtttttttattagtaatctatgttttttattttgattttttttttaaatttaattttttttttcacgtttatagtttttagtttttaaactttttaatacattataaatctatatatataaaaaaattattacatatcataaatatctttcacatatatacatttaattattatttctttcttttatactaataaaaaaaaaaactaaaatatctaatcacatagcattatttaattgtttttttttatcaattaacaagtgaaatacggtgaaatacaagtagatacagtgatgacaataattttgagtgttcagatgactataaagtgaaatacggtgataattaacaggactttgaatgtagcgcatgtgacgactacaagtcaaatacaataatgaaagaaaggaactacattatcaaatttttttgttgaaaaaaaaactactttaacacatttttaataaactacttgcaagaatagtggttttttcttaaagatttttaatttaaggatttaatcgggtttaaaattaaatttacataaaaatatctaaaatatctatatcaattattaatatatatatacatatagattctaaaattcaaatttaaatgttaaatgttatttgattatatacacaacaaattaatctattaaatatgtatatatttcaaaatatttatttattaactaaattaattttattaataataattcagtttcttataaaaaaaaaatatatggtatataatattattttaatttattaaaaaaaagaactaaatcaataataatatataattagataatttaattttaaaatttttacaaataaaaattattatttttaagttaatttgtattagtgatttttttttcctttttattattatttaaatctatcccacgaagagtggcaaaattatctagttttatatatgatggtctatattataattatttaatatatttttaaaaaaatttgtcaaattagaagtaatttataatgaacattaccatgatatattggataatagttgatataaaatatttttgatatatttattatcatatttttgaagtgagagagatgaataatagtaatgttaaataattgactgtcgaaacatcaacaatgaacatttagcaattcccatcagggcaaccgaagtgcataatgcatttttccagattaatccgctataggccctaacaaggacgagtttcatggcttgtttttccagtaacatttagatattattggataatataataatatgatatagaggaacattactctatatcaaaaaatatgtttatatttaacattactattatctatctctctctaattcaaactcaatatttttttctctctcttggcccgataaaacaacctgaatcatataatacaaattgatgggtttcttttaattagataacaaaattaaacataagaagtaggcactatttttttataaaatatttacatttttnngttcaaagaatgttttttttttatatttttacggttttccaaaaaataacacgaaaaca

SEQ ID NO: 127544 - DNA, 521 bp, Cannabis sativa
tttccctgtaccatcagctagttacattcctattctatagtgaattagtttaggttagttataacggtctcctgactgaccgttagtgctttagcttccaatacgctatatatactctgtattggtctcttttccacagatgagcaaaataacaaactttctttcctttcttatcttttcattttgcaacatggtatcagagcgggaaagaggtgctttccccgatcgatcctgactcccttctctccgctcaccttctccggtgaagagtatcgtgctctgttctccgatactctgtttctcgtttctttctgcacttcttcgacatggctgatgaagatcaaacatcaacccagtccgatgccgcaaatcagcaagcaagagtcgtggaaactcctccagcttcgattcaacacggaaatcaattccttcaagtcaataatcaaaagaatcccatggaggatccagcaaatccctacttcctgcatcacggagacaacccaggtaacgttcttgtctct

SEQ ID NO: 127545 - DNA, 2448 bp, Cannabis sativa
aaaaaatgccatagaagagtggcaaacttaaaaatgccatatttttctaactttgttatgaaatcccatatttcatgtaattttcacgattatatttacaatctaaatataaaaaataaatatttaattttaattttcggttgtaaataaatacataaatttaatttttaggggtaataataatacttaagttataattttgaaattgttgtgcgtacctgagcgttaaatgttaagtaaattatcacgtggcaattcttgattgctccaaatcattaatgtgttattttttttaaaaaaaaaaataatttaaatatatcaataaaaaaaataacatgtaaataatgacttaatacttaatgatttctaaaaatataaattaggtattattatcgccaaaaattaaacttaattgtgtatttacaaaattaaattttatgacacaaattactctctaaaaaaaataaatatctaattactattaaattgaatgtcaaaaattaaattgaattgattattaaatattatttttaaaattcaattaaaaacagatccaatcaaatttaattatatttatatattaaaaaaatatttatatttatttatatataataaatatatatattttaattatatttttagtagactttattttttgttaaattagtaatatttaattattttcttgatgttttgcctattttattactttgtaatattgttgtttgatttattttaaatttttagttttattattacacttgtaacaataatatttttataaagtattaaacttaaataaattgtgatatttcatttttatgtatttttcatcatatttttatggtaatatgaaaaattagatgtataattatatatccaattaaaaaatcgatcaactccaattagtaactggattggattggaatgaattttaaggcataattaaattagattggatgataattttataaatccaattactaattgaattggatcggatgaagtgaaaaatattaaattgaatgggatgtccaatcctagattatattatgagcattatttaagcgccaaacaccccatcttattggttatttatattctatgatactatttaaattaaattacgattctatacataattatacaatataacatcttaaataatgctaagcactgcgctaatgctttttagctaggagtatatatacaatctaatacgtattattttgcttagagtacattcgatctatactaaactcagatttcatattttggatccgactatttagaatttttatcccttgaactatgacatatatattattgtgccccctgaacttgttgatccgttataaatggtctcaaaactattcataatattataaattggtctttttgtcaagttttttacacgtgacaaacaaaataatgacatgtctacttagccaattgccacatcaacgctatatgtataatttaacattaaaaattaaaaaaaatatgcacttttaaaaaatcaattaatgattaggaaaattacgtaaaactaattaaaaaaattaaattattttttcaaattaattacacacatagcactgacgtggcaactgactaagtagtcatgttatcactttatttaccacgtgtgacaaaacatgaaaagtaccaatttgcaactctgtgaatagtcgatggaccatttttaacgagctgaaaagttcatggggtggttctgagagaaaaaaccctaaataacctttggatccaatttaatctgcataatagctcaaatctaatctaattcaatccacaaaagtacagattgaatgagttattctcgattgattactttttaatattgaattatttaatattttattaaaaaaaatatagttttttttacataactaacaataatataaattaaattattgttgttttacatttctaacaataaattaaaataaataaattaactaatagtaaattcaaagaaagaagaaacaaatatttagttttgttttaaattatattttccttatgtataagaataaaatatacatttgatctattaagtattaaaatatgtttttatgatatgtattagatttttaatttattattttttacattaaaatattagttgtatatataattttattatatgtgtgaattggaatgaataatttattattacatgtcaatcaacacggggtcaaaccatgagcatctcacttaaaacctccgctaggtttgttttaatcttgacaagcttggtcgggttcgttgtgttaaagggaatttctttaagttcctcggctagaccaactctcgagttgatatcctaaaatggggatcaatgtcgtccccatcttggtcacaccttcaagtggatttaggtgccgtcttgttaggttatttttagtattaattttagattaagtt

SEQ ID NO: 127546 - DNA, 733 bp, Cannabis sativa
agatcctggtaaaataaattcgaacaccttgtacaatgtgatttacctaaaaggtaccctcaggtatagttgattaaaactttgtttatagctttgtcaggtttctcgcctccccttatctcttctatccaggcgattttaagagttgatttggggaggtggcagctgctgtgtcataggttctgttagtctagattttgagagagagcatttagtttgtcccctcgctccttttgtatgattctagactgatagtcatggctagagcgaaacaatcatgtcgtagagtgccgccatacgatcctcatgttgccagggtcgcaataatggggagaataagagttgtagaggatgccacacatcgttgtgaggatgtggatccaaaagtttgtcaggtagaggcacctaaggttgatcagggggtcgagagttctgactttgaatctgaagtggagaaggatgcacctattaggagaaggacttacagaactggttctgtcctccctaacaaccgtcttggtggatgtgatgctaacggggagccgttgaacaagcttggttagccttcagtgatggattaagaccatatgtttatgcagtcttcagagtcctaaatattagatgctagatcacagagagacaggtgggtctctcccatatctttcctcacccttgagacttttgacgagatactagctagtggtctagtgaggggtgtgttgggttttatgcc

SEQ ID NO: 127547 - DNA, 1042 bp, Cannabis sativa
aaaaaaaaaacaccaaaaaaagagtacatatagcaaatacaggaatcaatatcacatatatgtgttgagacttttgcctaccattttatgtatggccattcaataccgtagaaacattggataaatacaacccttcttttattctttttatttttctttttcttttttttttctttttaagagagaatatttatatatgtggattttactttcattataattcagtcacaaaatattattcttttactttcatcagttgaacttgttttgactctccctttttgtgtggggttttgaaatgggaaatgtttgggataagggacttgtgaacgaaccaccacagaaaaaaacagggataggcatgtgatatttttaacatgaaaagccaaagtgacatcaatgtaaatattcttattttgatgtcaactgaatatgaatcccaaggaaatcttaatggaaagggacttgaaaagccaagggacatgtagataaaacttgaagtgatgtgcctccaaactagaggtttttcagggctggtttccaactcacaatgcattgtctacctttatatactaaatttgttcgggccgtacaatagtattgctatatcattacgaataaatttattttcagttttcatgtttttaacaatactatacaaagctttgtaaatttgaatcgtttagtttcaagcatagagatactaactttatcgtttattgtttagctaaagattgttttagatgttagaacatctttttgatagaatgggggtttgccctttattgcttgtcatctcgctgagcttcacatacccgctattttatgcgccatgcataatgaactttccttccaaaaaaagaaaacataatttcatacgaagatttaaaaattttatttgaccaaaattttgattataattattaaggtaagaactcatttgttaccatgtgtggggtaaaagatcattgttaaaactgttggaatttattttaccaggatcttaaatctactcacaaatatgttgtttaacatcctaaat

SEQ ID NO: 127548 - DNA, 1167 bp, Cannabis sativa
  modified_base (26)..(54): a, c, t, g, unknown or other
  modified_base (1076)..(1080): a, c, t, g, unknown or other
tgataaataaatatttattattattnnnnnnnnnnnnnnnnnnnnnnnnnnnnntattattattattattttcagattattgagctttttaatgtgtggtattttttagctaatttatttgtgcttacatattgtgctttcaagcttgtcgtgtcgtgtctaagtttatattttttgtactatgccatgctaatttgcaatattgtgttgtgtcgtgtctatgcccatatttttttatatcgtgtcgaattgtgccgaaacacatatcttttcataccgaatacctctcaggcttatctttagtttcgtgtcaaaaaatccaatcaatatttaaagcacttattgtaaccatgtgtaaaatcttcatcattagacaaatataaattaactaaaacttatataacaaaaataaaaatttaaatggtacatttggtaatatttttttattatttttttaattataaaagtaaatatattttctaaaaacatgttcaatacaattattttcactttttaattttttttttttttttaaaaaaaaagtgactttcaaaatttttttaaatagttttttttcttaattaatattttgtactccgactccaacctcgaccttggaacccacacccggaccccgacctgtacccgtacccaaacccaaacccaaaccccagcctcgaaccccaatttcaaccccggaccccagatcccgaccttggccccaaagcccgtcctttgacccaaacctggccccagacttggatcccaaccccagacccaaacacggatgcaaagctggacccagacccagacccaacgtcggccctagaccccggtcttggacccaaacctggccccagacccagaccccggtcttggacccaaacctggccccagacccagacccaaacctcggcctcgactccgaaaccggccccgaaccccaggtccaaacctggaccccagccacgacccataccccgactttgactcaaactagacttaaataaaatcaacaaatgaaaattaaaattaaatttacagaacagaattttgttttctgtttttgaaattgnnnnnaaagttattatagaacacatttttatttttactttcatttagtgattaaaaaatgacacctttgtttttgaaaaataaaaatgcatt

SEQ ID NO: 127549 - DNA, 1755 bp, Cannabis sativa
  modified_base (127)..(134): a, c, t, g, unknown or other
  modified_base (1716)..(1718): a, c, t, g, unknown or other
aaccagtcccctaccccctacgacgaagccttgccgtaaaaaatgggggccattaattctacgatttctcctctgttatgggttgttgcaaatttctccttttttttttcttctttctttctttctnnnnnnnncttcttcttcttcttcattctcaaccccgattcgatttaatcacaccactagtcagatctctctttctctgtatgtttgaaacacgaaggtatacctagggcatatgttcatcttttttatccttctctaggtctctctcttttttgcaggttaatagcgacgatttggatgtggttagagttgtcaatcactgttagaatgtgtgggatgacttgaaatggagcgaaatcatagtcagagcaaggtgcaacgatttatggtttttttgagttttttttttctttttcttaattagttttctgggtttctttttatgggagtttcttgggttttggtcggataaagagatagaattgagagatgggttttgcttggaagtagggaacttgtaaatggtcactactacaaaatagacctttagggttcagggaattttttttaaaaaaaaattgatactaaagaccaccccaactctttggtctctgtttataactgacacctataatgactttaagtgtcagttagtagaccgacactaaaattataactgagaccaaaaaatgtttttttaaaaaatatttataaactgacatttataagaaattaactttaagaaaaaattcattctagtactacttttgtaatttaattacaataaaattgtatattttttattctttctattttaacgattaattttgaaatcttcaacttttaataccgaatattaagatttatatttattattaacttaaattaaaaagtattaatgtatcttaataaatgtgtatctatcactatttatgaagttattaaattattattaaggcttcattattatcacataaaaataaagttaatagtatttcagtgattttatatgctatagcaaattgatttcaaaagtttataaagacaaaattttatagatatatactaaatggtattaataagattgccaaaaaaaactgtaaattattattagtttagatactatttagcataatgttgaattattagagaatgcaagcttaatttgattctatattgtttagttaaattgataagtacttatttggatactatttagtagtagtatataattttttattctttttttatttattttgatgttatattttctttttagtatatattaatcctattttgtttataagttttatttggttaatttatcaacaatattattgtatgtattttgtactttgtagtatataattgagtctgtgtgactgtgtttgatactttgtagtatataatctcatttaaattttggtaaaaaaaatgtactattaagtacaaatacaaaagtaaagaaaaagttcatgtaagatactaattagtttttttgaaagataataattagttgatcatatagcaatagtaagatgtgatgtatgctatatactaattagttttttgatagataataattgttgaattggaagtaagatgtttttgttacgaaaaagaaaataacataaaaagtcttgccttttggcatgaagtttttgttgggttttatgccctaaataaaatacatttcaatataatcagatnnncttattaatatagatcagaaatatcatttaatgttgc

SEQ ID NO: 127550 - DNA, 676 bp, Cannabis sativa
tttttacttttttactgtgggacgattttttttttttaaatattgtgtactgcatttgttaagttttaactgttgttctacagttgtttttttagatgtttcaatgttatttttaattattttattgttttacagctgttttatacaaagacagtacttttgtaaaaaaaattgtgtggcagtaaaattataaatttttgcccaaaatctaaattttttgtaaaaacttctttaacacaagtctctgaactaagttgaccctaaatacaaatctaacctgtttatacccagtgttagacctgattataacttaagatgtcatatattattatagctatagtaaatatttcttaattagtttttgaggagttttttttaaaaaaattataatgtaaaaataaagttcaaatcattagttacaaacatttattattcttttttttcttatgtacacatggaactgataattttgaagtttgttctcaacattatatctacactttcatattaaaaaaattgaattataatttttaaaaagaaaatacacaaagggatattaattattcttacaatatttatatataatgaataataagatattgctgttatataaattaacaattaacccaagatctatttgtatataacatagaacacaatagtagtatatgataat

SEQ ID NO: 127551 - DNA, 692 bp, Cannabis sativa
tttttaggttttaaatttttggtttaaaaatcaaattttttgattttctaagcatagaaaatcaaatttccctatactaataattaatatgttaaatataagatttatatctttctaaaataattatatatataaattaaagtaatctaaaactagcacgagctactagttagtaattagtttttaatcattttactaattaatatatatgtccaatattaataagctaaatttctagaccatattatagaagaaaataatatatatatatatatatatatttatatatgtgagtcaagaaagaaaaaggaggaagctatatatagaaaaataatgaatgaataaatatatgtgagacaagttgagataaaaagagatgatgggatttttaatgatatgctcattattcaaaagaaaaaaaaaagaagaagaagatgatgggatgagaattgattagagagtagagtacaattgtagtagtgcacaatagcatattgcgcactttcgagtgttgtagctaattatataaataaaacatatatacatatatgcaaagagtaaagtaagagtagagtactctagaatattgtgtggaaccagtgacgaagctagaaatttagttgagtgagggcttgaataaatattaagtcaaaactaataaaaataatgataaatgtatctttcaaattttc

SEQ ID NO: 127552 - DNA, 1116 bp, Cannabis sativa
cggcggtggagtgatctacaccacagttccacttgcgagacctttcactagagagtttggagcacaaacaaaggggagatttggtatagaaacagattttaccattgggttgaatccgttggtgggttggatgtaaaaaatgtcttggtgtaaatccctacttgtactgaatgaaaatgggtcagtgggtgtcacactacaaatgtattcacttgagttggaaccggtgacagtgcaacccacggatgaagtgagggcgcattagggtgtttcgcagaggacatgcttttgggttgaggatttatagcccttttcacattcaacccaaaggaactcaccccaacatctaacacaacataatctacaggttaagaagaagaaagaagaaggaaaaaaaaaagaaaaaaagaagaaaagaaaaggaaaaagaaaaaaaaaatttaatttttattttttctgattttttaatatttataattattttataaaattaatattatgtggaccactaaaaatttgccacgtgtataagtgtgtacacttggacagtccaccgtggcacttaactgtgatttttggtcggaggtgtgcagagcaaaacggaactagggtttaggtagttaagctgccaaaattttggtttttgtaattaagtgttacaaaccgtaaagttcaggttgtttagccgccaatatcccatttactaatcagaaatcattttatgttgcatggttcacatgattattttcatgattatatgttttttatataaattctattaaatccaaaatatatagttattcacaattacagtgatgtcatcacagtagaaagtaattgtgatgatatgcttcaaagtatttagtcccatgatttatcagtgcactagatttacactgacgtgataatcaacgataaagtttacttacatagtgttatgtggaatgtcttttttagggtattagcaaagtatactagtatcggatgtattggttatacattaaacttgatcgatattgacaacagaaaagatatcataaacttacatttatatatttttaagtcaatatcacttagttgatcttaggtcaattgatcttaatcctgagatggtta

SEQ ID NO: 127553 - DNA, 779 bp, Cannabis sativa
attagtagtggaactttacttttcgagatacactcagtttttgaccgctatgcagtgctaaattcgtaggtatataaaatatatcgtagtgccaaattcataggtatatgtaatatatgatagtgctacgtggttgttgatgtggtattagtgtttgttttttcactctaaagaaaaataggtaccccggcataatctgtctaatttttatcttgtcgacaaactgtctatcttaagttcacacctaataaaaccacttgagctaagtggctagctcaagtgactataggtgaatgtgtgttagaggtcttgggttcgagtccaaataaaatataattgtaatatataaacgctcaaaaaaataaaaattcacacctaataatattatatgttagcagaattatgtatgcgctctcatctttacttataaattaatttggcttagtatacatgtagaagaccaaactaactttaatagaaagatatatttctatatgtaggaacgtgcattgaattgtatgaaagttagtatcaagactctagaaaaataaatatgaagagttgattttattgtttaaaaaattaataatctcagtatataaatttatatatttatataaaagagatatgagtcgataacataatttttttagatagtactatttcttctgtaataccccagatttatgaaatggattagcaaaaccctaattagataattatgaataattgaggaattgtataattatatagttcaatatatgaaaatttatttgatt

SEQ ID NO: 127554 - DNA, 1310 bp, Cannabis sativa
  modified_base (1252)..(1283): a, c, t, g, unknown or other
taccgagtgtacacccatatatatatatatgaatatattatgagatttttttttctgtttttctttattcatttatttatttttagaagaaaaactcctaagaccacctttcaagcaataagcttaaagagaaagtgggggctaatgattcaattaatttatttcatttaaaaaaagatcatcgatacaagaaggataacaaggccaccaagcctcactaataacttctgacaaggcatatttagccaaagaataggcaacaacattaatagatctagaacagaaagagagactagcatagtgaaattcaaaaaaactacatctaaaatctgctaatattaaatccaaagaaagatccaaaaagacgtggtattaaacttcaaaaccaaattcaaacaatcagatttaaaaatcacattttgaaaatccaataaacaacattggatgacaatattttttaaagctaaagctttcaccatttcaggagagaaggcagccaaaatgtgccaaacagcagaaaccataacatcacttgtggagtcacgaaccaccatagccaaactacatctatcagtgaaagcgttcagagcaacatcaacattgatcttcactgtccccctactaggcggcacccagacaaaactataagaagcatttgtaggggacgacaagctcccaccgagtgagaagaactaggagagttgtgtaatctctggtaatcagcaagaaaatcacaaccccaaaaaataataatatctggagcaatcaccttattattatgaacttttttgttcctcctaaaccagattctctacataattactaaaatcaactttaaagaggccacgggcaaaagatcaagaaacttatgaatgaaatcacaaaaatcatgataaataagaggatccccaaataaaaaaaaaatatataagattattttggtgttgaatgaaagtttattacattggtgttaattgttacaagtataatatcattgataaaaaaatatatatatatcaatcatatatatttattatgaatttatttatacatttttgtgatttaatttgaaaataaagaaataagagaaataaatattttgtatgaagagtaattcaatcaatttaaaccattttgattatcttttctaaaatatgtaaactaaataaaataattttaattccccttctaatctatttagtataacaacataataaggtgtcatttggtaatacttttgttttttaatttnnnnnnnnnnnnnnnnnnnnnnnnnnnnnnnntttaaaaaatttatttttgaaaaacaa

SEQ ID NO: 127555 - DNA, 1655 bp, Cannabis sativa
taacgtgtcgtattactcatgtcctgatgtagttagaaattctcatacttaagcatgtgtgtgggattgaatacctaccttctccacatgaaaatgtagaattctgttatacatatctgctatagcaggtggacctaaatatcttaggctttacttaccatgcataatatttctatattgaagtaaactttaagaacatacggttaccaacagtacttaaccttttatcacttttaaatcctcatcattcttcattcgctagagcggcgggcatactctatcatattttgtctactatatttttttttttgataattctcttacttcttaccgacttataggtggtacctcactccaagtaaatttagcactcaaaaaaacatcccatagggttgcatacgtattgtggccaaccgattgtcatcatacggaaataaacacttactcaaacttaccaggaagtataccagttgtatcgtcctcgcttcaagtctccattaggttctcacacccacggaatgatggctcttatacatgagtacatcactttagctactttctggacaatgctacgtgaattcatctgattatctaaaggtttgtatttgacctaacacttgaaaagatactaaaattcagatttaggtcgccttctttaggaatacaaggatcgtatcgttttcataagttttaatgctccgctcttacgtactggcatgtaggatgtctaatcacaaatctaattgccgctttttgcatactcatgcatcttttacctaatcattgtactattttacgactaactcaagatgcatatagagtggggtaggttgtgattccgtcattctctcggccttaagtttccattccagtaagtttactccttgcctttgagcagaaacactaacatagttgctttcctggctacaaatttagatcatatcctttgtttcatactctccttgaggttcgtcaaggtgtaggctactacatattaggcgtaggaagctttcagtctctcttcggtctttgtgtgccaacaactcttgaatactatcacgcttgtaggatcaaccacaagttctgtattaagaaataagcattttctgaaagttagctcttttaaccaatagttttgatcttctaatcctccagtttagtcgagccttctaactcaatttggggtcgtattttagtatccttaacatccttccacaggttggagtatgaaaaatataaacaattcgacaacgaactcctccacctaatttttgaacagtcacaccatcctttgggcattgaataatttaagactaaattcttagtgcccccgctatttgagtgttgcttcaaatgtcatactcttttgtacttcttgttcttggtgtctagtttaagtatttaatcccgattgaagaatcaacattactttaataaaaagaagattcctaggtagaggcgaactatcttctttgttaattttatagggagttactttggtcataagagaagaatttgattgaagaagaagaaaaaataaataaatctttatttacttaaaagcgtactaaatctctagttacatagtcactagattattggaataggaacaaaaatatcttctttggataaaatttgacaagttgaaagagact

SEQ ID NO: 127556 - DNA, 1350 bp, Cannabis sativa
gttgaagattttaaggaacatttgcattttgcagtaattatgggatctaatagaccctcaaatggatggatatacccggtggcagtatgagtagtcataaggtgaaagcctttgatgctacttggtggcccaggtgaataaaataacgattcttggtggaatgggaaatggacttttttgttccaaaaagatatatatatttactgttaaaatttgaaaacaaagtgaactactcaaaaggacatactctcatctcatatatattaatttgattgatgattacacgattcaattttttgaaggaggtgaaagagaattcacaagaaaagatttcatgtgtttaaggaactctttgggcttttctaaattcacagcatgtcccgcgttcttaataatcaccaattctgcattttctcccaaatgcctatttgtacatataaatacatataaaccaaattattataatttcagacataaacatcataagaaaccatgattaattatttaccttttcaatctgtaacctagttccaaagggaatatctgatcttggtctccccatattatcaacgttggctgcatcaatcaagttattacgaacactaaatttccaaataatattgtgatatctgattcttaattagtaatagtatatacacaaatattataataatcatcatcatccatatatgtaccaattttattgactcaacaaccaaaaaaaaaagtgttagtacctgtttgattttggggagattagaaagttttcttcctttgagtatttcttggatcaattctcttttttcttctacaaactctgtacacatcacctgctcatatacaaatctagtactgtcaatgtacgactattggttggttaggataatataaactagaatttggagccctttattttatttcttttggttgaaaaagctagccagatatgagtagaatctatacaaattacttaaaaataaataaattaatatttttgcaaaaaaaaaaaaaatttttgcaaaaaaaaaaaaaataaataaataaataaattaatataaattaatatgtgacatctacacaacttatattggtgtagcactacatgtgtgatgtgccacttatattggtctaacacgacatgtacttcttaactccttaagattatagttattaataatagaataaatgatttttattttcaatctccctttacacattcatgacattctaatatatgggactttaaaaaaaatttagggtgtgtttggaagtaactgtgtaattactaagtaaggtaattacacagtttgtaaggtgtgtttggatatgaggtggtaattacatatgaat

SEQ ID NO: 127557 - DNA, 1448 bp, Cannabis sativa
ggtgtgttaaatttcatctgtcggtcccgtcctcaaccagaagatctctattatcgtttggttggtccccctaaccagatcaccttactcaacgtctaatacatctgacatcgtgttaagaaataactcttgctaattagtgttaattatgtagtcattggtgtggttgtaatgagtttgttacatcgtttttagatttgtatttttcgattagtgttggtctcctctttaccaatattaaggccacttgacacatttctattagagtttgtattcttttttcagagtataaataaaatatgaagcactcagcctccattgagctgggaaaattattttatcaaaattgtataaagtttaacttggtatccagagcattgaaaagtctatcaaatatcgtcccattctcagactcctcagaccaccaccacagctacagcaagtgctgcaagctcaacagtctttgttcctcaacagaattacactcagtcgtttaacacgttgaactagccatttccttagaagcttgaccaaaagagctatgttctctggaaaacaatagtgtcaactgtgatacgaggacattgtattgatggctttgtaaatggaaccttacctcgtagaattcacctgagctccaactacaaaagatggagaacctggttttggtgtcatcaccatcaatctagagttcgagcattggattgtgagtgaccaattattaataggttggttatatagctcgatgactgaaggaattgcaactgaagtaatgggttgtgaatctgcagccgcattatggaaagctctcgagaatctacatggagctcattccaaatctagaatagatgatacttgtactctgattcaaatcacttgcaagggctcaacctccatggaagactacttgaagtagaacaaggcatgggcagactctcttgctttggtaggggaaccatatcctgagaatcaactcatatctagtgtcacctctgacttagatgttgagtatatgtcgattgttctacaaattcaagctcgttcatcaataacacggaaagagttgcaggggatactacttgcctttgaaaacaagagggagcaccttcaaaatctaagccttaacagcagtactaaacctactcgttcccctatttcacccaatgcaaactttgcaaaatcacccaagcaccaacaatacagttcgaggaaactacaagaatcaaggaggaggtggtcgagaaaattacacttgtggtggtagaagcacctctggaagacgttgaggtggtagatccaatggcccgaaacccacttgtcaagtttgcagacattatggtcatttaggagctatttgctgcagttggtatgaggagctatttgctacagttggtatgatgaagcatacatgggatttgttcccaaaatgtacgtatcaccctgatcca

SEQ ID NO: 127558 - DNA, 1051 bp, Cannabis sativa
gtaaactttggatccctatctgaaacaatggatttatgagctccatggagatgaactatctccttcacatacaactctgcatattgatccactgtacaaatagtctttaccggtaaaaaatgtgttgacttcgtaaaatggtctactatgacccatactgagtcatatattcatgtggctttaagcaacccaaccatgaaatccattgcaatactctccctgttccactcaggaagggctaatggttgttgcaataaccttgccgacctccctctggtgtttcactttgatttacttacatattacacatttagccacgtaatccaccacatctttcttcataccacaccaccgatagtaggatttcaaatcctaatatatcttggtggtcctcgggtgtaatgaataaggtgtaatgcgagcttcatcaagtattcctttctaagctcaccatatactggaacacaaactcgagctttataaaataacattccgttattcaagatcaaaaaagtccttaagccaacaggccaatatctcatcccaaattttaattagcttaggatctttcaattgtgtctttctgatcctttccaacaaatctgattaaagtgacaagttgtgtaactttcctaccataacttcaatttcggtcttaaccatttctgaggctagctaaggagctatcattacagtgtcaaaaacttgctcgggaccttttctgctcaaagtatttgccactacattggctttcccaggatgatacagaatctcgcaatcataattcttgactaatttcagccatcggctctgcctcatattaaatcttttcgagtgaaaaaatacttaaggttcttatgatctgtgtaaatctcacattttcccctaaataatgtcgccatatttttagagcaagaactatagcaacaagctctaaatcatgcgttgggtaacattattcatatttcgccagttgacgagaggcataagctataacctatttagcttgcatcagaatgcatcacagaccctatttggatacatcacacta

SEQ ID NO: 127559 - DNA, 2498 bp, Cannabis sativa
atcagctttaggggaagactgtcttccctaaaattgatctccgatcgggctatcatgagttgagaatcaaaaaggaggacattccaaagactgctttctgcactaggtacgggcactatgaattttttgttatctcttttaaactaaccaacgctggagcaactttgatggatctgatgaatatggtattcaagcatgagcgacacctctggatgattctgtagtgattacatgaacataaattgtatgccaagttaagaaagtgtgagttttagctatctcaagtgtctttccttggacatattgtcagtcaggatgggatcaaggtggatctagggaagattgaatccgtcagggattggacgagaccaaagatagttacaaaagtcagaagttttttgggttttgctagttattaccgttggtttgctgagggattttctaagatttcaacacctttaaccgaaataactaaaaagaatcagcggtttctgtggatagataactgtgaagcaagcttcaaataattaaaataaagattgatcacagctccggtgtaagccttaccatctaataaagagaagttcgtggtgtactgtgatgcatctagacagggtctggggtgtgttttaatgcaagctaattaggtcattgcttatgcctcctgttagttaaaggaatatgaacaacaatacccaactaatgatctagaacttgccgcagtagtttttgctttaaaaatttggtagcattatctctatcgagaaaagtgagagatttacaccgatcacaagagtctcaaatatttctctactcagaaagatttgaatattaggcagagacattggttggagtttgttaaggattacgactatgacatcctttaccatctcgagaaggcaaatatggtggcagatgcccttagtagaaagggtcccaggcaagtgactaggataatcaagatttcacctcacctagtagataatatgcttagataaggtattgagtttattagaggaaaacttaataatttgacattgcaatctaatctcttagatagaattaaagttgctcagttaactgatctagaattggtgaagatccaacaggaggttttagctggtcaagctaaagattttacaatgttaagtaatgggaagctgttgtatagaactagagtttgtgttccgagcagtgtggaacttagaaatgagattctcaaggaggctcatacgactccttattcactacatcctaacactaccaaaatgtatcaggatttaaaatccttctattggtggtgcgggatgaagaaagatgaggtggaatttgtatcccagtgcctgacttctgagtagataaaggttgaacaccaaagacatgcagggttattataggctctaactcttcctaagtggaagtgggaagatgtcactgcgaattttgtggtttggttatttagaaccacggggatgtacgatactatttgggttgtggtggattgatttactaagtctacacattttctaccagtaaaaacaacctttacggtggatcagtacgaaaagttatacgtgaaagaaatagtgaggttgcttggggctccaaagtccattatatcgaataaggatttgaaatttacctcaaaattttggcaaagtctctagcgagccatgggtaccaaactgaagttcagtacaacattccatcctcagactgatagacagtcctaaaggacaatttagatacttgaagatatgtaacgtgcctgtgtgatggatttcgagggctcctagagcaagtatctacaactgatagaattttcatacaacaacagttatcaaagtaccatagggatgactccctatgagatgttatatggaagaaagtgcagatctccatttcactgggatgagactggagaaaggaaatacttaggtccggaatcagtgcaaccgaccaatgaggctatagaaaagatcaaggtcagaatgcttgcctctcagagtaagcaaaaaagttatgcaaatctgaaacccaaaaacgtagaatttctggtaggagatcatgtattcctacgagtgtctctgatgaagggaattaaattttttaagaaaaagggcaagttatgccctaggtttatagggcctttcaagattcttgaaaaggttagtctggtatcatgtcgcctagccttgcctctaacacttttagcagtccataacatatttcatgtctctatgttatggaaatacattttagatcccactcaggtgcttagttatgatgtaacgccctaatctattgggacatcacgtgtgtgattttataaactagtttaatactaatagattaattaattatgaaaaaaaccgtgataattttaaaaacttgactgacataaaacactaaaaacgagcattataacggcataaaaagcgtgttccgaggattcctgctataattttttttacaaaagaactatatacgatgatgcc

SEQ ID NO: 127560 - DNA, 1578 bp, Cannabis sativa
  modified_base (948)..(949): a, c, t, g, unknown or other
  modified_base (1303)..(1306): a, c, t, g, unknown or other
ttattttcatattgtatatgatatttttttgtttttttattttcataatctttattattgttgtgtcacgtactagttcctagatgaaaaaactactttcttggtaaacaaaccggtttctcaaataattagtattccatccaaatttccattgctccacactcttcttcttctgtaactttcaattgcccaaaagttagatcgaccatttcttcaacatatatgcaagggcggccctgaaaatatatgggcctaaggagaattaaattttggggccctaaaaaatatatataaaaaagattagaaaaagtgttatgggattggaacccatgacattatataatatgtcatacacctcaaccaattgagctatgactatttgttgtttacaatacacttaattttagtttaataaaagcctactaatttttttttatttggggccccagaaatgagtgggccctaggcatgggcctagcccgcctatgcctagggccggccctgtctagacatatgatgtgagaaagaaaaatactcaataatctttaaatatatataaattcaaagtaatatcatttcaaacttttgtgaattataatcaagggaaaacttgacaaatctttcaaactgtaaaaaatttagtaaaaataacatctagctagagagataaaactaaattatcgaatagattaaccattaatgacaaactaggcaatgaacgtgtgtattaagtttaaaaggagaaaatgaggtgttagaaaattaaaattatattaatatatagatatatagatagatagatatacaaattttgttattgattgactagcttgagacctcatacttagtctatctaattgtaacacaataattaaatatcatttaaaaataattacttatttaaaaatttattataagaagaggattttaatttgtgtaaaaagaagnntaatttttgtaaaaaaaataaaattttattgtaaatattataattgaatgacttaattgttaaataattagagtagggatttaaatataaataaaaacaaaatatttataattattaattgctaaaagaggtcttgttaaatatttaattaattatttaaagaaaatagttaattataattaattaattttaaaaaataaatgtttacctattagtaacctgtaataacaggtcaaagaaaaatgtaaccatgatagttacaataaaaaagtaaccattgaatagtcaccctatattatatacaatatactgccggccagagggtggggcagccggggcctcggccccaggccnnnnaattttggaggccccgaaaaaattaaaattaatatacaatatacatataaaagcatataatatataaatatttaactcaataaattacatgaaaaagcatccagcacaaatggtaagtaaagcttatgtcagtcttgaggttcaacgttcaaaccttactctagtcatcttttatactttttttgaaaatacaccttttatacttttagttatttgtgaaaagttttacttaacatttcaaaaataatataaataacaatattataacttaa

SEQ ID NO: 127561 - DNA, 996 bp, Cannabis sativa
attggatgttgtttaaccaaaaaagtgcggattggatcggatgaacagccctacccgaagggtgccgtcgttacaaaatgatcacgattaaagacaaaatggtgatgctcgggtcgttgtgcacatattgcatgtatcactctaactctaaagacttttaaattttatgtttatgcattacataaatcaccgtaactctcgagacttttaaattttatatatacgggttacttttaaattttaagattgttatcctgatcgttttgtctttctttatgttttaaaatttttacttgtgtcaataatttttttttcaatatttaaggagaggcatgtcaataaacaatcaacatcccatcgatatcaaatcgacaaacatatctttacttttaaattaaaaattagataaaactatcaaacattcaatcgacaaaccatcgatatactatcgacaattaatgcagaaaactagttttggaaaattatcgacatactatggatatacaatcgacaatttgtgccaaaatcttattttggtaaattatcgataaactatttaaaaactatcaataatggtcttccctgaccttgtcttacttatcatcgacaatatcgacatgctatcgatatatcttcgataaacagtaaaaaaacccatcaaccacaagaaaaccaaatcttgacgtcttagacaaaaaagctataaaattatatcagtgtaaacaaataccacacatataacaaaaacaaactacataatattctcaatgtttaaaatataaagagttaaatgattcttgagattgaatggtctaattgttcacagtgatccgagaaatagggagctcagagattgtgagagaggctcatttttttaaaattaaagaagagtaaaataaggagaatatgtaaaaaaaaaaaggaaattatagtaaatggccccaaatcataggagtatgttagtttatgtccttttttaaaaaaaaatatagcaaa

SEQ ID NO: 127562 - DNA, 898 bp, Cannabis sativa
  modified_base (841)..(843): a, c, t, g, unknown or other
gtatgggagcctagatacaagtcggtatatattatacgtggtatgcaacctggagagttcattcttgggatgacttgggctgtattttgtagtcgctgtgcgacaagtcttaaaagcttattttgaatatgattgtaaagtttaaaaatgggatcgcagttttatgtgaataaatgtatatgtttaaaaaagttaaagttaaatcaaaattttaattcatcacgatttttgagaaaatcctttgattagcaaaggtgtgtactttattagaaattcactgtagcgtgcctaagcattagggcattacaatttttgaattagagctaccaggttgtctatcgaagatcgtcataacatgtacaattatcatcagagataagctagacacagagataaattgggaaaaatagtttgggtaagtataggaattagttggattaaattttataaaaaaaattagagggttttttgtttttttgtagtggagggatttattaagcatggtaattaaaatttttagtacgtgcatgtatcatataggtaatatggacacatgtgtatgttatttacttataatatctattttatataaaatgtgtctatataacagaattcttagtttatgagaaattattagacgattttttttaaaaaaaattctactaaaaaataacagtttttttttcgtaaaaattaaataaaactttttcttttcctacgattaagaatttttttttcttttttttaccctatgattgagaacaataagaagttggaaacgaatttgaccgatcatataatagaaaagagtactcttagagacagtaccaatctcccaatnnnagctattaattcattaacgataaaactttcccaatgtttacaaagccatatatat

SEQ ID NO: 127563 - DNA, 1050 bp, Cannabis sativa
attcgagctcatctcaccgctattcatgcctggaggaagtggcggaggcggtgaaggccatggaccgccaccccctgaaccgccacctcccgaaccgccacctcctggtggcggattaagccttaccacgtgatctgttccttgtgggcccatgttccaatttgtatgaggttgattgttgttgtaataagaagcattattatctgtttccccaaaatgaaaaaaacagaagatcatcaaactaaatgtacgtatgcatgtttagggtaccaactattatgagagttgtattcatcaaaaaaaaaaaaaaattaaccaattatgagaaatgctaaaacaaaaatgttgtgcattttgagagttctattggtgctagttttcagaataaattagtacatattttgatttaaaatataatatgtgggaattgggatcctctaaagaggaataagtgttcaaatggaaaaatctaccgtatatctccaaaagggtacgctatcttagcataaggaggattttgttttgttttgttttttttttttttttgagtcaataaggagggttttattagtttagttttgtatgtacaataatgtaccgctgtatttactatggctatttgtaaatttacaaaatttcttgtatattttcacaggcaattaaggtaattcaactagttatttactacctgtataacaaaaattgttgaaagttgaaactagcattttcaaacaacttcgatacaataatctattaagtagtgtttggttgggaggaataaaaatataggaataagaataagaagaaaataaaatttaaaatacatacaaacaaaattgataaaaaaattattaaattttttattttgttatattggaataatctttctttatgttttaaaatggaataatcattctactaaaatagtagaaagaacattctattggaatgcggaatgctattgtaatactttaaaatgcaaccaaacaaaagaatagaatgaaaattgttttatttccattccattctatttcattacctcaaaccaaa

SEQ ID NO: 127564 - DNA, 500 bp, Cannabis sativa
ttgttgatttataataatagtgttttaaaaataaaataaaattatagagtatagtattgtgaaggcttaattctgacgctagtgtgtgaaatgcatcagattccaccaattttatttgaattttgatttgatattgatagggtttcatttcatttcctttgcctaaaataaaactcttcatcgcgtaaaaataaagcaaatccctatataaatattattattatatatataaacccctctttcccttaattctcttctcctctctaaaaccccccatttcactctctcgcaactctctctctctctctgcgtcgattcaagaacattttccatggtaaagtttcctttttcttcttaatttggttgttcttttggttctagggtttcttattattttcacagatacacagattatattagatccatcactccaactcattctttatgtttttgttatcatctcttaggctttgccgaaccagcagactgttgactacccc

SEQ ID NO: 127565 - DNA, 1359 bp, Cannabis sativa
aattttaataactatacatttaggaaaaaaataaaatggcattttaagcatagaatttcaaatttccctttctttttctcttccttcttctctttactcctcaactcgatggtagcctttctttttgagaaaattatattgtatactttactctatttattttaattttaccattatttctatattctttaagatatactcacttttataaatgatatctctattatacccctcaagttaatataaattatgtgctagacttaaatgaaggatgagaatatattggataacaatttcataatagtaggtacgttttaatgaaatataacataagagtattttcgattaatggataaaaaaaagggagttattcatcaacttatcattttcttcttcctcttcttctctgctcaacccaatagtatttgtaaccttacacccttcttaatcgattgacgactatcctaaccccgaccaacggcgagccccgaacccaaaaccccaaagaaccccgacacctcaaaaaccctagtattacccaatttgaaatccaagaattttcaaaacttttttttgacaaagattctcactttctactcaaaactctcaaatccaaactggatttcccaaattgggtttcctttaatggtgatctacaaccactattagggttctttttttaattcaaaatttgtttttatttttactaagaaaacaaaaatggacaaatcaatgatttcaaggtattggtatcacatatgttcccaaatagtcaatccaatcatgaaaatgattgagatcaaatgcccttttgccaaagcagtttcatcgaaggaatgaacaagggttcaaataatccctcactatctgaatttcaaaatcccaaactcggatctgattgagctccttctctctctgggctctaatcttacgaggaatgatgggtaatcctcgtcgtcgaagaatgaaaagaggagaagcaaagacggttgttctggtgttggtttccgacgagagaggagagacttcagagaaaggttgggtttgcgcgattaagagaaaacacgtgcgagggactggtgcgagcgtctttatgattcatgggggcttggtgcgagcggctccatgctccatggagatctggttttggttgatttggattctaggttgtgatggtgatagttaagagtgttcatccaatccaaaccacactattttgcttaaagtacatctgatccgcactaagtgtggattttatattctcgatccaatccaatctgcacaataactcaaatctatttcaatctaatctacaaaagtggggattggatcgggtactttggattggttacttttaat

SEQ ID NO: 127566 - DNA, 864 bp, Cannabis sativa
agaatttatacattaaatataatcatgaaatagatcatgtgaaccatgcaacataaaataaattctgatcttttattaatgagtatatttgattatattgaaattagttttatttaagatagacaacccaaaaattgtgacctgtaaaaggattgattatctcctgtacgcgaggcaaatttctttttgtgaatgtagagaataaaatgtttatatatggattattttaatggacgattggaagtgttagactattttgttaagtaacagtgagagtgatagagtgattactctataaacctatattgtagggttaatatacttatcttaagtaagcaatagaagaaattggttacttgattaagtaacattgattattagttatattttagataacatagtagattatcttattaaacaatgagctatataattaaatgtaatatgagaattagaatgattcactaagtaagaagataccattgattgcaatagaataatggtagtgtatgaatcaggaagtgaaaccttggtggtaataataggaaaggaatacaagatttttggattatgatgtatcaacattgtcaatgggagactcactattagttagtatggtaatttatatcaaggaattgtcagtaaaattgagatgtgtacttaatatatgtaaatttttggagatgtttagaaaaattattaagatttatattgaaaaaagaataggatttaggatcaaggtatgatctttaattaaatattgttgattagggaagggaaatttgacattttatgcttaaaaatgactaatggtgtttaattataccatcatcctaagaattttgtaactatgctaatctttta

SEQ ID NO: 127567 - DNA, 548 bp, Cannabis sativa
ccggtaagttttcataacgaaattccagccaatgctcatctttcaccctaggcagagtaatcattttaccacacataacaggctagttagtgtcaatccggactcgagtgctcatgaatgaaccccatccttcatgaagtgaatcctcgtggacatcaataaattctccaatccattctccaactttcttagcaagagctctggattcgcttaaaaaaggaaggcggtaagtttgaacccagaactgagcatggcagagatcatctttagttacattttggagcaaaaagggtaagtgcagcaatatcagttgattgaaaaaatgccatggttccccagaaagaactctatgctgatcacctgcacaagccaaagttaaaagaaaaagatcagagtgcatttcagagacaacaacttcaaaccaacatttgttactccagaattctcttatctttttgataaaagtcttcgggttaatcgaattagcaaggcatctagccaccagaaaaaatttaggggattgctgtggatcatataggtcggattca

SEQ ID NO: 127568 - DNA, 576 bp, Cannabis sativa
gttattttaatgttagttgaaatgatatgataatgatttattttattaaaaggtatgattcaatattattttactaaaatccatatatttttatctatgttattttgcttcagcaataacttatataacttcttttgaaatttgaattgtggattatagatttgaaggtcaacacaatgacaaaggagaataccaatacacaatttccagttctattgttgattcaattttttttctttaaatttttagatttatgtttgatgtagtatttgggatgattgtaaaatttaaattatattattttagatgactgaaatgttttatttttaattttgaaactttggatgattttactgatggttgaacattttattttatttagtttaggtttgaattttattatttttagagcgtattgtaacccaacccgactcaatctaatccaattcaattatgtattgaattgggttggattatgaaaacaatatatatatatactaggtgattgttacgtgtcaaaccacgtagtgttagttttatttaatattttagtttttattttaattaataattaaa

SEQ ID NO: 127569 - DNA, 2204 bp, Cannabis sativa
ttcgggtgctcttgcttccctcatcttcgtccatataatgcacataaaatggagttaagatcgaccccgtgcctattcttaggttactcatcacatcacaagggctatttgtgtgaacaccctgatggcagaattataatttccaggcatgtttcctttgatgaaactcaattccctgcacattccacaccagcagaaatgccacaggtatctacttctatgcaccctcccactttttcattcaatacatcacagttcagtactagtgttaatactaataattctgttgtgatgcctactgttaccaatatcacccctccaccaacatctggagtgagagaagacccatctcccattaatagacaggtgcctcatgttcatgatccaccccaaacagctgcccgaaccactcttgaaccaatcccagagaataacacctatgtccatgactccccaccactagaaaacaataccacttcccaaataccaacacctgtcccactcacatccactcaccaaaacttgccacttgtcctctcacacataaaccacataccacccactgatagcaactcgtctcaaccaagtcaccctctcaaaacacatacaatgatcacccgaagtcaaaatggcataaccaaacctaaagcttactctgcaactaaatttcccctccctgaagcccttataccctctgaacctaagtccacaagtgctgcaattaaaaaccctcagtggttcaaaaccatgcaacatgagtatgctgctctaaaaaaagctggcacatggacccttgtcccatacactccagggatgactattattggtaacaaatggcttcacaaagttaaactaaatgcagatggaagcttggatcggcttaaatccagattggtggccaaagggtacttgcaaacacctggcatcgactatgaagaaacgttttcacctgtggttaaaccagctacaataagagttatactcactcttgccgtgtctatgaattggagggttaaacagttggatataagcaatgctttccttaatggaacattgcatgaaaaagtatatatggctcagcctgaggggttcattgacactaccaaacccactcatgtgtgcctattgcacaaagccctttacggtctaaaacaagcccctagggcctggaaccaaactctcaaagacactctatctcaatggggtttctcggcttcaaaatcagacaactccctattcatctatggctcaggagatcaacaaatcatattgcttgtctatgtggatgactttctagtcactggtcctaatgacaatgtcattaacaacttcattaccagactacatcaagctttctctctaaaagaccttggtaatgtgcactacttcttgggtgttgagatattcagggacacaaccggcatgtacctatctcagtccaaatatatcactgatctccttgtgaagctcaaaatggaaggggccaaaccctgccccaatcccacaagtgccagtgtcaaactatctcttactgatggtgaaccccttgaagacaagactctgtacaggagcacaattggtgctttacaatacctgaccttaacacgacctgatgttgcgtatatcatcaataaactgagccaatttattcatgctccaacctccattcactgggatgcatgcaagagactcatgagatatctaaaagggaccatctctgttggactacactttacacttgcctcttccctaactcttcaaggttactctgatgcggactgggcctcatgcatcgatgataggaagagcacaggtggatacgtgatgttttttggcaacaaccttgtctcatggtctgccaagaaacaacatgttgttgctcgcagcagttctgaaagtgaatttcgtgcccttgctaacgcagctgctgaaataaaatggctggtgtctcttctctctgaacttcagattcatcaacctcagtgccctatactttgggttgacaaccaaagtgctgctgctatcgcagcaaatccagtctttcatgctcggtcaaagcatatagaaattgatttgcatttcgttcgagacctcattcttgccaaagaactatctgtgagatacgttcctgctcttgatcaaattgcagatgctttgacaaagccactttctactgacagattcaaatacttgacagccaaact

SEQ ID NO: 127570 - DNA, 2391 bp, Cannabis sativa
  modified_base (42)..(50): a, c, t, g, unknown or other
tttattgatatttaaagaataaagattacattgaaatggagnnnnnnnnngggcataaaacccaacaggtaatatgccacaggccctaaaaaagccacaggctacgcagaacatgaaaacattttctatacaatacaaacataaagttgaatactaataaaaattccatctacatatgtgcacaggagctaaatctggagctgaaaagtcaagatcatagagtctaggtcagccccatcatcactatgtttgctggcctggtgggcaacatcctggccggccacctcccccactggtgggtcggccaacacttcgtcgtgggtacctgatgatgagccctctcgataggcagcggtctggtgtgtctccattcgattctcaaataatgccctcccatgggccagtgttctctccacgaaggtcgaactgcccatgtatgacaacttggctttagtgttgtgtaggcagaactcgtaactatgttcgacggacaaatcaaggtaatactccttaatggcatcttggccattaacagccttctgtaacttcttcttatgttcctcaagatctgtctgcaacccggagagaagagcagcttggttgatgttctcggtgttcttggccctcagcatagtctccattcttaagaccattctttgcttctctattagaaggacctctagctcggcattggctttgtcctttgcggcaatagatgcttctaagaccttcacatgctcctcaaaagcgtctaaagaccctctagagccgtttcgagccgaactcaatttcatcaaggactgaaaataaattaaaacaatgtcagtatcaaacagtcaattttggccgcccagtcccctctttagactgccatggccggacaaacccttgtatggatgcccaaggtcggccagccacaagtaaataacactatggctgaccagcttatacagtcccaaaaagatgaacaaagctgaaagcataattcaccagagaaaggtctcgaagtctggcagagtacagcctgtcaggcacgccaacacccaactcatacaatgcctcatctaagagagggatagccctctctatacgtctagtggctgactcaccagccttcctaccagtagctgacctcgctcttccggtgggcacgaaggaagataaggcttgtgacgagctctacaatatggtatatgttttaaagccaaaattttagttttattttagttttattgtaccacggggtttggtatgaaaccctaggttatcctttgcaaatattaagcagtgttttgggataaacacttattggttttagttgttttgacatagggctgagatcatcggggatgttcctccacttggattggacaacatgcatgaatttggatcagaggtaagaaaagtattttgtactgcatagcatgttatgttgcaatacaattaatattgtagagaattgatagatattgagattaagacacaattattattgttacataatgaaaagattgtctgattaggcaataatgaaaaggttgtcttattaggtaacgatgtaaagattgtatgattaggtaatgatgaaaaggttgtcttattaggcaacgatggaaagattgtctgattaggcaataatgaaaaggttgtcatattaggcaacgatgtaaagattgcctgattaggtgatatacaagcacacttgattaggtgatgtgatatatgagtgctaggctatggcatgaattagcctgagtaggtaatgtggtatatgggtattggtatccaggttgttcctatgaggcaaccgcaataaagtcatcactctaaacttaaattgttggtaggtttcttcatgtcagtgatgcttgtttaggtacgggtagtaatgacatgtgagtgccaggttatggcatgggctcacctgattaggtgatgcgatatattggtgccaggataaggcacggacacgtctgattaggtgatgaaatatatgggtgtcaggttttggcacgagcttacctgattaggcaatgcaatacatgattattagatttaaagcatcgacttatctaattaggtaatgtgatgtaataaagatggttactttatgtggcaacagatataatttatataattaaaggaatataacttctataattagtagaatgattttatattactaaatatctatgtttatgtttaattgtgacagatgtcagtagtgatttggatttcatcttatgagcaatgtgtgactgtttgattctaattgtctgagtataaatgattatatttaaataatatattatatgattgttattattacttttcttgctaagttcttgtgagccgtgggtgctattgttggaagttattttaccaggatct

SEQ ID NO: 127571 - DNA, 572 bp, Cannabis sativa
  modified_base (536)..(546): a, c, t, g, unknown or other
tcctggaaaagaaggcgtggggctaggattcatttggagggactggtctggcattgcagcaggtatgatcttcatcccaaaagtctattctgtgatacttgctgaagcagaagcaatttttgctgcaatgaaggcttgtccgattgaaaacaacaactctttttagattagaaccgattgcaagaggctggtggacgatttcaaggaagaaggcagtaatcgaagcgatgttagcctcgtttcaaacaagataaagcgtcaccagcgtttccctttttgtacaaagctcaattttgtaaacagaaataataatgagattgctcataggttagcaaagagaagccttgagaacaagttaactcaatcctttctcaattcttttcctgagtggttagctaatttttgtaaagttgatccctctcattttatgtagttttaagctttgttaataaagatttctttcaaaaaaaaattatacttagatggatatgaaaataaaataaattatttctatcttagtaataattttcaataannnnnnnnnnnattattcaatttaagttgtatcaaaa

SEQ ID NO: 127572 - DNA, 1087 bp, Cannabis sativa
gatttttgtgtcttctgagaccttcatcgcagccaccacaaggctcgacgtgacgagccccaacagattggagccgccacagcgagggcttagggtcgccgcggtgaggaccgtgttgttttctcaactttttgtcttctcattttcgcctaacttttgactttaaactccgttttggacatttttgatattgttggaaatcctatttcgggctctatgtgttagtctatagttagaattcatattatgtatatgtacgattaaccctatttgtaaaatctctgaaatgtgtgattaggattaccggtgcttgcttaagaacacctagggatttagaatctctacgtacttggattaccaggtaagagagtgagttagaacatagagattagcgcagtggcgctcatgtatgttatttggtatatatatgcgagaaatcgagactagggttattactctaagtttagcaattatgtgatctaggattattactctaaaatatatgtgaatatgaaggcgataatgtattatatatgttgatataaagagttatgtggttaagacgtaaggccttattataaacagacgtgtgagcgtaacacataaatctatatcaaatagaatatagatgcagtggcatcaatacttatgagatagtgcgatatttagtgcggtggcacctattttgtatgcagaggtatgctatatgaaaagtgattataactgttattcatattgatgtttatactatcttctgggcctgggctcacaggtgctctattgtgcagaaaaggataaattggtagttgagcggccatgagatcgagggcttttgtggtgcattgtacatgttcaggctaagctagaccacaagagttgggtctgccagggaaattagttgtaaatctccgcttttaccgcttaggtcggcgtgtactaatgacttgtaatgtttgaaaatatttaacgggatccttgaataaaatatgtaatctttttggatttataatagagttttattatgagtaatttgcggcataaatacttaagttttatgccgagtagcagataaatacctaagtcgtat

SEQ ID NO: 127573 - DNA, 2123 bp, Cannabis sativa
  modified_base (2065)..(2069): a, c, t, g, unknown or other
acctaccctacatacaacctccttgcactaaccttatcctttaatcaacttgttgatcgataaggttgtatctcattcgtaattaactgcttcacccaagggtttttcttagagacaataacccttcctattatatccttttatttatcaacaaagtttattcgattttgtttaacttatatttttttaattttttaattataactgatttaagttaatttgtgttatttatttttattcattatattatagaaccggctctactttaattataattggtttgagttatttcgtgttatttgtttttattcattataaaactgttatagaaccaattatatcttaattataactggtttgagttattttgtgctacttatttttattcattatgttacagaacagttatattttaattataaccggttttattaggtattatgtgttatgaggttttttttattgtagatttagttttgtttttaatttatgtttcagtgttttaggaactggtttcccctttatgtttcaaaaacctcataacacataataccttataaaatcgattatatatatatatatattttttttaaaagtagagatcaattttaaaaaatattgaggtataaatataaaagaaccaattccataacaaaataaataaacacaaatagtaacacacaataactcaaatataatataaagaaaccagttatatttatcaactagttaaaaattgaagacaataactggttccgtaaagcaaataagataaaaactcacacacaaaaactagttaaataaaatagctcaaacaaagacattcattcaacatgttccaacgcaccaaataattacactcataccatatctaccccaaaaatatacttctgtgttattagattttttattgtagaactagttttgtgttgaatttatgtttcagtgttttaggaactgatttcccctttattttttaattgtaatcagtttgaattattgtgtgttacttgtttgtattaattatgttatataaccgattctattttagttataataaattttgaattatttcgtgttattggtttttattcattataacattgttattgaaccggttctattttaattataactggtttgagttattttatgttaatttatttttatttattatgttacagaactggttatatttcaattctaaccggtttgagctattagattttattcatagaaccagttatatttttagttatatgtgagacatctatttcgggtgactttgccagtgactttttggtgactttcccgatgacttttccggtgactgactttttcggtgacttttccagcgacactaacttttccgtcgacttttctgacgccggtgacttttccggcaaaatttattattgtttacaaatatgggatttccatcttttgttacaaaaatatggcataaaaaaactcacataaatgtaaaaaaaaaaaaaaaaaaccataaccatatagtgttatttatttatgccataaaaaataaactatatcctaaattcccatttttatgaaaattcccttatttaaaattatatatacaaaataaattagtttttatttgatgggttttataaagttgtagtaaattttaaccttattaattttttatataattatattgaaatcttatttcttaaaaaatataaattattcaaatttctataaaaaataattataaaatattttaaataagattacaaattataaaaataaatcaattatacctatataaacaaaaaggtccaaaacagcattgtctcttttatataattatagattatagatataggagaattatgtggacttaaaattaaaaaaaaaaaaaacaaaaaatacaatggtttatatagtgaggtgcactggttggaggaaatgcctccctcgttaaatgcttttgtattatgattgttcatctaataaaaaatgcattttcatctcaaaaaaaataaaaataaaaatatagtgaggtgcacttatgtatatgttacgtgccaagtcacgtatnnnnnttttattttaatttttagtttttattaatatcataattttaaaattaataatat

SEQ ID NO: 127574 - DNA, 1807 bp, Cannabis sativa
gcttacttgaggcagcaaaaatttacatttcttgaatttagcatacaacttatgctcctggagatgttgcagtgccatccgaagatatttcttatgtgcctcttctgaatcagaaaagattagaatgtcatcgatgaagacaattacaaaatcatctaaaaagtccttaaacactcggttcattaaatccacaaatactgccggagcatttgttaattcgaaagacatcacgaggaattcatagtgtcctatcaggtatgaaaagttttcttggtaacatcctcctctcgaattctcaattggtgataactagttcgaagattgatcttagagaagacagtctttccctgcaattgatcaaacagatcatctatccttgacaaaggatactttttttttactgtcaatttattcaatttccagtagtcaatacacattctcaatgttccatccttctttttgacaaacaaaatcggcacactccaaggtgaggtacttggtctagtgaatttcaaatccaacatttcctgtaactgaacctttaactctttcaactctataggtgccatccgatacggagctttagatacaggctctgcccctggtatcaaatcaattttccttttttacacaattaataatacccaaaaattaattacaaatgtacaaatatagataagttaataaagaaataaataatttgagtcaaactccaaccttctccaccttgactcaaatttatatgcatggagttcatactcttattgaacttcacttgagcacttgtcttcacattcatcaatctttcactgatgccttctttcttcaaacaaccttgaactgaattggagtcttctccaccttgctgcattcgttcacagtaattgaatgtcttttgtgacttgactctaccttcatagctccacctaaaatagtcttctcgactaatttatacaaattctactctttcttacccttcacaactatcatcccacatttcgtaatagatccaaccgcaattatccaaagctcccaaagagactaagttcctccttaatattagaacatatctcacattagttagtgttcttacaacaccatctaacatcttcaccttaatagttcctattctaacaactttagagctagaattattatccatcaaaatagtacaaccatcatatgccttataagtatcaaagcactccttatacgggcacatgtggaacgaacaaccagaatacaaaatctaagagtcaaaaaagttttaatcagctatgacagagagaacatcaaagttacttccaaagccttcactagcagcattagtagaatctgacgtgtctttgcattcttgattcttcattgcatgcatcaagatgttttgtcaactcttcacaaaaaaatacccaagttcttaaaaaaatcgtctcaaacggacaaccagatcaaaagttaataatgttcaaagtttttaaaaaatttcatgcaaagtttagccctttctctgatttttttaatttattgtggtccttattattttttcattttattagtcttgaaaaattatataaaaataagttatcacattgctaaattagttaagaaatgagaaagttatgccattcaaaagctactaagtgctcttcactcacctcactttttgcacctcatcacatacttgaagtaaaatttacaccatctcaaattaatacccaacgttaatgtatatttatttaacttttcaatttaatttttatttatgcttattatatataatttatacttaatttaattatattaataa

SEQ ID NO: 127575 - DNA, 1128 bp, Cannabis sativa
ttttatgcattttaaattttgttctattccattcctattcctattctcattcccattcctattcctattcctatattttcattcctcccaacaaaaggcctttattttaggtcatgtttagcatacatatttgatatatttactctattattttttttaatggattaacctatcactttcaaaaatgcataaatgatatatatattcaatagttatttattgtaattataatagttatatttttttatttatctataaaagtaggttagttatagataaaaatttattttttaaaattaaattaattataattaattatttttctggtgtcaggtggtcctgagttgcgcgggtagtggttgtgtggactcttggtcgagatgtcaacacttgtaagtgtggtgcctccacttctcatacctccttggcatctatacatgcaggaggcgtggttgtacccaccttgcatgcacgtcttgtccatgcaattatacctttgttgccctcgtcttccacacttgggaacattcccacttagtatggttgttcccttgacaagagaatggttagcttatgtgcaagcttaacacatggccgagtgacttattctcttggccatggcagagtgagctagggccaagcatggtcaagtgacctagggacaagaatggccaagtgtctttcttccttaacttggtggccatgtttcttctagggttaggccgagtgattttctctcttacatagtcgagtgacttcaaggccactatggccgagtgacattcttctttctcatggctgagtgacctagggccaagcacggcccaatgaccctcttccttagattggtcgagtgacttcaaagttgtatgtgttgggttttgtgccgtaactaaaactctatttcaatgtaatcttgaatattcatttatcaataaagaaacggaatgattttcttacttatttaatgtattattcgattcacatgtttatttcatgatcattttttttatttataaatttatctaaatccttatcagattgatattcttgattactgtctgggagtgctaatcatagatacagaatctatagcttctataaatgcatagaagtgaaatgatgatt

SEQ ID NO: 127576 - DNA, 2335 bp, Cannabis sativa
ctccttcttaatttcaaaattcctttagtgagttgaggaatggcccacataattcaaggcaatactcaggcctttgtagaagattgtgaaaaattccaacaacagaagaagatctaggtttagatctgatcatactgtgcgagaaaaaagatcaagggttaaagatctaaatagaaggagacattatattccgtcaccatcaatgtaaggttttctataactttatatgtgtttatttcatcgttttaagaaattcatttttagggtgttagattatagtgttataatcaacatacatgttagtaaatctcgatcttggtaaaataagtttcaataacatgcctcagagccatggtaataatttattttcataaaatatagatttaaaatgatatttgattgagttggatgtgttcatgtcagtttatgtgatgtttgattatttattgtaatattatgaaattttttacaaaaaataatttgatttttgttctgaatgattttatttaaaaagttggtgaaaacttaagcaaattatcctcttatacggaacctaatatagattaaaattaaaaaacatatgtttttttgaaatttaaaaaaaattagaattagagtttcgccaaatatgtgcccaattttctattatttttcattattttaagttttaaaaattattttttaatgaaataaaatttaaattttggtagatttttatttagaatcttaattttgaaatataaatcatattatcaaattaaaattaatttttattaactttattattaatttaaattaattttacatgttaggaaactttaaatttaaaaaattattatttctacaaatttcttattatagtttttttttaaatttaattatttattaattttacttattctttaatttataagattatatattatcatattacatatatttattttaaatataatatgataattatcttataagaaatttaaataattataaaattttaaattagtctagacattttatagatatcataaccataattattcaatttctaaattgacatttgtaattattatttttattttttaaattatgagtgaagaaaaatgataaaataaatatttttaaagatatattattattttttactgattagatacattaaactttaaaaatacatttaaaatgcctagatattttatacaaatttgacattatatgctaaaaaaagcataaggtgtttttatatacatctgaaaataatgtaaaaattttacactccataaatctttattcccaacaataccctccccatttcaaacccctactctccctctaactctcccgtttctctctctttctctaactccccaaacccactgccaacgaaaccccaccggacccatcaacgaaacccggctagcccaacaaaaccaccacctccgacaaaacacgaaacccagaccagaaccatcgcgaaattgcgaaaccccaccgaagacaatatcgtgaaaccagatcacatattgtgaaatcccaaacccacatccaaatcgtgaaaccccaaaccaaacccacatccaaaatcataaaaaaaaaaaaagtatttgtctaaactttttttttattttaattggattttttgttgtttgtgcttcattgtaaagaaatttatttggtttatgttcaattttttgtgattttgtttgaatttcattgacgtccattcgagttctatttttttatcaatttgcgacatatcgcgacattgttcgcgatgttttgcaatttaatcttaaaatattgttggttttttctatgggcgatgttttcttgacatgttagttgtttagcgatgtattttgcgatgtatcgcgatatatgttgtgaacttgtcgtgaagtatcgcagagtagtacctaggattctgtttcacgatgattagcgacatattgtgatatattttacgatattcattttattgatttttaacaaaatttcttacaattttgcaaatggctcctaaacttaaacttctagtttctcaacatttcacaggacgtcttacatatcggggtacagataggtttagatatatcaaggccaagtttactcagcttgattggttgatacagtgaaagctagccctttcggacacttcagggaagctagagagttgactttctcttgtgctttggtccacagcctcctcttacagagaatgaaagtagatactacaaaggaagatgaggtttggtttcgtgtagggaagaatgacatgagattcggaaagatagtgtttaaacttattaccggcttacctatgggtagtgcccct

SEQ ID NO: 127577 - DNA, 2110 bp, Cannabis sativa
  modified_base (338)..(352): a, c, t, g, unknown or other
aaatcgcgaccgcaccgcaaagaatttcaaaccacattttttttacagtgtggtgcggtgcgagcggtttgagcggtttcatgaacacccctacttaaaaataaggactcacctggtgcatatatataatactattttgaacattgtgatgtgtaaaagttactaatttgaccatttattttgttaaatgacaaaataaaccttgtattttttaaaattgtacaaataggaccctaaattaattttttgttaaaataacacttaataataatctgatctagaaatgttatgaaaaaacttgttacattttttgtatttgttcgtgttagaaattgtcnnnnnnnnnnnnnnnttaaaaaataaaattgttaaaaaaaagtacatgtaaataccacaaaagaaataaaaaaaatatttaattacatatataaatatattagatggtttattagtgtatttatattgataaataatataattataataatcattaaaaaaaattattacttttttagaaaaaaaaagatttaagttgtattaatttttattctgcataatttttaaaaaaaaaacttacaatttttatataaatattaattgttactttgttttattttaaaatatatgtatatatttttttttcacttttattcttaatgtagttaatttttttataaacaaaaagttagtagaataattatattagaagtagtaatgacacaattgtaataacattagaatatcataattaattattaagtaaaaataacttttgttgaaaatataatatttgtcatcacattaaagagagagtgtaaaaaagaatgtgatagaaaattctcttagcactcttcatttaaattttgtatttacaataaataataactattaatataatattgtgggcaacaaaagccatgatattcttaaaaatataaatgcaaaattaattaatgaaaaatatttattggtatggcaaaactcaattcttttttttctttattggtattgcaaaaattaaaactcaattattaaaaattagtgatatttattataaaattaaatttatacatatatttttaataatatttattaaatctagttaattaaaataattttttatttcctttatgttaatttacaaaaataaagacatcaaacaaatcaaaacaaactatttatttagttgattgatttaaataaaatataatttcaaaataaaatctttctaactaacaataataaaaaaaaaatcacaattttaagatgtggtttacttgaacactataaattataaatttttatatcatgtgaataaaaaaaaaattatatttaagaaaaaaactatagtttagttatgtaaattgaaacatacaaaagaaaaaaaaaaaaaaaaaagtagttgtcatcaccgtattacatttgtaatctctactatattcaaaatcattatcatcatcgtatctcacttataaatgtttaaactcgttgtcattgtatctcacttataatcaacactacattcaaaattattgttaggattattaaaatcaatataagaacaaaaaaatctatttgaactaactatatataaaaatattatgtcatgtgactaaaaaagttacaatatatttacgataaaaactaaattttagctatataaaatgaaacgcaagaaaaaaaattacgtcgttgtcatcaccgtatcatacttgtaattactactatatttaaaatcattatcatcatatctcacttataaatcgttcaaactcattagtattgtatttcacttataattcacgctatattcaaaaatattgttatcactagtattgaagattgattaagtataatcacaatcaatatatggaaaaaaaaaatctatttcagctaactatatgtgaaaaatattataataaataagacttttaccctaactataatattattgtacttctatcaaataaaaagaacatataaactccattagaaaagcatgttaaatagggtgttcattaagtattcgatccaatccaatccgcacgattcaatccaatccaatccgcaaaatgcggatatccgcacttgcgcggattggattggattg

SEQ ID NO: 127578 - DNA, 1189 bp, Cannabis sativa
tttgacatgtaccaaatcatatattttgaatttttaaggttgttaaaaatctctcctgaactaatgagattgttggattgaatgatttttgtccaattatagtaagaaacgtctaacatagatgaaagttcaagtggtatgattttgtacatataaaagtttgagggggcgtgatttagtagatatcaaaatatgaggaacataatttagtaaatacacaattatcaaagtggtaaaattaaatgaaattggacaaaaatctttaaatccaacaatttcaatagtttagtgagaatttttaacggtctaaaaagttgatagagcataatttagtacatatcaaaatttaggggacaaaaatcttaattagcctaataataattgtgcttgttcctttcaatggtgattttatatgggcacgtttgatgcattttataaatgcttgggattggattaaattagcctttttcatgtttggaaaaaatttagatttaagatggattggataatactatccttttattatttttatacctttaggtagggactattttatctcacaaatggattaacatagtcccaaccttctttcctttttttttagaaaaaaaaaatacttttcatatattttaactttcaattataagtttaatataataaattatatataatagtttatatatatttttaaaatgatcaatgatttttttttttagaatatgtaatttaaattaaatttcactataataattctcttaaaatactcattttttaattgaacatgtgaatttaaattcaatattaaatataagaatgataaaattttataaaataaaaaaaatatatatgtcaatatattttatcacatattattttattttcaatattattattttcatttataaaatatgttttaaataaaaatatctaatattgcatattattttttattcaataaaaatataattatattaaaaaaaaaatcaatttatgtttcatttagccctatactgcaccaaacatagcatagtactaagataatccagtccaattcaattcagactaatcatacttaccaaaccagtaataattctcttttttcttttctttttcataaaactttataattgtttggtaatcttgtttttttttttttttttgtctataaaggtttgatcttgagcttcac

SEQ ID NO: 127579 - DNA, 569 bp, Cannabis sativa
ttaattcaatgcattttctttttttacataaaacattattaattctatgtacataaaacaaaaatatattttaaaaaaatgaatctttatctacctaataatatgttgttaatcgagcttaaataatattccaaggagattaggtatcatggtaaaaaattccttggaaatggtcatcattttttggactagccggcaacattatatacacagttccaaatattacaacgtacttaacaatgctaatcagtgcccaacccatactcactctatatatgtatatatatacagagttgttatatatcatcatcattattattattataattacctcaaaaacatcatcatgtcggccgaggaaccatgtcgtacagaagcagcagccgccagagatatttccggtgatagtctccggccatcgagcttcgataaaagtactggaatttaccattcggttcaccaactaggtaaacatcacaaaattcccacaacgcctaatctcgacacagccacatttgtgttatcacaattcccaccccatcacaaggccgagttacgagtcgcactaa

SEQ ID NO: 127580 - DNA, 1606 bp, Cannabis sativa
  modified_base (129)..(137): a, c, t, g, unknown or other
  modified_base (736)..(743): a, c, t, g, unknown or other
gtatattgcagtatgaaacttatgaaacttataaaaagaaacttataaaaaaaataacttataaaaaaaatacagtaaaaaagtaaaaaattccgcctgacagtatatttttgtaaaaaaataacaaannnnnnnnnaccatgtaaatttcccttaaattaggcgaatgaacactacttgaacctaattaaatgggctcacaataaaatataagttggaagggatatacattaattgggttgtgttgtattgtattgggtaaagttgagaataatggagagtattccaattctcgtcaagatcaatatttgcactaaaatacaataaagattctaaaatatattcttttcccatgctaaacatcagctgcaatcacaaagtatatttataatttttagatattttctaatgtaaatagtactttacgaataataattaaaacaataaatacacaccaagaaattatctcatctgtaacgatggtctgggaaccgagagagagaaagacgagagaggactcgaaagagggataaagagaattaggaattttgaaatggaaggaaggattattgaggggagataattttattaggaataattacataagacaccattatttgtaaaataattacatttttacgttcaaagaatatttttttttatatatttttacagttttccaaaaaaaaaaaacacgaaaaaaatataaaatcaacaagaaaactacataaaagtnnnnnnnnaataacaacaaaaaataacatatatataacaaaaaatcaacaacaaattaacaagattacaacataaaaagaccgtataatctgtaaataaaatcaaaaaaatcgtaaaaatatttaaaattcagtgaaaccgtattttggttgtttttatgtttttactaggatcaaatttaataatggaaagtgaaatttatgtttaggaatagtcctaataataaataaaagaatgaatatatatagagaattactaaaatgtattattgatgtataaagaaatgttaaaatatattattgatgtctagcacttttatcggtgttatatactgttattagtgtaattaagtattggttcttatataacttaaaaaaaattaaaaaaatatcactaatcataaaatgttatctataaaaagtgttagatataataagtgctaaataggaaatatgatagaagtgaaattattgattaagatggaaatggagaggcttaataaatataatatttggaaggatgtggcaaaagatgggccgcatgcatgaaggggacaggaatgagtgattggttagattgcttagtatttttatttagtgtgattgtacgttgtcatatccgaatatttatgcactttgtcatgcttttgttattaattaacacaacatacatacaatgcatatactatacgtgacaaaatacaattgttatttccttatctctctctaatcacttcatatataataatgaagaataagagaatcagggccggccctgaaaatatatgggcccaagacaaattaaattttggggccctcaaaaaaatataaaaaaaaattaaaagaagaatgttatgggatttgaacccatg

SEQ ID NO: 127581 - DNA, 791 bp, Cannabis sativa
agggacaaacccctccaaccatgaccacaccgaccccaagaaaaggctggtgagacgtgaccagagaggaagcacaaggaatcaggcggcgatagatcaaaattgaaattcctagagataatttccattgtcattctctctattcacagtgatggtggatgatctcattccatttcacatcttatttttctcattgtcatcttgtgagtttgtctcaatcgtaccgccacttttattagggtttatgccttgaaaaatctataaagatatttctgattatgaataataattaaacattttgatatatgcacaaatgttaaattattaatatttaatattaaataatctatatctatttatctatataaaggagaagtatgaggcggtgacatgacagcctaaagtcactccaaaactgtttttctcttctctccttaattctctcaattttaatattttgttaaaacataaatctatataaattgatattttactattattttaataattttttatataaaaagaataaatttacaaattgatattttactattattttaataatttttctatataatattttaaaaaaagttagaaaaaaataaatttaataaaagatattaaaacttaaatcaaatataattaatcataaatttcatttatatacatacataaaatatcaatcaatacatataaatctatatctatatttttcatttagcatttctcataattaaaatatcacattttttatatatatattttttttaattaagatatttaaaaaataa

SEQ ID NO: 127582 - DNA, 818 bp, Cannabis sativa
gcgagtggttttcacgagatggtgactcttagttgtctcgtcgagagtttcgaaaagatgattgtaattattattttattcctttaaggtaccacgtcaaaagaacccttcgggctacgtgcaggcctgttcactggagagggagccttcttggatgaatcaaaaaggagcgacagattcatcccaacctcgatgtccgaggatgatgctcttgtaggcagagctcgcgagggctcgttgtctacaaatgagatagacaagatggttcaagaattagctgaaccagtgactctagacgtgcgcgatagtgagtccgcagtgtaagcccaaggttatcttatccattcgcaacatgccccagacaccaaagttgaagaaatgggtgaggacttcgagttaccaaaccgtgaaatagaggacgaggaagaaggtaaaggtagtgaggcagatttagttgacaatgcttaactaaacaaacctttctcctgcgaggatctagtctcgcgcgtcaagaaatttgatctctccacatttgcgaggttgaatttagttcacacagctacctccaagcctttgccaacacaatgatctcatattccgttcacgaatcctgcgataatcccaacacaaaacatggtggtttcaattctaattctgcaatgcggggtaacactgcccttctatcatttcgtgaaggacattttttcttgctatgacgtctctcctttccagcttaccctaaacagctaccgcataattctaggattttatgcgatgtatatggagttgttgaacgataaaattttaataataataat

SEQ ID NO: 127583 - DNA, 1650 bp, Cannabis sativa
ggacaaatacttcagagaacccacattactaaacccattaatggacatcaatgattttagagtccaagaacatcttgtaggcccccgtaaaaggaaagcctcagatggtataattgttaaaccagctcctgaaaaaaaagtcgttgatcctgaatgtgattattatactaccaaggccaatatactcagcattgattcaccacctcactcacctggaacaactccacagccaagctctgaaagtcatcatcaacccaatgctattggagaatttaattcgggttcggctgaagctcccagttccagcaagagacggggaaggccacgaaaatgcccaatgtcgacaatcaacaccagctgcactccaaggaagaggggaagaccaccgaaaactaagaatggcctctcggccacacctaaaacattcaaatggagaaagtcggctgtatcaatggctggaggatctacgactgtgcagttacaaaaagatggtaagtttttcgatttaaaagttgatttggataatcgatttgtgctggtcgagaaacaacgaagtctgaaaggagcttgcaccataactgagattgaggaggaattgccaattcagttgacttcggaagttggccaagcggattcggattttcactttggggctatggagacttgcccagaaaagtctccaaagtcgccatgaaaatcttcgcttggaactgtcgcggtctcgggaataccgcgacagttcaccaattggcggccctgatccgccttcataaacccgacgtgctactactttctgaaactcgcttaactctggacaagttcatgagattatgcacaaaaattcggttcaataaataccattatgttgctcctttgggtagatcaggtggtttgggattgtgttggagcgacgatgttaaatgtgaaattgatgtctcctcaaaatatataatctctgctgccattgactttgaaccaaaaggcttcaaatggttgttaatgggaatttatgggccacctcaccgtgaagacaaggaagctttttggatcaacattggggacatggttaatcaatcctctcggcctgttctacttattggagacatgaatggaactctcaaagattctgaatgctttcactacgccaaccgggggaactcttcaagatatgcttttgactttcggaggatggttaatggagtggggctaattgacttgggattccaaggcccttgttatacttgggctaaggatcgaaatagcaataatcatgggggttcaacaaaaagagccagacttgataggggcttagcgtctccggattggcgtgttatgtttcctaacgcgattgtcaagcatctctcttccatgggttctgatcatcggcccatcctcttagactcgaccgggggtgcaaattgtaagggtcgcctattcaagtatgaaaatatgtgggctagggacccgagatgtttttggattgtgaaggaaacttgggcaaaacggcttcatcaaaaccccatgacaaacttttaccaaaaggtgaaagccacaggccgaatgcttcaaaagtggaatttcaggcaatttaggcatgttaaaagacaagtggaggaagcttcatcactactccatgatgctgaaattaat

SEQ ID NO: 127584 - DNA, 1322 bp, Cannabis sativa
gccaaaaaaggactttacagaattaaattttatttggaagtaaatttagttaaagtataaaaaaatgggtattctttaacttttctctttaaattggaatacaattgtaaatagtgagctaaatatatcataaatttatttttttttttatcaaatttaatataaattttacatcttacattggagatagtctcattaaaaagtatctctaatgcaaggaaaatgtggccaatatccaacttttaaataagaactattatggtggttcgatctattattagaatgcttttcgtcaaaaaaaaaaaaaaaaaaaattattatggtcatataaatatttttggggaacgataactgaaaatcttttctatgcaagccttcattattgtcacgtttacttgtggtattgaatctatccatgaatcctttaatatgtagagtgccataatatatctacctttcaaattgaatgaggaatatgttagttttgactttgtggttggcttatttatgttataacttaaaaaggaactaaagcacaaagaacaacatatttagtactagattactagctagctaccttatcaagtagatcgtagctaagatttaatgaataaaccaaagttttgtactcaaaaattaagagctaagagtattttcaaggagcacactaaatttagtgttacactatcattaaatttagtgtaaaaaactatttttactccaaccaaaacactaaaaattacattaaaaaaattctttattattatattaaatttttaataaactaaaaaattaatattatattaattaactaaaatcaatacaattattatatctaaataataatttaaatacatactgtaaaattggtaaaattattcgataaaaatataaaagaaatgtaataattttttttacttatcataattgcaaataaaaataatttatggaattcacatttaaatttacacacaataaattaaaagatagtttacaatgcacccctccaaataaaagagtcacacgtacaacagacagtttgaattttatttttggcgttggtggtttgagaataaaattgtattggttttgtttagaataggtggatatgtggttaatagtttgttgtggtaatatagtgaagtagtgatattgatgagtagttgtcgatttagtatatgaaattagtttgggttagaaaagagaattgtaggtaaagtagtaaactcttattgatagtttgaaactttagcttttggatgttggttacaattttgaacccttgatggggtatttatagttactcaccccttacactttat

SEQ ID NO: 127585 - DNA, 741 bp, Cannabis sativa
tttgcttagggtattatttgattgttagagtttataattttaactcacctccatttttgttattttttatatatgatttctctcccttatctgttgttttattattttttttttataatttttattgtatttttatctctttaattttatttgtttctattttttctcgagttttagtaactgatactctttattatttttgctttgtatgcttaaatcaactctgtttgttgaacaagtaaataaaaaattaaccaaaatggagaatgaagttaaaagtttggtcattaagtattaatatgaatttatatgttcgaaactgaaatttaaaattaatatcatttttaaagtttaattattagacattgtgtatttttcattacattgttttggaaactttaaaaacgatacaaactttatatgttcgaaactagttttttaagttagtaatatttttagattataactttttgaattgtatttttttcattatattgttgatgaaaattggtttttttttctgctacttttaaaacaataattagtttattttaatgttgaagaactgatttttgaagttggtaatgttttaagattataattttttgtattatgttattgatgaagctagttttttttttaatatttttcataaaataattagtttcttttgatgttgatgttagaccgaaattaaatacagtaaaattagaacgaattaccgatagaataatctggctg

SEQ ID NO: 127586 - DNA, 1761 bp, Cannabis sativa
tttaattaaaccacactttttctaaactaatagattagtatgaaataagtttgtaaaagcacacacatggcatccctgagggtcagggcgttacaagagcagtgtgatgccgaatttcaaaagagaagctgtgataattatttattgtgtgaaggaacaaagagaagaaaaatatgatgataaataataatggcagtagactaaggagctatataatttttttacgttcattttagttttttatttgactttttatttaatgaaaatcctattcttacgttgatgtaggtgatggaatatttgagttccacctttttttaaggagtgaatattacaccctttcagggtagttagaataccaccgtataagtattaatgggtttaaaaaatttaaaacttcataacaaacagggtaatatttaagattacctttgccctcctaatattactctattccaaacacccatttagttctttgcctgcattagatattttacatgtagtaaccatctatattttaaaattaggtgtataaaacatgatattaaaagaagaatatcttttattttgctaaaaaaagtaaaacaacagaatttagcatgtatagacaaattgtagaagatatatgtcaatgtacattaaaacattagctaaacaactcaagccatctttctttgttggtactgtctagttcataaataaaatttgtaacaatacaatttctaatttatcaaaaaaagagagaagaaataataaataattaataaaaagaatcttaatgtatgaaaaaaaaaacattaaattcatcttgtcacagtaaaaattattttttaattttttttaacaaaaaaaagtaaaattattagtcacaaagtaaaaaaataaattaaaaaaaaaattataaaaaatttaatgataaaaaataaaactcttaccaagagtatgtttagtattgtaatggtcttcaaggagcttgggatcaccaaagaaaacatcagataaaatggattgagcacatgattcaaactttatataataagaatttaaaataaatacataatgaatatatattattgcaagtcatgattatatattaaaatctctcataataaaaactaaagatatgtgtatgttatgtgtatctttttgagaaaaaaaaagtactaaaaataattatatagaaaggaaatataataaagtttagaaagtatcacatgagaatgagaaagaaaaaatttcaataaccttttaattacttttcatgaatgtctataattaaaaaaataactttttctacattaaataattcatgctaatgagcaaatcatgaataatttgaaattatcgatgacagcaaagttatcgacataaaaaaaaattatgtctaaataattatggagaaatattttaatgagtgagaaaaaaatatctatctatctatatttatatataaatagaaagaaaaaacaaagaaatagagtgaatattgacaataccaattaaaaattgaggtcttaatgatatgaacattaaaaatactattgttgaataaaacattaacatagcatgctctctccactttataatgctaatcctttgatcaaattatgaataaaaatcaaccaaagcatagcaaaacatcatcatcattatctgttagacatttaaatgtataatataaaatatatgtatgtgtatataacatgcggaataaataaacatatacactatatgaatataaggatcgaaatacctccagcc

SEQ ID NO: 127587 - DNA, 977 bp, Cannabis sativa
tacgatgcctgtactgctgaactgacacaatggttgtgccactatgatagcgtcaattaatactttttggggtgaatatcactcttaacaaatacagtacatgtactgccgaaccgacacaatagttgtgctgctatgaaatcacccagaacatatacaatcacaaacacaacatgtatataaaatacattctatgctagtcttacctcatttccaaattcaagtgagttggccgacccgaacgaaaaatctcgtgctggatggatgctctagtcacatccacgtaaatgggtaattgacatgtcaaaaccctaatttaggaaacctaaactccaactaagggttctgctattggtaaccactataacaataccctaagcatcaagaaattaaccaaccaagactctgaaaacaacacgaatcgacaaaatgggctgctcgggaaacctgcccctgaactggttaaccgattttacaagacctggcaaactggttaaccggtttgcactaggtttccccaagcaatccaaagcttgcccaaaatgtgtccaaactttccaaaatacctaaaacaatatccaacaatagattctaagcaagaaaactcagaaatacacacaaaatcccaacatgccattaatgactcaagtttgagtttttaaactcaaacttaatcattcactacaaaactcatcaacattagcaccaaggactcaatcttagctcaaattgaacttagaaaccaaaccacaaaccaatctaaccactataactcaaaattacaaaaacataatcaactaaaagataaagagttcacaagatataggcttctagggcatacctcaacttgaatcaccttgaatccctattgaattctagaaatttgaaggctggctgggttgattcctggttgtgtgagagccgagcaagtgagagggaaaataaatgaagtttttctagctttttttttttttttt

SEQ ID NO: 127588 - DNA, 790 bp, Cannabis sativa
atattctgttaagtgcacaacaaaaactgttaaataggcattttatatattaggtaagatatatatataatataacaatcaccataatgatatacagaaactattaatcaattaataattaatcaaactaactaattacaactgtcaagatacttagaattcgtacactcaataaaacatcattataaatgtcatttaataggataacctaattgtacagtgattaattaatgatataataattagactatatgtgaaagcaaattaattcatttaaaatatatatattggaataaatcaaaataaattgtcctatttttaattaagtttttaattaagggcattagtggtgactaatatcgccatcgctatttataaaattaaattttacatattttattcatttattttgtttataaatattttattaataatgattatatatagttaaaagaaaattctcattaattatttataggatgtcattttataatagtattagatattattggtgcctaataataatatcttttagtacgtattagagaaatgctaaagagaccaaatatctacaatcaaattattattgaatattatttttgaaattaaaggatgttttcacgttgcggaaatattgtataatgttgcggcaatatgaaattaattgttttaaaattataaaaagaaataataaaaaagtctgtaaaaatataagataaatgcaatttaaatactttatataaattttcctattttaatttaataatacagtaatttgcggcataaatac

SEQ ID NO: 127589 - DNA, 929 bp, Cannabis sativa
  modified_base (881)..(882): a, c, t, g, unknown or other
accttaacttcaagtctttgttgtctgttgttcaagatattcagaaaaaaattattgtcatttacgaccgcccttctattgaggtatatttttttatatagttttggcttaattttttttttaaattattgttatgttagggttggtttctttcatgttttgttcagttgctttacaattgttaaataggtaaagacatctaacgatattgatgaccctagttttgatgatgatgatgaaaaaggattaccagaatcacaaaatattaaaaatgagtctgatgatggtgatgagtcgggtgaagattgtggtgatggttctgatgatgatgataagtttgatggaaaggttggttctaatgcttctattattggtgaggaacaaggtgatgttgttgcagggagtgaaggcgattagtccaaggatgttgataatgtcaagcgcaaagaagttgatttaaagggagatgattttttcaagggcttaaaccaggttgagatttatgaagatcaagttgttttggcttctttgaaggttattggaaaaatcaaggtatgttgcttttttatatttttaattttttgagtttgggtttccgagtagttgattagtagttgcaatagagttttattctagtttttaatctgtcagttttattacttgttattttcttttcagcaggttcccatccatcttcccgattttaaagtggaaaaattagttgccaatatttctatagaacaagaggatgattctcttgcttgtacttctcttcttgacaagagaaagagtacactgacattgaaatctctctttgttgattttgattcgtctgagtcgaagacttctccaatggagtttatgttgggttttgtgccctnnataaaatccatttcaatataatcggatttactaattaataaagatca

SEQ ID NO: 127590 - DNA, 1251 bp, Cannabis sativa
tatttaatacaatactatatttaatattgatttgtactaataggttatgtagaattaattataaattctttacaataaactctaccccaaccctaaccaaggcttggattcggaccctggagttggacccggacagagaccgggacctgaatttggacccagaccttggacttaaacccaaaccaaaactggaacccgaacacgaacttgaacactggacttgaattgggacatagactcgggcctgaactcgtgtttgggattcagggctaggttcaggttagggtcggggtgcaggtttgggttcaaggctaggtctgggttagggtcggggtgcaggttcgggttcgggttcaagtttggggtccaatttgagttcgagtcctggtccggggttcgaggtcaaatctcgagtttgagtctaggtctgggattagggttcgcgtctgggtccggggtctaggtctcggtcaggttcggggtctagggtccaggtctggggtctggggttcggttagggtcttggtttggggtttaggttcgagtttggggtttgggttttgggttcgagtctagggtccaaggtttggtctgggtcctggtttggggtatgggtccaggttttgggtctgggatctaaggtttgggtttgtgtcaaagtccggggtctgggtttgggtctgagtccttagtttggggctggggtcggggctgaggttgaccctagactctttgtaaaagtttataatacaagctaatacaggtcgtttgtgatgtattaaataatacgactcatattgtattaaaatttatggtattaataattaatacaatacaatattttatccaaacatgatgttatttattatttaatacaatacgatacctatataccctaccacacgagcacaaaatgttatataagatggatgagctactcttcttattgtccattagttataagattaaacctcatatacttttatcttaaattctaaaatactaaaagacacgagtaatagggtgaacaacggtcggtttggtcggttttttacacacaaaaaaattcgaaattcggttttcgattttcatggttataatccgaaaaccgaccgaccattatacaaatgtaaaaaaaccgactgttttaatctacagttaagtcggtttaaacagaccaaaacgaacttcattttttttttttaaaaaataagtttttaaattttttataattatttaaaaactaaaaaa

SEQ ID NO: 127591 - DNA, 1048 bp, Cannabis sativa
aatagagaggaggaagaagagcaaagggtctaggggctagttgcgttggtttctctctctctctctcaatggtattaagcgtcattttttaaatctcgcatatacattaggcgagtgttaccaacagacgcaaattgtaaaacagttttttaatttttttattttattgcgtctgtttgtttttttaccgtcgtttataaatagacgcaaatcatatattattagtgtcggttataaatagatagttttaattattgggtactattcacgtcggtcaacgctatgaatagtagcgttgatcgacgtaaatagtgtaatttgtagtagtgtcctttggaattaattgaaaagccatatggactatggattaaagctcaacctcagaggaagaacaagctgatcggagaaaggtggcttcgaacgggcacaactgctgactctcaactttttgatggtggtgagaatgcaattaatgttcctgtcattacccccacgagaaatcagggattgaaggaaaaaacgattgttgtaggagctgactttgtgatggattgcatggatcaggggatcggtttaaacaaagaaagtgcctttgatcaagggattgatgtattaaatgctcataacgtgataattgaagataatttccaatctgaatctatgactgttgttgattctaaacgaagaaggacatgacagaatggaaaataagtaatggaggaagatgaggtggaagtaattaatcataattttgctggaccaaaaaatggggctattgtgggttctggttcccaggcccaccaaggattacgagtgttcttagttagaattgctgtgggcttgggaaccctcgggccttacaattcctgcaggaccttgttgtccaaaagaggcccaattttgtatttatgtgtgagactttatgcaaaaaagagaaggttgatagacttcgtgtctgttgcccctgattttgcccaaaatacgtggaccaaccggacgatgacaagtggatggaaaggggttaacatttaaataaaacagccaagtc

SEQ ID NO: 127592 - DNA, 729 bp, Cannabis sativa
ggtgtaaggacccaatggaggcttgaagcggggatgttacactcgtcttcatgtctctatccttgaccagagtatatacgtagggtattttaggatttgattggtttaagatttgaaaataattttatgtttttaaaaacttaaaatgtgaggatccacctaaaaaatacttgattgttagtgtattttcaaaaactaaatcaaaaatataattttaagttttaggctacaaaaataaaaacaacaattttatgtttttaaaattttcaaattattgaatccaaatttttttcaaatattcttttacttttttattttgagattctcgaccaatcataagttacttttttaaaactcaaaaatattaaatcacatcacaaccaattatattctttgaaataattcatcacatttaaaatttaaatttttgtttccaaacctctctttttaaaacacaattgctaaatagtcccctaagttttaaggaacatgataagtgtcgacttttatggacattatggacacttcactgacccactcactggagaagttgcggcctgtctttttgccatggagacggcagtctctttgcatcctccttttgtgttggtggagagtgattcagagattgttatcaagaacctaaaagggatgactctatttgggggattgagaactatgtgcgacattgcaagttcctctctaattttatgactaattgtaattttt

SEQ ID NO: 127593 - DNA, 925 bp, Cannabis sativa
cataaaatataatatgaatgggttataattttgaaaccgatttaattgggttggcccattaaaatactctcaacccggccaacccaacccatgatcagccctaggttgagttgagtttgagtttatgaacccaaacttaactcaaaaatggcacttttgattttaaggctttaatgatgcattttttcttgaattatgttcatatttgtgttattaggaattctagaaggttttgtgaagtttgggttggaattgagttaaagaactcgagttttagttttttttgctaggaaacggttaactaggaaatggttaaccatttcctgttgaaacagcaaaccgtttagcctagcaggacccccaataaacgattcgtcgtttagggatctggtttactggttgggtgtttttcgagtgcctagatttttgtatttcttcgatatttagaatatttccacgatatttatcaatagaaaaacttctgaatctcaatttaagttcctaaaagtgagttagcaggtcgcttacctattttgcattattgtgacttagagtcccagaattattgagcaatacttccactcggattgtttggtatacctgattacggaagtgaggtaagattagcataaaggatgcacatatatatacatgttgtatgcatgcattatgaaatataagatagttctaccaacattagtacgttagaggaactaagtgcatgtggtatagagactcaagctagttctaccaacactagtacgttattggtactgagtgcatgtggtatagtgactcgaacaataattacacaattttgccaggagcccaaaaaaaaattttgcccttttaaaattacacaatttttttgctgattttgaaaaataccattttttttctaaataagggcccaaaaaataatttt

SEQ ID NO: 127594 - DNA, 1014 bp, Cannabis sativa
  modified_base (943)..(946): a, c, t, g, unknown or other
aatcttttcccaacgtcccaacactcatttaaataatataattgaacattgtagtagtttttaaaagtaaaaaaagttattccattgattctataatctctatatgtaatatcaatttaattatatataatcaaaagtgatgcatagattacaattttcttaaaaatttttgtaacatttcttatgtcatgtgtattattaaactatataatttaattactaaatacattatatatattaatcttgtattaatatataatatatcacattattttaatcttattataatattaatttatttgaataacgaataatataacaaattctcccactaaattaaaatttatgacacttcattgtaacaattttatttaatcaatcaaaatatatcatatatctctcactttgattgaataaataaactcttttcataaagacttttctcaagttcataaagtaaagtgtcttttaacttgaactttactatagtgtaatctctataaattttattaaaaatttggttgacaaaatattgaaccaacttttctttataataaaatagtgatgatacacacacatttgttagactcacttaagacctcaagctcaaagtctcactttgcaccattaatgaccttgtgcacatttcattcattgagcttttttaaaaaaatatactctccaattcatcacctagggtggcaccacccttaggtcaatataactaggtagaattattacaatatttgttactaaaatacttgtttcccaaactaaattctattaaagattttataccattttataatttgagataagttaaatgatgttctatcttaaaattaattgataatgagaggagtagcccaatcatcttatatatattatattatctttctttattaacaatatacacttcgaaaaatcttacttttagtcacannnnaacttgtgactaaaagtgaaaaaattgtgactaattataaatcttgattcctatgttgtgactaaaag

SEQ ID NO: 127595 - DNA, 1036 bp, Cannabis sativa
aaaaaatatattatttttgaatagaaaattattttaaaaaaaagttatccatgaatttctcataaacacaagaattcagttatataggtacactttatatagaatagatattgtatagatagttagatatacttgagatgtaggcttactaaatgaaacaactataatattagtgaccaactctcaaaactgtggtggtccacttatgattcaattttttaaaatttttatttgttacacaaataaaaaatatatatatagagtcatgacataacatgtgtcaattacaaaccattcacaatgccaaaagttgaaacataaacatactttctatactatatattatgaatcacatattcacagttcaaaaattatacattctactattgtgtacaaagaaatttcatacataaaattatacattcagtgggtgggagtagcgagagattgagatgtagatggaaaaaaaatgatagaagagaaaaataatagcctttagttttaaatagtagattattattaaatgataaaagaatacattagaatacccaataatagaaaaataagtttgaaattattcatatttttattttttttagttattaataattataaatagttaaaaacgtaggctctaatttttaggtatatttatttattttattatttttgaataaaattatgtttatttttaaaataaaaaaaataagaaaaatattaaaaataaataaattacatagcttttaatttttaatttttaaatatatctaggtagataaattaaaaaataaaattaataattaattaatggtatttatcatgaatattctgttgaattaatatttcttttccgttagtttttaaaaaaatttatgttttttttttgttaaaatattagaaaataggagaaaaaagtttattgttttaataaaaaaattaaaagatgatggaattaaggggagaatagataagaacattgaaaacaattttaaaccgccacgtcaccgttttatacttctcatttatagatatatat

SEQ ID NO: 127596 - DNA, 514 bp, Cannabis sativa
tttctttgatagcaccaattggaaacataaaaaataataaaaaatccaaaatttttgctttccttggtttgaaaaggaaatgtaattatgaagatgattcttatcaatttaacaaaaatgtgacattaaaagattaaatgaagtaggtcgaaaaattagtacaaaacttttgattttttttcaaactttttttatttgtagattttaagatttttattaatatggtattttctcaatgtataatatcacacacaaattttaagattccaactcaaaattttgattttatttaataaaatattaattgttatttaaggaaaaaaaaagtgacaattattttcactgcaaacaaaacatacataattatataatcacgcatagataaaaatttctaatctatactttcatagcaaagtatttcatgtactatttcatgtacaaataacgaggattaggctattactggactactcggggctgaacctctatcaaattcttgtgtcttattattgct

SEQ ID NO: 127597 - DNA, 862 bp, Cannabis sativa
taaaattgaaaaatgtaaaagttaaaaaagtttaaaaaaccgtgtatggataaaaatgtaaaaaaggtgtcaattttgacatgaggtgtaaaaatctcaattgatattgactttttctctccaggttaatataatgccttaatcataacttttggtccaagtaattgatgctgtcgttgtattaagatatttaataattattatgagatggttggttttgttatattattatgaaaatataatatatattaaaatatcaagatgatatattatatatttatatataatatgttagttcgtaaattatataatatatagtttaatgatatatcttaaagattattatatataattaaatgagttattattataaaattaatagtatagttagagaaatgtttggctcggagaggagttataaaaactcaatattgactttttttagaaactgttattatatgattgataaaatattattttatggttattctccttcgtctagaacaaattttgaaataatgtctatatacatacatgaatttattgaacatattttcaatttttttgttcaacgtttttatcttgataaatacaaattaaagtactgataacaatcatgtggtgaagggattttaattttcatatgtgatccctcaaacactatataaataaagatctttggttcatttgtgaagacaactagtttctatcaaaagaacacattactagaaatacgataaatccaaaaagttattaccattattctcttttccctaaggtggtgtttggttcacatgaatgagcattggaatggacttgccattccttaagaaagctcaatcaagtgtttggtttctttatt

SEQ ID NO: 127598 - DNA, 1517 bp, Cannabis sativa
gcatcccttagcgatttcttcagggcctctgcctctgcatttcccttggtgtgttcccccaaggcatagttgtacttggcaattcaaaactgaaccctttcctcatcatgatgaacgagagtcaagataatacccggaagtgcaggatactcatccacccctaaaggaatccccgaattagcgctgggggctggagtatccaccctccttggtttcttaacaggcgtcgtgtccaccatcttgcctttacgtttgcggtccaggggagggatgatctctccttcttcttcttcctcttcctcgttgattaggatgacttggtcctcgggtagtccagcagaagatcttcctggagtcaccaccacatcgcgtggctcgggcaggccagcttcaggtctttatgtacaagcaagggcgtccatgaggtcctctattggcttcgcttcttaaagataaacaaaggagtcagagcattgccaaaaaaccatgcatgcaagaataacataatgaaactaatcctaccctgatgatctaattctaccctagcaaatgtatatattaaaagactggtgtcatcgtcccctagaaagctatctaaggggagaaaccaactggaagtgaggtatgaagaatggtccaagaggattggtacgggaggaccagaacccatccgggactgacccaagaaatgactaaggttggaaaaataaaaacttttggcattataaccccatcgttaatggggcatccgaaacttatgcaaccgaccgtcaaattccattggccttaggcccgcataatcttgaacaaaaggaatgtgatgaataatcaatggagacttataagttccaaaagtgctggcatcaagagccccagagttgggaacaaggaaaggaaaattagggtggatgggcacctgttctttcccagcctcctcccggaggatcctccttgaagcagcctaagcgttgatataggccaactcggtgttccttcttgaatttatacttcttgtatttgtcttcgaaggaggagatgatgtcctcttggagcgccttctcggtctcagggttgcgaatatgagggcagagaatcttggacaacttgaagttgtccactgactggccttccgaaatcaacttggccctcctacagttaacggtagtgaccaagtccccgacattcaactcatccttattgtaattagcaaaaactttcgcgtggtgtaggaagaattgagtgggagcggtatggtgcatgggaggaatcctgacccattcagtaagcaactccggacgctcgacagctttgaaaccggaggagaagaagaatcggtgacggtactccttcacgtccttctggaagttaaaaggcatcggaccctcagtggcagggtgtataatcgagaaaaatatttagcacaagcaaaatacgaagagactgcctcagaagtatcagaagtcgcaaaggaatgttaagttaataatatgtctgaataataagacctattttttgtc

SEQ ID NO: 127599 - DNA, 688 bp, Cannabis sativa
gtttttgtgaaataatccctattgcaattacactactacaagatggtacttcacgagtggttatcaataattctcgatagcagttattaaattaaaatatttaaaatcatatttatagtgtgtagttattgtaatagttttctatctacttctaataacatcatttaaatgtgggataatttagtttaagatacctggataattatgtaaattattgatatgtttgataggaatagtaaaacacctactctatttaagttgggtacaagtaagtctagtttcatcaccatttcattaatacaaagtagtacttgtctatatattttgtaagaagatagtgaaataatctaagagagaatggaaggcaaaaatgttattatgagtgttctcttattgagccttgctgtgggacaacttcaagttgaggcaaagagttgttgcccaagcaccactgctagaaatatctataatacctgtcgtttcgggggtggctctagggagacttgtgcatcaatcagtggctgcagaatcattactgggaatacttgtcccggtggttggacaaacgacaatctcgaaaacactggtaattttttttatttaagcgtttatatattacagtgcataacttgggacgaaaacactaataattaagtgtatgtttgacatcataactaaaaaactgttt

SEQ ID NO: 127600 - DNA, 2021 bp, Cannabis sativa
tttgtttttttagtgctctatggcagttaatgtcccatatggattttaccggtttttttcatctttttcccagaaaatagcagtttttcttcagttatttatgcagttattgtttttttaactgaattttcttctttctgggttatttccttggtagtgtccttcccctattcttctctttttcaacttctaatcagtgttcctttggttcaccatggatcggctcactaataaaatgaaggagaaaattacattaactgaagatgaggaatcagtgttcgaatttcatgattctgaagctatttcaccctcagttactattgatacggtgctgtatgccaagatttttacaaagaagaaagtttagttgtccactttgcaaaatcaaatgtctgagcattgggatgggagatttcctgtaaaaatttctgaatcttctgatatgtttatgctctctttcggatgtgagggggataaaatccgagtcctgaatcgtgaacttttccacttccaaaaccaccgccttgttctacatacacctgaaattggaaaaaattttacttctgaagatcttaaatttacacatttttgggtacaagtcttccgccttccttttttgagtaaaactaaatctttggcttttgctcttggaaatattgttggcgagtacattgatgtttttgaagattccctgaatgaaggttgggggccgtttctgcgtctccgagttaaaattgatgtcaccaaacctctaaagagaggacgaatgatctctcttactcatgttaaagataagttctgggttgaatttcgatacgagcggttgccggaatattgtatggaatgtgggagaattggtcacccatataacaaatgccagatatatcttgagcaattggataatggagaagaacctgcactagagtatcagtcgtacatcaaaggatctcctctgccaacttcaagttgcgatcgatatagaacggatttttccaaaggggatgcatggccacttttgactcagcttgccaagaaaagtctcactgctgcaattcctaatctttagttacgtggtctgcctcagccacgacaatttcttggatggagaggtcctcccaacacactgttaacaatgaagttaatgacaacaatggggcacatgttctagtcattaatgttgctccaccacatgttactttaccatcacactccatttattttaagcctcccattcttaatcatcacactaccctaacctcactttcctctgcttagaagattgatcgtgtgaaacccacactctcatttgatgatcctgatattaattacactaatctatcatcaatttacatgcctgcagtttcagcatctttgtgtaataatacttttgcgacttaccctccaactactcaatcagtttcaatcactaataagcacaattgggttaacacttcaactgtttttacaaatgctcatgcttctccatctattcccacggctcatgggaacacatttgggaaagaaaactctaacccaaatctttaaactaagagacaaagtgatggtctatcgctgaggcaaacactaaaaagatgtagagggaatacttccaatgacttcacttcaactttgtcaattgaagaagatgaacaacaacaagtttccacagacttcagggattctgggggtgtagcagacaattcagcggtgaccggtttacagtcccgccaacagccatgaaaattgttagttggaacgctcgtggtttggggaacccaagtgctgtccagaaactctgttttcttgtcaaggagcaaacccccgctgtttatttgtaatgaaaactaagttagcttgtaattctatttcccgttttcgcaatcttttacattttaataatggtctagaagttcctagaattggtcttagtggtggtttaatgttgttttggaattgtaataccctagagttatgaatggattagcaaaatcctaattagataattatgaataagtgaggaa

SEQ ID NO: 127601 - DNA, 1061 bp, Cannabis sativa
tatggtctctacgcagttaatgataacatatggtatcaattcacagagtacaaattggattcctataaatttcattccaatggcgcaatgtaaagctcaagctcttttttttccccttactttttagtatttttaaattgttaattattctgatattgcatgggcccagcgtgtataccacttacttgtctttattattatggtaaattatgtaatacctcatatacttttactttttgagaaattgcataccgcaacacatcttagccacagcttagccattggattccaaaaactgaacttttgctaagatatgaccttaaccaaaaggtaaggccaatataacaataaaattcggtgatctattcattttttgtgccattgtactttatttttatgtgtaaattcatgttctttttctcttcaataaattgaagagtttcagtagagcatatcacggcttggtaggctgggctgggagtgaccgagaagaagaagtagaaagaaaaaaaaaatagaaaagataaaaaaaataaaattaattaattagttttggaaattaattattcatttatatttattttaaattgaaattataatttggactactaaattatcaacacgtgtcatttttgggagcaacaaacagagcaattaaattggatacctactcacaaacgagaatcttgagcatgagactattacgacaatttttaaagattgaaaacttatttgcatcaagtaaattttttgaggacttatactgcaatttaatattaacatgtgatatttttggagcaactaatagatctcttaaaatgaagataaagaacttacaagaatctcgagcttgggaactattacggctatttttcaagattaaggacttacctgtatcaaagttaactttttgagaatttaactgcaattttaatacacaaagaatttatttatctttacataaatgaattattacatagaaaatagaaattgacattttatttacaaacatacttctataaggaaaagacaatatttatactttttatgtgattttaatt

SEQ ID NO: 127602 - DNA, 863 bp, Cannabis sativa
gttggcaattccagagattagtcttgtcgtttccaagacacgaagacaatccctataatcgtgggattgagtcagagaataaaggcaatacgccttagtttctcattatttgtattataattataaaattaatgtagtttcctattttatttattatagattaagagaaatcatccttcatgtaataagctcctataaatagtggcataaattcataattaagggggacgaaagtttagttcaggataacactcaagagagaaaaacgatctagtaaagaattactcatagattaattgtaatagctttaaagaggaagaccacttcattcttgttctcaagtcaatacaacaaataccattctcacagggttcgaacctctataaattctgatgttctttttacttatttttttttcgctttctattatttattttatctaattgctttatcttgactcaatgtcgttggctataagcaaggttaacaaaaattattagattaactttcatagaaattttaataagtttagaagtagttaaggataagtagtatatattttctataatataaaagttataaatattgtattgtaaaatgtctagaagttttttttttaaagtttttttaaagtgaaaaggttgctaaaatttgagaacttttatgaaaaaaaatgtataaaaattgatatttttcaaaaaaaaaaaaaagaaaaaaaaaggcctaatccaacctaaaatccagttccaaaccaccagcacccgacccaccaagcccgaaacccaaaagcccggtcacacaaacaggcgagtttgggctatagcttttagggattatttcataaatacacaaaaataataaaa

SEQ ID NO: 127603 - DNA, 873 bp, Cannabis sativa
  modified_base (423)..(429): a, c, t, g, unknown or other
ctctaaatttttgaaaaattctgaatagtttacagtgccgaaaatagagttttagatatttcatgtgtgttcaaaaaactttaaacgtattttcggcactgtaaactattcgaaaattttcaaaaatttatagggatggtgttgtaagcataacgaacaccaccatgaaaaaatttttgaaaaaaaaaatattccgacatgtgttttttagcgtgaaggttgactaagttgacagtagcactcctgatcttaatattatattgtcttttgtcacataaaaaaattcattatttattttttcatgttttttttttagaatatgaaaaatttttgaaaaatttttgatcatgtacttcaataaaacggacatgaataaagagaaggaacgtccatgatatataatttaatttaatttatttattnnnnnnnttatttatttatttattttcttctgaaagaaggtggaatttttattcaacttaaaaagcaatcatcccttacaatagaaaacaagtttagctatgcaatgagcagtcctatttgcagatcgtttaacaaaagaaataaagacatgtaattcagaaagtaacaaacgacaatcttgaataagtaatccaaatgagatggcatttgaactgaaccattaataacctgaacaactactaatgagtcagtttcaatttatttatttattttaattgctcgttctaatctactcccatcacgttctcacctaattttatttatttgattatttttaaaatacccacctattatattcactacaaaattttttacttatagtcacaataaaatttgtcgctaaaagtaaaaaagttgtgactaatcataaattatcatttctatgttgtg

SEQ ID NO: 127604 - DNA, 1008 bp, Cannabis sativa
  modified_base (973)..(978): a, c, t, g, unknown or other
agggagagggagagggagagggattactagtcaaaagatacctatgacttggaatctccatcttgtaatgtcgaatgattggaatctccatcttgtaatgtcgaatgattgggagggagggattaccagtcaaaacatacctatgacttggaatctccatcttgtaatgtcgaatgattggaatctccatcttgtagtgtcgaatgattggaatctccatcttgtaatgtcgaatgattgattactagtggaatggagctatcatttgaggagtagctcaacggggacttagcctgaatttttgggtgaacctcgagaatgttttttggtgttttcttatcccttctttcagtcttttattatgtttgtgtttggatatcagatcgatctagatctagttttattcatctgtttgatttgtgtttcttgggagatttgtgtttctttgaataaggggttttgttttagggtggagcggagtcgttttgactcattgacttgttgaagtcaaaggaaataaaatggccagtcttgacctcggcaaaattgataaagtgtattgtatttttttttatttaagcgtttatatattataaccatattttacttgggactcgaactcaggacctccaacacacacacccacttatggtcacttgagctagcctcaagttgttgataaagtgtattgttagtgtaagataaatttaacatttaaaatccctacaatattttttaagacaaaaaaaataatttggataatatataggattacaactttcatttttatatgtcctatctcaaatttctattggactaattttacaaactgagttaactacactttgaaatataaagtggtgtcaggtgaaactatataattgggagatataattgcactaaatacatgtcaagaagctttccatagaaattattataataaaagtatttataactgttgaccgaggttttnnnnnnccaataaaatattataagattatagagctg

SEQ ID NO: 127605 - DNA, 615 bp, Cannabis sativa
agttgttgactcacagaagtagatccttgaagactttcttgtcttttcaggaagagtcttcagaaaaactagcctttttttagaaagaagttttaaatgactagttgttcctcctaagaaagagtttcgaatagtcaacttcaactgactctgtcctattcaggaagctctgcgagtgctttgatctgtgattctaaaacctttcatacacgctcccagaagcacctatacttaagctgacgtgaagatctcgctcataatagagcttgttaagtttgttaagtcctaactagcttaacaatttaatttctcacaaccaccgattttaggatattgatctgaaacctataataataccaccaatatttaaattataattacaaaactaaattaaagtatcgttagtttataaaaattaatattatttacactgcaaactataaaataaaactacaagtcaacaacgttattttcgtcattgtcatcattgggatgagcaacctgtgaagaagaaccagtgccaggagaccgaaatggtagaatcgatggtatcaaaggcattgaggcatgttgaatcctggaacggcgctggccatatttatcattcgttgctaa

SEQ ID NO: 127606 - DNA, 1000 bp, Cannabis sativa
caatacaaacaatcaagcaaagagcaaaacagcccttaaccgaagcaaacaaacagtaaattacatttgtataatctgtaaaaacctgctatctactctattcaatcttctattttttacattttgaactctatacctcactatacctttaatatcagtaacaatgcgagtattcttatgcgaatatccctcaaaaacacacctattgtgattaatccaaagataatagcaggtagcggcaacagctgctacactgattttttttcacccaattgtccatgttcaaagacagccagcttatccaacctttaaaatctgaaggccacatgcgattaccaagccaatcgaacaccaactcaaccactatgggaaagacatcaagagaaaaacaagtgttcatgagtttcaatacaatcctcacaaactgggcgcttgttcgactccaacagaatgtgcattctagccatattattctttgtcaacagatgggagttaaccacttgccaaagaacaaatttgtgctttggtaagttaagagaactccctatagttttatggcaatgaaaattgatttcgatcaagcatgctgttatataactgaccatttcggaatttacttgtattcccagctgcctttatgtcatcctccgtgaatctcttcctcaagtgacaaagcttttgccaataccaacttatgtcaggttttagatcatacaaccagtaagactcttgttttaggtaaatggtattgatccatttaacccataacaagtcttttttaatagaaagagcccaaacaaacttggctaagtttacctgattccatttagcaccatccttgaccccaaacctccataagctttgggcaagaagattttatcccaaaaagcaacatggtctttgcttctgttaccatttaaatgttgggaatattttaccaggatttagatttactaacgagtatgttgaatcaacatcctaaatataaatatctctaaaa

SEQ ID NO: 127607 - DNA, 1052 bp, Cannabis sativa
  modified_base (266)..(268): a, c, t, g, unknown or other
  modified_base (962)..(963): a, c, t, g, unknown or other
tatattattatatagtatgcatgttttgtctattttcaggtgtgttctgacaagttggtgcggtatagtcacaaccggctattttaggctgaatcgggttttggggccgaaatacaatttttgggatgtttgattggcattttatttttatatgagaaatttgaaatttattatttatattggatgtaatatatgtgagaattatattttttgcccttatatgcttgaaatgggaatttggccctaagggcaatgtggtaattgtnnnttttgggttatgattcattaaaaggaaaatgttaaggaaaagaggattttattttctgtattttttttcagccctaggagccccccttccctctctctaaaactcatatttctagctttaattttgtggtgaattacttgtggaagaaagcttagttttggagaattgggttttgttcttgcttggatttgaggtagattttcttactttttttgaatttgttgctgaaatttctgggtttctccttcttcaaaactgaacccttttccctcttaagatatttctttccttgattgaatgtgtgagttgttgcttggatcaaagcttggtttggtaatctttgtgcttgtgttgaggtagccattttaactggtttaatttaatttcagcttctgaaataagattgaaaaacatgctttatgtgtgaatatgttcatctttgcatgtgtgttggattaagggggataatcttgttgttcttggtaagtatgtgttgcaaaggtatggaattgttcttaatgattttaaggcatgtgtttaagttattttgagagtaattttgtgtaattaagatgctaatttgtatggttgtgcaagatcttgatttgggatttctgcactagttaaagcttgctgaaattgatgattttgatggatattttggtgttgtcggagagtgaattaggtgtaattnntctctaattatttgatttatgctaggtgaaagtttattatgattgtgggctggtttagcatgaaaattggcatttttggatgcattttc

SEQ ID NO: 127608 - DNA, 1044 bp, Cannabis sativa
ttaaatccaacaatctcaatatttcaggaggcatttttagcgaccttaaaagttcaggggtacatgtcaaagttcagggggcaccaatcctaattagccttaaaatttcgaataaaatttgaaacaactacaaattatctctccaatcaacaacacaacattgttccaggtaacttactatgagtagttaaaataattacaattcaaattgcctagaaacaacataaattagattctattttggagagaaatttctcagtgtttggtaacacttcataaacaccaagatatagaattatcccaaacttaaaaaacagtacagaaataaaatgtatgtagaaacaaataccatacaaatggaattcacatgacagaacacaaataattttattgtaccaaaagcagaaaattatgaatgtttctttggccctggtccttacgtttcaaatgaaaaaaaaaaatgagaacaaaatttcagaccatccagattagaacaaaatctcatatgattatcaacacgtatacacaatctctaattcttagaagaacaactaaacattataaattaattataacaaacctgactaatataaaaagaaaaataaaaattggataacagctaaatcatagcgaatgtagaacactatacaaaacagagagaatcacttgagaaaactcaaacaacaacgagacaaagtttccatcgtcccttagcgtttaaccatcattagcagcctcaaaaacgtaaatacagtacctgttgtgagtgaaggtaatggttaatccggaaaatgagaaacggaattcctagtctccgagactccgatctccgatcagtgaaggacgttgatgacaattctagggtttgatcatatatgagttaagaaacagttgtgctccccataagctactttggaaggatgaaatgaaagccgcgcactttggtttataactgggcctgggcttcttatattgcgttaaactcaaataatactatagattatttcacaaaaacataaaaacaataaaaaaaaaattacaaaa

SEQ ID NO: 127609 - DNA, 650 bp, Cannabis sativa
ccacctaatataattatttaaaaagtataaaaaaatattttctaaatttattttaaaactaaaaaatatatatttctcaattttgaaaaaaaaatcaaataatgaaaaattaattttgttaattttcttcttgtttaaataaaaatttgaggtcaaaatgtaaaaaaattatcactattttttattgtattaatatacttatcaaccaaatatatggagaatattaaaagtctcaaacattatatctaaaagtcaaagtgttgttaaagggttttctttactcaataaacaaacaacatatatgaaattcaaaagaagaataaatcttagtaccatcatcatatcgaacaaatcataagttcttatcgccatttttttcaagattggggacgggatgagttggtggaggagaggacggttggggatgggcctgaggaggagcggacgactggggcgctccagttggtgttctcgtgcggctgttgttgttggtcgtgtgcgattggggatgagaatgaacggaagaggaaaatatggttggtctcgtgcaattagggttaaaatggggcgggcttttcttttcttattaatttaggcctaagctgctaggtagttgtagagggagagggagattgtgacagtcagtagtc

SEQ ID NO: 127610 - DNA, 638 bp, Cannabis sativa
tttttggtttaattcccataaactcataaaagtaattactttatggtgcccataaacagaagaggcctatattaattttttttttttttgttattgtacctattttatttttgtgaatctttcttcaaccattgactttaaaaatatactttatgcattgccaaataatcacacgtgagattcttcaaagaataacaccaacaatagtcatttaggtttgggccaacaaattattttgtaagttacattattatatttatgtgattacgtatgtgctagattatgttaataatattaggttttatcattgtatatatatttttagaacattattatcaatattgtatatatatgtgaaattttcttatataatataatgtttgtatatatgaatcttaacaactggcgttcgtacggaaattctttttattattgttattgttataacatttatgatagggcttggttttgggtttttataaaaatattaaattttaaataaaaatttacaattttactgttatacgaaattttttacaaaaatattgtatttttatagggtaaatagcgcataaatacccaaaatcttatatttataagcggcataaatttaatgtttatttttagcagcataagta

SEQ ID NO: 127611 - DNA, 1261 bp, Cannabis sativa
gtaatgggttttatttagggcacaaaacccaacagtgggcttaggctttgttggggtggttagttttattaggattttatgccctaaataaaaattatttcaatattgtattatttactatcaatagaatattagaagtcatttaagtttacgtgtagtttttattattacagttttaatatacaatttctgttaaatccaaaacatatagttatcaacaattacagtgatatcatcacaaaggatattaattgtgattatatgcttgaaagtctttagtcctatgacttatcggtgcattgaatttacaccaacgtaataattagcgataaagtttacttacagttgtataagtagaatgtcctgtccaggatatgagcaaagtatactagtatcagatgtattgtatatacatcgagctagatcaatattgatagtaggaaagatatcataaacttaccgttagatcttttctgagacaatatcacttagttgatataagatcaaaatatctcaatcttgagacggttaggttctagcttaactgtattatttgtgttctatgacttgttcgttaaggctgactaattagatcagcccaatacttatatcttgagaacatggtagtgcaattgagcgggagcgttaatgatatatatagaatttatagcttctaatactatttagaagtgaaatgatgatttcctttgagattggcttaacaaatataaatggaagagctcttatttcagtaattatattggtttactgaaatatcatttattagaagctaagtgtcttaaggataaaatatattaaggggtagaacggtaaattatccctactcaatgtaaatcatctatagatgatctttgattatttagattgaaacaatagataattcatagcgtatttgttcttggtgaatagagtgttcaatgtaattaggagtacaattctgaatctattgtggagtcaggaagaattaataagatatgaaatttacttagtaaattctagaaatacttattgggagattgattatataggctcacaatccccacactagttgagatcataatgtcttgtagactctattaattagttttaattaatcaattagaattttgaataagactatatcttatttgtgaattttcactaagcaagagtttaattgaaaagaaagagaggattagggtgtgacagtcagtagtcccgtgatccgtaaggagaaataccgggtaagctgtgcaatccc

SEQ ID NO: 127612 - DNA, 1810 bp, Cannabis sativa
ataagtaaatctgattatattaaactgagttttatttagggcataaaatccaacattgttatgtgcgagcaatgacaccccaaaatatatattttcactacttctcaccaatatcatgaattccaagccgagaggtgacattcctttgccactccattttaaattggtgcatctctagccgaaaataatcatttcccaatatttgtggaattttggcctagaaataaggagatttttgttgatatttatttatttataattgtttattcgttattatgaataagatatgagatttgttaatgtgatactccgacatgtgggggatcatgaacaaatactaaggcctatataaagagagtgataggctaggatagggggatcgcttgcttgctcattggacgactgctgagaacattacttcccttcatcttttttcctaagtcatccatactttgttgacactaagcctgccattaacatacacagtttctaagaataaggaccattcttttttcttacttttattagtttataatttccaagaaccttacaaccaccatatttatcagatttgtgaatattaagtctcccatgagtcttgtgttcataaatcttgatacagatttcacctagaaatctattgttgtattattgtctacacacttttgagaacatatctctagtgtattgagtctaattaataaaagtaaaagtaaatgtagccccattactatcgcgatataggggtgagctactataaatccacggtgtctattttatttattgcagttttattaagtcaaattaattcatcgtaatcctctttatttttacgatcttctttgattagttgacgaaaaaccatgtcaacatatatatagattaaatttattaaaaaaaattctttttcaaattataaatttatacattaattattttactttttataatattaattacatttcaaaaacaatatacaaattttcataagtatatataaactaaaaaaatcataaaataaattgaagattaaaaaataaatatcatcccaaaatttgcacaattattatgcaatactgcgagaaacgcatattaatttcgtagtttttaatatgagtcaattttaatatatttttaaatggaatttaacatacttttaagaactctataatatttttttttagatatgagctaatgtatactaattcaacaaacacatatttggcactactaggttattagagcatctctaaccatgggtgtttagagagagtgtttgttgatgtggcagaatatttgaaagaagctaaccataagagatgttgggatttcaagtcaaagagtaacatttatgccatactcctttttctaaaataaaatcaaaacaaataatatattcaataataaccagcgaaatcatagtagcaaatttaaaggtttactagaggagtactttaaaaagttaccaaaaataatacgaaagaatgataaaataaaatattatatttttaaatagtatagaaattttttgtaacattaaagtgtgtcacaattggagatgctcttaggccaacttcaatgggcatgcaaaacatcaattacggtgtgatattacaccaaaaccaattccaaccgaacgacaattgtataactatttttgggtttgtctacattgtcccaccatatttaggtgagcattgtagacagcactaaattgtttttttttttaataattatataatatttaaaaaaactaaataattataaataaatattaatcaaaatatttataaatgtatttgtttgtatt

SEQ ID NO: 127613 - DNA, 1064 bp, Cannabis sativa
agagtccaatttataatttttgcaaaacacagggtctaaaatggtatttacccaattttaaatcacccatattttcataagacataactgttattagatttctttaatccttatggacgtgttcgacattaacataacttagtaaataaacaataattgatttgttagtggtgtcgttgtgtcctattaacttactattgaccggtttttgctttcaagaaaaattatttaattaaaatgtttctttttttttttgttgggaaaatagaaaaattatgacagttggagttggagcttggaacacagagaaatagacatttaatactattattattaatatgtttttagtcaattgacataatattgtagccgtccatttttaatggggtgtgaattgaattctcaatatgtacatagtacatttaccaatataatccaaccaaaggatctttcaaaaaaataatccaaccaaatgatcgagttccctttaagtgacatgcgtaacccaatattattttacaccaaaacatgaaggagaagtaatcaactaatcataagaccatctcaaattggaaaataaaaaatttgtgctaaatttagaaaaaaaaaatgaattcatattaatttagcccactattaacaattgtactctaatacacaatatgtaaaataagaaaaaaataattaattatattaataatcattgacttatctaggtacgatctaattatatattagatgttagattttactatccgatctaattcaattaatttcagtcatctaatcgatcaaccatccattgaatgttggattggattagattggttctatctattagatatttttcatatatatttattggtttaatttgagtttatttaatattttagacctagtattttttagatccatccaatattttaagtctagaatttattggattgaattagatctaaaaaaaaagagtaaaaatttaatttaaatttttatatatacatatatattttttatataacaatataaaaaatactactccaatgatgttctaaaaaatgtgctaa

SEQ ID NO: 127614 - DNA, 1211 bp, Cannabis sativa
ttgatcatatgcttgctttgcaaacttctgatcctcactattacactgatcagattatcaaaggatatatcctggttagtaatttttttttttaactaatttacttatattttggtctaataataatgtgtatgattatttactatgtggggtatataattttgcttctatgtgttttgagtatttttttatttgaatgcatatattattgttaggaccactttattactttttaatttgctatgtacatatttttgtgaacctaaacattacatctttttaaccacttgaggctagctcaagtggccatagggggtgcgtgtgtattgaaggttttgggttcgagtcccagattatgctgatgtaatatataaacgcttaaataaaaaaaaatacatctttaatctttgtacgtgtaatatttagattttatattttaatcattactcaaatatatatgaactttgatgcatattaattagttatagtctaacatactattctttttctattcaggtactattattagccgctactggcacatcatcagcgacattagaatgggcattgactaatttactcaacaacccccatgttttggaaaaagctaaagctgaaattgatgaacaaattggtgaacataaattgatggaagaacaagatctttccaaactaccatacctccaaaatattatccatgagacgttacgattgttcccagcggctccaatgctcttacctcattattcctccgaagattgtattgttgagggatatgacattccacgcgatacaattgtaatggttaacgcttgggctatacatagagacccgaaactatgggaagatcccgagagttttaaaccagagagatttgagaatagcgaaggtgttaacaacattaacttgcttatgccatttgggttaggaagaagatcatgccctggcaatggcatggcaaaccgtgtacttggtttgactttggggtgtttgattcagtgttttgaatggaaaagagtgagtgaagaaaaaatagatttgactgaaggaaaaggagttactgtttcgaaagctatacctttagaagctatgtgcaaagctcgtcctatcatgaactcaattctctaaaaatcctcatgaagaaagattaatatatatttatattatagggtacctagttttttttttttttttttttttttgtgtgagtg

SEQ ID NO: 127615 - DNA, 531 bp, Cannabis sativa
  modified_base (26)..(39): a, c, t, g, unknown or other
aggatgttaataaaacatacttggtnnnnnnnnnnnnnnctggtaaaataattccaatagaaacatcactatggatgagggactggaaagatctagagaaggagggataaaccctaagagagagttccagaagctttattattaacactttgcatatgtttatacaagtgattttacattaaagtctcagtcacaattaattatcgaaatatattaataattaatgaggaaattaaattgagtaataaatttaatgattatgataataatgaccatcaatagaatattgattcgattaacaaaatataaactaagattaataagaattaattataattaatataattattaattataatattacagaatattcttatattttcttacttagtcagcatttaataaatcaatgtaccacttacacccaacgattatccttgctaaataacaaacataattaatcacgacgatatgtcctcattaaatggcgaatattatctttatgtattacgatatatttattatataaca

SEQ ID NO: 127616 - DNA, 1160 bp, Cannabis sativa
aagagataaggggataatggatcctcctgcctaacccctataggacccattgttcttcctccatatgtgacattatagttaactgtagaaacgcagaacatgattagcttcacaaaatgcaaatggaaacccatccgaataagcatagcctcaagaaatgactacccaactcgatcatatgctttgctcatatcgagtttaagcgccatgaaaccctccttacccactctttttctcttcaggtaatgcatgatctcataagagatcataatattatttgaaattaatcttccaggtaaaaaagcactttgcatattggatatgacgttcggcaaagccatctttaatttattcgccaagacttttgaaattatcttataaagaacattgcaaagcaaaatagggcaaagatcactcatatactctagtaattttttcttaggaatcaacacaatgtttgtttgatttaaagaactaggaaaaaagccagtagcgaaaaaagagcataccaactcaacaatgtcatcaccaactatattccaacacttttggtaaaacccagagtcattccatcggcacctggctctttatcgggatgtaccttgataacggaggcccaaaatacaatgttgatcgaggaggttaccagggaggatattgaatattcatattattttaatttaataactctaattgctggcctcaagttagcacataaagtacgggcagattacttgatatatacaacgactcctaattggtcattattcatgtcctagttgaatttatacggcacaaggaaaaaaatgataacatatttgagcaagattcaagacttattaagtcagctcaaaggttagactacaaggcgagttctcagagaagagaatgcaacagccgacgcacttgctcgagtagccagcaacaccttgacagacaaggcaaacttggtgcccatttagttcttaaaagaaccgagcatcactatttctacatgttggatgatagcccaacgtggatgaaacccataacagcatacctccaaacaagaatcttgctagaaaaaaaaatgaaacaagaaaaatgaggaggaaagttgctcggtatctaatcctgaatggggtcatgtacatacatggtttctcaatgccacttctaag

SEQ ID NO: 127617 - DNA, 2316 bp, Cannabis sativa
ttctcaaatagtaataataataatgtaccaaccaatttccggcagagttacatagcacaactctctcttatttctaagactgagagtcctcccaaagctatcgactaccaacctattgcctgctgcacaaccttgtacaaatgtgtttctaagttgatttgttctcggcttgctaatgttctgcctaacttagtgagccagaacgagagagcgtttgttaaggatcgttccattgcttacaatatttttattattttgaagaactatagaaggaagaattgctccccaagatgcacaatcaaaattgacataagtaaagcttacgatacggtcaactgggatttccttgagaagattctggtggcgtattgctttcctgaaaagtttgttaagtggatcatgaactctgtgagaagcacgccgtattctttactcatgaatggaacagtttaggggtctttcaaaggcgaacaagggcttagacaaggggaccctatctcgcccctcctctatgtcctagttatggaatacctgactcgaagcatccaaaaagcagcgagagataagaatttcaggtaccatcccttatgcaaaaaaatgaaactcgctaatctttgttttgcatatgatttagtgatcttttgtaaagggaatgagggttctctcaataccattaaatctctgcatgatgagtttagcaagatatcgagcctttccatcaattttactgaatctcaagtttatttcggtggagttgcacaaccgattccgcttgctcaaaaaataaatctttctataggagaattccctctcaagtatctcgggatcccccttaaaccaactaaatggagactagaggattgtgggtcgattttgaagaagatgaaactcaagcttcattcttgggctaataaatatctatcctatgctggcagagttcaattaatccattctacattgataggattaaggaactattggatgatagtcttccttctgcttcaaagtgtgataaaggagattgagaaactttaccggggcttcctttggggattgaaggataatcgctctagagttcacttgataagttgggaaagggtgtgccttcctaaagcctatggtggtcttgggttcaaggatggtactaaatggaacaaagcttctttagctaggttcattttggatttgatgaacaaaaaagatttactgtgggttaagtggattaactcggtttatctcaaagggagtgatttctggtcctataggatgagcatggatactagttggtattggagaaagctttgtaggttgcgaacaacttatagcaaagctgatatggtggcaacgggtggagaaaagttcgaaaccagcaaggtttattgcagcatgctgaagcagagtgagtttccagcagcaggggcgatctggtatggcttaaatatgcctaaacatgctttccaactttggcaagcagctcaaaccaagctgttaacaagggatcaactctgctggcagagcattcccatttcaaacttgaattgtgtggtctgtgatcttgaacctgagagccacagccatatatttttcaagtgtaatctgtctttataggtgctgtataacatttttcattggttgggcactgctgagtggtctaaggactacgaaaggtggacagtttggttaagaagttcaagaccgaatttggtggacaggataagagtgctaattcttgcagctgtgatctatcacttatggagaaatcgaaacacatgcatattttctttctactttaatactgtgaattgtattataaataaaattaaatgtgaagtgaagtatagactcttattgattaaagataggaattgttctaaggataggagaagaatttgcttcataaattgatttgtaattagttggcattgtggtggttgcttctcttgaagaagtgttattggttgtaattggtgagtagagtaatgaagttttcttgttgatgaaaaaaaaataataatgtagcatttaaagagagatgggacacgaaacttggagacgtgtgattttaattaggcacattacgccactatcggtcaacactgtaaaatttcttgatcatggtccgatccgacacaatatcaattcaacatataactaaactaattgacaagaaaaaaaaaaaaaaaaaagacaacataaatcctccaattgatctattttatctgtaacgctattgcaagaacaatgacatatctcgtataacttgattaaattaatagctcgcgatgttagacttttatttgggcttacattaaattt

SEQ ID NO: 127618 - DNA, 1027 bp, Cannabis sativa
gtcctgggctaaatgaaccttaagtacagatttagtcggtctaggcctaactgacctatgcccaagtccgagcttgatgtcatgccattttggctcttgtagcaaaaaactatcttgatgaattgaattaataaattaagaatattttttctagaaggtagaaatgttaaaatttaaatgttgtattattttatgaaatacaaaataataataaatatgtacaaatcgagttaaaaaaattgtgaaaaacattttcctccactcttttcttaaaaattttcaacaattttttcataatactatcaaaacttctaagaaaataatttatcagcttgaaataatcaattgttttttctactaaatacatgaagattttgagactcattagtgatattattacctgcaatttcttcccaagatttcttctctgctgtactcagtaagctccaagaagctatcagaagcaaaaatctaaaagaaaaagaatgaattaatatagtcatattaaattagccaataataacaatgatttataataatcaaacaagctaagtttgagtagaaaaaaaaagtcttacaatgggattatcaggcagccttggatcagtaatgacaaagtttttctcaatacgttcaagtgttgtagcaagatcaataccctttctcatttccttttgccttttctttacttcaacatccaaaggtccatctccatcttcatcatcatcatcatcatcatcctcatcactctcaacattatccaccacaacaatattatcatcctcaacattctcattatcagattgacttttcctaataagcctcctgttatacaaaatatcataacacatgaaaactctttggtcccatgttttatgcatgtcaatacttataaatctatttttttttaatatgactaagtttttgtaaaatttcgagtgatttaagtagcgtttggtaacacttttttcatcagttttctgtttttaaaatttgaaaagtgaaaactgtttttgcttttcaactt

SEQ ID NO: 127619 - DNA, 2212 bp, Cannabis sativa
ccatgtatcttggccatagctttgttcttagctcgatagctcgataaaaagtccaggagtagagttaagagtacttaccctcaggatttgctttcttgaatcactaaatgacatggctggatttgctttgaacttctccaagaactcttttgtaatccaatcaacatctaccagcttgttctcccataaaattccacagctgtgttcttcctcaaattttttaattcacattgcagtgcaatcatctctcatcctctaagcatacattaaccatttacaaccttttcctttgcatacaactctaattctcaacctatcattgtttatatatttatactacatgtcaatgctaatgaaatgctcctttaatgcttctctcaagtgctcgacagtagggaattccattcccaattcaaacttgatattttcaagcttgaagtgtagatcaaattcaatgtgtttcttttttagcactagtccattttcttcatcactaaccaagctgaccaaatcatcatcctattcatatcctccaccaccatcatcatcttggtaagcttgaatgcataaatcattaactgacccccaccactagctacggtcagttttggagcatattcctcttccacaaaatttggatcttctactgattggttttttttcctactggttggtgttttggatggtgtttctcttactctctttctgttttggggtggtctttgggacacactttgagactggtttggggtagtattttggatggtgtttctcttactcttttcctagtttagggtggtgttcgagatacagttctggatctggtgcagggtggtgtttgggctactgtgtgactgttttgaagtgttgtagaaggtgtttgggatctgatttgtggtcttttggaatagccttctcctttcctagtttaggatgttgtttgagatttgttttgaggtgatttgttgagatctggctggcctttgttttttctagtttggggtggtgttttggatggagttttagacctggtttggggtgactagaacagttctgtctggaaactttttttcttagtttagggtggtgttttgattgttatttgggacctggttttgggtgatgggcagggatttaactggccagttgttttcttggtttggggtggtgttttggatgttgtttgacaactaattttgggtgatgggcagggatttaagtggcctgtctttttcttggtttggactggtattttggatgttttttgacacctagttttgggtgatggataaggatttaattggctagtttttccttgtgtttgggattcggtttgtgctgatgttttgctactttgggctttctctggtttggatggtgtttgaaagctattttgggcatttggttgggtattatgctcagatattggcctcgcttgaagtggcatgggttgtatgggcatgttagggtgtaaatggacctcacttgaattggtatgagactcatctgttgggccttcatctacagcttcacctccataaatttctccaatttcatcaagtgtctcaacaatttggacactagaatcactatcatcatcacttcctccgtcaacatcttccatgtcaaattatggcatgtcaatatctgacatgtacataacaaactcatcatacaattaagtagatctacaatttaccaagtaaatttcctaacttattaattcctcctgattccgctatagatttagatttgcactcttaattatacagaacactctatatgttccaagatataaatacactattaattatctattgttataatccaaataattaaagattctctatagatgacttacatcgagtaaagaaaaatttactgctctacccttcaatgtattttatccttaaaactcttagcttcctataaatgatatttcagtttactaataattactgaaataagagctcttccatttatctctattaagccaagctcgaaagaaatcatcatttcacttctatgtcaatataaaagctatagattccatatttatgattagtgctcccactcaattcactaccatgttcccaagatgtaaatattggaccggtccaattggtcaactttaacgaacaactctaagaacacaaataacacagttgagatcgaacctaaccatcttaggattaagatctattgatctaag

SEQ ID NO: 127620 - DNA, 1204 bp, Cannabis sativa
attaaaatcaccaatgatcaaccacgacaaattaggagcattataatagatatcatgcaataatttccaagtaaagtatttttggtgactaacaggggaaccataaaagcaagtaaagtgctacatacattaacattaaaaccaacattacaatctatatgattagaggaatagttcaaaatattaacataaacatcagccccccacaaaagaagaagtcccccaccgaaatgctgcctaggaacctcaaaacctaaagtccttttaaacccaacaacaaagtggggcttaagccttgtttccataaaaaaagaagacttggcttatgagttttgaccaggaaggaaagctaattgaatgctcgaggattccctagaccttaagcattccaactcaagagactcatttttgcgggcgaatgtgctcagcctcacccgcctattcaggttcaacagcagaagaaggagcagcagagtctgtttcaccagccctagcacacttgagcatagagtgcacgaagcctctaacactggcttgaaaattttgaaaggatggccttttaactccagaggcacaagcaagtcccttgcctttaacctgagaatcaggtcgatgagcatccatcctaaaggtttgattattagcattattctggaccaaagccagagatggcagagcttcagcaagagagtgggttgcatgcactaattcagaattgttgaaagccagactatcactaacaatgattaaatcagtggagatcgaagtaaggcatgaagagtgggacatagaataagagttgttactagttgtaccaaaaggcacataatccatagtattgttaggattgataggggtgggaatcataatactttgggaatttttgggagcaattaaataagaaatagaggccatatttgaattgagcaaaggcccaaaaccaatggagtgagttaggaaaggattcatcatttggcctccttgagagaaatcaaagaggccaaaatcgactatggtaatgccaaggttgcccatctaggattcttctcttatccccttcatagtcaaacgtaacaagaaagagaccatcagagtgttgggttttatgccctaaacaaaactccaatttcaatgtaatctttatcttttaaatatcaataaagaaacaaaagtgttttcatcacttatttgtgtgtcatttggt

SEQ ID NO: 127621 - DNA, 1052 bp, Cannabis sativa
acgtgaacacttttcctccacataatattaaatatatatacatatatatttatattattatgactaattcagtactttgaataatatactccacaaaaaatataataaaacatatatcatgtactctcgtatatttgtaacacaataagtttcaactatcaattctatgatagagaaatttcatatgacaatgaaattatagtgtaccatatgtttaacgacatatatatgatcaatatataagataaattgtttggcaagtttattgcatattatgcgttacgttcattaatcatctattttataaatttattattcgatttgattactttttcttttgtaagatatataattactaaaaattttattttaaaataaggttaaccacttaaagattacagtaaaaatgtaactacgatggttatatttttttttttatgatggctataataaattaacaacagttcattgttaaaaagaattttttatttaaaattaaattaattataattaattagctatgtacttaaaataaataattttttttgacaaaatattgaatgaaatcgtttaaccattatttaggaaaatttgcgtcaaacacccattttctttttgacagcaaaatacttaattaatgctacattttcgttgcaaataattagttctttaggcagttaaatgccacaaaaatttgttaattaaatgtaagcaaggatgcacttgtcaacatttcatatttgaccaaatattaaatatttaattatttacttgaaaactatattttatataaaatttaattaatttaaaaaaaaataattcttaaaaataaattcttattaattaatttcaaataaaaatgagaaaattactctaaaacatatatggtggtcaaaagcttacaaacctagtaaactctctttgaaaaaaaaaatagtaaaattcaaacatcacaacaaaaatagtaattgactggcgtgcccgcaaagtcggagtcagggtatccaatgatctcaaagtgatctgacctcctatatgtgagcatgtactct

SEQ ID NO: 127622 - DNA, 855 bp, Cannabis sativa
atccaaaatatgaaatccgcacttagtgcggattgaatgttgtttgaccaaaaaagtgtggattggatcggatgaacacccctagtctcagcgcttcccattacactactacaaaaaggtttattagcgtcatttttcaaatgacatatataataattgtgtcagttcgtgtaattgacgtatatacaagagacgcaaatagttactatattatgttggttcgtaactgacggcattaaatagtgccgtcaattttaaaccgacacaatataaataaattacaccatatacgtcggttcataactgacactcaattacaaaaataaaaataaaaatttaaatttgggcactcgagcccagatttctattcgaaataccaaatacgaattaaagtacataaactataaaattgaataaaaattagatctgcaagctaatatatatccattaacacaaaaatgagatatgtgaaaccaatatatatacacaaaattgtaattacataaaccaatatacataaacacaaaaatcagatttgccaacaataaaataaaagtaaaaaaatttatagatctctgaaactctatagccatcaagagcgtgcaacaaaactcataaccatggtgcatctgaagaaaaaaaccagagagaataagagagagatcgatggagggaggagatgcttactcatccttcgtcgttggaaaagaacgcaacaattgcggctcggtctgcgttagacggtggaggatgtcatggtcatgcggcatcatgttgctcctgcactaatgtgggcagctccatgtgagaggagagagcttgtagtgagagatacagagagcttgtagtgagaga

SEQ ID NO: 127623 - DNA, 590 bp, Cannabis sativa
  modified_base (26)..(53): a, c, t, g, unknown or other
ttttgttgtgactaaaaatcatattnnnnnnnnnnnnnnnnnnnnnnnnnnnnaaaagttgtcactaaaaataacaattttttatagtgatcattgagttttctaaatagatgcatgtttatatgatgacgaactgttaccccaaccaattaaaattcaacaactcattcaaatcaaaacatcatcttcattagttatatacaattacttgaatttgataggttgacgagacataatcatcaacctaatgaaaatggtacaaaatatattttattattcccactattgtactgtttttatttttagttacaaggaaattaatatataattagaaaatattgtgttatcactaaaatgttagtttttctaaaaaaagaaaattataatttggtgtgttaatgtaaagaaaattatattttagttataattgattttgtaattattaacaggttatatgttatttaattataagtaggttttttttttaaatttggttacgaataaaagttatatcaatacacatatatatatatatatttaagaaagtgatattaataaaattaaaaataaaaatatagggatacgattta

SEQ ID NO: 127624 - DNA, 2533 bp, Cannabis sativa
aacaatcatttcaatttgaactacgcaaggcttgaataaccactaagcaattggtttcaaggaaagcttggcaagatcaatttctcttgatccaacttaaagcttccttaacacccaatgcttccacaaattctagtgtagccgacccatgaaatagcttggtaactccttcaatgaacagcccttgtgcattacgaaccaaaaaaccaaccccaaactgatttgtgccaggaaacataacgtcgtcgacattaacctaaatgctatttcctagtggtggctaccactgctcagccccgtcacctagcacaaaacaaggactcgggtaaattacattagaactatgagcagcaagccattgattaaggtaagtttttgctaaaaataactatactttccacacttgacaatttgttgttccaaaccttatcattccttgcattccatattgacaaacaaagagcaatcaaacatttttctgttatccgaatccagcaccagaaaattcaaaatgcaccagtccaagaagactacattatgttgcagcaccgtgcctattccctctctgttccagcagagttttgcagctggacaatcaacaagaacatggtaaattgattcctcatgactgttacaaactggatagattgttgacacatccacccgttttgttcttagttgaatcatagttggaagacaaccttgacaagctctccacaccagatttttcatttttggagggagtttcaatgcccaaaatttcttccaaaaagcttcaagtactgttgtattctgagtattctccccattcatctcttggaccattctatatgcacttttcaccgtatagaaacccgatatctcaccaatcaaagtgattttgtcttgatcgtgaccaagtttcataggaatttgtaagatgagtctttgatcccgctattcaaataagtcaaccacaacttcttcatcccatcccgacccatccaatgccaacaaattgcacagttttgcaccaacaagagttggatgttgagatgaaacaaacggatcatagccaaggttcgcctaaaaccgagatagaagttccatctcccacagtccaacgaactcctttaagcactaattgacgagcttcaagaacactacaccagacataattgtggttagtaccaatatcagttgtgaaaaacgaaccccgagaataataccttgcctttaaaattcttgaaacaagcgtatcgagttttgtaagaagcctccaacctttctttcccaatagagccaagttaaaacttcttaagttacgaaaacccatacctcctttagatttatgtttgcaaagttttttccaagacatccaatggatacctttaggagagttgctcgaggattgccacaaatattgtgacatcaagccttcaatatctcttgtgaccacttgtggaatcaagaatacactcatagcatagcttggaagtgctttcgcgaccgtttttattaatatctccttgcccgcccttgatagaaactttgtaccatagccaagagtctattcttcacttaatttttcaagaaacccaaagcaaccgatttatttctccccattaaactaggtagtcccaaatataaactaccttcaacagctgtgaccatacccaaaatagaattgattctatctttcatggagctcaaggtattagtactaaaaaagatagaagatttggagaaatttacttttcgacctgaggcaagttcaaatttgagtaatacttcctggatcttccgagcctcatcttctgtagccttacagtaaagataactatcatcagcgaataacatatgagagactctaggagcaccattggctactttacatccatgaagccaccctctttgttcatatttttgaagcaatgcagtgaagccttcagcacaaagaatgaagaggtacggtgataaagggtcaccctgtcttatacctcttgttggaataattgggccaacttcgttgttaccacaagtaacacagtatcttgcaggcttaacacatttcataatgagctgaatccaattttcaacaaagcctaacttctgtaacattgcctcaagaaagtcccactcaattcgctcatacgctttctcatatccagttttaaagccataaatccattcttaccctttcggttcgttctaaggtaatgcaaaacctcaaaagaagcaagaatgttgttagagatcaacctaccagggataaaagcactttgattttcagatatgattgaatccatgaaaggcttcattctattcaccatgacttttgttataatcttgaacaagacattagacaaggcaataggacgaagattcgacatatgctccgagtttctcgtattaggaataagcaccacattagcatccccacacccatcagcaagtaacccatcttcaaaaaaagaacaaacaatttttacaacttcgtctcccacaattggccagcacttttgaaagaaagcaggagtcatcccgtcaggtc

SEQ ID NO: 127625 - DNA, 1190 bp, Cannabis sativa
gtaaaataatttccaacaatcaatgctaataagcattccatacgtacacagacataacatccattattcataacctatcatacttttctaataactcacacatttcaagtaagcaaataattcaagcatttagctaataatctaataatcaactaacaattaacacttactataccatgagtcgaacgagtcttcgcaaccaatgtacatatccaaccagtcttcaggatctttaaaccttggtcgctcttataccatattgtaatgccctaacccataaaggcgccacatgtgtgcttttataaagcagtttataataataatctatcagtttaagaaaagtgtggttaaattaaaaattttgataaaattgaattaaaacttagctttcattcaaaatactgctagattcgaggatcctcttatttataaacttttacaacatgtcacaaaataactattacaaaatggggttacattttcaaaatacgatcaaaaggtggatcatgtccactgaaagtcaagacacaacagttgatatgtacatcatcgggagacctctgactcatggttggtccgatttctccttccttttacttgcatcacgaagcacccgtgagtcacaaagactcagcaagaaaagcaaataaactcaaacattacatacatcataatatcataacaatgcacaacttataaatgcatcacacagtataaataattattcaatacataatcaacatcttataaacaattatttgtcttataagacaaacgaccatgatacctcataaagcatccttaccactcgttaccaacgagcttatatgtcactattgttgcttaattaagtaatcgataagtaaaaaacttatcaacggtttcaaagtgagtaattactcattctcactagcaacggtcggtttggtcagttttttacacacaaaaaaaatccaaaatttggttttcagttttcatggttataatccgaaaactgaccgaccattatataaaagtaaaaaaaaccaaccgttttaatccacagtttggtcggttaaccgaccaaatcgagcttcatgtttttttttaaatataaatctttaaatttgctataattatttaaaaactaaaaaaatcagagtattgtatgaaatatcatataatttaagaacaaaaactttcttagttaa

SEQ ID NO: 127626 - DNA, 903 bp, Cannabis sativa
aaaatcatgtttattttttaaaaacattttgaaataaaatttcatatacatttttatcttacttattgtgtcataatatttaaaatatactttatttttattttaaaagtatattaattaagaatattgaaagaataataaaaaaactagtaaaattaaaaatatatattttatattaaataaaaattattagatgggtgtttttttttttattattattattttgagaaaaactgacatcattaaaacctcaagaggaaaaagagtgtgagataatatcattaatcataagagtttgctggcaaaacagcagtaatacaatttgagtggccagaccaccaaacatagtgactattacctaaatgacgtttttcatctatccttacccaagtctaacgttataatcaaattaataagtccttttgattttaacgcacatgttgttgacattaatggataagattaagtattgcaagcgtattgataatcggtttgtggacatgatggattgattacgagcatgtatattaagttttaatggtttttgtcatttgcaagttatatttttctattcgaatttggatactaaagttgagtattgggaacaattgaatcttgtgagtagtggtggtgtggagtaaattgaagtaagacttactttgtgttcgtttgtttttagtttagtgttgatttttactcgaggacgagtaaatgttaagttttggaaagtttgataaattagttttgggtgcattttataaaatgttttagaggtgtgtttcaattgattatatttacttgtgcagaattatgcttgtattctatttgtttcaggtttaaatggtaaaattcaaaatataaattaaaaataaaaagaagcatgttaaatgatatgaatatgat

SEQ ID NO: 127627 - DNA, 1318 bp, Cannabis sativa
aatgtttaagacggccctggttgttataactgtaggagtttgttactgccagttgtagtttgttggttctttctctttctgttattagcagctatataaagcttgctctcttgtattttcattttagattgaatgaatatagcagctacattttctttctcctttttctctcgttttctctctgttttctctatattttctctgttggttttaccagctaatatggtatcagagcaggatctgtggtgatccttcttctatctacttcttctttttgttgcttctgcttctggtttgttaatggcgagaggaggaggagttcgaactcgtgttgctcgtgatcatgagagtaatccgaatgatcccaactcattctctattcttggtgaaaattcaagatctactaatgttaatgatctttctaatccctattttttgtcgaatggtgacaatccaggtgctgttttggttccaaaaattctcacagggagtgagaattacagcacctggagaagatcgatgatgatagctcttgtggcaaggaaaaagatcaggtttatcaatggaaaacttccacaacgtgagaaagacgatgaggattatgatagctggtgcaggtgcaatagtactgtgatttcttggatccttcatgcaatttctggagagattgcagacagtattttgtaccatgataatgctgctgagatttgggatgaattgcatgaaagattcaatgaaaagaatgctcctaggatttttgaggcaaagaaaatgatgcaaagtcttacacaggggtccaacactgttacaacatactttacacgcctcaaatctctatgggatcagattagagaatatagaccacaacttttttgtagttatgatgctatgaaaatcattcaagaatatcaagaagaggatcggttgcttgagtttcttgttggattaaatgattcttacagcatggtaagatctcaaattcctatgcgtgatcctctacttaatgttagtaaggcttatgctagtgttgttgaagaagaaaggcagagaaatcttaccaatggcagtagtaacaattgtggaaatagctgtaatgaaggagatcagtctatctcgaatgatactactcagtttgttgggaatgtgcaacctttcagacctaaatatagttgtacaaattgttgaatgtcaggacacatgattgatgtttcaggattattggatatcctccaggccacaaactttgttatcccaaattttgcactctgacgtggcatcacgagaatggtgacacgtgtagtgttgggttttgtgccct

SEQ ID NO: 127628 - DNA, 2074 bp, Cannabis sativa
ttattaaagaaaaaaataataatagaatgggctttaagactttttatattttgatattttacttgatattaatgtgttgtctcatttactcgaaggtggtagttaaagatctttcaaagacaattgtggaaacaaaatagtgagtttatagattaatatatatttgtaaatacatattatggattagatgttttaattttaaataagattacttttatgtatgttatgtatgcacatacataatatttgtataattttttggtcttacaatacattttttctcattaaatattcaaataatttattaatgtatagagaatgttatctcactctcaatagtgtagataatacaaaatattaatgatcatacctaaaaatggaggcaaacaacaagtacatgaaaaatattatttttagtttatttatttaaaatatattttgtgttaataaatgctaatggttctatatttgtaataaaataaattacttgacattgttttattgattatgtgatcatgatactcatttttaacattaaaaaaatcaattaaacaataataattcatctccaaaaggattgttaaaaacaaaaaatactctcaaaagtgaaaaaaaaacaatgataatatagagaggtgagataatactttattttttaaatatcttatttttgataatttaggataatttcaatttttaatttcaaataaataatataattaaataattgatttgtcttaaaataataataataatttaattaagtaaaaagtgaagttacatgatcattcaacttataatatttatttaaaaataaatgcaacaataatttctctacaaaaaaaaaaataataattaaagaggtggcggtataatcttcttttgctaatctctctatttttgtagtaattttaatattaattacaaatattaattacaaattataatctatttaaaaactaattaattaagtagttgcatgtctgttgttacaaaaaattatgtaataattgatattaataattgcaacttattattgaaagtttaaataatgttttatatttttttttattaattgatcagtgtaaaaaattatgctattagtgactattaatttcgttttaaaaagtagtaatcatcgatttctaagaaaaaaatacacctcgacaacttttctcaaaagatattttaataaattaattgttaacaattaaaaaaaatctatatatgtaagactaagaataataagatagatcatatttttttaatgcatttatattattttttagaaactttagttttttctatgatctaactttgtaaaaaactcacatttaaaaaatattatagttttttttatatgtaactgtaaataaattttttatttgtccaataattaattagtattttactaatttaatattttttaaaaacataaacttttttttttaataatgtatagcttatgattttttaagaccgcgcaacgcgcgcggcttttgtttcttagtttatttatatggttaggttatatatcttctaatgggtatagatgtaatttaatgataaaaagtctaaaatattatgacacaagttataataaaaaaatttcttttttgcaataaataaattacctctagcaaaggtgttattgccatattgacaataacaactctctaactcttaatacatattaactcaagtgaccataggagagtacgtgtgtattggaggtcctgggttcgagtcctaagttatgcattgtgtaatatataaacgcttaaataaaaaaaaaaaactcttcatacatgtaaacacattattggataatatcatagtcaacatatgcaaaagaatttatggaaagtggaaaaataataataaaaaaatagaaaagaataaataataataataataaagacaaatcctatctttttaactcttatataagagaagtttgtgtgtatgtgtatcaaattaaatataagaagtgtgttttttattaaataaaataataaataaattattttctatagattgaaataattttttatttttaaaaaagaggtatttt

SEQ ID NO: 127629 - DNA, 1666 bp, Cannabis sativa
attttaataattgttattttatataaaatttaaatctttaattgtactaagttttttttaactttttcctctcaattcatattcttaaaaaatatacctatcaaacaaaaattaattatagtttaaatattatgaccaaaaaattaaaataaaaacttatatgaaattttcttagaaaaaaagtaaaaaatatatatatacatgagttagaaaaaaattatgaaaatgaaatcaaaataagtattgaaattaaattaaaataatgtgagaaatttttttttaaaaaaaatattaaaagtaatttaatttttaaaaatatttaagtttacatatttttttaataatagagtgtatttatcattttatgggatgcaaatagaactccccaaagaaaaaacaacaaacaaaaaaaatcataatcatctttttggatgctggtctcaaaaacatcatcgactaagtgtaaataacttgcatttagaagatgtcatgagatgacggtttaaacaacattatcatctaatgtaccatatataggacacgacacttgtagtgtctcatctattgaaggccacaataatgcttgctcaaaaattatcataatgtacctgtttactgagatttttagaaacctatgtaaacaaaattaaaactaaagaaatggatgaaacataaaaattgagatgagaattttgcgtggttttgttgttaacaaaccctagtccacaagtcaatattatttggctagaaaagccttcgagtattaaccaagtgttcttgtctggtttatgaaacctaacctttttgccttaacttctcagaagaaaagatccccgctttgcatgaaagtatcatgttatatttataggctacagttaggtacgactatacgtagactcgctagggttttcttgtaaacctagctgactgatggggtaaatacaagtaatatattgacattgggcccattttgtgagaccttgcccatgaggcaacgatcatctatatatgtggagacctcctgacggtaacaggtggcatgtgtggaccatctttgcatataattttgccagattaatggatgttggacaaaaggcatgtttccttttatgttatacacaatttcagggtttatcgtggggaataaggttctaatatcaagggattctgaattaatagagtgccatataaacctcgactcttgggcgcctctttaattgctcttccaaaactgtgatttagagatatgtggatactctccctactagaatttctctatatctggataaattctcttccataacttgggaagcccggttcttatgatagttatgcttacttgagatttggaactacgactaaactctttcagcgagtttagggcattatcccaattgggtctgcaactgggcatgtgttgattgatttggattatgaaattactcgtgttcctcttctagaaacacgtataatatttaccccaagcctatagaacttaaatgttatggaggcttgcaatctttcctccagattagatgaggtcatgtgaggcattgaaaagtgtggactgtttggctttgtgccctaaataaaactctatttcaatgtaatcttttctattcgtatcaaaaaagaaacagagttaatttcattacatgtttaatgt

SEQ ID NO: 127630 - DNA, 818 bp, Cannabis sativa
  modified_base (132)..(132): a, c, t, g, unknown or other
taaaacaatgtttgtgttgatttggatggtttcatgatggtttatgtgcatatttgatgattgtatggaaattgcaaagtatgttgtaaaatttatttcttttgttatgaaaatatttttactggaaagtanacaaaaaattaatgaatttaggcttttacggaactcaatttggatttttttatgaattagttatgattttttgaatttggataaaaatattgaaaccgagcaaaacgctgtgcgcgcgctgatagggtctgacacggcttcgaacatgcctatgtccgaattcacttggacaagggctgccctaagccccttctgaccgaggtttgccccccatgaggctactagcagccctttggtttcccatttgaagcctattgtgtgcatggggagtatgcactgcatacttgcatattcccctagtgcaatcttgttttggtgatatcttttgattcaaaaattatttttcattgaaacaaaattaaaaaattggtagaattttgtgtagaatctgaaattttaattaaaaatagttttagatacagtagcctttaaatttgaaattttgatttttccacaaaaatagccttatggttaattttaaaattttgattattttatttattttacttattttaattataagatcagatattacttattttattattaaaatttgaaatgatcttatcttaataataaaatattaataaattgaagaagtaatctagtttaaatttcaaatttgctaaccatattatttttttcaaaatttgttattttttgaaatatattttattaaaattaaa

SEQ ID NO: 127631 - DNA, 846 bp, Cannabis sativa
gtgattttaaatagagatgaaatggaatttttttggtcatgctttggagaaattggttttgtaggaaccaatggattcataataagaaatttgtcaacactgaaggggttttggggtgggcttccgagtcacaaagaatttttagactgttaatgcaaagaagtctcaatctaatgtgtgtctcgctctgcctattatgtgtctgattactcctgcttgggtgttgcctggttgtaatttgttgaaactgaacattgatgcggggcttcggggtgcgaaaaaatgtgtgggatacagggcattggtgcattatcagttgggaaattatttggcttttgtggctttctagctttgggctccctttcccatccagtggcagaagctatggtagtccttcatggcttacttctctgtacacgccttggttttaataatgtggagaagtcgaatcggattgtcaatgcggtatccatatcctacacaagagagacttgtttaaagacatttatgttatttgtaattatgttaatatttctaagtttctcttttttatttgttatacgaactctttactcataatcctgctaaacttgccttgcctttggatatttttaacctcaaattaggactagtaaccctcaggattagttaaagttaattttagggaaggaaaaacttcattctcagggatagccactggtaggtcacctgaggatgcacgaaagtgacctgctcgacatgcatggcctaacaaggcaatttgcaactactgtcaaaagaaatttggaggatcaagcagaaatggaacgagacatttacatgatcacttcaagatttgtcctctta

SEQ ID NO: 127632 - DNA, 1396 bp, Cannabis sativa
gcaagctgggccctcccaaggctctccttcttaacccattttttagaaataaattttattttaatttttaaaaatataatattttaaatttgtacccatatttactaacaaatgcaattattttcttaaagaaacaagtaattttttttttggaaattttatatttgatattaaagctcaattaattatttttttcaaaactatttatactttctttttaccactaagcatatgcatgttcttgcaaactacatagccaaataattagattataaatggttacattaatatgtaaaatcatcacaatgtttatgagtgtaatattcctcctttttagattttttaaccaccagccttaaaattttacggacctaagaaataactttgggtaatgatcaggtgggttcatgcattattaggcctatttcagaatatttacaaaattactacttttttttctacaaatttatatgtataaaaatgaagaaccctaaatttggaggtctagctcgcattagcctaagaccgggcttgattttaacaaacacttaaaaaatacttcaatttagttataacatacacttcatttgcatgtatatgcattttaattaattttgtgttgatgtctattaattcttattggtcccagattgtgatcctttccaaagtagttatatagagaataaatcaaatatgtagagccttcttatggaagggaaaagatagattttgatggctcgagcagattaatggagctataatgcccagctcccaccacaagtagttgatattgagcctgagtagttcagataaaaaatgagctaagaaattgttattcagtttctaaatattttaaaggccaaattataatattgcttgctttaaagaagagggtagtgatcgttggcagtagtctattatttgggattgtcttggggtttcaaagcataaatttaatttttggttctctaaagaatagattgcgaaccccaaatagattgtttcagtttgggttcatttcaaaggatatagatgtgtcatctgtgggctgcaggaggagatccatgagcatttacttttttttgctatcattttagcttgcaatgtatatatccaacaggtgcttttgtggttggacattggttcatataagtttcagcttcctgctcctgggttaattaattggattagaagatgcaagaaatcaattcaagcatcttaatttacttgtgctataagtgcaagtatttactatatttgaaggttaggaatgaaattttttacaactttaaattcttttagggtgcgtttggaaagccacaatgtaattgaatttgtgtgtaattagaggtaattacacaattcggcaagtttgtctgaccatgtaattacactg

SEQ ID NO: 127633 - DNA, 1246 bp, Cannabis sativa
tcggatactaaaacagatagagagtatcccttttaagggtgtgcattataaaattttcctatactattatatattatatataaattaaattaaataaatataatataagaaataaagtttttgatgattatatcatttatgaaacgtacatattatgttattaataatgtagtttgactttaaatatgatgctatgaattaaagaatttaaaaatatatacacacaattcaacattatttagtcttgccttggtaaaatgatcattaggtacgtatatgctgtaattcattctccagcctaattaataactacaaattaaacatatccctaattaaaattcactttttgttaattatattattatattgggcatatgtatatacataaatatatctttatattagcatatgttcaagcatataaggttgattcttgaagtattctctcatttatatttaagcctgtatgtttatgtcttggttaaggcatgcatggtagctatcaaaaactttcattaaataattatattttaagaatgagtaaatacgattttagacgttgtgttttgttaaaattattaattgaaaccatattttgttaaagttacagatctgtatttttaaaatagtatttaatagtaccaactgaactgatttgttagacaaaataaaacttaataataactcgatttagagatgttatgataaaattagttacgtttgctccatctattcatgttaagaattattttcacattagttatatactaaaaaaaattcttaaaaattgagttcagatttcctatttctacaattttaaaatatacagagtttattttgtcattgaacaaaacaaatggtttcttcagtaatttttgtaaatcagagtccaaaatgatattattttttatattaataataataataccaaacaataatcaaaattaataatacataataaaatatagaaatcatctaataataaaactagagaccatagtcaaattttcaaataatcctttgtggtatagttactctaaatgaaattcactcgcggttaccgatcttgaaaggaatcttatggagtgatagttgaatctagaagggagttcctagatgactatcatgttcactttgggtacagtcttcaagacagctagtctttgtactacaagaaatgtcacttttaccagcacagttcgctactgcgttggtaaaagtaacttttaccagcatatttcgcaaa

SEQ ID NO: 127634 - DNA, 902 bp, Cannabis sativa
tactgttggcagaatgcagtaaaccacatacaatataataaatacaccaaaataattaatagcctaacttacatgatgactttagggctccaaatcattaacgtgttttccatgttgtattattttacacattcgagaagccttgacatatatgattaaaattttgggcttggacgtgtcactctaacatttgggattatcactcaatttcatttacaccattttgcttaaatttaaaacataacataaagttaagtaaattaaatattttgaataaaaataaatttaccattaataaaaatttaattatgttaattttatatgcataattaagggcttagattgtataaattttagtcttaatcataacccccaactagcttattgctagtctctagtaattcaagcgacgaaaaataatgtcaataaaatatttttaggtcaaaatttaaaaatgacacaaatattcaagcaaaatgttagtaacaagccaataagaactatacaaagttaccttgaataaatctaaaattatgagtgtgtgcaccaaacttaaaccttcttatcgtaaaccataacacataaagactttcgaaaaacgtaccaagtagaaatttcaattccattagcctcacaagtatttgaaaatatttatttacggctgaagatttcactcatagagttagaaatttaaaagtgagcacttgagatggatagatcaatttaggacaaacatttgaataaacattcaaacgaagataggttatgaattaattggactggccaccgtaaagagtaccgcaaactagcttttcaggatttttaaaagaaaatagacaatcttttacatttattctaggagccataacaaatgaaaaaaataaatactacaattttttttt

SEQ ID NO: 127635 - DNA, 1043 bp, Cannabis sativa
taaccgaccgtttagaaattataaccgtataaaaccgattgtacggtttttggcaattttttggttttgcaatttttggcagttttgggcggtttttggcagtttattgtggtttttggcagttttggcagttttttggtttaaccatttttttatttaaaaaaccaaaaccgaccgccctgtcaaaaaaatcgaaaccgaaaccgactgccaatttttgtgatgacgtggaaccaaaaatttggttacgttctggtcagtttgatggtcggtttcggtttatcggtttttatgaacacccctactggtcagaattctgctgaagtcagtcacctatccaaaccttgattgattaagggcttgcatttgtcgaatatggtagtgctgatagggccttgagtaagctcaaggatgcgaaaaaatgtgagaaagccctcaaggatgtagaaaagcgtgtggaagccattaaggatgaggttctctcagtgaaggctttgcaggagcgagaccagcaggtggtcgaagggtccttgaagataacttaagaggagattcgacagcttcaggacaaggaaaagaaacttgaggaacttcaccaaaaggaccttgagaccgcaaccagcgtgtctgtggagcttaaagaacttcctgacttctaagacaagacgaattaggaggttgccaaagctacgagggaagctctcttggctccagtcacttatgaaaattgcatgaggtgatttgaggacgacgtcttcatgacctgcagatccaataattatgagcctaaattcaactttctacgcaatcttgcagctaccttggctcattttttagagaagaacaagaagtggaagcctagctcgcgaagaccttgggtcctcgccttcctcatagaatcgacaaatctgccatttatctatacttgcttttttgtatttttggaagacttttatctagctagtccctaaggctttcttttacattagaagagacactttttttttttggcctgtccgcgaggctctctctctctctctctc

SEQ ID NO: 127636 - DNA, 746 bp, Cannabis sativa
  modified_base (708)..(708): a, c, t, g, unknown or other
taattgtaatatttattctaatttcttatgttttagtttaatgtatgatgattgtactgaagtacattaattagttagtttcatatatgatctactagagacagattttaactgttatatatatatttcattaatttataatttatttatttgtcaataatggatgtctatcattttatcttatcttatttacccaaaaagatatcgatccttccaactgactatattattgaaagaggagtgttggtatatatgatatgcagaaagaaaaacgagtaggaaataagattgatattaatggggatattataattttgagatattgtttacttctatcaaaatagcgttattacatggttttctagtattgctaaaattgatataatcacaattgtgccatgtaaaagatgtaaaggagatgttgagaaattagggtttcatctcaaaaatacaattaattataagaaagttttatataggcaactaacataaaataaaagactaaaataaaaaagataaaaatgttatattattattagataatataatacatagattaaatatgtgtaataaactaataatatgtaacatatgacaatttatattatttgtcattatttagatctaccattatcaccaatattaaaagtgtgaaaggtgtacacattttaatttgaaattcttaactctataggagttatggtgtgnatgagttacatctctttattgagtccataacatccatg

SEQ ID NO: 127637 - DNA, 1790 bp, Cannabis sativa
aaatctagatcctggtaaaacaaaatccaacataggtaagggcaaagctaaggctgaacagtagtgagctcgagcggataaagattgtacatgtcgagatagtttggcctggagcatacgatctttgggacagcaggctgtattttgaatggtcgctaggcgacaacttttgtataaaatattttgtactatgattatatattttttaaatacgagatcccggttatgtaaaagatatttattttcaattaaagagtaattaaataaaaaatttaataaatcacgatttttaataaactcgttaattagcaacggattgtataattaacataaaatcacaataacacgcctaagctaatagagtgttacatcagggtcccaatcgatcgatggggaggctattttgtaggaaaaccaggccattatgaaggaaaatcagcctcttaagcaaaatcaagtcaatcaagacctaatgatgcaggcattggtgtaaaaattgagtgcgagtattttaggatttcagttagacctcccgccactacaatttgatgatgttggatctagtcgggcagaggtgggagataatgatggccaaggcaatgatgatattgatgatgatgcaactgatatgtagtagtagtatttagtttattttagtgacaaaattatgcttatgttactattttaaagatatgtttgtttattaacttttagacaattataactataaatatatataatcagaacaatttaaaattatattttatttttgttgatttattttcataaataattgataaaatttttaaattaaataatattaattaaaaagtaatttaaattacaaagttttacacgcacattaatgtgttggtaaaagtaagatttttttcagcgcatatttttattggcgaaagttagactttttccagcgcgttcatgcactggtaaaagtaagacttttcctagtgcacatttttgctagtaaaagtgagacttttcccagcgcgttaatgcgctggaaaaagtcttacttttaccagcgctattacacgttgggaaaagttatttttgccagtgcttttcgttttgcactgacacaaattgcaataccaacatgaatttgccaacctcttttgtcagcgcaaaaatatgctgacgaaagtaaattttattttgccaacacaatacctaacttttgccagcataaaaatgcactggcaaaagtctcatttcttgtagtgagaatagataaagaaataggaaaaaagaaaaaacaaagagaagaacagaatgagagagtgaatgcgatttttgtcattagtttattttaatgaggtgaaatcctatttatacaaaaatatgactaaaagaatgagaaactaaatcaatgtaataaaaaaaaatagaatcaaacattaatgtcgataattaatttaataatttgaacatccatatataatatttttataaatttgattttcaagaaggaacatactatagtagtgattttattttaaagtgtagaaccatctatttgaatgataattagatagatttccaattatcctaatcaatgccccttatttgtaatctcaagaactgaaaggtaatgcaattatttctcgcataaactcatttagtctcaattagtcaatacgttatctttattcacggttaatcgatcaataaattataggtgagtattcaatagttacaataaaaatttataacctgttataacaggtcattgataggtaaatttttatttttagacttaaataaattat

SEQ ID NO: 127638 - DNA, 769 bp, Cannabis sativa
ggggcacgatttagtacatgttaaagttggggggaaaattactaattagcctttataaaaatataacacatactctaattcggcatgctcatttcttaatgggtactttaacctttttggcaagattaacgttattcccaatgtatgcatgtttagtaggagaaccaatttctatctgctaaacaataaaaacaaaagaaaataaatcatacacaatacaatccaaaaaaaaaaaaaactcatcaaaataataacaacttaatcacaaacacactattaataaaaaaataatacccaaaataataataatacagtaccaataactaaaatcatataaattaatataaaaaattaaacaacaaaaatgtaaaacaaaaatattaactttcagagataactatttctaaactaaaaaaattataagtaatcaattacatactgtattccaacttaaagtctcacatcaacatctatatatactcttgcattatgttctagtgttctgactcataaggaaaaagatcacgaagaaaagactaaaatacatttttaatctttcaaaataaatttaaatttttttaaatctattagaactttaatcagttaaaattatgttttgaaaaaaattataataatttactttggcaacatatgttgtatttaaatgaagctgattttttaatagggataataccattttggtcccctgtgatttatctaaatactactttggaccttctgttcccataaattctaaaaagaaccttgt

SEQ ID NO: 127639 - DNA, 1022 bp, Cannabis sativa
acatatatagatcgtgtattgatgagtgagtctttatagacaaatattattttgaggtactttctctttttgttgtttattacaacgatgttatcgtaatgtaaataaatgtaaacatttttaattacaacttcagaataatattaaaaatggtacttcagttcgtcccacgtatattcaactattatccatcattttttttatccttaatttccaaagctatatatactattatttatcaagttcaaaaaaatacttcaataaaataattaatatcattataattaagtaaaaaagtgataaattttgtaaataaattagtaacgtgcccttaccgttagggagcaagataattttctatttcgtccctgcgcaaggacgaccaggggcagagccgggataagaagtttggggggtcaaagtatataataaagaaatttacaaaatacactaaaaaagtatatttttttaatatatttttacggaatttttttttgatatttttaccaattttttattttagggttttttttttctagaaaaaaatgttattttacgttattttttcacgacaataatgtcaaaataatattgttctgtaacaatagaaaaacaacactctgtatagttataaaaacaattgttgttttcttgcaacgtcaaaacaatatttttttaaagcagcagaaaaataatactctacaattttgtaagaaaaatccataaaaatataaaaagaaaaaaataaattcataaaaaatataaaatttattatttatgtatatttatgaaataattctcatataaaatgtgcatatgatatatctttatatttattatatcattaactatcacccgaaataaaaaaaaaattattagtagaattattttttttcactgtaggaaaaatacttaatttatgtatacaaccatacaaataataacatataaagttaaaattttatcaattatttgtatatatataatatttattatttaggagaaagaacacaattagaatt

SEQ ID NO: 127640 - DNA, 702 bp, Cannabis sativa
gattaaatcaaatcaaaggttataaattattattattatccctattgataggtattttacccaatacctactgtaatagtccccttatataattggttacaaaatgagatatttaagtatttttcgttttataaatatttttattttatttatttattttttaaaaatatcacatcaccaataactagaaaaaataaattaataaaaaatttctaataattatattattatgtttatcaaattgtgcatatatattagttgttagatatttattaaattatgtatatattaaattagaaaagtttagaaaatttatagaatagtttaaagcaattttagactgtcgtgtcaccttcttatacctcttctttatatatatattaggaaacaaaccgtgcttcgcgtgcgattgtattttttagtaataattaagtcatatatatcatttgtataaattaaattagaattaaaaaatatatatatgacaattgataaatttctaaaaactacttatatgatatcaaaaacgttgttataattgtatatttcttgtactcatcattacattcaaattcgatatgatcaccgtatcttacttgtaattgttaatattattctcaatatatttgttgataactctagaaattagagttatttttcacatttttttttaactaaaattggtttagttcttaagttttt

SEQ ID NO: 127641 - DNA, 1296 bp, Cannabis sativa
tgattcaaagagaacgtaaatagtgaaagtgtattttaattcatagataattatgaattaatctatttaatagagatgatttttgtggtaattttgagtaataatctttcatgaaaataagattgtgcatttgtttttttttttaagatccagacatctgaattcagatgtacatcttaataataagatattaactctgaatttgaatattaaaatatttagactgtttgtttttttttttttatctaaaatatgtatatttttttagtatttttaatttatataagattgacgaatttattaaaatataatttattttaaatattttattttaaaaaatatttgaatatatttaaaatacactgtattaataattttaaaaaaaatttaagtatcattgatagttgatagttgagtgggttttaccacaaattactcttaaagtttttattttcattttaattattcattttaatttttattttgtaagaaaaatttgcggcataaataccatatgttttttatttttttacacttaaatactatatcttttttttttacaaataaaataccaaacgtttattttaactcattctattactactattccgttaaatgtaaaagaacatacatgtgtatgacccggattaaatcccacttatttattctttttcttttaagcataacaaatacttttagaaaatctattgtattttatcaaaatttatattaataatattataaactaattatatacctaatataatcttaaaaactgaagtacaataaaataaaagaaaagaaaaaaagcaccagccccattctcaatcgtgaagagaaaaaccaaacccagttaaccatttccccttttctcaatcgcaagaacaacaccaaatagacctcctcccattttcagtcagacgcgcgtaccagtaaaagatgctctctttaatgccttctagaccaaacacgccgacgaggaggaaaacgaagcgaacggatgaacgagatctctttactgttcgagcatactgttggatgtggcttgatatcaacaagaagacgtcgaaggtaaatcagttgtcggtgggtcaggttcatcagtgcttctggtttgttgctccgtctggttcattgatgagtgaaaagggatgtgattttggagattttttcgggtttggtttgactgttcttttttttcgagtttgagttatgggtttgatgagaagatgaaggttgtgccattggaaagggattgaatcgttttaggtttaagtttttttattattattattt

SEQ ID NO: 127642 - DNA, 1340 bp, Cannabis sativa
ttttaataattaattattctattagtattaaactagtttataaaatcacacacgtggcgtccctatagattagggcgttacatgggcggtggggtcaaaagaaaagataagggtacttggtgattcttggctacctgatatgtctaatcccatggtaacttctacatctctcggtctgcaagaggcaatggtggctaaccttatggttccttcttcttttgtgtgggatgtggagctaatcaatgatatgtttaatgagagggaccaggctcttattctaagcattcctcttacattgacgaatcgtgatgatacaatagtttggctaaaagaggtttcggggttgtatcttgtaaagttagcctacaaactaatccaggaattaaatggaacatggaatagtgccacctcctctgccttttggaagaaattctggaaattgcatgtgccgcccaagattaaggacctggtttggcgagcttgttcaaactgtctccctataatggttcaacttcgtacaaagcatgcgacggtcacgatggaatgtcctatttaccatgaaagtgaagaatcgattgtgcattgcttggtcgagtgtccagctactcaaagttgctggaatagggttggaattagcactggggtgcccatggctgctggtttttccagctggtttgaggcgtgttttcagcagctcaatgatgacaggtgagatcttcttgctgccatatgttgggcaatttgggggccccgtaataacaaggtttggaatcaaaaaattgttgttgcattagagattgtatcatctgcagtaagttatcttgtacaatggaatattactcaattttctagtttagaaactacattatctggtctaaccaaggatgatggggcagagcaatgaaggttaccaccgtcaaatagtatcaagatcagcgtagatggagctatctttgcagatctaaatagatttggccttggcttggttgtgcgagatgacaagaggtttcttattgaaggaaagaccaaactttaccaagagaatgtggctgctgaagttgcagaagccatgatcttcagagaggcgcttagttgggtaaaataatactcaaatttgtggcagcaggtcttcattgaaactgactgtttgattgtggtacaatcgttaaggagttcctttagaatgattttagtgtttggtgatttaattaacaattgtaaaatgttgcttaaagatttaccatttgtctcgttttcatttgttaaacggtctacgaatgtggttctcatagctttgctagagcgtctcgttcataccctgatcgtactttcagtttggg

SEQ ID NO: 127643 - DNA, 926 bp, Cannabis sativa
tatttttgtaatattttccttttgggctgtacaaatgttcattgggccggcccacagtattgttgtaatatttttctctttttagaatattcctgtttttttccctaaaataaaatagaaatccaatcttatcattaatgctctaatattgcttggactgacataatgatgtcatatcacatgcattgttttcgtcttttttttttctttaggggatctcacatactcacatgtattgttgtttaattaattaatttatggagatcggaaaaattatctataatttaaaagagacatcctaattaattcacataccataactaataaatcagacaaaaatagtaattaattcaatcaaatactctattttattatttatagatcatgtgttgtaatttttactctcctataagattcgtatgaaccttcaaactttttttatttttttttgatgtcgtcgaatttgttatacagcgatcgcgcggtaatagacgaattttgtcatatccacaggaagacaaatcacaactataaattagtttagtaaataatatataataaatgtgatagaggaaaataacaaaattaaatgataagatgagaaaagatgattagataaagagttgagtaaggtagaaatgtagttatgaaaattatattccaatatcgatactatattaatttaaaatgcaattgtaattttacaccattaattagaattgaaaaatatgtatcttaaaaacacaaagtaattagtcttgcataaattgaaccacttctaactttataacatatcatattatatatcataaatcgacaaaatactactattgacagaatgtggtaaatgacatacaatataatcaatataccaaaataattaacaacctaacttacataagaaaagcatgactgaacttatataa

SEQ ID NO: 127644 - DNA, 1700 bp, Cannabis sativa
tatcattataatgtctagttttgagtagtttctttttagttaagagttatttcaaaacccgagacatgagtttttaatttcattattgaatgttactttctagtttcttttatatcaaattgcttctattcttttatgtttaatgtgatggttattactttaatcttatttagatggccactaaattaggttttactttaatctaccatcatcttaggattactattcacctaatagtctaggattctaagtgtttgtgataaattacaatttctaatattatcaaaggtattttaattgtgatgaataatagaacctaggttaaatgaattatatactttattaatttgttgtctagattagtctatctccataaatctcaaagttttgtataagttaaataaattgcatacttcgtgaatttactgcttaggaaaaagagttaattattgagcgtttcgccttgattatatgtaatagggagattagaataattgactgcttcagcgttatctgcgggattaatagttttattggaaattgaaattacattcattaataggaattaagaatgattgttgagtgtggaaaaaaacctttaactatttatatcatgtcgtagtctcacttttaacttatttttatttttatttatgctattttattctaaacataaaaactcccttttctaacttttgtcactaatttttgagcatttaaataaacatagtttttgtgggatcgatccttacttataattatactaaaataattgggtattggaaataaatatcagtaaatttgttgtgacttacaacacgcctcactacactctaattttaccaatattattactctaattcactcatttttttattaaaataagtaaattaaaataataataggagagaatgaaagaaatgataaagtgtatttatctactctaaaatctgatgatttttttattgtcaaatgggtctctttttatagaggcaagcaagcctcagcaaaaataactgctagtacgtgtaaaaataaatggtagtaaacataggtaagtggggagagagaggtatgctccgtgtgaggaaagatgttggcaatccatgactttgggtcgtgtgatttaatggaattgacttgctgaaataaaagaaagagttgctgaacacgttatgattagttaaactggatggagattaatgagcttcatcaccagttagagaatggaaatccaaagctaattagcttgatgatggtggaaattacacttactataaaattttaaaaattcttatgataaatatgacacatttaagtttgaccaatttatatgatatttttttgtttttaggtctttttatggtatttgatatgccatatatatgtaattaagttttcaaatcccatatttaatgtttttatttatttaggaagtttttatttgtcactgatgctggaaaagtcaccggaatttgctgccagtaccgaaaaagtcgtcggagtagctgtcggtgtcggaaaagtcgttgaagttgctgccggcgccgaaaaattcgtcagaattgacattgtcactagaaaaatcattgaaaaaattactaagaaaccgatttcttagaaaccggtttcttgatgaagaaatcgatttcttgatgaagaaactactttcttgatgattttttcgttgataatgccaa

SEQ ID NO: 127645 - DNA, 1043 bp, Cannabis sativa
ttagggcacaaaatccaacactttcttgggaaaaagtgtgccttcctaagaagtttggtggtattggctttagggaaggaaagaaatggaatgttgctctcatggccaagtatctttgggccatatcttgcaaacaagacaaattatgggttaggtggatagatgccatttacttgaagggtcagagtatttgggatgttgaatttaaacaagatgccagttgatactacaagaaacttcttcatctccaatcagttattggtgaagctgatgttaagatggcggagaggaaaggtaaatttcaatctaaactgttttatgtctcgttgatccaagagcagaatgctgactatgcgaggaatatatggaatagattgatcttgccaaaacacagatttataggttggcaaattgagaatgaacagctgctaacgagagataaaatcagcataatcatgcctatttctactgatgtttgccctgtctgttgtactgtgatggaaacacacagccatgtttttaccaactgctgctacacacagagagtaatacaggaagtcatgtcctggtgtggtgtcttttgttggccgagcaacatcaacctatggttgtccaggccttcgaataatttgagggacagaattctgaatgctgttgtgttagctacattgtattcaatttggaagagccgtaatgggtgcatattcgagctcaaatgcaaggctgctgggtctttaagcagggaaatcaaagtggcagttaaacagagagttttaagctgcaacattagggagaagggggctttagacaatcacttaattaatgtattagaaagttggtaatgttgtgtagtttcttgctggttttgtagctggtttttgtactttgtactgctttgctagtttttgaataaagatcctttcttgttcagaaaaaaaattataaaaattagacaatatatatttatcataaaaatgttagcccaagatatgtttccaagagggggggggggggaattggaaatttaaactaatttcggaaaa

SEQ ID NO: 127646 - DNA, 761 bp, Cannabis sativa
ttttggcatttacagtataaaagacaaaaaattggcaaaaacagtataaatgtaatttttgtcatgtgacagtataaatataaacatttactaaaattacagtatttttataagtttccttatttaatacaatgtaatctttatacatggcttcgtaaacaatgttttaattatttatccaacttttacaaaatttctgtattattccatatttatgcaaaccagttgataacaaaaaagcccaaataactatattgatgcagagtaaaagatgtatggttggtccaccatgagtcatcgcgcgtggctccacaaccacttatgttaatctgggctttagtccattttgactttccccatttcagccaactagactcacaaactcaagccaattttgataacaacatatttagaaaaagagacaattcttttccaccatacaaaagttgtctaaaacattcatatataagaaaccaataaaataaatggtgccagtactcttataagttataatattcttattggtataatttaataaaaattataaaaaatcgctaaccaattataagacttcatgtcataaaagtgttagacatcttagtgcctcatatcaatactctttatataaaaataaagaaaatttacaaaagtactccaaattaaactttttttaaaaaatatttttatggggttagaattataaggagttcattccttaattaattttaatgttgtgatcgtatttatgtgttgaaactaat

SEQ ID NO: 127647 - DNA, 1400 bp, Cannabis sativa
agatcctggtaaaataaaatccaacatgaacatccagctccatgtcatactcattaattaccaaatcccacaatatcacgattaaactcctaagatcttgattgtggatcgtatcttctcaatatggaaaataattaatctctttatgatccatgattataggacaggaattggacaaatatcaacatgatgtagcatctacatcatcctacaattagcatctcatgggttgggtgttagaaatatatttaatcaggaccttaatttactattcaagtatgttggattattaataaactaacatcctaaacatagaatacctaaatcacataaagggataaagagatccttacattggttgcgaaaaaattaattgacttcttctgttcagttctctaaccctatatcctttctattgcagagtatgatcaagaactgaacctggattctccttcagttgataaaacacttcacaatctttctcactaacctgagtattgccttaaaaagtatggaagattactcaatacttacaacactcgaaattataaggaagaatagtagagaatctcaaaattcactataaaatataataactttcttttttattctatttgtctaacaaaagtgagtcaacaatatttttcaaatcaaagtcaaaagtgagtctaacaatccaaatggatttgtcattctctaaaatacatgattcaaaaataaaagcattaccttcgttctaatggttctcaagtctgggacatctagcttaaaaatgtcctttctttccacagtgagaacatagaagaatacgtcttctcatttgttctttaattgtttcaattattagttaaatttctatcctatctctcaaaattgaactcgaagaagcagcattattggaggaatcatcctcaatattttcagctttccttttacccttatctgctatactggagggagccctcattgcaagtggcaaagtgtattcataagcacacagttcagcgtccaacttgtctatgtcggatgagttaaaattgttgatcatatatgatacaacaaatctattatactcaggtggaaagctgttgagaatgaattgaacccgttgctcttttgataaatcaattcccagcagatttggtttttggaacttcaagttcatcatgagtaagtgtgatgtgatgctcttaccaggagacattttcacactatagagtttatttgcaaagacatgtaatagatggggattggggtgagggttattcattttgacactacaagtatcaataaacagaaataaattactttgttcaaataaatacatacacaaatttagaaaataacaagtaaggaaacatgtttgcaaaaataccaaaataaaacatattcaattattt

SEQ ID NO: 127648 - DNA, 1113 bp, Cannabis sativa
taattgtccttttgagtgtatttttcctccttgtggatacgacatatagcccgtttaatacctaactaattgggcgacatcaggacccgcactacgagacatgtcatattaaactaattttggagtcggataatttgcaagaatggcaaattattaatcacctccagaaggataacaattttgtttctccctctctattagtgaactcgacccgaagaagagataggaggacatgcggagcatggcccaccgctcgaggtcaaaaatcattgtacacgtatctaatgtggcattggggaagaacaccctacaccttactctaaaaagatgtgatcaagagtttaaactcagaattccctgatttcacaatacctcatacatcatttgacggctatattatgagctatcaaatcatcattaagagacaagtctagtctcaccgaacgcctataacaagcctaaacacaccaaagaaaataggcaatcatgccctatgtttaaatttgggaaattgtgcaagacgtgattcatacaaacacgataatggtggcattttaccaccattatgagcctataaatacccaatgatgtatggaagaaggggatttttttgggaattatttgtaagaaactcattaataacaatgactcgtggactaaggctcattaattctacaaccacgtaaaaattatcttctataacttccattaattactataaacaactctaattaatagttttcaaaaatctcagtcatttttttggtgctttcaatgagagttgtgggaagctttctaaaagaggaaatcataagaagcctcgttatataatgttattaacaagaaatacttcacgtccaccaccccattctaatgacccaaagggtccagaagaagaagatgtggcttctcaggtggatgttgaaggaaaaggagatatcgacgaccctgagtatacttaagaccaagatgagttcgaagcatatgacaaagacaactacacaaaactagtggctttaaggcaaagagctaatgaccatgatgttgagttggtagaataaaaagaacaaaataaaagaatgcaagaaatattgatcgctatgaaaaaggaaa

SEQ ID NO: 127649 - DNA, 877 bp, Cannabis sativa
  modified_base (27)..(29): a, c, t, g, unknown or other
  modified_base (778)..(797): a, c, t, g, unknown or other
actaatcagattgtaaagagttttatnnngggcataaaacccaacacacctaaagggtagaggttccctggttcgggtgtttgggtattttcagatgcctaaacctttggtacccctgaggggcttggattccctgagcttgttggtaaacctctccccgaggaggggttatagctgcttgctatccgagaatgaccagctaaccttggtctaccctttgtcttggataaatgattggaattctcacccactcatggagacgcccattcttgatgagattcttaatcccgtctttcaaattatcacattcatctgtcgtgtgctcgacatcaccatggtactcgcacctcttactaggatcccttttatatttttacccttgtacatcgatggtggccttttgtaacgagctgtattgcacagagccatgtggacattctctcaagggtctataaaattagtatactagtatactgggcttcatatcctttctttactttcttcagagactcactccatctctgactctttccattccacttatttagggactgacttacttttgcctctgaaacttctgtttgttggttcaactgcgtttgtccgagagcagcattgtattcggtctgttatgctctgaaaccacaaaaatttgtttatggaagtgaatactctgatttagtgggtctgtaaataattggagttatgtattgggttctaggagggacaatagacggaatcgacagttgtggtgtatgttggattatgttttaccagnnnnnnnnnnnnnnnnnnnntatgtttcattaacatcctagtatgaatttctaaaaacaatgacattaaacacatataaagttttagaaaaccttacatt

SEQ ID NO: 127650 - DNA, 2338 bp, Cannabis sativa
agagaacaataaatagagaaatgacgatgcaagagcaaattaatcaaagatcttttacgagagttttcgagaaggaatacttcattctttgtctaataagttaatacaactgaaatggaagtaggctattaccactataatagggacgaacctctataaatcctagtgtttgctttacttattgttctttgccatctattgtttatttaatctaaacattttaattaagactcactgtcgttggctagaagggagatcaataatatcaatctatcaaagtgacatgtttgcctgtaaaagtacacagaaaaaaaattaaataattgaaattaatgttctatcaatatctaattgcttagttatgacatttcttctggttatgacctttttggccacatttgttgcacctattctgttttttttcttttttatttcccatacaactagaaatcttcttttccttggtcttttggatcacaaaaaatggataacttgtgaagtcatgttctttcaattttagttgtaggtagaaaagtaagctttgatcatcctttatcctcagcagtcagtatccctctttcacttggtattttagttgcatttgagtgttttctttgttgcattctacaacttatttcaacttatgtattagctctccatatttgaaatcaattgagatgaatttcccactagctttgtaattttcataattcattccttcatcatattgtttgtttagaaatatgaggaatagaattgcgtctttttcctgagagtataaaagtttgagtattataagtgaacttcaagacaactgtaatgaaattgtaattaaatagttaaatcttgcgagtcaactaacataaaatctgaaaaaatataataataccccatatgttatacaaactaaacttaccacaattgtcttttatctgttcaagttgcgtattgccaattttgagccatatttctataatatataaaattgtagtagcacaattattattcaactaatttacaacttaaatataactacaaatgataattaattataccttaatagtaatatgtggagaaataattgttagacctctgtaaacaaactttatatcaactactttagtatatttataaaactaatcatgctatacacgtttttttttaaaagagattttattattttgatgatgtaaaatacaagcaaatatgataaaattattgaatcgttgtcaatttataataattgatatgtaaagtattagagcgctagcagaagggttatgcaactatgatgcaacttttataaaacataaaaaccacaacaatatttccacgtacatgactctatctgtatgtgaatttattattctattcattatttaatataaataaactcaccattagacatttgtcaaacaaagaaaatgcaacggataaactcttaactatagtattaatgttttttttgattataccttatattaattgattgggagctccagatctatttgttagagatatccatttcatgaatttgaaaattgatattaggagaattagttgggaaatttgattttttatccttacattagggggaaatttttcccttaaacctaaaataccctatattgttaagatgggacaacatttatttaattcccacattaccacccccatttgaaatttgactcccctctctctttcccctctctttctctctttctctctctatctcgcctctcctcgctgcacccacacacgcagacacccatagccgtgaagcagaacacccacggtcgactgcccccagcgtgcacgtagccgaccgccctatatgacccacggccaatcgccccctcaacctacatcacccacgccgaccgccccaaaatgtcgaaggtacttttttttcaattttttccttcaatttttggtgtttaaattcatgaaatatattaatatgttgcaattttgtgtgaaatctgttagttagggttagatttaggaagagatctgtcgaaaatgggattttttagatcgggcctgatggggccatatgcctgtccaatggttgggtccgatggggaatggctggagcttgaagatgatacccatgggcccgataggctcggtagcctcgatggtgtttggtaagatagtggagtcatgttcaaagctacaacagctgagacctctataccttagtcgtctcttacgtcatcatttccctcaacataacattcagggtttggaccataaaaaaatccatcaatgaagggcatttgtgctacaatatcaacactcggcatcatagtgtttaattcaggttatacatcag

SEQ ID NO: 127651 - DNA, 741 bp, Cannabis sativa
actgtgactttgagtttaagaaattaaatagataacacctaacattttttgtttttcttagcctactttgtctaccttctttatgcttttattaattagaaaagaagtatttgggagggatcatgaaacaaatattaacgaatgcaacttcccctactgctagtatttcattttattgagaaaatggcttcattaaaacttcttttaagtaaacctaataagaaaaatatcaagaaaaatatcattaaacaataaatttgcgtgtaaagagatactaatataattagatttgcagcaaacacgtttaataagattattatcataccacaccttacgatcatccacatgcatatatattaaataataaaacgaaaagatgaacgaaaaaaattacctcttttgaaaaactatcaagtgttctcgagtcttttcgtaagttgtattcaaagaagagtaatatctcacaccatgatctttatgattaaccacaacacactagtatcagtatgggctgatagatcatatacacaatattattcttagaattaatcttgtatttcttaactttttttaggtttcctaaatatattatataaatatatacatttagatctatactgatatattaattataaacaataaataatattaaagatttaattaaataaaatattttttttatcaaattaaataaaatatttatttgtttatttatttaaaataataaataatcatattata

SEQ ID NO: 127652 - DNA, 917 bp, Cannabis sativa
cgcattatatattataaagatacatacttttacaatataactttatatatatagagacacgattttatcccgtgatgtactttcacagaatgtattatgtggtacatcaaatgggtctcaaggtacattagatgtgtgtcagggtacgttactattttttaaccctaattattcctagatcaatctcagtcctcagatcaaataactccctcatttaacggctgtcgtacatcacggaacacattccgtgaaagtacaattacggaacaaaatcatgtccctatatatatatggaaaacccatttatttacaatgttcaagccatacaattaaatttaaaaaaaatatctatataagttattctttcttctcatattgttaacataatattattattattattattattattgtaatgtacatgtacattatataaatttttagagacaattcaacccaatggcttaattcatgtatatgttatgatgttaaaaatttaaaaaaaaatatagctatttgggtgttgtgtggcgtttgcttgttgattaataaaaatcattttctttgataaaaacagttctttgattcaataattatatatattaatctaacgaataccttactataaatatgagactgcactcttgatataataataaaacattcattgatctaatcattacatacatgttaaccctctattaatgattcataattagagagaataaaagttaattattattttacccttttagttatttcttgttccaaaagtaccattgactttactaataaaaattgtatcatagattccatatctgctaagttatgttcccaataggggtgttcattggatcacatccaatgtttttaggcctatccagatccgatccaatcatatattggatgttagattt

SEQ ID NO: 127653 - DNA, 899 bp, Cannabis sativa
cctcggattgtctccctctttcaacctctcaaaaattaattgcttcctatcaaacgtccatggacttcccttaattgctctctgaatatctacctcatggtagaattgaaatagataccggttgttctcaagctctttcacatacagcccttttactggtttccaaagaaatgccatcatatgctgcatagcttggaaatccaccagtcccgcattgaggaatctccctactaggcaccaccttgaatcaaacgattcttcctcctcaccacctacgaaactgaaccccatctcttcatcatctaaacatattgttgctgcatgatcttccaaccccatgttgacactagatgaagccataacactctacacgacaaaactcaaaacaaagaacaagccaaaaacaaaataaaaattcaaactctgactatacttcccatagaaggacaaaaaactcaaaccgtatcaaaagatacgacatttttacgatatattttaattggtcatgagtctataaaatagtctataaaatatgtatatgtatacaagagaacctcctatatatcgtatattagatttatgaatcattttttcctcattgttaataagttttgaaataaaccctcattcattttacaatcttattgttagaaattttattataattgataaaaatcaagatatattacaactttattataaaataaatacaaaaataatataagaaattgattagataaattttacaaaacatgtatactatgtataatatatatatatatatataaaagtagaaagaaaaattacatcacattatataacatatatagtatataatatatgaagaaaaatgttgagaatcatggggttccaactcaaaaccaattggcaatgagtgg

SEQ ID NO: 127654 - DNA, 1960 bp, Cannabis sativa
tattgtaatataatttaaaaaaaaaaaaaattattcaaaaaaaaaaaagaagtaggtgccttcttggaagttgcttattatggtggcccacaaataatgttgaatgatttttaggaagttgtgtcatttctcaatcactttaaacaaaaaaaaagtgtcttgaaaaaaaaagtgtcttgaataattactacaataaaacaaaactacttttcaataaagcaaggaaaagtgaggcaacatcagagcaataatcttaaaaatcttctaaaaagtgatcttttacagttggagagtctcatgaaattaacaatttgtgtggatggaaatttccacacattcagtggcggagccaaaatgagaaattagagggggccaattttataaatttaagtgaaaaatgtttgagaaacattttacattttattaatttcataattaaaatttctttcaaaaaaacttcatagttaaaattaaaattaatgcagaatctttttcttgcatatcacaacaattatatactattttttttgacgatttttcttttttaatatacaatacacaattacaaagtgtattttttactatatttgggttgtgtttcaatatttttcccacatttacaatacacatatcaatcattttcaaaacccattttgtaaaccatagaatgaacttctcttcccttattcaactccatcaaaccaacacaagctttaagcacaattgaaaaagagaacttattaccagtaattcccaattcttgcatcaaagaaaaataatcaattgcttctttatagctgccattaaaagcagaagcaaaaaccaaccaattcaaagcaaaaacatttggcttaggaattttgtcaaacacattctttgcatacctcatttctccgcaacttgcatacatacccacaagctttgaattcaaagacaacaaattcatgttcattccagttcctaacaacaccccatgaatctgcttgccttgtctcaaagcttttcctttgaggcatttattcaaacacaaagccaactggtctggggagaagtttgacgacaaaaagtatggttttttcatgattttttagagccccatttgggaatcaaacccatgaatcgtattccatggcgttgtttatatgatatgaagaattgaaactataaaaactgcatagaatcttttgcttgaatgaagagaaaatagagaaagaaaggaaaaaaactactcctacgagttcagaagaaaaatttaacttcatgcaacaatcttgtcgttataaagaatagtgtcgtttcaaggaaagatgtcgttttgcttctttattaagaaaagtgtcgtttttcttcatgcaacaatattgttgtttgttaagaaacgtgtcgttttcctcatgcaacaatattgtcgtttatctaaacaagtgtcgtttcaataaaaaatgtcgtttttcatctttattaagaaaagtgtcgtttttcttcatgtaacaaaattgtcgtttgttaagaatcgtgtcgttttgcttcatgcaacaatattgttgtttattttcagcaaaaaaacaatattgtcgtttctaagaaaaatgtcgtttttaagaaaaaaagtcgttttgtcaagagtttgttttttgtttgtattttaacattgtcgtttaacgaatttaatttatgtatgtaaatattcatccaaatcgtcttctggtgggaaagaataaatttctgcaataatgccacaaacaatcaatcatttttttttttttttggaaatttgttaattgatttgtgctataaaacaatatatataatctaggctactcttcttccatcaaaggacaatatagtttaattcttagtttgtcctcaatgtgaaaagaatatgatactttttaagttttctcatctttgagcttgcagatatagttagaaccacatgagccacagccacagttagaaa

SEQ ID NO: 127655 - DNA, 698 bp, Cannabis sativa
tgggattatcttcacaagtctaataactctagaccaccccgtgaccttgcaaagggaaagggacctgcagtcgaagaccccagaagctctaccatgaaagtgaagagtatgagatttggggggtgaaggtcaatgaactattctacacttagaaatactttcgtgatgaatgaggtgcttggtgtaggtacttctcctgaggtcgtgatgaccaacaatacaaatactttccatgggtgcatggagacatgttaaacttgagcaatcgttccaattccctccacacgtcactctaaggaagaagactatttgaaagggaataatagttggtatagtactacgagtagcttctcatgaagcaaatgctcaagagatgactctatcatcatacaggataagtcccccacagttgccatcaaggccacacgaccaagtaataaccacaaggctcaagtcgatcaatgccttttctcgacttggaataaaaaaaaatgcataacaacatcaacaagaagcggaaaactaatacacgcatcaccacagtgtgcaaggccaaatttgacaccattgccactctggttaagggtatcactactcaaaagctaacaaagtactagttagatcaagagtggtgttctccattcttagattgaatgaaggctttggagatccccttaaagttcaaaaatccagtgtgg

SEQ ID NO: 127656 - DNA, 804 bp, Cannabis sativa
gatacttgcagaggtatacaagagtgtttttttttcttcttttgaaaaaggaatcacatttgttcattttttatttaggagtgtaaatagatcggatcagatctaatccatatcaaatgatgatctgccttgtcccgacccgttagaccaattattcaaatcagatattatctgacccgacttatctgaattagatatgattctactcaccttatcaaaccaaacatttaaataaaagaatacaaaaacatataaaccaataaaatggtgccttcagatgatataatattaatgatgatatgaatcaaataaatggatccataaagatatcataattaaaaaaatcaattgtagaaaaaaaaaaactataaacatcaacgaatctgaaaaggaaaaaaattctcaatttagctatctacatgaaacttaggccatatgacaacggccatagatctaacgacaatgaatgaagctgaaatgacgccgttttgagttaaggaaggagcatcagtagcctacaggatcaagagcatttagtttggagtcatagtcaacagttcggagacatctaaagagtttggcacctggttggcgatgaagcttcgcgaagtcgagagaaaaataaaaatagagatatcgagaagggcaaagagagataaattgtcaaggaagatgattcacgagcctctgacctcagatttaggtatgaagaagaccactcagatagtgaaaaaaaaataggtggggcaaattgaatttgagaattttggatcagaaatgatccgttgaattggagcttcgacc

SEQ ID NO: 127657 - DNA, 1374 bp, Cannabis sativa
cacctatacctgtacaaagcatttggtaaaaataaaacgaacatagttgcaaaatgatcataaataaggaacaaaattcattaaggataacaaataatgtcaacccgggattaaaggctgcccagttagctagctgtttgaaaaatgaaaaatattccaagtttaaagacctcttggccggtcactttatctcaaaaaaaaggcctactggccaaactgacgcatacaaaaaaaaaatggtgatggtaaagagaaggcaatcaaacggcaggagtctcaggctcttcgtaaggatcaactaggtctaaaggggccagaggattatcggtctgcgcagaaggagcctcaatattttggtcggtaggagaagtggaagtggttgcctcagggttctcattggccgcttgtgccatgcagtaatcaagaaacatgtctttggaagttccaaggtagtcgaagtttgcttggggattggccttccaaaagtcataaaaaatctcgagaccagctgtctctaaggtatttaccccttcccgagctcctccacctgggatttttggctcttaacctctactttgagttcctcctccctagtcttattgtccttgacctcatcctccaacctgctaagaagagtccggagaccctctctctcatcttggagactggtaatttcctgagacaaagaaacgttgtctgtctcgagctacgtggtcgatggcatgtcctgcagttccttggtcagctcggcaaccctagtctcagcagtaaggagtttcttatttgcctctccaagttccatcctcacgacctcgagctgggtccacgcatcttaagcgtctttcttggccaagtccacttcccttcgcattgtgttagaggtggcaagattcttgacagcggccgactttgctcgagagtatgcataagccatcttcacaccagtctgtacagagaatgtattaaaatctgaactatccaaagtataatgaaagaaaagtgatagagggaacttactcgagaaatttccttcaaaaatcctcccaagacaagttcgaaggacaactcactatccgccccagtcagttgttcattcacttccgggagcgaccgagccacttagtggttaagcatgtctttgcctctcctggtctctgtacacaatgccagagttagggtaggggccctaacttcctcagatccacccttgacttgctcggatcttgtcttagcctgctcaggtccatctgaactcccatcctgggaacttttggacttagcgaccttcaaggtaaaagggtccacagtaggttatgttggaattattttaccaggatcttagatctactcacaagtatgttgattaacatgcta

SEQ ID NO: 127658 - DNA, 619 bp, Cannabis sativa
gaagagggctgaagccaataaaccaacgaaaacatagaaaaatcacatatacgtgaattcataaatatatatactgaaagagatagtcacggtacaccacaataaaggagaagaatttataaattataacacaaacattcattatatatattcaatcaaaaaactgaagcccaaaatcttaagccaatcaactcatataaacaaaactttcaactccgaatgtcctccaaaaatcataagatctaaaatggaccggagccattaatgtatatcgcatattgtgagatatatctcaaaataatccaaccaaaaaatacatctcatgtatcgtaagaaaacaaaaattcggctgggcttttcaaaagctgaagccagaaaaccgcattcttcaatgtatatatgcataatatgcttaatccactgaagccaagtacgtatcaaataaaaaaaaaatatatgcgataaaattaagaacagtggcaaaataaataaaaaaaaccctaattttcaaaatttccaaatttcataaacaaaattatcagatcttcaattaattcaacaaaggtggctctggtaccacttgttagggtttataaaacacttaaagaaatatataaat

SEQ ID NO: 127659 - DNA, 1324 bp, Cannabis sativa
ttaccgaacatgatttttatttgttttatttttgataaaaaaacaaaaaaccatttttaaaatggttaccgaacggggccttggtattttagctaagtattaagaaagggagcaatacttggtattttggtattttggcagagtgttggaagagggagcaacacttggtaatttgactaagtgttaagagagagaagctcccttggtacatgtggagagtaatgggagtgaggagctcccttggttggatagggagcaaaggggagagatagggagggagcggggagctcccatggttgaacagggagcaacggggagaaagagagagggagtggggagctcccttgattgaatggggagcaaagggtagagagaggaagggagccgggagctcccttggtgaacggggagcaaaggggagagagaggaaagtagcgaggagctcccttagttgaatggggagtaatgaggagagagatggagcgaggaactcctcacatgtggagctcagcctgtgccttggctcctcctcgtgctagctcttcctctcgtgtggtgtctcaccttgctagttggcctcccatgttcttgcccatagacttttacttaattgcattttgagatctttcctctgtttaatcatgtggcctccaaaatttatacttagtatattttaggggtcaacacacatacacgtttatagtgtattttaggattttctctccattaatctaaaaatctccaaaaattacacttaccaatttttgggggtcaacagttatgtttaatatttgttgtattttatctttagcccaggtgtcaatattagagttagtattgcaactcatgtgagacaagtcagccgtgtacaatttaatcaactcattgaggttcattttaatttttgaataacagattttctctaaagcttattgctctcactctctattaatttttctacttctatttgtttctctccgggttgtactatatcagttcttgagaataataccactgatttgacttgatatcatctaatgatttacctagcatccatattttagcctaaattatactagttacaattgaaaattatctcgtataatgaaaatttctgagttcaaatttcagatagataacaagaatcggcaaaagtatcaacactagtgtctaaacataagccaaatacatatcagaatatacttaatgctcaaaaccagtaacaaggataaggaaaatacctcttaacatgcattggcagctagaacaatcaatatcttgtggactggtacatatccagtataaatgacatgctaatatagat

SEQ ID NO: 127660 - DNA, 826 bp, Cannabis sativa
ccacattgatcagtctgctatgcacatagctaacattcctacatttcataaaaggaccaagcacatcgaattggatcgccatttcatacgcgaaaagattgtctcgtctgccattcgcctcataccagttagaagtaatctacaacttgccgacatatttacaaaccctctcccgtctccaacacttacttctcaccttttcaagatgtccatacatgatatatatggtccatcttgagaggggggtaacagacttttacttttttactgtctttattgttgagttagttactcgttattagattcttggttagttaaggttgtaaatcgttttatgttatgcacggtggttagatggcttagaccttactgatctttgtatcctatataagaccttgttcttcattttgaaattcattcaacacattaataataatatttagattctctcattatttccgtaatatgacatatgtaagattatacactcataaatatattatattactacatgtaaattatattttttaaacatattaaattactcatatatttgtcataacaagattgtaaacatgttttaagttgataagttaatcaaaactaagaatgattctttatataaacgagtcggatcggatcaactctaatataaataggttgactttgagttttagtttttgacacaaataattaataagttagatttaggtttgacatttgctatcatacaacctcaataagaacaaatcacacaacaattattgatagggaaattttatttacaccccaaaaatgtttaaagacaccccattttaataatttt

SEQ ID NO: 127661 - DNA, 1478 bp, Cannabis sativa
actcccttggggtgaattttgacggtgatatctttagaattgcaactgggatgtgagacatgacttgatagaaagtttaaatagcttcaaaatgcaagttgaatcacgtcaatcagataaaaattgagtgagttatagttgttttactaaaagtggttcaggtactagcgactaggttgccatccagtgcacaagttgacatcccagcgctcaggttgacatctgacatcaacatggacgttgtataagtgtagaaatgtccaatggatgtcctttgagatgcctaagtgatagttggacaccacttagtctatttataagttctagcaaagctggttactagttcttgagatgttgctattttggggaaacggaagacttgaaacttctgattttcgagtgagtcaattttccaaaaaattgaagttgtgaatttgattgttctgacttcatggatcatttcacttgtgaaaaactagactgacggtcgaaatgacatcaaatttagataagtagaacccaacgaaccatgctattttttgacctgggcattgggctctttaaactgagctctcgggattctgtttttaatactttcaaggtttctaaacttaaggatgagatctcctttcccgtttttaaccatgccaaaatggttgcattggatttggcatttgaataattgaaggcagcgtcccagatggattgtcaacctggacgttaggcccagcaccaagtcaacttgggcactgggccctgtttctagggagtcgggtttgtggttttctcctcgagtttacttgaatctttgttattttttatgacagtaaaaatgctcggaacactttttgcttaattggattggaaacagcccaggttgacaaaatgtcaatctgggcgctgggtcacagttttgtcctttcgaaaattctgatgatggagatgatgatgctcaaagtaattcttgaaaaaatccactttttgtggctcaggttgaaattttttcaatctgggcgcaaggccagccacaagtgtcaacctaggggctaggccctgttatttgtgcccaagaattgttgtttttcctccagaaggacctattgtcttgttttttatgaagaaggatcgatccaatgcgaaagttggatattttattattggacacttggaaggtgcccagattgatagattatcaacctgggtgcgcagggcctcggggccccaggtgctaaaaatttagcttgctccgattttgattctgatacctcaaatatctgtggtatgtctagttgatgtcagaatgtaagttttgacccttttgcactaagaaggccccgaaagctgaaaccctagttgaagatgtcaacttgggcgcagggtgaaacccaaggtgcccagtttggcttccgggttgtagattcgtgtaatttcagctcttgaggtttggattaggttgctccatgtcttcatggcacaaa

SEQ ID NO: 127662 - DNA, 798 bp, Cannabis sativa
taggtaaaggaaaggcgaagtctgaataggagtgaatctgagctggatgaggttgtacatgtcgagacagcgcaacttggagtgttcggtctcgggacatctggggttgtattatgtggtcgctgtgcgacctggatattatgtattttaaagtattatgtttaaaaagtttgaaaacgggatcccggaacttgtaaataattttgtatattataaaatttattaattaagataaaagttttaatttgacacgtttttcaagaaaattctttgattaacaaagactgcactgcaattgaaaaagcactgtagcgtgccttaacattagggcgttacaaaatcactagtgagcatttatatatgtttagattttaactaaaattaaaataatactactcacaaataaataatattagagttacaagtttgatctcaactatatcaacatttgaccttaaatttcatcatattacttgagttgagtaattaagggaaaaaaaatagagaaattataggttgttgagtaacatcacacctggtcataattgatatctctcaaggatttttcccttatcaactattaataaaataaattctaacataatctaataccaagattctaaatcaaaaccctttcaattccacattctctgacacattttgcgaaataaatttcaaaatccaatgtgagaccggatctgtggttccgttataggaggatacatgcgggtttttgaatcccgaaggaaaaggggtattcataatatctgggtgatatggctcaagctcctcgtcaga

SEQ ID NO: 127663 - DNA, 760 bp, Cannabis sativa
tgaatgcatagcaatcttaccataaatgaaaaaattattttgtcaactaacttgccaaaaaaaaaactttacaattgttattagtttaattaagtatctatatagtttaagtatcacatttagaggttatttggtatgcaggttttatttatcgaaatgagtttaacattgtttggagagtattgaagggaattataaatttagacaatcgcaagacgacatgtctggatcacatctaatagatttggacataacgaatccaatagatattggattttatcatttgatccaatccaataaaattgagtcatccgattcgattcgatccgatctaatgaatatattggattggatcagttcctaccattgtatgcattaactgattttctattagattagattggatccatccaatttattttaactaccatttaagttgatttcattaaaaaaaaatatataaaaaacataatttaaaacctaataacccaacatacataataaatattagtttagtccaacctaattctcataatttcataataaatccgcaaaaaaataaagcttagtcaataacactgacaattttattggcgtttaggaaaatgaaaattaaaattttagatctaaggtgttttttttagtctcatgataattgcatgatggtataggtgagagtgatatctaagattgaactaaacaattggagcttaagacttgagagcttaggattgtcttttggacaaagtttaacgacttg

SEQ ID NO: 127664 - DNA, 1114 bp, Cannabis sativa
acttgtttcatttctaacttcttgagccatgagcaacaattgaactttaacaactgagtagtcatatttttaagtagatagagatgttacaaaaatagagtactcacgtgtaaagccattgaaaatggcttcgatatgatcttgagttgaaagaacatggctaatggaagctagagaatcaacaatgtgtttgatcttgagcaagtagtcatttagatttctagtgagctttgtgtgacaaagttgagttctaaaatgactgaccttagctcgattttgagctgaatagtactcttcaagagtaaaccaaatctgagcagcactattccatccaaccatgcgagtgaggatcttctctgtcatggacgaggaaagccacgtgacaaggagactgtcttaaatgtcccattcaagaaactcttcagtgattcgattttctactgcatcttttgttgtcgtatactagggtggagcttccattaaatcaataaacttgagtaactgatggcctttgatagcagcataaacctggtgtcgccatgggagaaagttgttttcatcgagtttaatggagaaagtgtgattgaatgaaagagatgaagatcttggtaaaggattggatccattgggatgaagtgtggaatcggacgaagttgcataggccattagaacgaaaaaagctctaatatcatgttggattgatgaaaacgaagaatgttaaaagaaataacagaatttgtctatgttgattgaaagagaatgaattctgttcaactataaataagtcagtgtatatacatatatatacagttgagcaacagttgggaattaattacaaagttagttacatgtaatcaaactaactgaaattaactaactaaatagtattgaactaatcctaagagagttaactaatcttattctcaataagactcaatacttaaatgtaccaataataatataatatattaaaggatgctagacactattaataccttatagtatttccaattcaagaactactcttttttttttttgaagaaaagcgtgcaatatattagcataaatcagttagacctgtcggtcattacagaaaatattgtcgggcaaggag

SEQ ID NO: 127665 - DNA, 569 bp, Cannabis sativa
aaattgagagaattaaggagagaagagaaaaatagcttgagtgattttagaatgtcatgtagtcgcttcatacttttcttttatgtatatatagattatagtaaataaaaaaaatagtagtatattggtaatatacttttttttaataatcatttttaaatgaaactttattaatcaaaagctcaaaacaaaggctaaggcaaatctgttgtcaaagcagcagatgcacaatggggtaaattcccaaaccagacaatgtgttcaaccacatttaaagccaaaacaaccaacaaatgagccactttattacaatcttttttgacatggagagcagaaatacaatcattaagaagagtagagtaacaccctactaattttaggtgtgttaacatgattttcaactttactatgcagctcgttggtaatcaacaaatttatggaaatttgtgaataattaaaactttatttaactaaatataaataccaaaataacatacttgtaataaactaggatcccatttaaaaaaatattgataaaagttttacagtgcatattacaaaagtttgtc

SEQ ID NO: 127666 - DNA, 567 bp, Cannabis sativa
attttcaatggtcttaaaaattcaaatgacatgatttggtacatgtcaaagttcagaagacaaaaatcctaattagccattattataattatgataatgttcataatttactatattcgtataaatagtcatttttaaatgcttgaaaaaaagtagatagagcacaacaacaaattatttaaaccctaatttgatcattttatttttttttagaatttattaaaaaaattacagatggtggcttagtatcttaattagaccgtaccccggggccactcaaaacattacagcttatatacatgacaacacatgggaaatttgattaaatatgcataaaatactttaatatttttttcctaaatctatatgtattgaaattggtcatatatgaccacattactattttccccataatacccctcacatttgaaatcccaatcagcctcctctctctccctctcgctcaaacccacgacgacggcgcagcaccccattcgacccacggcgaacccaatcgacaaccgaagcaacgaccctatcgacgaggcaatcgatgaccggatccac

SEQ ID NO: 127667 - DNA, 613 bp, Cannabis sativa
ttatttgatttctttccttttttctttttcatatcaatggagcatttaatattttgtattatagcattgactgcaatagtcttcaagcccacaggcatcagtttcttatttataacatatattttatggtagaacttaagccaatatttgcttagtaaaatattcaagtcgctttccataagagcaaaagcttcaactttgttgtgggctttgagattagttgtagagattggaaaatcatcatacgatgacgactcgaatttccattctattagttcctttccaaaatgatcacctttttgaagacgattcatttgagtggtaccacttccaaaactccaaatcataccttgtgtgatgaagagcatcatatcaataggctcttcctttcgaatgatataacttctctctgaatacacaactggctttagaattttgtatattgtttcataaacatgatcttcatcaatgttttcgaaaaatggaacctacaaatacgatcaataaaaagttatacataatatttatagagagtagaagtatcacttttttcctatcactacaaaaaactgctacttttagtgacaactttttaaatattacatgtgactag

SEQ ID NO: 127668 - DNA, 1721 bp, Cannabis sativa
tgaccaaccacttaggcaagttttaatgagcaaagcatcagggcacctactcaagtgggcagttaaactaggacagtttcagatcacctaccaccctcgcacaacaatcaaaagtcaaacattagtagactttattgttaaatacactagcttcgaagaagacgatctcatgatctatgaagaccaagtccacgcacttgagactgcagttcaaagggacattggaccttccaggaaactttatgtagatggtcctccaatgaaaatagctctggtgtagtactcatcttggtaactctagagaaattttgaactcacgatgcattgcggtttgagttcaccgtaataaacaacgaagcgtagtatgaggcactcctagcaggactacaattagcactagcaatcaaagccaagtcacttgagatttacagtgactcacaactagttgttaatcatattcttagggagtattaaacccgatggtcaaacatgatagcatatttaagcaaagttaaagatttattagcccaactcaagcacgactccatccaaaaagtgttgcgtgagcagaatgcgaacacatactcactagctaaactggctagtacaaaagattctgacactctcagtgtagctcctgttgaatacctaacaaaatggagcattaacaaagactgggacctatccttattatcgacaacagtccatcatggatgaccccgattgcacataatttagaacaaggtattcttctaactgaccaaaacaaagctaagagaatgatgagaaaaatagctcaattcatcatcggggatggagtaatgtacaaaagagtctattcaatgccacttctaaggtgtgtcatgaaagaagaagccaaacttctcatgatcgaggtacatcaggaattttgtggcaaccatgttggaggaaatagcctttcaaagaagatactaaggcaagggtatttttggccaacaatgactaaatatttgatggattatgtccaaatgtgtgacaagtgccagagattctcaaaaatacctaggatttctccaaatgaactcaagagtatgcaatctccctcgccatttgttgtatggggaatcgacctcataggttcactacctaagggaaaagacagagttcaatatgctgtagtggcggtagattacttcaccaaatgggtcaaagtagagcccttacccactatcacatcaaaaaaaggttcttaatttcgtggtcaagaacatcatttgttgctttggaccaaccttgtcctaaagataatggtaggcgcctatgcttgttcctatacctatggggggtttatttttggattaattgattagttaattatttcaattaggcaaatattcaatttgaaaaatggttatagatatttcaagattgttgagatattctctcaagtaattgagagattctgtcataaatatcagtaatcgaattcagttatagatatttatttatttaaacagttaaatataatttaattaaagggatataactactataaataagagcctaatttgagaaatcagtacacttcctttacactacaaattttgaaatatactgagagaaaaggaaattagtttttctctctattgttctttcttatgtgttgagaactcaataagaacaaaggttatatactttatcccaatagcccacactattccttgtgtgtggtggatcga

SEQ ID NO: 127669 - DNA, 1136 bp, Cannabis sativa
aaaaaataaaatgatattaatatttaaaaaatttaataatttttattttaattattattattattttttaaagttaatttaaattgtttttatattgatatttattttcaaaagtttttccaatgactacttgaataattttagatgccctttaattagtaccgtaccaatttacttttcctaaactcattttttttttgcaagaaaaataatatctaattgacataattaatttttatttgataagtggcgtctcaaaagtgcagccaaacaacaagaagataaaaaccagaacactcaacaaacagtcaataacaccaaaactatgcacaacctaaaagcaaaacaaagaaaagactaaatgtaaacataaaaaaattagcagtaaattatgaaatgccaaaaaatgagaagccaacaaaaatgagtttaagaaaagcaattattttttaaaaataaatatcaatataaaaataattcaaattaactttataaaaaaataataataattcaaaacaaaaatttataaaaattttaattattaatattattttatttttttaaaaaataaatattattaaatattattataatatgtataaagttttcatcgtatacaagcagtcctatcataagagaatataccttacatcataataaccacatgatctaaaatcaatggtcaaataccatagtcttgccctaaatatatatagagaagatctagggtaggacctatgcttttgtcctcataccatagggaagtaaaataaaccaatcaaaatatagaaaaagtgagatgtagatagaatctttttaatgaagtgtatcagatcattccatactattctattttttttaattattatttttatttatgaaaatttcaatagtttattctaaattatgttagagtatttgatgctgtgtttactttttatttatttgtaataagacataatttaaaattacatgcgatgttatgataaaaatatttaaaaaaaaaatcctttccaattttttttttttttaaaaaaataccctgacaaaatattataaataaatttaacaacgttcaaactgcccgcatcgcaccacaccgcaaaaaagatgtggtttaaaattctttgcggtgc

SEQ ID NO: 127670 - DNA, 785 bp, Cannabis sativa
tggtcgctgaaaccgaagctccacgttctctctcttgatctgcttcagccattaattttgtcctaatttgttttttatttatttagaaaataatatcaatggtagtaatggtggtggtaatagtggttgtgtggtggtaatgatgataatgagatgaataatagagaaaagaaaaagagaatgggaggctgttggaatggataagaagattagggtttttttttgttctcttcagtgaagaagaagaagaagaaaaaaggaaaaaaaataaaaatataattatttttaattatttttaaatttttttttttaaatatttaattttttttaacaattaatattacgtggaccaataaaaatttgacacgtgcacacaagtgtacacgtaggcaggccactgtggcacttaactaagattttttaacagaagtgtaaagagcaaaacagaatgagggttcagtaagttttgctgtcaaatttttactttttgtggtcaagtgttaaaaaatttaaagtttaagtggtttagccccaatatctcatatatatcctatgtagtataggataagtctatagtacatgtttgagagtcccacattgctaatatgtggaatgataatagaatatataagaagaatgggctactcctcccattgccaattggttttgagatggaaaccccattcatcttatttctaaattttaacatggtattagagcaaaaacaaacaaacaaaaaaaatctctaacgactatccaacccaaaaaaaaagggaaatttacat

SEQ ID NO: 127671 - DNA, 1735 bp, Cannabis sativa
tttttatatatatatatatatccaaatagatatgaagtctaccgaatatttttttataggattaaaactattattatgaatttaaaaaatttatattgtagaccttttaaaggattgttctggtagatttttatttatttcagtacccaaaatattttttagtctaattttttttagtgatcgcatacattgtagttatttaggatcacttgtaaatttttataattctgaataatttacaatgttgaaaataaggtttaaatagtcacttagtgtataaggaaaaaaggcacgcatgcatcaaaatatgtaaattttatttttggtattgtaaactactctaaagtttctgaaaatttacaagtagtcctaataactataatatacatgattatgtaaaaaaaaatagattaaaaagttatcgggtgccgaaacaaatagatggtctaccaaaatacctatttaattaggaggttttactgtagacttacctcttactttattggtatattaaattttagaaaatttatgtagtagaccaccttaaaggattgttcttgtagaacccttatctatttcaacatttaggaaaaaaaatagtctaatttttttttatgattgcgattattgtagttatttatcacttgtagatttttagaaaattctaaatatatagtgtcgaatattagatttaaagagttacttactacacgtataagagaaaatagtaacgtgagtaataaaatatgtaaattttattttcaacattgtaaattatttgagtttttttttttgaaaatttacaagtgattttaaataattataacgtacgtgatcatgaaaatttttgactaattcctctgtatacagaacatattaggagtctactgaaatattattttaggggtgtactatagacttatcctaaattttagtatcatcaaatatatttgttttagcttttgtcaattttacatggttgagatagaaaatgttagtgatgatatgttaatgtaattttaattaaaaattgaaaattcagtgtttgaagtgatggaaatttctgtagtagaccctaaaatgagagttctgatagattttttatttgtttcggtatctaaataatatttttagtctattttttttttatgattgtgtaagttgtaattatttaagactacttgtaaattttaaaaaattctgaatagtttacaatgtcggaaataagatttaaatagttatgtaccatgcatataagcaaaaaccatcgcacgtacaacaaaatatgtaaatcttattttcaccattatagactgttttgatttttttttttaaaaaaaaaatttacatgtagtcctaaataattataacatatacatgatcatgaaaaaagctacactaaaaagttctattgagtaccaaaacaaataggagtctaccaaaacacccatttgaaagtgtactgtagagttacccttaatatatatatacatatatataaatatggaacacttttcaatgaatattacctattgatgggtactaaacaaatttaattataaatattaatttcaaaaatagcaaaccattagattttggtctgatatcagataataaagagaaatttcaatttccatgcttaatttaactacttaattaaagaaaatatcaaaaaatacctctttttacactatatcaaaaatatgtttatatggtggtcgtttttttttttttt

SEQ ID NO: 127672 - DNA, 1544 bp, Cannabis sativa
attttgttaatttttttaaaaaagggacatttattaacttaattgttagatttaggaccattttgcatcttgaccctaattttatactcatgtaactatctattttaaattctaccttccaataccgaaaatgattcaatttttttttaaaaaaaacatgtgagatatgtatatatactacaatatatatgattctacagtggaaattttctaaatgccctatttatagagcatttgatagctcattctaattaggtaaatacattgtaataccgtgatgttaaatgcaacatatatttaaattaggatttcttaaaatattttttcattcaactttattttctatatttgctatttaattgagaaattctatttgtctcccacgtgcccatcatatactatatcatctaactaattttttataattatatttttattaattcattatttaattttattaaatgctatggaccccactgatataataatgcattaattgggataaaactttttttttttttctgctattgggttgcaaatagtcttctactgttgtttcaaacaccagccctgggttaagagctttcattgggttgatttctcttacatttgtttcgtgtgtactcgctatagagtttgagttgtttgtcaatggtttttccatgttgtattcacttgttgcatcaaaacatagaaaaatatcgattaaattttattcttgaataagatagttccagctctaagtgaagattttgtgtcacttttttcacctgttgtcatgagtgttgatctgatcatggaagatatccatttcgatcgaactaatttgatgaaagcaactgctcctgcaacatgtgggcaagccattaatgttctagatttcaaagcaaattcggaaggttttaagcctattggaattgcccctggttccagctctaagtcaagattttgtgtcactttttatacctgttgtcatgagtgttgatctgatcatggaagatatccatttcgataaaactgatttgatgaaagcagctgctcctgtaacatgtgggcaagccattaatgttctagatttcaaagcaaattcagaaggttttaagcctgttggaattgcccctagttcatcactttggggaatcatagcagctaaaatggccactcctagagccattatatctggctgaaatttagaaaattgtttcacttttttaatgcacattacaaaatcttaagaaattgacatgcatatatagctacacaaataataagatggaagcgaaaatagttataatgacattgagaatattttctgtgatctgtccaggaccccttgatgaagaaaatacaataattaatgctacaagagatgagtttgtaaatttggaatttttcacaattgatagatataaaattttatgattaatttgaatgataatgttattttagtttggattttttttttaaaaaaaatgcgtttataaataaaattgaagttagacctcatggtcattacaaaagatattaacaggtatagtagatat

SEQ ID NO: 127673 - DNA, 915 bp, Cannabis sativa
gatgttcattttgattatacgaaaagtagcgaggaaaccttgataggcaacaagaggaaaatctctatactaattagttatgtttgtattatgtatttaatgttgagatctggggtttaaggttcatatcatattcgataaatatattttttaaaaaataaatctgattctactcttccgttgcgacttcgatatgaaccctaaaaactaacagaatgattggtggatcaatgcaccccgagaagtttagtggatctctctcaaagaaatgtctaaaaggggattcattcaacatgtccaataaaccaaactcctcgaatttagtttttatcttcgggtaataaaagctgccgccatgccaagtaagacgtcccgtgtaatggtttgacatcggaactaacaactttggaggtcttgtattctgcaaagaaaattaaaaaacaaaaaaacaaaaaaaaagttagacaacaaattataaacagaaaagaaaatgaatatatacaatcggacccaccatcgtccctcatcgtacctatattgtttcccaaattataaatagaatacaaaacaaataatgaactatcggacaccaccaacgtaacctatcgtccctatattgtccaccaaattataaactaaaaacaaaagaaataatgaactatcaggcaccaccatcgttctttatcatccctaaatcgtcccccatattaaaaacagtaataaaaaaaataatgaactattagacaccacaatcataccctattgtccctatatcgtcccctaccaaataaacagaaaacaaaataaatagtagaatgtaatgaccgctttagtaatttgaattagaaaaggcaattagcactaatttttgttattttataattatttatgaattaattatttgtggaccccaat

SEQ ID NO: 127674 - DNA, 608 bp, Cannabis sativa
  modified_base (33)..(59): a, c, t, g, unknown or other
ctgctattacaggtcaaagaaaaatgtaaccannnnnnnnnnnnnnnnnnnnnnnnnnngaatagtcacccatatatatattataataaagttgaaaataatctaaagtacataattgatttattaaaatgggatgctactatatattaattaatgattattattttagatcttagattttatataataaagcaaaattgtgtggaaaaaatagttattttttttaatttaataaaatcctatcaattcaaatcaaacaaataataatagaatagagaaattgacagctaagtttttttctaatgaaaatgaattaattagattgtgtataattgttgttgatatttctatcatgaataaataaattatagaatatttgatgagcattgtttacttagacacacatttggcactttaagaataattaattattaataatattttataaaaaaatattaaattaaaatatgtagaaagatatctaattagactaataagttaataacacataataattaatgctcacaatgaaaactcttttaataatatatgtgtttatttaagagaaatgttaaaggataccagtggtgcctagcaccctcctacgt

SEQ ID NO: 127675 - DNA, 959 bp, Cannabis sativa
catggaacgagaacattgtttagtaataaattctagtaaattttgacggtgatgaagagtaaagacaacaacgaaaacctatagatacagtctaacaaccaacaataacaatcactcaaagttcacctattaatgaagcacccactgaataaagacctcaacaagagagaaaaaggcctgcatggatgattgattatgatgtatctgattttgaagaggatgcatttttgtttatttgcagatttgatgcattagcttatggagaagttgctaaagaaccaaagtggagaaaggcgatggatgttggaattttaaccatagaaagaaacaatacgtgagagttgatggagcttccaaaagggtgaaagactattggtgttaaagggggtgtacaagacaaagctgaaggaaaatggtgaagttgacaagcacgaagcgcgactggtagctaaaagctataagcaagagtttggtgtggactacaaatgatattttgctctagtgacgagacatgatacaattagattagtcattgcattggctgcacaaaactcatggactatcttctaattggatgtaaaattagaatcaacctcctggctatgttaagattaaaaatgagcatgaagtgtataaattaaaaaaaggctctttatggaataaaacaagctccatgggcttggtagggtcgtattgaagtttattttttataggagggttttcataaatgtccatagcacacacttttcatcaaatttggagatggaggtaaaattatcattgttagcttatatgtggatggtctgatttatactgaaaatgatagtgccatgattgaaaattttaaggatttgattggtttgagattttaaaaattgtgttttctaaaagagtgttttggaaacaaaaatttgaattttgtatgtgaaaaattgcttttaaaaatgtgattagttgta

SEQ ID NO: 127676 - DNA, 631 bp, Cannabis sativa
tttacgtggctcgccacgtaacttacatctagtatatatatatatatttatgaggttatgtgtgagaacttaactttttccattttacaactaaaagcaccattttacaaatttttgattgagtacacataggtgtatattaaataatgtgtactaacataaatcttatatatcaagagttaaaaaagcattcttatgctatggggacaaaatagacatgccaaccctaaaaatttcttatattatatactttattttaaaattttaaaatttattatttttagtattaatataattatttatttaatttctaaaaaataaattattggtttaactgtcactaattaaaaaaaattaaaagtataaatttgtaacaaataacttttatgaaaaaaataatatagtacaaaaagataattaagttgtcaaaattaagtaaaaaaataacttcgtaatacaaaatattttgaggagttgatattattttgtttattgcgacgaaattggtattttgttatttttatgttgctttgagctgtctttttattattttatagttattttgtattattaattaggtgttcaatatttattttttaattgttttaattattttttattttagtgaaat

SEQ ID NO: 127677 - DNA, 681 bp, Cannabis sativa
  modified_base (654)..(655): a, c, t, g, unknown or other
taatcaaccagtctctggtgagaagcctttaccaacaagccaaccaggtaataaacgtgtgcttgggaatacttttccaatcccaaatacattaggtagctaatcatgattcatcagtgtactagatttatactgacgtaataatcagtgatgtagtttacttattcttttatagggcattagcaaagtaaacttgcattagatgtgttatcccactttctgcagagggtgatgtcacatctagtaagagtgacacctggagaacattttctaagcatggacatatgattgtcctttgacaatctatccacagagttttacatgaaatggtctagtttacaccttcagcaggaatcatcagaatagaacctatatgtaattttctgaactgatccacaatatctaggaatgccgagtcttttaagcagggtagttcgacataagaagatcttcagagatactttccgtaaatattccaatattcaaatctcagtccaatccttaatttcgtgtgattgacttgcaccgacaagaaataataagaaaccttcttagttttatttgttttgggaaacttaactcatgcactttttctcctctaaataatggtgcaatccattatttagggatctaaatgttgggttttatgccctnnataaaactctttacaatctgattagt

SEQ ID NO: 127678 - DNA, 902 bp, Cannabis sativa
caacggggtcttaacatataattaatcaaataaattctcatatattgaactatataataatataattcctcaattattcataattatctaattaaggtttttctaatccatttaataactctagggtattacatgcatatgaagcatgagaaatttttttagtcacattatctaagtgggacttaattaataaaaccataaagcataatcagcttgcacgtgtacacttatggaggcatatacaagttaaaatagaggagacttagtctaatactaatcattagaggtgttcatgtatggttgttgagtaatgtagggatttaaaaaattagaatatttattcatggcatattaatataagaaagtaattttctacttagtttcaatcttttaaataacggaaacgtggcaacaagggagtgatagtccaacctagataagaaaactaagactaagttgttagtctcattattcttttcatgtgtagagaaaaaagaaaaacaatttaaattttgaattattggttaggtgtcatggcaagcttaagaggtggagttttccttctaagctcttattcaagtattgaaagaaattacttttgaggaccgaacctagttacaaggatagaggaacatactaagtgagtgatgtggatagtgtgtacgtggttgttatcgatggcagtcaaataagttggagagaatagaggagggaatagttgagagaataaaggttctttgagtttgtaaaaaaaggggtaagaatgaattttcagtcctataaatagaggactctagtcttcacttattcactcattcacaacccaaaggagcacccggcctgtagtgttggaatttattttaccaggatcttagatctgctcacaagtatgtttattaaca

SEQ ID NO: 127679 - DNA, 1359 bp, Cannabis sativa
ttcactttctcgttctctcttcatcttcttcttctttcttctcatctcctttatattattttatattattttataacaaaaatatatttataaaaaaaatcaaatatcttaccattaaataatataattaatcaattacttaacttactatatatattacataactaagcaatataaccactctttgtgggactaatttaatctttttagtattataataaaaaataacttttattaatataataaataataattaacaaattattaaatatataataatattaaaactatatcatctaattatatattattataattattaattaaatttattaaaacgaaaacatcataaaattaaaaaaaaaaaaattatgtcaattcattattttttttggagaattattgaagagtttattagcatcttctattatttatttatttgttaagaagtttgagattatactaatgtatatatagagagaattttaaattaatttgttaaaatgaaattgttattattaaaataagtaaataaggtggtgtaggaaaaaaattagagtattcttcataaatataatgcattagttttatattccatcatttaatatcgtatctgatctgtggtctcactatattgtttttatcaccgtatctcacatgttgctatcatcatattttatcgaattagtaagggatatgtcctgtcccaagacatagtagtcaattagtgagacattcaaagaagctatgcaccttcactaaatgttaataaaaacatgtgatcctgctttaattaaataagtagaagttgagtactacttatatactatacataattatgatcaatttttttaaaaaatttttatcaattaatatagatcaaaaaaatgttgaaaactgcgataatttaaaataattttttatcattaattaattaatatagattaattttattttttcaaaaaatagataaataaaaaattagaaaattaggaggtagagagtgttcttacttttgtcttcttaatgcacctcactttattgtattttttttttttaaaaatgattcaaaaagatattgaaatagattctatgaataaatggatataaattctattatttattattacagttttttttttttaaatttttaaatgtttgaatatttaagtttgtaattatttaaataggaatggatataaataggaatggatattctttatttattttttttttaaaaaaaaactatatcgtgtattttatttttaaataaataaattaattaaaatatactattttattaagtttattataaattttatttttttatttttatttatgtttatatgttaaatacca

SEQ ID NO: 127680 - DNA, 959 bp, Cannabis sativa
caaaacacagggtctaattggtaacttttgtaaagcagaaggaccaaaatggtatttacccttaaattaatgaatattggttgagatattagataatatttaatttaacataatatttagttttaataatttttattttatataaaatttatatctttaatttatataccagtttttcataactttttttccttccttcttatattcttaaaaatatgtgcacataaaaataaatgttatatattaagaccaaaaacttaaaataaaaaaattatataaaatttattaaatagacaaaaaaataattataaatatcttttaaaaatatgaaaataaatattaaatttaatacaaaataggataaaaaattaaaatattatacttatacattaatttatggagtgcaaatataattttcttatttttattaagaaatttttttaaatggtccccttaaaatatttttatacactttagccccctcacaatagttttccgcctccgtcctacataaaattattataagatatggaatggaaaagtattaccatattatcattactagtgataaatcaatatatttttgcgtcagacaaataatattaaagaagttctatttgcactttataaaattataaatacactatattattataaaaaaatataagtttaaataatttataaaaattactattaatgttttttaaatttttttttctcatattattttatattaattttaattcttattttgttttcatttttataattttttctaactcatatatatactttttcttagaatttttcatataatttttttttcataatatttaaaatataatttaattttttttgatagatagatatattttaaccacttgaggctaactcaagtgaccataggtgggcaaggacggacccattaagagtgatgtgggggctatagcccccacgaa

SEQ ID NO: 127681 - DNA, 796 bp, Cannabis sativa
aaaagggttcgcttttataagctcctcctctattctcttggagatacattgaaggattttggtgtcatagcaacaatggaaaatgccaatatgggaggtatgtgttttcttattttatgatgctctaaataaaatagatcttagttgatgattatgagtaatgaagactagcatttaatgtgttcttggttagctcataatcatagaactttaacaattggtatcaagagctgatatatttgattttagagctcatgaacttaacccatttttattttctgatttttttttttaatttttggattaatatattttattaatgggtaatgtgagattaaatgttgtataatgagtttttttttcttatttttgggactgttgctatatggttttatggtgaaatatggagttttcataatgttcattaatggagaaaaacccattttgggtttataatattttatctattattttgtattctttgaattaaatgggtattaggaatgatcttgggccattttccaccaattttttccattttagcattctatcatttccacatctcacttttgcataatattaatgcatgaatttattcataatgttagtaattaatattatcttgttatggcattaattatttctttgtttaaacaattagtgtttattttcttacctaccgtaagattaagcatggaaagttgtttggtaatgaggaacacttaaatattaatttatttaaatattgtatcttcctccaatattagattaagatccttataagtaattaattatc

SEQ ID NO: 127682 - DNA, 787 bp, Cannabis sativa
tagttcgactagacttgtaaaacaattggagtgtttcacaagaatattggatcagatatagctagctttgattcattgtttgtctgtaaatttaatgttataataatcattaattaatgtatgacgaattgtgttattgggaagggttggattggacttcttgctgtataggctaccacatcatcagcagcaataatagtgtcaactaatgatattatgacaagtgtagtaaagtggctgacttttttcatttgactttatgtttcatctagagacaccaacacacgatttagtttgggaaacatgcaagtaattttactttggcttgtgtaattatttttttcaatttttaatgatttcttttgtgagaaatgttgaaaaaaggagattattattattattatttattttcttctagtttgaataagggagttgtcatttattattatttttttttgagagatttttggtttgtagccggtggagttggtttgatattttatgttaaaaaaaacctagtttacttagagcctcctagatgaattaaaatagctcaatgtttaaattatagagaaaatttagcttctaataagtgaagcaaaccttaattattttacatattttttagctcaatgaatactgctagctaaatatgaaaataactattcattaagctaaacatactttaatattattttcttaacttttctatatatatgtgcaattagggatgcacacggggcggggaattggcggggagtgctccccccgtccccatccccgttaa

SEQ ID NO: 127683 - DNA, 643 bp, Cannabis sativa
aaccaatgaaacactgagttggagcggaaggtagccttagtcagggtggcacaggaagacagtactcaaaaccaatctgatcttagagtgagaaggccacgaggcaggtctcgcagttcatgaaccaggaggcaggagacagctcaagaggaccctcagaacgctcaggaagaacaacctgaggaaactgaggatgcccttgaagatgagcaaccgaatgaccagacacatcatcaagaagtgcctcggagaccctaataaatgctaattacacaactttttgtaaaagaatgctttttcttctttaaaaaaaatctctctagaatttctctcttaagagtttttagctgctacgcttgtttttttgcctgaccagagctcatcgctgtttcttgtcaggtcgggtcatgttgattcctacactattttcaattttgctagggttgttggtatttttcagcttcaatgttattttcttctctatctttggaaatttatgttgctcattggcttttaattggatctccactggtattaatcttcttagtgtgttatttttatttgttgtgttttgtttctttatgtttatttttatttttaataatggtgttgctacaccgcttgctatttgtcactacaaaaa

SEQ ID NO: 127684 - DNA, 1219 bp, Cannabis sativa
  modified_base (44)..(54): a, c, t, g, unknown or other
tttagaattcatattaggattttaatgaaacatacttgttagtnnnnnnnnnnnctggtaaaatatttccaacatttctctctttaaatatttcgcttactccccccctttaagacaattttgtttttgtatttattatctatgttttaggtaaggggaaactactatggcccgaccccagacccttttatattttggacaacttatattacaagtttatatctactttgctttccttatgtctggcctatttctgcgcgtattttatgccttagtacccccttaagtgacataaaaaggacttttgggtcacttagcttaaatttatgtgggataatgcatatattttgttcggcacaagttaacatacaaaataaagaagaatttaagtactgaactcctaactattgatagtatttgcggaggtggtcagcattccaggctctaggtactatggatccgtccattctttttagcttataagtccacgagcctatttcatcttcaatttcgcatgggccttcccaatttggcccaagtacccctactcttagctcttgggaggtcgggaagacccttcttaggactagatcaccaatggcaaacttcctatttttgactttggaattaaagtatttttccactttcttttggtacgctgccatgcgtatttgagattcctcctagagctcgtcagcacttcttactgcaaggcttgattctttgctggatcgtaagtaactcttctgtgggacaggattatagcttctactgggaccatggctttgcatccataaaccattgagaatggggagtgtccggttgttgtccttgcagtggtccgataggcccataacatgcgtggaagttcttcaggtgaattattgttgcagggcaaaagtttcttcattagggtgaccttgagtatcttattgacaacttttgcctatccatttttttgtggcctcgcgactgcagaggaacttttgataactccgtgttgattacaaaagtcagtgaatttgtcatagtcaaatttctttccattgtctgagactattttgtgaggcaccccatatcgacatacgatgttctttatgccaaagttcaaggctttcttggaagttatagtcttcacaggttttgccttcgtccactttgtataataatccactgccactatggcatattttatcccaccctttcctgtgggtaggga

SEQ ID NO: 127685 - DNA, 2437 bp, Cannabis sativa
  modified_base (90)..(111): a, c, t, g, unknown or other
  modified_base (2300)..(2300): a, c, t, g, unknown or other
attacattttaataaaatatacatatatagtttataaatttaattatgtaaaattaataatttattccaaattgtaatacatgtataaannnnnnnnnnnnnnnnnnnnnnttttattatgatatagtattaaatattgtttactgttattgttatccaaagaacttggttggacagtttgtttgtagacccttcccgatctgtcgattagtcttccttggagaggatctctgacgagatcctaacctcacttgccagttctttcattgaaccaccttactaagttgctagcttatttgttacggcagtctaatgttacctagtgagatcggaggatgcaatcttggtcatccatccatcttagaaattcgtgtctctattgtgcgaaggaggacaagccttggcacgaagatttagtggcaagattagccagactctagaaaccactgtctgggggcctggtcaggggtttgtggcacaataacaacccctattggtcaacctttggctgaccagcacctaagtggtgcacctctggctggccaacagggtgaactcccatcccagagcatccgggaacaagtaacctaaaggctaatctttaaccagtaatgtccaggagcaggtggaaacactcaagacaacaacaacttgagaagtgaatccaatcacttcagactgttagatctaccaaactccaacaatttgtgtgatctactccatgtcaacgcacaagctccaccagctagtcatgaaagaatgggtgccatgccctgctcagcacagggatggccgaccatgaacagctaccaagctcaggactggccggccatgaacagctgccaagctcagggctggccgagcttgaacataccctctctaagggtgtggtcggcaaggctctggccaatctagggctacaagtcaatcaagaagggccaataaatcaggaacctagagcaacaaatccttgtatgcaagcacagttggatcaaatacgagacatgatcaaaggactagctggtccgaaactatcagatcttgagctggataggtcaagggatttaccattcagcatacatcaatgtccactactacaaaacaagccttttaaggctgtttttttttttcagcaaattaataaaattttaataaaaatacctacgaagtcggttattttgtaataaccgactctgtaggtgataatttttttaattttaatgaaaaagccctacgaagtcagttttcttttttttttttggtaataacctactccgtaggtgatcttttaattttaatagaaaaacacaaatggcgttggttattttgtaataactgacactatatgtctttatataaccctctccgttatcatcttcctcaaaaccctaaaataaccagcagcccttcttcctctcaaacccacgaaaccctcacccaaccaccccatttcccccctatttcttaatttttcattcgtttttacccattttttttaatcttgcattattcatatccaaaaatatatccccacagttcgatcatcttttatttggtcttttagggtaaatcaaacatagaggtggtagttgtaggggttgtggtggttttagcttcgaccgccgcttttggtggtgaaattgttgaatctcaacgtccattgaggtataaatctaatctctaataattttattaatgtaaattgctttattttttattttgtaaatttttttagggttttcccatattattaagattatgttcttatggttgtgcatggtggctggattttgataataaggtaaaaatctaaactttaatagtatatatatatatatgtattttatattttattgagtgtgtattgtatgtatacataatttttaattgtatatatattatatgtatatgcattgtattgcatatgtatacatacaaatattataattatattgtatatttttttttatgtattgtatatgtatatattgaatattttaaacaaataattttgttaaatattgtgaatgagaatgagataggagagtattaaaataaaaattttaaaaattaatttctaaaaattaatttacaaattaattctatttttatcatttttttaattttcaattttattcatgtgttttttatttttttagtagctagtaaatagttagttacaactacttaacaagttactaattttaaatcttattgatgtatttttattactaactagttactcattaattatataattaatcagtagttaaataaagaattttttaattttgtagtanttttttacattgtaggttgtgatgtcaatttgcaagtattcaacttacttagtgttgattggtttgtagctagctcgaggtatataattactaacttttattattaattaatcatgaatgcttagtagagtttgaat

SEQ ID NO: 127686 - DNA, 774 bp, Cannabis sativa
catacctgtaaaaattagcaaaattaattatttattgtatttggtgattaattgacatattttatactcattaagtaatattagaaatagtgtgacattcacattgaattaaaatgaattttaagtcacgtttgattggaaataattaaaatataagaataacagaataagaattgaaataaaatagaatttagaataaaattttaaatacataataaaaattattaattttttttctcatcttatatttaaatagtatttctttttattttaaataaaatatagtatcattctataaaagtgatgaggaaaaaaatcattccattccaatactttaaccaatttgtttagaaattaaccgtgattttttggtacacatgagagtttttactttaatgattttaaataactgttagaagtttttacaagtttttgttatttagatttctatgagtgttcttaatttttactctcgtggttagttgtgattttcagatagatgaacaacttattatttagctagatgagtacttttcattttctttgtggaatatatatataacccttattacattttcaataaaattgttccttgttttttttaataaaaaaacaaatatataatcaactttttaccctaaacatcactaatatgcaggtcgggctctatcaatggtatttgtatctaaattttattttttgaaggctaattatgatttttgtcctctacatgtatcaaatcatgttttataaacttttttagctgttaaaaat

SEQ ID NO: 127687 - DNA, 1008 bp, Cannabis sativa
  modified_base (89)..(101): a, c, t, g, unknown or other
aattatactattttaattattattaaaataaaaaactaaaatattaaataaaactaacactacgtggcttggcacgtaacaatcacctnnnnnnnnnnnnnatatatatatatatatattcgatggaagaaaagaataagaggaaatatttgtagcatatatatgaactttaataataataaaaaaattgtcccattatcggttagtgacatatagtgtagttaataattaatagtgtaattaataatttgtcccattaatggtaaataaataaaaaaaatatttgtagcaatgtatgtttttcattttttccataattcaataagattttatttacaataaactccattacaaccgaataaaatatcaaagctcaactaaaatgttgtacccaaggacacatgcccttctatatatagagtctttgttctttgtttatgagggtttgttttgctgtgaatctctatggcttttagtagtggggttgttagtgaaatattagaaacaaaatggtcagatatttgcttattggatggtgaggctagttgtttttcatgatgaggaagcgagtaacctgagtttgatgatagatggtgctttgttggtcatctacttaattacaggaaaagtattagatttccaaatgtcttagaatataatagtggaccatctggaaaccaggaaaaggtatatatacttgagcaaaattaatttttattttgattctaccatgcatgagatcgatattcaacgagtcattacgggaaactcttggacttacaatcgcaagcaacgtatcattgaatgtctgaaaataggggataatcctctaaatccttcatgattccaatccaagaagaaatggtttcagtaatgtccaatttctcttgggttgaaattgttatcagcgttttcgaatgacaaataaacgggccatgtaacaccctaactagcctaggcgtgttaacgtgatttttaaacttgctttgcagctcgttgctaatcaac

SEQ ID NO: 127688 - DNA, 1287 bp, Cannabis sativa
ccgcccccgctttaatttaaacgggtattgggacgggtatgggggtgaatttaagaagcgggtatgggggtgggggagcgatccgcccattcgccccgccccgtttacatccctagctttagtagttgttgattttagataactctgtttatccctgtttttctccgattattgtttgtatttcattaatcttgtcactgctaactgtttggtgattgattttttagttattttagttctgtactttagtcttaatttttttataatcggctaattattaaattttattttaacaaaaaatcagtttataatactattagtattattttgaaaaacaaaaaatccaatttattattttaaaaataaagaatttaaccaataatttttgcaaaaaacacaatttaaatgaacattatttactcatatacaaatatataaattgagtatgtgtaacattttttttagtttatattacatttgtaaagttacatatccggattcgataccatgactcccctgagctacacacctcaatactctctatacgttgctagcctcacgtgattgtgtgtggactaacatttacttgtacattaagaccactgatcttgagtcgttttatagtttttccactactgataatataagaaatataatatcaccactgcactgttcactatcacatcatgaacttggtaaaagtgacccaaaaggcaaatacccggaaacaagcgcctcactaaagtaactagatatgcattgcatgatttccatttttaacaacattgtacactacactactactgtatataatgtcatttgcgtatatatacatatagtgtgtgtaagtgtactatatagtaacctagctatatgattatatataggcaagccaaaatggaacatgttaaaatctttaagttttcagaaaacacacccatcatcatcatcattattatttatatattttcaatttgtttttactacacttcattcatcggccataaccaaacaaagaagataagaacaaagcagtaactgtagaactacagtgtcatatattccaatagtactactgaccaatccaatctccaattaatattaatacttttatttgatttaaaacggttgcctaaagaatcaaaattatggcatgtcataataaattcgtaatattggttggacttcttttttttttatatatataatgagcggcgcgaatggtgtttaataaaggggtaagttgaaaaataaatttacctttaattttatatttatttgaaacat

SEQ ID NO: 127689 - DNA, 3463 bp, Cannabis sativa
taaaataatttccaacaatcacatgtataagaaaaaatagacatgcatttaaaataattgaatcttattttgagaactgtaactatttaaaattttttaaaaatttacatgtaattctaaataactacaacgtacacaattacaaagaaaaaaattagattaaaaagctctcttggatacaaaaacagacagggatataaactttcattttagaggatttactatagatttatctaataatttttgtaccatgtaatatatagatatatatatatattcatatatagtacactttataaaaagggttgttctggtacgttgtatatgtttcgatatttaacaaaattatttagtgcattttatttttatgattatgcattgttgtagttatttaaaattacctataaacttttaaaaaattctaaattacagtaccaaaaataaagtttatatattttattttacttataactgtatttcttatttgtgtggtaaataattatttgaactttattcttaacactgtaaactatttatgatttttttaaaaaattatataattgtattaatattaaaataaatttaataaaaatatttgtaattatagtagaaattattgaataaaaattgtaatttctataaaattatatcttattaattaagtgatcaatttttaatttaataaataacaaatatttaattatatatctcaataaaaaacactaatatccatcacggttatctgtccatcaatatatatttttttaaaaaaccaaaagatatgtcaattgaaaaataaatatataatcacaatatatatatatacttatatataattttaataacactacatatattatacatttcataaaattttgggggccatggccacactaccccctaaagtacttcagcctttgtgcatgagatatttacaataatttctacagttcaggaaaattttggtatgagaaaaaaaaattaaggggcaaaactatacaagggtcatagttcggaggataaatcttatttattctattttaaatttcctaaactagtaaaaaagctaacaccctgtccaacagggacgccacgtgtgtatttttataaatttattttaacctaatttattagcttagaaaaaatatggtttaattgaaatttttacttaaaataaacttaagtgttattaaacataaatccaccgttaagtatgaggatcccttgtataaaacctttacattctgttccaaaatttattttacaaaataagactacatttcaaaataccgtaaagagggtggatcctgtccactggaaatcgaggcaccgcggttgatatgtacacgtctagaaaacctctgactcatagttgatccactttacctgcaccatgaagcacccgtgagtcataaagactcagcaagaaaagctattaaatcacacgcaaagtaaaaaaaaaaaacaagtaatctcaacatgacataataaacatactcatctttcatcacatattcagcaatgcatttacaattacacgtctacaagatgactcaatcttagtgcctcataaagcacccttaccactcgttatccacgagctatatatgtcactatcgttgtccaataaaacaattgataagtaagaaacctatcggcaatttcaaacaagtaattactcataacggtaatgaccgtttccacccctcaatcataattgaggcacaacaaatacacatcattacctcgatcataatcgaggcaccaacgattacaattgtttcttatctaacatacttaccggtgcataaaaattttcttagtctagaaatcaggtgtgcacgccgacctgaatggaaacaatgctcgacgatcctgggtcctatgttacgacaaccaaatctggtaaataccttaacaaatttttgacagaaaccctaataccaaaactgaacaaaccctaacttccattagctcgaaaataggttatacaactcccaaacaacctaaactagatcatgggaatcatcctgagccaaaaattggccttgaagaaaactgggactctcccctacagaccaactagttgactgattctgctataccaaaaggaaccggtcgatcgaccgattctggcaggtaagaaaatcttgggttttctccctcaaaaccgatccaaaacctctccaaacctatccaattgctctagaacggtataataccataaacacaatgtattcaaaactccaattcacaacaattcatccatttaatcaaaatatagcataatcaaatgagaattaagctcaaccctaaattcctctaactcaaaactaacagctttgtttctaaccaaattaaacttaaacaaatcctaaatcaagcggcctaaaaacttgttctaacttcaatttagtacctcagtctcgaaatcttaaaatctttacaaaacctaacctacaactctagaaaatcaaaggaaaagaagtggaaaattaccttaaagcttgaaccacccctaacccttgtcaaaacagcaaataattgaggaattttccagaaaaattccttgagtgcagctagtcctagggctcgagcaaggagaaagaaagaaggagaagttacgtccttcaattaattattttcttagtttatctcttattatttattaaacttaatttaatataaacttatctaaataacgaaaaccccaatttcagccaaaaattccatataggacaaaattaatactcttcaccaaaaggattcttttgcccttcataaccctaagattaaaatcaactcctaaggataatttagtcatttctaatcaatctcgcttacctgttaattgaaaattctaaactagtccggtataattccaacataacacaacttaattgtcgtgacatttctgactactccgtcgagtttcccaaaccgccaaacccgaaaatattttatttcaaaagtggtatctactatatccacatactccgataaaatctccataatttataaattacactttatttaattatttattatatttactctaataatcacacaattagctcaagtaataagatcataatcttactccaatatcaatataatcacatatgtaataaaatatacccaattaaatattgtaatattttctgggatattacaactatcccctccttatagaaatttcgacctcaaaatttaccttaataactcgagatactgctcccgcatctgcgactctaactcccaagtcgcttcttcacccttgctgttcctccacaacactttaaccagcagaatagtcttgttccacaacactttttcttttctgtccaaaatctaaaccgattgttcttcatatgacaactctgtttgaagctcaatatcttcatagcttaggacatgagtcgtatcagacacatacttccgaagcatcgagatgtggaacacg

SEQ ID NO: 127690 - DNA, 1260 bp, Cannabis sativa
  modified_base (1227)..(1232): a, c, t, g, unknown or other
tgaaatattttttaagagattaatatgttctgcaatgatattaaaactttgaataaattaaaataagaatgaatcaaaatgaaattacaaaaaaaaatgcactaatcttcaacttcaccggagaagacggtctgggcggtgaagagaatgacttctcgttttccctgaactaattttctattataatcatttataattatcatttttaatactttatgtttagccaggtggatcaatgaaataataattaagggtatatatgaatgcttctatattgaccaaatcaattaaataataataataattaagtgtctatcagtatatcctactttgattaattcaaatctaattttaattcaatacactacaatctacaataactttctaaaattttcgtatgtggaccaattatactacaggatagtggaacatggaactattaattagtctattttatgggtgcctattaaagaatttccctataatatatatttaaaataaaaaataaataaattttttaccctagtaaattttatcctaataatatcatatcactattggtgcctaacacaccctctaaaatatcatatcactattggtgcatttcagtatcaggtcacatataagttaataagaatattgacagtaaaatccacctaaactttatttttgtaacacttaaccacataaaccaaaattttggtggcaaaacgtactgaacctctattttattttgctttttatactttcgtccaaaaatttcagttaagtgccacagtggactgttcacgtgtactcaagtgtacatgtggtaaatttttagtgatccacgtaatattaattattaaagtattataaaaataatttaaaaattataaaataaataaattgtaaaaaatttatttatattctttttctttttttttttctccacacccaccaaaaccctaaagccttttcttcttctcctttctcatgccatcaccatttctctctgcttcttttttgaatagcctctgctccacgccagttgacctgctttggccaccgccagcccaaaatagactccatattgatcgaagctttctttatctattgtcaacttcaaataatatctagaagcacataaaactgtgtgtggtaactcgaaacaaaagccagcaactcactctcttggataagttccgctcagctgagtagacttgtgttgcccctgattttgcccannnnnngtggaccaaccagacagggacacgtgga

SEQ ID NO: 127691 - DNA, 564 bp, Cannabis sativa
atattattaattttaaaattatgatattaaaaaaaaataaaaattaaaataaaattaacatgacttgtcacgtaacatctatctagtatatataaattaatgcgataacgatgatctgtcttatactatatactattgtaggaatatttaggatttaatgtaataataataggtgcatctaaatattatatattgtggcataatgatattattttagacacaatgatgatttttaataaagataattaattatgattggttagaaaaaaaaaaaaaaactcacattgtaatttgtataatgagtgcatgtacgattactctattgctactatatattattatctaatttagtaattaataataaatgtactgttataattattaaaaacttttttatttttatattttaaaatagtattttttatatttttacacaaatttacttaataacttacataacaattaacgaaataatctaaatcacaatcaaaattcacttaacaatctacataaaaattagaaatttttacatgaaaaatcctttttactcactttattacataa

SEQ ID NO: 127692 - DNA, 716 bp, Cannabis sativa
ggcataaaacccaacagatagaacgggcataaagcactcacctctactcttttattccgaagttgatccattgttggtaagcacttagaaccggctctccacaaatgtgttttgatcttaggaggcaacctcaatttccacatgttttccagaaagtcgaagcctcctcctcactccaacggccattgatttgctgcagtaagttataagcagacttgacagtatacagccctgaagtatcttcatgccaaaccaaatgatcaacacattcagtcacttggagagggatttgcataatgagtaaagagtccctctcctcaaacatgtcattaagcaaatccaaatcccaagttctcgaatcaggtaccataaggttattaaccttagtgtttccaagtctagggtgggttgagattatgtaggggttgttcaagtctggcagctacggctctcctagtacatttatgttcatgccatcacccacacaccatctcctagtacatttatgttcacgccatcacccacggctctcctagtacatttatgtccatgccacgactctcctagtacatttatgttctttgggtaacaattctagtttcgtttggagaagcatttgggaggctcaatggtaattttttaaattactttctataggtaaagtatatataaagtaagaattatcattttaattttataaaaataaaactaaaaat

SEQ ID NO: 127693 - DNA, 540 bp, Cannabis sativa
aagttgtccatatagtttgaccataaatttgtgggtcacattgtatcatgtagcatgtgaaagagaaaaaaagagataagaaaaagttccaaaatgacccaacaagtaaaaaaatctaatcaatttaaatagctctagcaaaaacataaaatagtcttgtgtagaagtataacaagaatacaaaaaaaattaaagcattattattcgatactaatactattaaatatcttttagatatgtcaccttttaattagttagtaatactctttaatagttattatattaaattatataagactcaatacttaattacattaacaataatattaacacataagagagtgctacataccacttgtatattttaatatttctcaaatatcaccttctttggtatcacactgttattaggggtgcacacgggttaggttttcgggatttcgggttcgagtattcgggtttcgagtcttggaaatgtacaaccgaacccggtgtttgggtgtacgggtgtagtcgggttcgggtcagttattttcgggt

SEQ ID NO: 127694 - DNA, 1038 bp, Cannabis sativa
tatggaaccgaaaacagtgctccaactcacaccctactcatagctaattaactaactaactaactcatacctattttgttacaagttaagtagtcttttgtgaggagatcagctatttgatcgacagataactgcttggcaagaatttaatctctcacaaagtgcaagtctatctctatatgttttgagcgtgcatggaaaactgggttggctgcaagggcagcagtactctagttatccacccagattattggacaattcttcaatttgatgtgaagctcatgaagtaggaaggtaatccatctaagttcagcaactatatttacaagtgagcgaaactcactttcagtacttgaacgagcaaccacctgttactttttggcagaccatgatataaggttgttgccaaggaagatgacatagccacccgtggattgtctatcatctatacatgatgcccaatctgtatcagaataggtggttaatgtgaaatcagcagctgttttagaacaagtccttctccaatggtgccattgagatatcgaagaagccttttgcatgcttcccaatgaagcacagtaggagcttttagaaattggcttaacttgtttataacaaagggaatctcaggccgggtttgttgtaggtattgcagagcaccaattgtgcttctgtagagtgtaggatcctcaaaaggctgtccttcatgcagagagagtttggaagaagcactgattggatttgaacatgatttggccccttccatatgtaacttgaccaacaaatccgtgatgtatttagtttgaattaaatacataccagtggagtctctatgaacctccccaaaaaatagtgtacttctctaagatccttcaaggagaaggatttgttgagatctttgatcagttgagatatgagagctttgttggacctgttactaatatgtcatcgacatacacaagcaagataatcagtgtttgtccacttccatacacaaacagtgaagtatcagacttagaaagatgaaaatcccactga

SEQ ID NO: 127695 - DNA, 502 bp, Cannabis sativa
tcaaaaaacacaaatttatgaataaaaatcaaaacttgttaaaagggtattgagaaaaacctgtgagaagaaaagggtatctgtaaaatcgttcagattttgagaaaaaatgaactttttttttcctttttctgtaattttttttgcatggagaatttgagattgggataaagcaaaagaggaatatggttttttcagtttggattattagtttgagaggtatggttgatttggtgagagaggaagaagatgagagagtgaagggcatcccatgaagctaggagtttaaacggtattaccatcacacacacttgtattacgcgccaactttttggggcctataactgaaaaaacactaactaatttatgaaataatatagggtgctttttctaacagacactgtaaatgcttttactgatctacccttatttgttttagtatttgagggattttgttaatttttttttttttatagacacatacgctgtagttatttaagat

SEQ ID NO: 127696 - DNA, 1527 bp, Cannabis sativa
  modified_base (58)..(66): a, c, t, g, unknown or other
aagtggttacagaacgcatttttgttttttaaaaataaaaattttactttcattttgnnnnnnnnnaattaaaaaataaaaatgttaccaaacggcacctaaattaattataattaagggtaatttacaatcaaattcctaaactttaaagtttgatactgtcaaattcttaaattgaaaaaattatggctaaattccttaacttctacaatccttttgttctatattcattccgttagtttttggctgttaagtgtcaaagtggactgtcattgttagatagtctgacatcgctaatgtgtggatagataataaaatatataagaggaatcctcccattgccaattggttttgagatggaacctcattcaccttatctcaaattctaaaatggtatcagagcaaaaaaaaaaaaactctaatgaatatccaaccccaacgaaaagtaaattgatcgaagtagagcttaaaaaaaataggagccaccaaaaattcaaagaaactgatccaagagccaaaaagtcaaaaaataccacttgtgattcagagatagtgagcgaaaaataaaaaataaagagagccaccaaaaaaattaccgatctaaaaagtagagcaaaaagagccacttgtgatcagggatagtgagccataaaaagagccgctatgatcaagttgtccaagataataaaatagctatcatcttgaaggggatgttagatagtcccacatcgctaatattatgtgtgaaaagataatagaatatataagaggaatgaactactcctcccattgccaattggttttgagatggaaccccatttatcttatcctaaaattttaacagtcatagtgtatcgaagttacacatggcatgattttattagtccacctaatattaataattaaaaaatcagaaaaattaaaaataatgtttttctctttttttcttttttctttaattgaaccctaaaaccaaactcatcttctctctctctctctatctctctctctctctctctctacttgtgcggcacaaacgacagatggactaggagtaccgtgctcggccctcctctggtctcttttcccaaaaccccgaccctctacagactcaaatgccttaaccccaaacgccatcgatcccctgcaaaccaaaacattgttgaccccctgcgaacccaaacaggtcgacccttggaacccaaacgtcgtccctctcctacaaacctgaacctgttgtgctcctaacaaataaaagagaccaaagacttctttgtaatgggttttggatttcagagttggattatttgttctctgtatggtggtcttgtcgggatcaaaagagggacgatgaaaataaggaaaagagagacgttgtcttgtcgggattgaggtctagctggagtggtgctgagttttggggtgggggttggtgggtggtgggttttttatgtgtcaagttacatatgttaattttattttagtttttagttttttttaatatcataattttaaaattaataatat

SEQ ID NO: 127697 - DNA, 595 bp, Cannabis sativa
gcgatgcgggcctgctcggcgttcaccacgtccatgataactccgccacggagcatctgggcaaggccgactttcacagaaaacggcgatttctttgccgtttcgtaaatggcgccatttccgtagacggtgactactcccgtgtctgccattataagaagaagaagaagcttaaacttaaccctggggttgaggataagagagaagcgattagagaagaggagacgaagaagatgaacgagagagaatattgagagaaaggtggtggatattcacattcaacaccgtatataagtggctagggattaccacttcaatcttcttcttcttttttggtattttttttttttaaaaaaaattgtataataaataaatataaaaataatttgcagaaaaaatataataataaaataacacgtgtgacccgtctgaaaaaataattttaataaaaaaaataataataataattttaaactatttcactaatttactaagggaaatttgattttctatacttagaaaatcaaaaaaaattttccctaaaccaaaaatttaaaacctaaaaaaactattccttttttttcaaaaccccaaa

SEQ ID NO: 127698 - DNA, 678 bp, Cannabis sativa
  modified_base (621)..(632): a, c, t, g, unknown or other
tttggacatccacataattaataatatttataacagttacaattttttttttagaaaaatagaaatttttattaatatgcaaatcaaacaatagtccattaaataatgatatatcgctaggcaaaccatgtccttacaataaaaggaatgaaaaccctaatgagcatgtgacaaatcacacctatcaatgactatcagccaaaaatcttctaataaaaattgggtaacaacaatcccattattcaagctagaataaaagaaaataatcaaacgaccaaccatagcgataacaatcgtaacaaataatcgtaccataaaccatgtggccaataagaatatgagatacccccatatataagcatgaacaagaatagtcatgctactaacacatatgagccaattgagattctcacaacatcccaaaagaaaaaaagctaaaatttctcgccataaataaacaaagtcctactactataataatagcaaaatagtgtatcaacaccattattaaaactaaaaaaaaaattctactataaaattaatcatttaaaaattagcctcattttataattgcttatatatataaagctaattaggatttttgcccctgaactttgacannnnnnnnnnnntgccccctgaacttttaagatcgttaaaaaagatcggaagagcgtc

SEQ ID NO: 127699 - DNA, 627 bp, Cannabis sativa
ctacaatatattaaagccctttggctgtgcttgctaccctcatttgaggccttataatagacacaaaatggagtagagatcacaaaggtgtctttttctgggatattctgcatctcacaaaggatatctttgtgaaaaccaagaaggcagattttatatagcacgaaatgttgtctttgatggacaatcatttctagcaaaagactcagcaactccttgtcaggtgcaatcttcttttactatgcctactatctaatcatataaattatgcaaatgatgtctctgagtactttatatcgtctgtcagccctacaccagatctttccccaactattcaatcacctaatcactcaaacacaactcctcaacccagttcaaccttgaatatcttacctgttgcacccttaaactcaccacaagataacttttcccccaccatataacctgctacaacagaacctcaccatgagtcaccatcctcaataccaccaactactccagcaacatcccaacctatcacacacaatgcccccatatccactcaagagacatcattacctaagctacaagaattcacaaaatggtgactaaatcacagaatggaatccacaaacccaagttgtatct

SEQ ID NO: 127700 - DNA, 837 bp, Cannabis sativa
ttgaaaaatattttcactttttcacttttaaaaacaaaaactgattaaaaaagtgttaccaaacgccaccttagcaagttaaaaataatgttaaaattgtttattgcatctaattctttaattttataattttatattggaaaataaaatgtttaaacactgatttatttgaatttttagaaattttgaatgatattttaaaaaattttattgtaatcatacaaaaaaattagactacattttttttttaaggtaaaatatataaatatattgtaaaatcactcaatattttcctcatttgattttgttttttttttaatgaaaattaagtattccttatatgtaaaattttggaaatgaattaaatttttgatctttgtaaaaatttgtgaccattggattgagagtagaggagtgtgtgttgtttgggattggtgagaaaagttttgcattggaagaagaagaaggaaagagaagaagctatagcattaaatttggagggacacatgtcccctattcgtcaaccaaaatcctttgtttttatatgaattctttgattgaagagctttttatttatttattaacttttaacattttttgatggaagagctttttaagatttgattgaagagcttgggattgccccatttttttttttttggtaagtttgggattgccccatttaatgcattttttttgtactttttcttttatgagaaagagagaaaaacaagtggttgtgcagaggggtggaatagaaataggggtggaataggaatatttttgaatagctaaaaaaaaaaaaaaaaatagaagaaactaaaatcttaagaagac

SEQ ID NO: 127701 - DNA, 683 bp, Cannabis sativa
atctccttataattctaaccccataaaaacaataattggaattaaactaataatagtaaattaataaataaaaacaaaaatatgagacggaggatgtcgctgagccgaattgaatcactcccagacgactgctcttgaacccctcacagaagaaaacgttgatgtagaaatgagaattttttttttctttctatgcagttatgtcttggtgcaccgccgtttgaactaaatgatctcagagaaaagtcttcaataatgatgataatgaattggttcattgtatcgtttattttttcattttaatttttgtaatcaattataatgggactattgtaataatgattacgggccaaccaaaatcaatgtaatcttcatcaaattttttataattataaaataaaaataataagattattttaatcgttatccattttatttcattacattctcatccaaataaaacattataataattctgattataatattcattctaattacaaactaaatattataattaatttttattattattcttattccattacactaaaccaaacaccatcataaattattgagaatcatgaaattttatcttgaaattaatgggtaataaataaaaggctaattagtaattttttcccaactttgacatgtactaaattgtgcctcctgaacttttt

SEQ ID NO: 127702 - DNA, 621 bp, Cannabis sativa
tttcttaaaaaaaaaaaattaaatttctactattgtttaattcatattttacggtgttatgttttttcttcttcttctctaatagaattttatttcgtgaattaatgaattattatttaatagaaatatatcaactcagaattcaatgttcaacattattactgtttttggtgaagaaaaataatatgtgcatgttatcactgtagaagctctaaaggaaataggagagcaattaggtaagaaagactggaattttaacgtgaatccatgcagcaatgacacaagctggaaaacaccaaaagtcccacggatgcaactctacaacaatactctctcatttgcaattgcaacttcactggtggcctttatttcgttgttaaaatgtaacatatattactctcaaattatcttatcatttcaaccctatatatatcatacatttcattaatgtccagaaaggtagtacagagtaaatgctcgatagaaagaaaaataaatgctcaatagaaagaaaaaaatcaattgccaacaaattgttataaaataatataaagtagatgagaggaaagaagaagaagatgaagagagaaagagaaagtgaatgagaatttctgagttgtt

SEQ ID NO: 127703 - DNA, 792 bp, Cannabis sativa
taaagggacttaactcattttaagagttaagctttcagctaattttcctctgtttttactttctctctgagattcctctgctcttggtttctaccattttctagtttagcttgttagcttctacaagctcttaaatttatataaaaaatagtactagagtcattttagctatactttatttagtcttttgtaatgtaatcctcattacatagcttttctaatgtaacggggattctcttgtttaatgtaattatgattacaatgtaattctattacatcacttttaaaagcaaagcaaatattgtaataaaaaatttgattctattattattcccattacaacaaaccaaacatgccattagtgttctaaggagaagtggatttagtgaatttgtacacagattatttttcctttttcaaaatattttaatttcaccctgttttattctatttttgtataatggttttaaaatttgtaaaatggtggccttttcttgatagaggaaaatacaactattttggattgatccattaaataagagatatgtatttttttttttattttaagttttgattagttaatatttagttaatattgcttccctttagcatacgtattttaagtttggattgatcccctatataatatatttgttaaaaaaaaatagattataaacataaatggagtaaataacttaagataagtattttatgtgtcttaattctaatattagtttggaagtgaatttgaaagaaatttgtagtaattgttattacaaaaaaaaaaaaaaa

SEQ ID NO: 127704 - DNA, 896 bp, Cannabis sativa
  modified_base (539)..(549): a, c, t, g, unknown or other
tttggttattcaccatgtacgaggatccccgctaagcatccatggctgaatagttaaagtacccaactcataattggcaaattcataggttcaattcctactggacgcacgccgatgggatcctccaataagtctattggaattagctttgtattaatggaatctcatcatccatacataacgaattggtgtggtatattcatatcataacatatgaatagtaagaactaacagtcttattgagactagaactcatagggaataaaatttatggatggaatcaaatactttgtagttacagacaaaagtatacagttattgttgaaaaatcaatatacttctaatgttaaatcaggatcaactaggacaaaaatagagtattaggtcaaactcttcttttagtgtcaaggtaataactatgaatagtcatcgactaacaggaaagggtagaagaatggaacctatcatgggacatacaatgcattacaaatgtatgatcattacgcttcaacaaggttattctattccccctcttatannnnnnnnnnnttaaatcaaaatacttaatagcatggcaatacatttatgcaaaacttttaccccgagcacatgcaaaagagttgtagacaggcaagtaaaatccactccacaaaataatttgatctatggacaatattgttgtggtaaaggtcataatgccagaggaatcattattgtaggcacagaggggcaggtcataagtgtctataccataaaatagattttgacgaaatgacaaagacaaatatggtaaaatcataactatagaatgcgaccccaatcgaaatgcatacatttgtctcatacactatgggggtggtgagaaaagatatattttacatcccagaggggctcta

SEQ ID NO: 127705 - DNA, 824 bp, Cannabis sativa
gagcttggaaccataatgtgtataagcgacaacaaaagaagattaagaagaaaaaaaagcagattcaaggccttgacaataggtccgaccttgaaatttagtgggacataagaaatttttgggccctaatttagaaaaaaaatcgtatttttcaaaatcagtaaaaaatgtatattttcaaaagtatgtttctggccctgggataggtgagcccttggcacaggcctagcctgcctatgcccagggacgaccttacttcacaatcataattcttcttctcataagctgcgtcatattttaggtacggtgatttcagaagaataaagtgctttttcgactggacgcttaattacttttagggcccgtatggaattcaggattgaactagaaaggattggattagattggactgaactggacaagattggattatgcagaaagtaatcttatatttggtttaagaataaagtggactattttatttatttcctttttttaaaagataacttaattaaattgaaatgaaaacataataattaataaataaaaatgaataactccagaataaaataaaaaataaataataaaaacaatctatatatataagagagatataagacggtgacatgacactttaaaatctcttccattaacatcatttgttctctacttctcattttttttttattttttattagattcataaatattaattgatataaaatacatacttttacttattttctccttattttttttttatttttttaaattatgatatcacatatatatatctgttgggaatattttaccaggatctaaat

SEQ ID NO: 127706 - DNA, 2041 bp, Cannabis sativa
gggccgcgacaattggcctttagtgttgtagcccgtgtcgcgacccttgatatttcgttgatatttttcatacacaggcctcaacactcaaaggaagtgtcacagcgctcacttgcaattttttggcatagagctcccaatccatctctgcctcaacactaaaccccagtgttgaggcgcgcccaggtcttggtcaataataatcttctctgccaaatttcgaccttttaatgccctaacatggaattttagtgttgagaggctactccattatttctattttttttttgccttaagagatccaaacacaccagaacttttggtattaggcctaacggactcagtgaaaggggctcgtttcggtattaggccttcattatggaatgaagatcccctattaaaagttgatatctcatattatgttaaatcaatctaaatttgacacatcaactaattttttattaattaaaaaattaaaattttaattgagtcaataaaagtagttaacatatttaatataaattaaattaattgatatgagtcaacaaaaatagttaatatatttaatataaattaaattaattgatgtgtcaaatttaaattggtttaatacaatatgaaacactaatttttaacatgaaatcttgattactcattatgacctacttattagctatccagaaataaggatatcaattatatcaatagacacttcattcttaaataaagtaccctataaatatatgtctataattatcaatagttcattctcatatttataatgaagtaatcaggacattaataaatataattatttaatcaaaactttgattgataatataatatttattggagcttgaaactatgggtccataggtcctccaaggtggatgtaatgaccgcattttatatatggattagaaaaggcaattagtactaattattaatattatagtagtcatttgtgaatttatttaattatgggttctattattaaaaatagggcattagagttataatttttcaatttcgaagattttattaaactctaggggtattatttgtgttatatgtgaattatgttatttttgtagtttttgctccgacaacaaaaaatgcaatggagggctagtttgatcatgtgggtaagtctagaaccttatttcttagtgtgatgtatattggagggaatagagtaccgggattgagcggggttatggaaatgcttaagttataaaagaaagggcattttagtaatttgccacatgggtgatttgatggctgccttaggtgttgacacctagcttctattttaagccaagattaatgtagttttatttttcatttgaagaaaaaatagagaaaaacaaaggaaaaataccaaaaatagaaaactctccctctttcccttctctctcttcaaaccagtaaggaaccagtgacattgttgttggtttttggtatttccagcaagaattgaggaggttttaaccaaggtaaaccatagacactctttggttatgtttttctcaaggttttaattggtttgaacttgtaattttagagaatagggcctgttagggtttgattaggttatggttcagtttttatgttccttttaagttgattctaggttttggttgctgatttgagtgtattgtgttggaattatacaagtttgagctttgaaactcaaacttaggtctttaatggcatgctttgattcagtgtgtttttttgagttttattggttaaattatgttgtgtatgccctgttttggtactctggaaggtttggtagcttttggttgagctttgagcaagtttggggttctttagggaaaactggtacaaacagattaaccggtttaccaatacctgtaaaactggttaaccggttttggcaggttccccgaataacctattttctcaattcttgcccatttcagtgcttagttgggtatttcctgttttctaagatattgtatgttgggaatattttaccaggatctagatctactaacaagtatgttgaattaac

SEQ ID NO: 127707 - DNA, 1290 bp, Cannabis sativa
attaagtttataattatttattacgcattatattataagctttgacttatttatttatcatatatttataattaaatgtttagctagaacccctaaacagccttcaaagttcaaaggttaaactttttgattgagagttgttgtgactacctattgcaactcgcaagtaggtcaaaatgaaaattggacaattaatatacgaaaaatacaattctcgtctcattcccactatatatttatgcccccatcccgtctaataatcagtaaacttggggtagaggaatatccatcaattattgaaaacccaacaggtattcattaaaataaatgtaaaaaaaatagaataatttaaaataaagtaaattgtggcaaaacctctaataatttcccttgtaattaatctcaaaactcaaattttggctataaacccataaaactacgatatagctagtaatttacaattttcatccaaatctgagcgttaattgacatattagattatccacgtgaacacattgtacacatgacacaatttaattggtcaacgtaaataattatattaaaaaattaaaataaaaaataaaaaagaagtattctttttccatcatatcatatatttatttgtaatattttttttttcttcttcttcaatctatatactgtcaccaccaccaccatcaatagctaccataaccaccccacccaccattaccgaaaccaccatcatccatagccatcgtaaacaccactacctaccactaccaaaactactaccacaacctatttttcaaatctattttgcacaaaaaaaaatcaacaaaactcaaactaaatttaaacaaatttaaatttaacaaacaaatatacacaaaattttagtttgaaaaatcaaaccttaattttctaaatttatttctccacaactatattatctttccacaaatctaaaaataaaaaacacaataatacccaaaagggacatttatacactgaagtattaacaagattgcaaaaaaaaaaatatgaaaacccctaaatgggagagagaaagagagaaagaggagatcggggcagatagagagagaaagagaatagggctgagagagagaggtgattgacttacttgggtcgggatcctcatcaacggccactggctcggtggtcctcaacgacagcacttgagtcttgatcctggtacctgcatcattgagagagaaagaaaagaatgatgagtgggagagagaaagagaagagggttgagaaagagatagagagagagaaagagagaga

SEQ ID NO: 127708 - DNA, 1460 bp, Cannabis sativa
acacctttttcggaggacttctccttcataagataggatggatttgattcttatttcctcaatgtaactccgtcctgatatcctatcaagtgatttcttctccgtgttgatgagatagtagagagttccacatacttcattcctccctctcagaaaattaaggtagacccgtttactcttattcattatcttgggtactttgaatacgagagtttcttaaagtgtgaagaaatacttgctttttcttcaaaaaaattggaaggctccagttctaactttggtggtcaatcatgaacctttaattcacacttagatttgtttttgtttagaagtgaattgtattgttattggaatgtgtcttattacaaggttgtcaaagaatgactacaagaggcctatatataggctaaccaactaaaccgacctaaagtcttattggtcatgatatgaaatgaccgatgaggacactaactactaagtgtccaaacagaacatcacaataactatattaaatgtcactaaaactaacaatatcaattacagtatgacacttcttgtggtgtttgacaccttaaggtacctcataatacttctcttacactatgtttgtcacgagagggagaagtagggagaggagcagtggagggagactctctcatccctccaaatacacaaatttcaatccctcttaaaaaattaaacaaaattccattcctagcttttgaaaaataatatataattgtattaaaaaataataaaatagtaattttaatatttattcacactctatcattttaactttatcttcaaataccaaataacacaaagagaatgactatcatctctctcaaatctaacaaacataaccttataatagagagagataatgtataaatggataattacataaagcattatttttttgtaaaatttttatattttcacattcaattttttttttatctttttcgatgctctataaaaataacacgaaaacaacaaaattaatatataaaggtaacaggaaaataacatccaaataacatcaaaataaaaaaaaaacatacaaataacaaaaaatcaacaataaattaacgagagagtaatataaaaatatatcaaaagatcatattttctgtaaataaaatcataaaatcgtaaaaatatttttttgttttttttgtttttttttttttttttgtatataacttgtgaaataaataacttcatgtataaatggttagagagagaacttgagaggaatgacttgggaattggtgtgagagacatgttttgtacagagttgagtttgttatcaatcaagtgaagaaacttcctaaggagagttcaaaaggattaggctcactattttgagctaaacttgtataatttcttggtgtgatttttctaacttttcttaattagggagctcaattaatccctaacatgtatatatatat

SEQ ID NO: 127709 - DNA, 2238 bp, Cannabis sativa
  modified_base (42)..(60): a, c, t, g, unknown or other
gtaaaataatttccaacagatgagacattgcttcacgaacannnnnnnnnnnnnnnnnnnaatcaagagaagcaataaaagagcaagaagaagaggagagatgcttataagaaacaaaaaagaaatagaaaaagtacattggtgtttacctttacatagtgcaatgggaagatcatctttgagttctaaatctgacgatgaagatgtaggtgcaggtgcagtacatgaaacatgatgtggaggaggggggcgcctggtgtacactataggaggccaagggagtggtggaggtgtaggcattgtgggaggtataacagaggcaggtgaaggaacaagagactcgtcagaacatgtatcaggcacagaggatgtgcccgttaataccaacaaatcatcatcctcccccgacgagtaggagtagttaaaggtgaatataaggtgtattttccacaaaggtaacatcaatagaaactagatatttgttgagagtacgacaataacacctatgccctttctaaagacgagaataaccaagaaagacacactttaatgccttaggttctaatttggccacatgtggacagacatcgcgagcaaaacaaacactgccaaatactcaaggagcagctgaaaataatgacttactaggaaaaagaattttaaatgggatctcaccattaagtacagaggatggcatgcaattaataagaaagcatgatgtggaaactgcattgggccaaaaaggttaaggaactttcatttgaaacaagagggcatgtgcagtttcaagaagatgtctgtttgtacattctgcaacacaattttgagaagtttcatgaagcatgctattggaggtcatgtaattgaaattgagcaaatgtgtactctttggcattatcacttcttaaagtacgatcgaacacattaaattgattttgaatctcagcacaaaagcacagaataaagaaaaaaactcattattatttttcattaaatataaccaagttacacgagaataatcatccataaaagtaacaaaatacctaaatccaggttgagaaaaataggagaaggaccccaaacatcagaatgaactaactcaaaagaaatactagcacgtttattgactcaaggactcaaactaacacgatgatgtttggcaaattaacatgactcacaatctaataaacacaacttaatatattggggacaaagtttcttgaggaaaggaatggatggatgacccaaatggcaattagcctcaaaagcgtaagcaacactcggacaagcaataggggttggtggaaatgggtgaagaacatacaaaccaccagattcatatcatttaccaataatcttcttcgtcttaagatcctagaaaaaacaataatcgggaaagaatgagatgcaataatttagattaccagtgagttgactaatagaaagaaaactaaaggataaattaggtaaatataagactgatgacatagtgagcagagatgtaggaacaacagtgcacatcctagaatagaagatggtgatccatcagctaaggtaacaatagaagtgggactatgagtctaaaaagtggaaaagagactagaattacctgtcatgtgatctgtggcaccaaaatcaatgacctatattgaggatttggaaaaaaatcatgcattagactaaaaaatttattaaataattttaaaaatgaaaaaaaaaacctaaataataatttaattataaaaagtaaataaatacataaataaaaatatatttctgttatttttcttctcgatatttcaactccaattgttagttatttgaagattatttaatgatttttaaaaattaacaatgagttgaatcgttaatatattaacatgtaacattttacttaattaaatgaggaaattacactgtataaccacttcttattatgtgtgttaggaactctaatcttaataagttatgtgaggttatatttgatactttaattataaaaaaaagtatttagcaattaaaattattttacagttatattaagtcaatgtgtaataaaaaaaaaaacattacaacctatccctaattaaatcaaaaattagtagtagtgtagtaaaaaggtaacatataatttatttaattcataaaataaaatatagttgtttagttttggtggttggttgattctcttcagtttgaatagttttttaattaaagttttatgctgttttttgatat

SEQ ID NO: 127710 - DNA, 680 bp, Cannabis sativa
gtctttaactttaagaggtggaaattctaccactggctcctctagtcgggaatctaatataagtacaccaagatcaaaccacagttgtcatgcatcacataaaatgaagataaacagtaggcaaagtcattttttcttatatacgaataatttgcaagtataactaacatggtttcttttagaattgcaagaaacaaaaacaaaaagaatatattgtcaatttggaaaatgaacatgcgtttgctaaattagctctctctttggaaaataagcatgtttggtagtctggtattgctgattattattcttcattttaaataggtagtagtagatagtgaaccttgtatatagagataatcttttcaagttcaaggtaagatcaacctaaaaactcaaatccttccttaagccattaaaattaggctaattagaatttttgtctcccgaactttgacgtgtatcaaattatgcccctgaacttttaaggtccttaaaaatgcctcctgaattattgagattgttgaatttaaggacttttatacaattttaccaaaaaaagtctaacatggataaaatttcaggggcatgatttagtacatatcaaaattcaaggacatgttttggtaggtattaaagtctaggaagcatggtatagtacataaacaatcactgaaatagta

SEQ ID NO: 127711 - DNA, 1356 bp, Cannabis sativa
tctccaagtgtcaaaggaaaccaccatagaactgaaaagctttagaactactttagactatacaagggaaaagaaaagtagtggacaaaaatctctcattaattacctaaatggagtttttatttttttgggattaaatatgatgatgtatatatatgtcataataagtcactgagatgccttatttgcacgctatttttctttaatcaaaaagtaaaatatggaacaagtggcaataagttagtgagctcatgctagattttacaacagatactattgtacatctgtccaagacaatttaaaacaaaatattataaaatataagaattcactctcccaaacccaataatgagcatatctcttactatatatttgtaagcatattttaaaagagtttcatttttggattgaatcaaatataatattattcacatggtgttccaaacttagtataaaatgtatcaattaacttggattgatatattataataactcccaaaaaatgaaaaactagtttaaagcataattaaagcaggagaattatatatatataaagatgaaatagaacattaatttaattaaaagaaggaagattatgagaccttaattatgaggataaaaggtgaagtgttgaaccctctagttctttgtccgagttaccgaaactacacgctttaatcaataatgactacaatacaatggcaattagaagaaaagacgtttactttaatacgcatttctacttttgtttattgttttttttttgtatttgcaatgaagtcaaatagtgtccaacaaaccattatggtcattggctgctttcagctttctgagatgataagagattattaatttttttaaaataaagatattattctccattatttgatcaaaaaatgtacaatgagaaagagaagtcatttgagtgtataaaaagggagactttctctgtattgtttggtaaaggtgatcaatagatagatcgataaggtataatcttatgttaagaatggaagtgaggtggggatgtgatagtgttttgattattattattattattaatctttttttctggggattaatgttatgtgatggtggaataacaagtagttatgttaggagtattgatttctcgagagatatgccaattgagagtgatgttttcagagtaccctccggttataatgcccctcaacaggtgagttttcattctcattctcgagtctcaactcaatcaatcggtccctatctgcttggttgctcgtactaattatattaatttctttgacttctaaggtttgaataatatttatgtgatataaggttcatattacacaaggagatcatgtgggcaag

SEQ ID NO: 127712 - DNA, 2498 bp, Cannabis sativa
ttaaacgagacatcaaggtgccttaaaaaaagtacttaaacctagtgtatgaatagacaatctaactgttcatataagcaatcaaaaatatacaaagtgataaattattaatagtatattcaagttagcttaaaacaactgtttgtgcgaagcagaattaataattgctcgcaaaccaaaagcaaggcagataataaattgctctcacacatagtagattactaactacttaaatattatcaaaggaaaatatgagcagtggaaagacctaaagtatattaagttcaaatataaaagtacaaagcattcaataaagataaaaaaaaaaaaaagaaagcaaagttggccatccgaccttgcaaatatgtctttacaaaaaatgctacaaggggcaaaccactgtctcagccttatggccatcatcctagataaaataaaaataaaaaccaagcctacatggtaggagacttggccagttcttcttctgctgccttcttggcttcttgctcctccttcttggtcttctcgcagtaagcaagaatttcctcttcagactcttccaggaaacttgtatccatattcgaatttgccatccaagcttgataaatggtacggaggccaacgacattacattgctcttgtgtgtcagcctattttccttcaagtgtcaccttggcagcttcaagttccctttttagtttctcgcattcatcagttttgtcccttgtctccttctcggcagcttcaagattcttcttcatcttcttggcttcttttgtaaggtgagtaatcttcagttgggcatcattccaattcttggccacaacctcgcgttggcctattgagttctagacctcgctctccaagtattttaccttttccaagccttgctgctgggtgccaaaagagaggaaaggagcctggaaatccacaaacaaagatgtatgagtaaaaagaaaaagaaggagaataggaataaaagaagtgaacaactaaggataaagaaacttactaagaggatgtgagagaaattccttgtaagcactccctccaaatctccatggttgataaaatcccaatcatggggaaggagagccttgaactgacaccaacacgcaactccaaactttatggtaaactctgagccagtcttttcgacctcgacaagcagtgtttcaatggactggctcgaggaggcagaggcttgagtcgctttatagagaagctcgttggtacttgtggagactggaggaggaattggatcctaggttttagcctcaaggacctcgagattagcgatctgggaggctcgtttcttgttagctatggtcttcttccgccttttgaggggatccacctcgaccttagaaggaccctccgaggagatcactctcttcttccctttcttgtggatgcgaccctcgaaatgcatttctgtgagacaagataaagtgttagcattaattgaagaaaagtaaaaggagagattggggcatgatttttcacctaaagaatttaccataatcactagaagatgaggtatcactaggagatggggtagaagaaccacaatatccactaacatctctacaacccatgatcctgaatatatcatagggattaattggttctaaattccagctcgcgtctaaatgactcaccctatccatcttagtcctgtactactctgctactctgtagtacgactcagcataactaatttggacatggaatttgggatacacactatcaaacttatgtgtaatgccatctacgaggaggggatgccaaatataaaaattaaagcggctatctcgaaaggtactagggtgttacgctcagccctaagcagtgtgggtgactaaccacattgattacctcgggatgctctttctacggcttcccaaggggcagtattctggagatattgtgcccgagccatacaatcatgagccttctcctcattcgggatgggaacctactgccaagaagaatacttgggatatttataatcacaaataaactccttgtcagttaggacatccacaatcaggttgacctcgctcagaaggaagtcgcatgacctaaggccatacgagagagtcagtaagagcctgcgtcgctcggccatctcaggagaaggaacatgtcttttcgaaagaactatcgaaaagaaaacaaaattacagctagaaaaactagaataaaaggcatggattaatttaaccaagtctaatgcaaataattacttacaaattatatggaaggtggttgtggcaatgggagaaaggtcggtcgtccagaagaagtcgtccttgaaagaagttttgttgggaaaatccacgatgatcttgcaatcacttatgtgagtcccaagatagtagaaaccccctgccgcattcttcctcgttggaactattggaaatattttgccaggatctagatttactaccatgtatgtttcattaacatcctattatgaattctaaaacaatgaa

SEQ ID NO: 127713 - DNA, 1019 bp, Cannabis sativa
acaattagaaaccaagttgacatgcatgttgaataggaatagctctaaagacacacttaggccctacccaacatttatttgagcctaaatagagccactatcataattaggtggtgtttgatttactaatagaaggtaatggtaatagtaatgagaatattattaccatatttgatttattttgtaatgaatattgtaattagaattgaattgacaaaaatattcttactttatttatttatttatattttcaaagtgagaaagatgaagggtaaaactgttatttagttgtcattttaatcctcattcatgaggtgtaagagtataatgagaattcatagaattggtgtaatatctattataatagaatttcattacaaaggttagaaacacaaatcaaacaatgtaatggtgactttgattccattacaatcttgattccaatcaaccaaacatggtcttatgtctaaaccgaggcatttttagaatgcataatgacaacccatctttttagttcataaattcaattattgatctctttcttttttttcttctttctgacatctgtatggtgaagcattgctttttaattgtgcattcattatttaatacataacaaatagtccgtattaggttgtattataatatttacaaaggatttggggtcaacaccaatctctaatctggacttgggacccagatttggaaccggatcccgacccggacactaaacctggactcggccctggccccgaaaataggctcctgacccagatcctagaccccagaccgcggacctcagactccgacccggaccccgaatggacccaggacccaaaacccggcccccagacccgaccctgatccgaacccgacccggacctagaccgcgacccagacccagacctgatcccgaaccccaaatcccgaccccgaccccgactcgaatccaaatctggacttggactagaccccggaccgagacttgaattaaataatactaatacaatataatacaa

SEQ ID NO: 127714 - DNA, 2847 bp, Cannabis sativa
aggtacgcatacctaattattatatattattattgtgttttatgttatatacaaattgatcttgagtttattattaatttatctaacaatgattttgtgccaaatttagtaacgccgcaaacacagagcaggcactccataagtacttcaattaggaaagaaggattgagcaggtaaggatggagtgcgatctaattccaattggagtgccacagaaggcgccaatattcactgcacaaacaaaacctttggctatgattaatttggaggcaatttggcgcagataaaagaacagacggtgaaagagattatgaaaaatagaaagggaaggatcacatagttggatgatcaaaatagaaatgcgatgagaaatacaactaagtctctatttttaaaagagatcattgatgaacccaaaccaaaagacttcaccatgccaacttttgcattgttcaatggtgaaggagattcgttggaacatgtgctccaatttgaacaaaagatggagttgtagaccaataatacaacaatcaggtgtgccattctctacgaccttaacaggatcaacactattatggttcaagactttgggagaaggatctattgatttgttgaccaaaaaatctagactagacttttaagccatacttgctcgctatattacgagaatgaatatgtagttaagtatttataagagaaacacaacaaatttatagtagttcacctcctatatcgcgatagtaatagggttacgtctacttcgagttttttatttctcatgagatggtaattacagctatagactaagtgttagatgctccaaattctagagagagaaagtgtagaaagagaagctctaaccttgtgggtagttttctgaatgtgaaaaatgagctaaggaagctcttcttttataggtgaaggaggcccacaaaaataggggaaaatacaaataagattttttgactgttgatgatgatctaacagtgaaaattagctcttggtggtgatggccattttttggagcccagcgggtccccttacaggtaacccaaagcttatttttgtaacttcattggggtgaattttgacgacaatagctttagaattatgtcttgattgtgagacatgacttgatagatcattgaattatcttcaaaactcaaattgaatcgcgtcaatcagattaaaattgagtgagttatgtctattttactgaaggcagttcatgacccaatgccacattgacatctgagtgccacgttgacatatgatgtcaacttggacgttgggtaagtgtaaaaacgtccaatggatgtactttaagatgcctaagtgatattttgacatcatttagtctatttatgcattatggcaaagctggtcaccggttctcagagatgttgttgttttacaaaaatgagacactcaaaactcttcatttctgggtgagctggaaatgaaaaatacaaaattgtgaatttaatttctctgactttgtggatcattgtcattgtgaaaaactagacgaatggtcaaaacgacatcagatttaggtaagtagaacccagggcaccaggaattttgtcaacctgggtgctgagtacttaatctcgagctcccaagattttatttttgatacttacaaggcttctgaacttgaggacgagatctcctaccctatttttgaccattccagattcaatggtctcatcaaatatggatttgagcaattaaaggcagcgtcctaggttgattgtcaacttgggcgttgggcccagccctatgtcatcttgggcgttgggccctacatctagggactcgagattatggtttcctcctcgagttttcttgaatcttcgttatttctgatgacgaaaaaaatacccagaatactttttgctgaacttgatcgaaaacaactcaggttgataggttgacaatatgtcaacttgggcgcagggtccagccccagttatcaacttgggcgctaggtccctattttccctttcaaaaattctgtttggtccccaaaataagttgaatcttaatattttctgaaaacagagaagatggtcgaaaaaaatcttaaaaaactccattttaaatggcctaagtttacaaaatgtcaacttgggtattagtccctgttatttgtacccaggaattattatttttttctctaaaaggacctatttccttgtttttgatgaagtcaaagaagatgcaaaagtcatatctacgatcagacacttggaaggctcctagattgacagattgtcaacctaggcgttaggtgcttaaggccccaggtgctcaaaaaattcttattttttgttatggctttaggattaattggattgaaatcataatcctatttggtggcgccattcgaaattagagagagaaaagaagaaaagaaaagacttttggcattttgcttatcattatctttttcttttaattctataatttttccttaatcttaatagcattaggaattattgttaccttttaaatttatattcctatacctagttgtataagaatttcgaaattctctttaaaaacgacaaggaaaaagatataattatatatttcacttatcatttacctcttctttagaaaatattaaatttaaaagactcacattagcattaggattatgaaattaaactcaactataaataagtgagttgagaaccaatttttcacactctacttctcattttacacgtctatagtgttggattttatgccgtaaataaaactcaatttcaatgtaatctttatcttttcaatatcaataaagaaatagaagtattttcatcactttatgtgtcattt

SEQ ID NO: 127715 - DNA, 912 bp, Cannabis sativa
gtattaatgctgacgtggcacatcggtatttgtgcaaataaatttgttgaaagtatttttgcaaataaaatcaattttaagtatattattgaaaaaacccctttatttaaaataaacgtactggtttattattgtactcattattgaaataaacttactagttcataactatacaaaatatcctacaatgcttctttaaaagatcaacaaaaaagtcatcaaataaatatataggcatataatcatttaaatacagtaataatttattattttctttataaaccactttataaacatatatacatacagttattaaataaacttattagtctattgctgcacatccaaaatcatactcggatgtataccaataaacatgctaatatatttttacacatggaattaaaaatgtaactaatatatctacttgtataggtggaaacatcaaacttgattgtatacaaagtacatgattgtaccgactcatacatagtaaacctggaaaaaaaacttgcagctgtcagaaatttgaatatgatgaaatgcctttctcacatgcaatggctgtattaaccaaaaggaatctatcgtgctacaactactgctcatactactacacaagaaaagcttttttttgtcaacatataaagatagtatcttaccactagcagattcaacaacttgggatataccggatcatataaaagatatgattgttctacccccgactcacaagaggccagcagggcggccaagaaaacaaaggtacaaaggtgtcctagaaacaaaaacataggtcaaatgtggggcatgcaaccaaaaaggacacaacaaaagatcgtgcaaaaatgaaccagctctaaagccatcacgaaagagaaagaacaccagtacttaaaaaaataacatttt

SEQ ID NO: 127716 - DNA, 689 bp, Cannabis sativa
tatttaagtttaatttttagttgcaaataaatatctaagtttaatttttgacggtaataatacctaagttaaacttttagaattccataggtacctgactgttagatgtcaaattattatccacgtgtcattttcttattggtatatttatacaattttttaaaaaaaaataaaaaaatttaatgacttggaccaatcagggattgtcacatggtaatttacttaagacttaacagcaggttacacctacagttaaatatataacttaggtgtattttattacagctaaaaattaaatttgagtatttattggcaactggaagttaaacttaagtatttatgcgacaaattactcttaataatataacgtcaaaaaaatctacaatgcacctatttctgtttcaaaaattaggagaatattttagttcaattttttttctatttgtttacgttgtagttatttaggacataaattagaaaaatttcacaccctaaaaataatagatgttgaatctctcaaaattttgtgaaataccaaaattgatagaagtacattgtaaaagtatcctataaagtcaattaaaaaaaagactaatatcaaatatcataaaattaatttagagtatatatataataaaaaaaagggtttttttttttttttttaatttttagttttaaccaaaaaaata

SEQ ID NO: 127717 - DNA, 526 bp, Cannabis sativa
atcccacttgaccttccccaggcggtgtgagattgcacagcttacccggtgtttcctcttacggatcacggaactactgactcacacagtataacattaaagaagatgttataagacaccaataatactttttagcaattatcttattaatagcctattggaccgacattaattgtgtagatatgaacatattataagaaaaaatgagaagccaatgaaatatatatatagtgtggcataattgcatgcatggtagtactgctcccattagaagagaagacaaagaacagttctggtactatatatatagtctatatagtctatactgtacactccaaaaaattggtaaatatttattaactctatataggtcttttaacctcattcaaagttactcacttgtcactctcaaaaaatctacatgacttctatccaaaaaataaataaacatagttagctagtatgtaataacatccatgcatgtgatcagaaaaaaaaaaaaaaatcagagactcatgaaagaagc

SEQ ID NO: 127718 - DNA, 1072 bp, Cannabis sativa
agagagagagagaagagaagcaagattttttttttttgtcttttctttcttgattaattacttaacaaaaataagggtttttaattaacaaagatttagctagaaatggatagaaaatgacaccaactcactaaagacaaggctaggtaaaattcttattttacccttacttcaaacttaagcaatttaaggacttaggaataaaatggataaaaaactatcgccctaccaagtcctaatattctaaatatcacaaatgattacttcaaacaagggattttgtcaaggagatatttcgacttcatggtgcccaaggtcaatcgtttaggatcaagattcgaagtttacatccaattactaggagagtctacaacaagcaatgtataccaaattagagttcattttgagatatattcagggtattgttggcacagtaccgtatgagatgctttatggtagaaagtgtcgttcacccatttattgggatgaagtcggtgaacggagatacgttggacttgagggagtccaaagagtgagtgagtccattgagaagatttgagcttgtatgcttgcctcacagagtagataaaagagctacgctgatccaaagcgtaaagatattgaatttcaaatttaggattttgtcctcctttgggtgtccccaatgaagggaattacaggtttggaatgaagggaaaattgagtcccagattctttggcccatttgaaattttggaaaaggtaggtgaggtagcttatcagctagccatactccctgctttatctggagtttacagcatctatttcaatgttttagaagtacgaggtacatacgatccatatatggagttacgagaatattgaatttcaaacagacttatcgtataaggaacagtcgatacaaaaaatttgaatagaaaagagaaggtgatgtggaagaacatcgagattgaaatgcaactggggagttagagtcgcagttgcgggagttgtatcccgaattgtttagataaattttgaggacaaaatttctataaggaggggatagttgtaatattctaaaaaatataat

SEQ ID NO: 127719 - DNA, 616 bp, Cannabis sativa
ggtgtaattttttggttggtattagagccaccaggttatcttctgaagattgtcatgacatgtacaatcatcatcagcgatgagcttgactcacgcttcaataagccttaatttctttattagtttattttaacattatgttttaagaaaagccttataggaagcatgttattagtatgatagttgaataggtgcatattttaatttccaaaataagcggtatccagtaagttattcttgatcgcgatctaactagactagctcttggattctcaggctgttctaatagaatggatgccaggtaaaacactaggagccaaggtaactcggtcggatctagtggctatctaggagcccagattcccctaaatgttcgtggccaaggcagaggccctagaggtagggcacgctgtcggagagatgataacccgccgtaagcttcttaggaatgggcaaacaggtttgcaacaatgcaatccagatttaacgaacaagaggcagaaatcagatgcttgaggcagcaagtgttggaattattttactaggatctagatttactaagaagtatgttattaacatcctaaacatgaaattctaaagtgatatgaaataaaca

SEQ ID NO: 127720 - DNA, 897 bp, Cannabis sativa
ttttgactcgagaagggtaaaatagtgattttaatttaattacatgtttttggactatattattatacaatgtacttattgtgtcctttttcaggtgttttctgacaagtcggcgcggtatagtcacaattggaaatttcgggccgaaccgggtttggggccgaaattcattttcgggattatttattgacattttatttatgtgtgattaatctaaatttattttgagtagatatgtgaagttaaatgacttaaatacccttgattacttatgtgagtgttatatggccctaggggcaaattggtcattttgactctttgaattatcttcaacaaaaagggatttttagcatggtgcaagcttggattttggtgttaattgtgctagagattggaaggatttgaggtagctcttcttactgttatttttatgtgaaattacagctcagattttgatgttgaaaagaatgaaaaatgtgtcgtgttgctcttgtatgcatgtggataaaattggtgttaatcttgatgtgtttgacttgattgtgtggcttagtagtggagtgtgttcttgatgatttgtagatgaaattttagggtatttttcatatgtgaattcaagttttaccttatgttttcctgctgaaggttgaagttgaaagcatgcttgaggttcaagattttagtgtgtgcttgagcttactttgaatgttggttaaatctgaattttgaaacatgtttatgttggaattagacctttaaatatgtgtgttagctctctgttatgttgataattattgtgggattgattttgagatatattcatgtttggggtgagtttggatgagttttaatgcaattttcgaagctgaaaagtgggtttcctgagtttttaaaccc

SEQ ID NO: 127721 - DNA, 1197 bp, Cannabis sativa
gatcatagggtgatattgaatcagatagatattacgataagctttcaagaacagaagaggatagaattctataagatctcccagctcgtcagcaatgaactgggaaagttgggggttttctgaccaaaaggaatgttgtgggcttggatccagaaagggacgaattgaaattggtctggggtgagggtatcaaggccttctgggttggtaaatatcatgagattttggtcgaaatgctagggttggtcctctaagacccttcgacggtctccttcacactggaaggtgacgaggaacagaccggagtggtatttagagatggtaatgggaaaacgaagagtccaagcttcagacatagctttctcgatccaagctggcttaggagatttggtagtgaggattttgacgataaggcagtgggaatcaaaagcagctccagaattgagagaaacatggttgaagtcgtggatcagattttcttcttctgtgagtgagagagtggtggggttgaagaggatgccattggaaacgaaggaggactgaaatagctaagaactggatatggagtacatgcaaaaatggcaaaacctatccttaaatagaaaagtaagaggaggaagatgtaatacctggagaagaaaaggcgtgtaggagtatgggaaatcgtggactccgtctgctcaaatcccccctgaggtagagtagccatcatttgagtagcaatgattactccgtgtggcctcaaggaactcaaagtgactgtaggatgatcggagaagagagggtcgaagggtttagagccataaatcttgtgatgccaaattaattgtgaattaacatgagccatcgaaagtaaatgcaaaataacaagtgcaattaatgcaagcaagatttggattttgagtatcaggggtgcaatcatcactgtaaaggagtggaggtggtggttaaatgcattaaatgcaaatgcaaatagtaaaggtaggagcctagtatcccagaacaagtcttgtggaaacttcacgaagaagaagtgatttttttttctatcgtgacacaaatgtttgttaatatcagtgtgtatttatttgttttttacaaaaaaaatgaatatatttattttaaatgaataaaaataacacatttatttaagggtggacatccgatccaattcaatatttttcttctcatccgatc

SEQ ID NO: 127722 - DNA, 578 bp, Cannabis sativa
  modified_base (547)..(552): a, c, t, g, unknown or other
taataagatacctgtcatttgacttcagcagttgcatttgctaaaactctaaattcgctttatgtgcttgacctatagcaacaacgtgttgctttcttatagaccaagacataatgtttcctcccaagaatagaacatagccacttgtaaattgtctgtcatctatacaacttgcccaatcagcatccgaataggtggacaaagtgagagatgaagtaggttttagatgtaagccttctaatatagtgcccttaacatacttgagtagcctttgcaagcttctaagtgaatggttattggatccttaatgagctgactgagcttgttgataaaagttatatctgatcttataagagtgagatattgcaaggctcctaatgtgcttttatacagtgtctaatcaggaaaaggctctccctctgtaagagacagttttgttgccgcactaacagacttaatttgcacattccatgtgcaacttcattagaagatatgttatgtacttggtttgagacaagtacatgtcagtgttaggttttatgccctnnnnnnaactccatttcaatgtaatctatttt

SEQ ID NO: 127723 - DNA, 562 bp, Cannabis sativa
tattgcctctctctttatgaaagctggtctggatagagatgtggtaaatcaaagactagtgtgctttttactagtaatataagccacgatagaagacaaatcaattgttaacgtacttagagttcaacaagtgaagggagaagaaaaacacatagggaaacccttttgtgtttaaaagaaggaagaaagaagactatgaacaactgatataaaaaaatgttttagcgattggaaggctggaagataaaacttttatcttatgtcaaaaggacaattatggtgaaaataatggattctgctacgcccatttatgcaatgtccactaataagcttcctctctcaacttgtcgctcacttgatgcattggttaagaaatattggtggaagggcaacgttgaaaacgagagattcatggttttcaaatcttgggatagtatttcttcctctatggtgttggtgcggctgggttgaaggcggagttgttggacagtggtgttggttcggggctggggtgggctagcaggggtgtgggggtggggcttctggtgcttgctgtaggcgg

SEQ ID NO: 127724 - DNA, 1890 bp, Cannabis sativa
aaattacttgtttattatctttcttaaagcgtgtgtgaatatgtggattgcatgaagttgtcttatccttttataaagtatggttcattgtgaagttaaatgaattggttctttgctcattgctcacttgttaattgattaggtcacatttttttttcctctttacaagtttaacatgttaattcgtgagatatatcatttggcatgttttaaattgaaataaaaatgaatctcatttgaagcatcatttgtaatatcgtggtgatttaattatttttctttgtcaatctctctcatttgtttatatctaatatccatatgttttgggtcatgctgtgttagatggtttgactttctactttgatgttgtagtagatggcttggcattgtttgttgcaatgaggagtctatgttgcatttaatactaccattcagggggagctctttgttaaacttttagttttctcaagggcagcatttgttttaggaccatggtatttttagcatggattatgcccaatgaagagggtgaaatacttatcctttgtgtaaagtgttgtgttttgttgtttggttgtttaacaactttatttttaagtttgtttagactctgtcatatttttatggttgctttgttaatattttattttacactggtagtgttgtaattgaccataatttgtcaagggagacattgtaaaaaccattattttagtgacaaattaggtccagttgcatctggagttcctagtgttatgtatggactttatactgttagtgattgtccacgttatcaagatattttgggtgtttaatttcccaactatctacttcgagtttctttatttacctgtatataaataccttttattgttactcttttaactaaccttcttgatcgaagattacggattcatttctttctttctttcttgttttttctgtatgtttcattacaggtactcgcaagaaactccattgttgtgggttgaagtttcagagcaaatcttgaagtcaagtatagagagctgaagggattttagctaagacttggtgttacagatctgaaggtgttcaaatctggagcttcgttgaagggatttcaacaaacaagaagtaaggagatcttgcattcataaccaagggatttggtaatttagggtaaaagttcactactgtaaatattggtttgtttttctgtgtaacctggattggatactttacaaacattctttgatatagtgatggttattaccctggttcagggaacccaagcagtagttggctggaatgattttccaatgcagatgaagcttgtaattttgtgtgttgattgttgcatttcagatcttaactttcatgtgtaaataaagataaaatcaacacttaatagagaaagataggttattgaaaagtgttcttggcctgctcatctcatcattccaaagtgtatttgtcctagggcgcttgatacatgacaacattatcgctagtttggagctactttgttcactatttaaaagaaataatggtggaagaggatttatggctctcaagcttgacatgagtaaaacatatgactaggtagaatagggactcttagccaatatgatgcaatagtttggtgttgctaagggctggattagggttatcatggactgtgtgactaacccaaagtataattttaatcaatggtcatcctaaaggttgagtgattctgacaagaggattacagcaggaatgtccttttatctccttatatattcctcttctgtgcaaaatcattgtcttccttgttctctcttttagaggccagatctgaattgatagtgtttaggtgtactagagggaccacgtgttactcacttattttttgcggatgatagcctt

SEQ ID NO: 127725 - DNA, 869 bp, Cannabis sativa
  modified_base (593)..(596): a, c, t, g, unknown or other
aggtaaatttgattaattgatgaataaaagagacatttttcaacttactcctataaataatgagtttttttctatctctcccaattattattttactttcacctaattctctaaatttaaattttagtgataaaaagatcattaacgaatttaaaatattatctattgtcataattaattactaatttgaattatttatatgtatatacatgatatctatattaataaacgtattattattaaaaattataatattttttatttttattaatttcaaaataatttttaaataattatactaatataaatatattaagtgtacaaaaatatacatataaataatttatagtgacatttaactgaataattctactgctaaaatttaaaaattaagtgcaactaaaaaaggaggagttaatgggaaaaaacacataaatatttaagggattattttacaaatacataaaaacaattaaaaaatttataaaattacggttgtacggaattttaaatattcttataatttttataattttatttacataaaatgcgaattttttatgttgtactcttgttaatttgttgttgatttnnnnttatctgtatgttattttttattattattttcatattatttgattgttatttttttgttatttttacgtaattttttttttttgttattttcatgttgtttttatgaaaatttgtgaaaatattaaaaaaattctttaaatagaaaaatgtaattttttatataaaaaaaataaggctaacagtaattttttcccctgaactttgacatgtactaaatcgtacccctgaactttcttggctgttaaaaattccccctgaactattgagattgt

SEQ ID NO: 127726 - DNA, 1585 bp, Cannabis sativa
tatttaggacgttaaacaacatacttgttagtaaatctagatcctagtaaaataatctccaacagtttcatgagtggttgtgaatgaatagatcctaagggaataactgtcaccctatgtatctataaataggaacaaattcatggtaacagggagggaaaatctagagagaaaaagaaagatataattatcactgatattattgtattatgtattccaaatactttctccaaaaagatggactagtggactatgaagaattaacttcaaaaccacgttaaaaactttttgttgcttatttattgctataattaattgtgtaattcatttattacaaaagactaatatttttagttaacgaaaatttgcgttaacactttggtactttgattgagagactttgtagtaaaaacttaaaaaataccctcctcagagacacaagtcaaaatctatacttatggcatattcaacataataaagaaaatcagcaagaggagacaactcgtttccttagaaaggaacctcagggatcacaaagaaccaatgcaactaaaactccctgttctagaaggaacaatggagatttcaatccaactggtaaacagattccataaagacaaagcaaagacgcctatgatccaaggagatatgtcccactagtggaactagaaaataggaaactttgacaatacctgacttagtcaaactggaggaatgccgagttagaatggtaagcagcgacagccaaggctacacagggagtgactcctcaaacccaacctgatccatctacaaggcgaccacagggaaggccccgaggttctaggcccaggagataaaaaaataatcaaggaaaccccacaaatacttaggaagaacaacttgggaatacgagagatatcctaattaaaagagaaaatccaccaaatattggaaatataagaaatcaagagcctcgacgtgacattccaagaacttctcatggatttgcaaactaggggaatgaacaacctgatataccagaatcatctcgcatgaacgcaaatgcccaataggcatgacctggaaaccgagaaattctgcaagatgacaggagaaatattagaagtcaactagggacaggttgacccccaacacatccgcgaatgttttctcataacgattgagaaagtacacacacatacttgagtagggttatgtgtcaaaactcttccgaagaagaaggtcgatgcaagaagagtcacgtgagactggttcaaacacaagtcaaggtggatcaaggtcaaggacccatggggtaaacacaaggtgaaggtggaccacgttgttattataatgatcaagaaagtatgagtaactctcgtagtttctaatcagaaagttactcaaggactagatttgtgagtaattatggtcaaagacatcgcaatcctgatctccacgaatagttaaaccaaagacagtttgacctatgtgagcatttaaactgtaatgcaccatatttacgtaatcaactaaatcaaaatgctgaccaatagcatgtggatccaatacaattgctggtaatacaattagaagataagtt

SEQ ID NO: 127727 - DNA, 4317 bp, Cannabis sativa
  modified_base (1196)..(1197): a, c, t, g, unknown or other
agttgaagagtaaaaatgtaggcttaaccgtgtggtagtattttagtaataaaatatgtattttgtatttttagtgtaaaaatttctaacattaatattaatgtcataccacctttgtcaaataatatttgacagtttctatccaaaatttgtttagaaaagtataattaatcaaaatttgttaattttatttaagtcgggtccggagccgagatccgagtccgagtccaagtttcaagatctaagttggggtgaaagtccaaaaaattaataaaagaaatgtttaaatctttttgtttttaaaatttttaaaattttgattttcaattaaaaaattgaaaagtaaaaataatttataaaacatgattttagaaaatattttcattttctacttttaaaaacaaaaaattgattaaaaaaagtattaccaaacactataatatttaagaattgtaccggtagaaactttcgccggtactaattataaaaacctctagtattgagtattaccgacagattttgctagtattatcagttggtaataatgggtcactaatactattattagcaaccaaaatatatttctgctggtaataatattaataccgacagattaatagcggtgggttccatcagtattaaattctgtcatttgcacgatgacacaataatactggcagtcccactaaagtattttgccgatattaatattttttatataataaaaataattataatattatatataataattatttcaaaatatatatattattaatcaatttctgtatttaaatttaagaaatcaaacattaataataattatttatagtattaatttatccataacaatacacactactattgtcttaaataaaattataacattgtcttaaaaaaaaactttaaaacatcaaatttttcttaattaaaaacctaattatcattgttcagatcactaaattccataaaattatctgcattagagccaagtcttgaatcgtcacgataatcataagattgaggcgtcggcggggtagggtaataaggttgtgcgattgttgcgtaagtaagatctcgacaaattgttgagtttgcggacgaaccaaagtactctgctgttgttgctaactctgcggattggaaatctaaccatacataggttgttgtggagatcctcctatttgaccatacannggttgttgctgcaacaatgacccaaattgaccatacacaggttgttgttgtgatgacccaaattgaccatacatggggtattgttgttgttgcgataagcctccaaaatggccaaccataagttgttgtgtctgagatcctcctgtggcatctgaaaaatatataggaggagactgtgagggatgcctgaacatgtaatgaggcgactgtgaagagccagcatacatgttgggagaattttgttgatgttgttgaaagaactgaggcatctgaggggagttacaggacatgttaggagacatattttgtggttgatgaaaaacttgttgttgtggcattgacattggacgtggggttgaagtagatgcactaacttgttgttgtgatggtaacataaactcagagaagggtcactagaggtgccagattaatcaatcttatcatgcatttttaacataaactcagcaaagactctcatatcttcttgactaatggatggagaagggccttgtaattgaacttgactttgagtacgagaacttgttaccgatttgtctttcaatttataacccactcctctttgatagtccgaatgattcccaagaactttattaatagcttgaaattgcttgtatttggtagaagaaccatcgttggaatcattttctgttcccgtcatgctggcaatctcttcattcatttgctcctgatcaaataaaatgttaaaaatacaatattaccttcattaattcattttaaaaatattataaaatgaaaatttgaaacttacatgtagttctcaacatgtctcgctaacccaagtgtcttttgttccttttttaagctggcttttttccaaacataaattgcatagtctttaaggacgttatgttcagaagtagagttagtttgtgtaatgtgtaaaaaaaaatttactaatagaaagttaataattttacttacaaattcattacgagtcgctgcaattgactttgtgccttacgtggacatatacttcatttcctttctattttccttattttgattagatcgcgtaataaattttgggctcagaaataattcaacaagttgcttccaactctgtgtagagcagtgatcaagtacaacattgataacactttccaaattatttggatccccagaataatgttcttgaaagtgagtgtgcctgatattctttatctcataatacattattttcatttcatggtagagagtttgtatcacctttcaggctctggatgaccatcaatatcgtacaaatactacaaacaaatagtatttgttaaagaattttgtattcattaaaattaaaaatttacaatattaaacttgttaatttgttttacctttattttttgtgcaacttggtctttaaagtgttgaggtaaatctttaaaattcaagtagtgtcctggcaacaagattgtgacttcaacacccagttgacgtataaaatcttagttctccgtaccaaccactttacctgtcacttcatcaagtgttagtggtaatagttttcctgcatcccgcttttgttgttcaacattaaggttagtagcaaggccacaccccttccttcttggcggtagagctgactcacatgtcgacggtaccctactagggtctggtggatatgtaccaccgtcgtctccaccatgataagttgatacattagctgacattacttttttttaaaaaaaaaataatatactatttattagtaatagtaacattaatttaaaattaataatgttaacttgaaattaataattgtatgtattacaaaataaagtgtctgaaaattaatcatctatatcactatcattattaattaaattatcgttcacatcatcttcacaaaggtcaactaaaatttcatcgtcagatgcttcagtagcttcttcttcgtccatgttgtgatcatcttcgttaacatgcaaactttgttcaggtccaatgattaggttgcataattaactctccaagatcaacagttaatacaaaatttgatgagactgtgtcgtgtaccaaatcaacttggaaattagcatcatcatccacgatgtcctatatttgttgatggtttacattcttaactattttttaatttttccctctcaataaatcatcaagataaaatacttgctttgcttgattagtaagtatgtgtgggtcatctttataccattcaccattaacattgatactagtgatatggttctcaacgattattttctttcgtcttggatctgtattaaaccacttgcacttaaataatgtgacggagtaaacaccagtgaaggttaactttagtacttctttaagtgtgccataataaaccttctgttccagccacaaacactccactattttgtgtgctcctcttctcatctcgctttctacccataaatcgaacttcattcacaatacaaccttcatagtaagtacctaagtgatcagacccggatgctaaagctagcaactcttctccattctctaatgatccaaacttgtgcaagtcatatatctataaaaataatatctcataacaccacttaaaataataaacttttactacatctatattcaccttcttgtgaaaccacgactgaaaatatttcttgtgtagaacgttatgatctccatttgggtatttttgtctgatcacttccaagtgttcactataaatcaaatagttttgccttattaattagaatttcaagtgaaaaaaaaaatagaaaaaattcaaaaaaagagaaacttactctaagtaagcttgaagttcaggtgaattgttaaatatataccgctttgcttgttcacgagttgcacgatcaagaggccgaatattggtttttgtaatgggtcgacattgagattgaaacacagaaatttttcgtgggacaacctcatcttcattgtgatcaagacggttaaaccttgtttcaacccccttgaaatacattgaacagcatgtgaaagcctcatctacaacgtaactttccgctattgacccttcaggacgtgctttatttcctacgtagttcttcaattttttcatgtacctttcaaatggatacatccacctcataaaaa

SEQ ID NO: 127728 - DNA, 1518 bp, Cannabis sativa
  modified_base (296)..(306): a, c, t, g, unknown or other
aattaaacatttttttatacatacaatttttttttcttcctttgaatttgttatttattattttatttattttagtttgttattggagacataaaataacaataatttatcttattttgttgctagttgtgtgaaaaaaatatttttttttcataaatattaaataaattaatatagaaaagtaaccaatatccaaaataaccgattcaatccgtacttttatagattggattggattagatttgagctattgtgcggattggattggatcaaaaaaaaaatgaaatccgcacttnnnnnnnnnnngatgcactatgagaaaaatagtgcagattgaattggatgaacacccttacccacatgttgggtgctatagaagtgtgaaatttgtcaaactaacaatgtgaaatattaaaatttacaaaataacctcacttaattttcagggaatgttatagttttattgtctaaattttcggagacagttttgttccatgtggcttgcaataagaattttacaacgcatgatttttcaaagcatgcccttcgattagatgatgagctatcctggtttgaggaggtcctaccaccgattatagattgatgcatcgttaatcatatgtgattttgatcaccacgtcaaaagaaaataacctcatttaattgatggtcgcatagtgtaaatttatgatcttttatgatcacacaatataattcatgatcatttctgtgactatacatgattattttgctaataattttttttgtaaaattattttgctaatagaagttttgagaattcaagagctcttttgatatattctctatttgtttcgatatacaaaaagttttttaatttatttttttctcgtgatcgtatacattatagttatttaatattatctataaaaattttagaaaatttagaataatttataatgttgaaaataagatttaaatattttgttagacgtgtgactgttttttacattgtaaactattcataattttctaaaaatttacagatgatcgtaaataagtacaatatacattatgaaaaacaaatagtaaaaaactcgcttgagtgatgaaaagtaattttcttgggggtttaatatagattttttttcttttctcaatgatatttatatatccaaattaatatttttaattttaagaattattttattttaaaatattttcattgaatgttttattattattatttttaaataaaattataacttacaacccctttggtttggtgtaataatctttggaatggaatgaaagttccaatttcaatgaccttatatggcgacgatttaacaccgtcgcctataccgtgttataggtgacggggtgacagttttaaaccatcgggaatgtaaaaaaaaaaagagaaaaaaatacaaatttttctacccttaatggcagaaaaatctgtattttcctattttttttcttgcattagttttataattttacctaaattaaaataaaacaactaattaattt

SEQ ID NO: 127729 - DNA, 1144 bp, Cannabis sativa
agaattcatattaggatgttaatgaaacatacatggcagtaaatctagatcctggtaaaatatatccaacaccatcttgttggtagcactcaaaactcacagaaaaggtatctaagacaggtagaagaaggggaagagtgaacattggtgcaatctcctgcacagtgccccagaatgatgaattttcccatcacatttaccgaggatgatggcaaaaatatgtgcttccccataacaataccttagtaattgatgcacatattgctaacaagaaagtttctagggcccttgttgacaatgtaagctcaatcaacatcttattcaagtttgtgttccaggcgataggactcactgaagcgaacttaacttcttatccccttccgttgtaaggcttcaatgtagatgccctaatgtcgatggggaaaatctagttattgattacctgcaaaggagagaatgatacaagtgcttttaagaactcaacttttgtggtggtggatttttgaacaatgtataatgagaaactaagatggtctaccctagtggactttgtgttggggattatttaccaggatctagatttactaccatgtatggtatttaacatcctaaatatgaatttctaaaataatgtaatttaaacacatataaagattaataaatcttacattggttgtagcggaattaaatgactcatttcgctcagatctctaactcttgtatcctttctgtagcagagagtcacaaagatctgagctcgattctccttcacttgaagggattcttcacagtcttacacactatgattgaggactcacttgttatgtgtgagcatgcactcaatcactaaggcttgaatttgattgtgaagaaacattaagaattttgaattagagaagagaaaagaagaagaagaagtctcaaactctctagttgtgaaaactatgtcaagagtcattagttggatatgagaccttactcttctttttataataattctactagggttagggttgatttatttggaataaaaaaatgataaaaatagagcaaaaaaaggcacaagtggccgaccatgaagtgggcccaacactggttaaatttttgccatttttctcagccatttatctatttttcacaaata

SEQ ID NO: 127730 - DNA, 1497 bp, Cannabis sativa
  modified_base (44)..(44): a, c, t, g, unknown or other
gttttagaagttcatattaaggatgttaaaaacatacttgttantaaatctaggtcttggtaaaataaattccaacattattggtagcattagttcataccaatcaacattgcccaacatactagatatcgatatcttagtcaatatcaatgtacacccatactgctatctctaatatgcttgctacatgaaaaggtaatacatgtatactaaatacgtgcatatgtgcatcggaatacttttcttacctcaattttttattcaggtgtgtcagcgaacctgaatgaaaattaactcgacgatcagaggctctaagtcacattagtggtaaagtggtaagtgtctcgctaaaactctttctagcactaaaatttataaattgaagtttttctatcgataaataagttggcaatactataaataacctaaaaatatgaaaaaccgaggtatatccaggtctgtccaactgagaaattagatttgtagttgggtgccggaaattctaggcattgctagagaaaccgagcacctagtaacacaatctaggtgcctagatctttgcaaaatctataacttaaaaatttttgagttttaacttccccaacctgctctaaatcaatccaaacttcccaaaacaacataatgatgtattctaagaagatttataagctcataatacaattatatcatgaatttcaaaatttaacattaaagaataaagcttcaaactttacagttctaaacttcctctctcaacttcaatttcagctactcaccactaaaattaaaccaaaagctaccaaatttaatctaatattaaaaaagattaaaattgctaatgaaaaaaattactaactaaaagaaaacaaattgtttaggaattaccttctttctcttcaatttaaccttcaaagctctaattcccagagactacttcttcttcaatcacatgttgattattacttgaattcaatgtgaaattgacaaagtttctagttttttttttttttagttttgggggtccgctaaaagagagagaaatgggttgatattttttttattaaagtttctcacataatctagtcttttctaattaactcaaaaattacaaaaataccctttactcaatatttccataaaacccaactaaggataaaaggatcattttctaaataactgacataatcacatattttctaaatgtccataaaaaccctcgaaacctttaaaatactaaactataccactctcacatttttgtcaatccatcgagctttcactattaccgatcataaacataagaaaatacatactacacacacataattccataaaatttctatagtagagtaatattatcatattttgtctattttctaataataaacttttatttctgaaatgcacatattatactataatttattagaatgtcaattaattattaatttcttcatatctaattatgtgttcattataaggatgttcatgttggaa

SEQ ID NO: 127731 - DNA, 1519 bp, Cannabis sativa
gtcgtaggttgcttaggctattttataatttataagacactcgacaaagacaatacgtaaatggtgctatttttttagaaagaaagataaacttcaataatataaattagttgttacggaagaactaaaaaaaatttataaagaatcatctatccaaatacaatctcctaaactaataataaaaaataataataatatatagtaatagtaaaataatataacagcctttgtgggactaatttaatttttttcaatattataataaaaaaaataacatatataataatagtaaaatatcttaactaattctatattattaattattatcatttcatccgttgttattgtagtcaccactactttcttttccaaatctcaatcttaagaaattattgttagattccattctaaatttccaatattttcttgacacatttgagccttcactcatttctaaaatacttctcttagaattggaaacttaaccaactaaaaatatttaatatctataccttacacatataataacacttgtgtcatcatatttttcatcttcttaaatacaacaaaaaaacattacgaataaatacattacacataatacaccttttgtttaatcattagaaataataatataacaggactattatttaacatccacggatttggtttagttagtttatataatatatgattttggtctacttaattattattattattattattattattattatattaccaaaactatttaatttcaaaataattttctaaatattatggttttagtactttagttagttagctaatttatttttattgttgttgtaagagtaaagaaaaagaaaacagaagaagaaaacagaaagattgagagaaaaagctcaattgagcaagtgaactgcaattatattatatagaatttgtaataaattcacaattacatcacacaatgagagagagattaatgtaagtaataacaaacaatataatagaaaataatagaattctttaaccattaattaacactaacaccgaagctgtggaatcttttttgtcatcaggaagaattttgaaagagataaactccacaatacttacccttataccaaaagtgaagttcccgaacacagtgaaagacttcaggcctatcgcctgctgcaatgtcgtttacaaaatagccaccaaaatgatttgtgctagattgaagaacatcttaccaagccttattgctcaaaaccagaatgactttgttaaaggaagacttattgctcacaatgtaatgatatgtcaagacctcatcaaacattatgaaaggaagaatgccagggcaaattacatgataaagctagatcttcagaaggcatacgatacagtggagtgggactttatagaagaaatgttggaagccttacagttcagtttgtaaagctggtaatgaattgtgtaagaactccaaagttctcattgatgtttaatggtactctgcatggattctttgagtcaaaaagaggat

SEQ ID NO: 127732 - DNA, 712 bp, Cannabis sativa
tcccattatggtagtgaacaaatattgggcacatagttaataattgtgtttatggtattaaacctatgattatattagtccacaataataattctaacaggaggaaccattttaattaattacccaattaatcatcaagtacatggctatatatagtgattcatctaaggtgttatatatactgatctatttaaacaacacagatttcaaaagtacttgaatctgatttcttaattagttcaaggtttttgggcctttattagttgactgtttaaatttagaaaaatttacatggtatactaagttttggtatttttttataaaatactgctagacggtattttttatttttttatagtatttttttataagtttcatattgcaatatactgtgttaagttttcactgttgttctattggtgttttttagttgttctactgttgttttgagctgttatgttttgtacactactggtgttttataaaaacacagtatttttgaagaaaaaaaattcgtgtaacagtatttttgtaaaatttaacctaaatttcagtattttttgtaagtttccctaaatttaaacaatattaatgtaattctttcttttgtgttttttttggttatagtgaaaaacaatatttacaataggctaattagtaatttttccccctgaactttgacatgtagtaaatcgtgccccctgaacttttt

SEQ ID NO: 127733 - DNA, 781 bp, Cannabis sativa
ttagtgagtgtgtgtagtctaagtaaaataaaagaggaagtaattggtgtattgtagtcaagttttggtgtaattaattttgtaataataaaagtaattatgtttttatgtgttgtagtgttcaataagtggtattaaagccaagtcgagtcggtttatatcaagagtcatttgatgagttttctagagtggtcgtgtgtagtttagtattacagagcttgttgttgaaatcaagctttcttggtaaaattagaattttaaccaaaacaacgatgggtgatcttcaagtggtcggtggaataaaaaaacttaacaactaaaactacagcacgtgatcgatacacatggaggcatatcttcaaggccaaaacttgtgagagattattagtggcaatgaagtcagacaaccggaggatgcagccactttaaagaaattgaagattaaagcggacaaagtcatgtttgcaattcagaccacagttgaagatgaaatgttggagcacaataggccgacgaagacaccgaaggaagcgtgggatacttttgcatcactgttcaccaagaaaaatgatacgagattgcaacttctagagaacaaacttctctcaatcaggcagggagacatgacgatcaaccaatacttcaccaaggtaaaatctctttgtcgcaaaatctctacattagactctgctgctggcatgtcagattctagaattagaagaattattattcatggattgaggccagaatttagaacttttattgttgcaatacaaggttg

SEQ ID NO: 127734 - DNA, 514 bp, Cannabis sativa
  modified_base (482)..(483): a, c, t, g, unknown or other
tagttagggtgttacaattttagagtcatgaaaccttcttttccttttgcttcttctataacccaatttaatataatacaatacgatctaatacgacatactaaatgaactcttaaatttatatatatatcacataaaatatagtatttatctaattatcaaaactctatcatcaaattaaggctcataatttattaaaattcaatataatttgtattggtaagatgaacatgttgaaagtagaataaattaactatttcaaacatgttaaaagtagaataaattaactatttcttttggcttaatgaaagcaatgcaaactcttcatttttgcttatgaacttttaattcaaaatcagtttatatatatattataattaattaaaatgtgtatttttctttcattttttttctagggtgtcagccaggacttgtgcatccgctagtgtttatattgtttatataaatatatctattctatnnaaagtgtgtctatataacagaattcttggtt

SEQ ID NO: 127735 - DNA, 1667 bp, Cannabis sativa
  modified_base (34)..(52): a, c, t, g, unknown or other
gaaccatgcaaaataaaatgttatttctgatctnnnnnnnnnnnnnnnnnnnattatattgaaatgggttttatctagggcacaaaacccaacataaattgcatgaaaacctaatcttaaaatttagaaaattaaagaaaacgaaagaaaactagcttaccaagagctgctaccttcaatcctttggaattcctaccgaaatcctctgaacatggctggaatttgaagaaaaaaattgattttcttagttctatggggtggtcgaactcaaggaagagaaagagagaggcttaggaaatttttagtttttgttttctaacttaacaactatagctaaatgaaaaaataattaataaattactatgtttagcttatttaattaatgataagcttagaaaataaatcatttttcacttaaacataatactagttttaggatagttacccttttctacctaaagagcaactaacatacttaggggtaaaatagtcttaaatcataactctaaaaacaaccgactatctaaatgtctaactattccgtctcgataattttaagatacatagaaaaatatatctaggtgacttaataggccaaaaattgcattatattattatcgagcataaaataaaaaatcataatatttcacatatgacacaattaacacacctagaatttaaatatgtctccacaattatataaatgataattaaaagtctaatgctgaattaaatctaataatctgctaattctcatattaaagctgagcgattattacagtattaacctagttaactctattattctgtctcttgtttccactctcactttatttttttgaaagaaaaagtggtgcattggtggtgtctagtttattttccattcgtgttgtgcttatttatgtctagagtaacttcttacttgttactacttcatgcctcaagctatgtttgagagagagagatagagttgagtagctggtgaataaaatctagcacatttggctaggaaataaagccttttctggtagaacacattattatgtcaatctatctctagaagaccttgtagagatttctttctttttatttatttattttttcttttttcccttattgttaagaacttgtttgacgtaattatgataaattaattatagaaaaataaaggggtcatttaattttgtgctaaatctgaaatatggccactacagggtagagattgatgatgcttgtttatgtggaccaactataaaaaagatttttatagatatgaaggttgatgaagtgaacaaaagaaatatgaaatggtcaatttagctcaaatttatggaatcaaattcttgaggacttgcaacgcaaaagtaagcgaaattactcaatgaatcaagttaagaaaaagttcaatagattacttactaagtatcgcaagtttaatgagctatgaaaataaactgaatttggctggaatggagcaacacatactgtgggtgctccagaggaaatatgggagaattatatgagggtaagaattaatttagtcaattttttttagaaaattagtcttaaaagaagttgataaaaatagttctcttttttattataggcacactcaaaggtggcactcttatcgcaagaaaggatgtgatcattattgttggaactaa

SEQ ID NO: 127736 - DNA, 1942 bp, Cannabis sativa
aaatatttaatcacccaaatatatatgctacattcagaggccaatcaaggggccctctttaatttagttcaatgtacaaaaggtaaactttccattgctaagaacactttctcatatagttgagcttcactttgagggaaaacttggatatttaatttttatggggggtagagcggaggctttacttgaatgtatcaaattatgagtgctaggggtatcgtctaatacaccctgtagggatatgatgagcttctcgtacactcacttgtatctgtttccaatactttattaccttccttaatacaaatgtacttctctgctgtctcacagaagtcttctataccatcaaattcacttttaagcatattcttccatagtctacttccagggtgtgctctagcacctacgacaaacatgagttcatcgtcagatatcctccctacttaggaaactttggtgttaaagcgatgatatatcttcacatgctttcttatttttcttgcttcataatggtgatacttgttacaggcataacataatcattggttgcctgatgttgttgaaggaattcttccaaaaattatttccaatatgtgattaatcttggcccaagccttttgaaccacttacatgcagctcctttaagtgcgaccacaaagcattgggaccttacctagcatgacattttttcatcttcattagctcattaaatgtttgtaaatggtactttggatcagttttaccatcatatggtgtcatgcaaggctccttgaaattgggtggaagttgttcaatttgaatttcccttgagaaaggggatacttcatcgaacacatcatcctctggatttccctttgacgtggtagccatcttttgatgtagatttcacatctctccttctagctccttcattcttttgttcatcatttcttgatagttggtgcgtggaatttaggtattccttacagtttgcatgggacgtatgagtagtactcctcttgtcccatcatcatgaaacttcccacgatgattgagggatgatgccttttgcttgctttgctcttgaaagggggtgcaggcacggttccccctagtatgagactctttgggtgaagtccctccatatgatcactggatgtttctatcattacggtcttactatagtgggtagactcacctagccttgaatgacctataacgtccgtgtctcacaatgggccatttttgctctcatcctttagggtgttatctataaatgacacgaagttccctccaccaacatgtgcaattgggatctcatgttctttctagcggttaatgtgcagaaagtatgagggttgggtttttttctttgagtatgccgctcaacaccttttgcatgctagtcactataatttctagccttttgttcttctagtggagatcatttatttcaccttcatagtggtaagtttgagattttgagctcactgagtatgcttacttttcttttttggggtgatgtcgctaggtatcgggatctctcggtgttattggtggaggacgctttattggaaattttttttgccatgacaggctattcacaccaacatgtgtgacggatgcagctactccatcatcttgatgccttgaagacggttggagtatcctggagtcttgtagttgtggtaagtaaggaaattacatgacttgagcttgttgctgccacaaatggcgacaaactgttgactttgaaaactcattaaccaaattatagtcgcaaaatcaaaacttagatgcaacacctaggattaagatgaagatataaatatgaaaacttttaaagcaaaagtgctaaatatctatggagaaatataaacgtgtatatttctctaggtcaagtgttacaatgattttccaatcccttctaatatttgtgaaaggggtaattattttataatgg

SEQ ID NO: 127737 - DNA, 906 bp, Cannabis sativa
  modified_base (866)..(878): a, c, t, g, unknown or other
tttttttaaaaaaataattaataactggttttctttaatttataaaattttcaaaatacacataacaaaaataaaaaactaaaaatataattaagtatatgtgcaatattacacgtagcaataacctagttaattattatatagatatatacatagatatataaataattgttatatagatatatagatatagatagataaatatttttaatatctttatatttgtatttatttattaattaattgttatttttctttataatatatatgttaattaaaagatactataagttaatgtgaatatgaattaatagagaaaaaaattaggaaaaataaataaaaaggtgaaataacgagaaaattagaaaattagtttctatggatggatagatagatttttttatttttatttttatatatatatataatatatgtcaattaaaagacactatgaattaatgtgaatatgaattaatagagaaaaataattaagaaaaataaataaaaagttgaaacaataagaaaattaaaaaaattagttttttgaaaagttagagcgtcatgtcactaatcctaataatagaattaaaacactcatacaacctgtcatctcacgtaatctaacaacatcattatataagtatgtagatatatagatagtttcttgaagagttagagtgccatggcactaaccttaacaatagaattatataatatataaatactctctaaaagttattatattaagttttatgagactcgatatttaattacactaatagtgatattaacacatagaaaagtattaagacaccactaatatattttaccatttggaagagatttcaatggttacatttttattnnnnnnnnnnnnnttacatttttttaagccattgaattact

SEQ ID NO: 127738 - DNA, 1196 bp, Cannabis sativa
agccactaagcttcctgttaatatcttgcaaactgattgtaaaagcatagtagataaaatttatagtgctagtagtcataattctgttgtaaatgatattatcctttgtattaagaactcattgttgttcagtcctaatctggtcattgcccatgttccacgtgagctcaataaaattgctcatgtgtgtgctagggctggtttaggattagacagtgagtgtgtttggaatggttctttaccttcctttgtaacctgatttttttgtatttgtattttcttgtttaataaaggatcaggtttttcaaaaaaaaaaaaaaaataacgattatctattgtcattttcatattcaaattaataataaataaacaaaattaaataccttattttcccattgccacgacccaacttttcctggtgcagctaatcctatctaagcaaattttgcaatcgtattattcttgttcaagtatctaaaaaccaaacaaagaaattttattaaaaaaatagttatattcacttaatattcccgagtttttacaaagtttttagtttttcgtttgattatatctcttatttgtttttcttctctaaatttgacattgtttaatgagatattttagatttcttaatttcattatagatttctcaattttgatttttttttttttttcattttctgaacttatttatttatttgttttatttttattttattttctaaaataactaaaatatttaaccctaaaaatatctataaaaccaaaatccttctaaatctatccaacaattttttcctttctaatttttcttctatttttaaaaaagttttaaaatatctaaccttaaataatatctataataaaataatattaatattaattaatattcccaaaccttaccctttctattcattatatatctatatatactaggcagaagttacgtgcaaatgcacgtatacgtaattatatacttagtttagaaaagttaattaaattatataaagttttaaaaatagtaaattagatgcaaaatatttacaaaatgagttaaaaagcaattacattttgattcttttaaaaaaaaaaaaatttccaattctaaaatttaaaaggaaatatgctctaaagtttttaaaattaaggaaagacagaaaagacaggaaagtcttgtttaagagaagaaaataatg

SEQ ID NO: 127739 - DNA, 653 bp, Cannabis sativa
aaactttgggtacttatgccgctacttttctttaaaataattattttctttaaaataattattttcttaaatgataaagttaattttaattggttgtaatatttttttttttaatttggaaaaaatttaataagctacaaaacaaataatgtcaagtatattatagtatagagacaaaaaatatatactataaagccatatgttcgttaacgatatgagaagggctagtactactattgtggatattggaagccgaatgataattgcaatggggaatcagcccttggcagtagttggtaattttgtgtacgattactaattggggattgcggcggtggatcgtagaaacattgaagttgccagctgtgaaattttgtgtacgattgtgttggttatccttgtcatacacccattatcgtacactttttttttttttttgctaaacttcaaacttcataaaacaaagaaagcgatgctcacagtaggaacatctccccaatacattaattagaaaagagaaacattaaaaacgctaggagtaatttcccaaaagttcacaaatccattacaagagcccacttagccagagtgtgcgccccagaattctcagtccgagggatccaaaccagagtagtttccatgccttcaatcgc

SEQ ID NO: 127740 - DNA, 1341 bp, Cannabis sativa
tacatgatcttaataaaaaaaataaataactttttttacaaaacacaaggtttaaaatggtatttaccttatattttctctacaaataaataatattggtaaatggtaacaataatcgttctatgtggaaaataaaaagacttattttgtcaaataaaattgatgccttcaatagatcctgaacacaagttaatttagataattaataacttaaataactgaataattttacaactctaataaccaataactaaaacactctaataataaaatctacctcatatatatttaatattgttcacccaaaaacttaatctagtgtgtggacatcaatgtttgacgtgtggaaagaaagaaaacatcctggagttgagtaatcttgagtcatagcagtcgacctgggaggggtccctagccatgcgcccaggttgactttgggaactccaaaatgggtgtttcgatcccgccaaattattttcaactcaccatctttagtattcaaaataagaagacgagaagaagcaaatccaagacatagaaatttaaaagagacgaaactacaccccagaagtcaacccaggtgcctaagattttcacccagcgcttaagttgacatctcatctagggtttcaatttttgagcttagtgcaaatggctcaaactttatacttcgacatgaataagacatgtcacgaacatattttaggcatcaaaatcagaatcagaacacttttatttttgagcacccaatgcctaagttgacatattgtcaacctgtggcgcttcaaatcataatattgaggaattatccagagcattttattcatgtccatccaaaatgaagaatcaagtgctttcaagaaaaaaatagatcaacttggaggccgaaacggggacctagcgcccatattgacctaagtgctgggccaagcgcctatgttgacactttgtcaacttgggccatttccaactataatttagaagaagtcttctgggtatattctccgttttcattgaaatttaagatttgggtacttttgggcaacaaacagagtcatataggtgctaaaattgggacccgatgcccaggttgacctaggtgttgggccaagtgcccagacttgggccatttccaatcactttttctgagaagtcttctaagcatattctttgtttttgtaaataacttagatacaagtatttttgaaaatcaaatggaaccatccgatggcaatataagttagatttcaaaatctagctctttctcgacaactctagctacactgcgagtggcgaaatgggtcaaaaataggtcaacataaacataatacaattttttta

SEQ ID NO: 127741 - DNA, 1157 bp, Cannabis sativa
ttgattagcaaagattgcacagtaattgaaaaagcactgtagcgtgccttagcattagggcgttacagcattactgacaaagtcacaagaagggatgttagagatgtttttcttggtcaagaatttctcattgatggtgatgatgtagttgagatgggtattttgtatttactctcttgctacttgtttagatttacacatgacaaaaaggtaaataattttctttttgggattgttaatagtgatgattatctagatattctaaatggttttgcatttggaaaaatactttgggagaagacattctactatttgataattgcaattaaggatgataattctatatttgatgaacttgaagcaaatggtaagaagttcaagaaatacaaactttctggatttgttgttgcttttcatttttggctttatgagattattcctagcttgtcccctgaataagtactgagtttcgccgaatacttaataggcaaagtttcgaggttcctggttttgtgactttagtcgaaaaggtttttaataaccctgaggtaaaatagtctttgcaactggttttgctatttgattttttttttttttatttggcttcttttatagcattgaaactgatttttttaacaggtcattgaagatgattttcgtcttactgatgctaagagacataatcgtcttttgaagaattttaagtttcaatcagtgtatcttcctaagagtctggatgatgaaaatgaaccagttttcatatattttggttgcagattgtttttctaacatttcatattctcttttttaatattttttgtttcttttgtaggattttgaggacaagtttgagaatagttgtagaagtttatcatttattaaagattctcaagtaggcatttgtaatgagatggcaatcttgagagatgagttttttggggatttggctaagttgagtgagatgattgaaaaaatgaactccaaaaactatgaaaagatggacacagccgatttgtttggtgcttctgatagagaggtaaatcgtttattattgtttatattaacaaaattattattagtttcttttaatttgtatatgaaattattctttagtataattgattttcacactgatactggttttttttttttttttt

SEQ ID NO: 127742 - DNA, 1097 bp, Cannabis sativa
tggagtttaccaggagcatgccttcctatagcgagatggatgcctcgctattcatcatatatgtccttcaagctgttacacatagttagtataatgtatattatacgctaagtatttcatcagccaactcgccttgttaacacatctctccatattgcaaggtagatacctcattatatattattgatgtcatccttgcgatcttgtaaatacgtaaatcaatagttcgtatatccttgccttgctgaagactgtgaagtctgcgagttataaatatacctatcgacttctgcatttaaagagttattccatttaatatttattaatataattgccattatatttgttcgttcatattctctgagattgacatgtgttgccttctgaagtaccaaccaaattttgggtataacaattgccccttaaaaaatccttttaagtgaaaagtgctttttaaatgattacagagggtatatttgtcacaatccattttgaaaaaatgcatgccttcgatttcagcgattttctgattttaaggcacatcatgagcattaaataataatcttttccacttccctctcgtttctacctgttggaccgtttatattttaatctggcgaagatcaacccaatggtataaaaccaaaaaaaagccaccttttcatcatcttcgtcattttaaaaaatttcttgagctttttttttgcggaaaaactctatcctagttttacaaagctttgcatgccatctttttctttgacatacttcttgcaaatttcatcggacttgcttttgcttttccacaagcattttgaaagatcatcacagcatttgcctcattaccagttgcagagccatctatcacaccaccacttgatttcaaacagtaattaagtacccatccttctctatctttttcttttcattcctggatctgatcattacttttataatttgcacctttgtcatcttatttggttttagcgattttaggttaaatttttttggataatttttagggtttaggcagagcatagacttttgggtttctcaatttataagcttctggtttgataaatttcatccaagaattggga

SEQ ID NO: 127743 - DNA, 970 bp, Cannabis sativa
ctaatttaatacccaaaaagatataatttaatacccaaaaagatataaataaatacccaaaaagatataaataactctattttcatagagttatcaactactgaccttatatggattcaatccttatttagtgaacttgatattcagctttcctcctgccctatactctagtgtgacaacctcaaagcaacatctctggctttaaatcctgtctttcatcaaacaacaaagcatattgaagtggatcttcactttgtgagggacaaagtgcttgatcacacccttgacattagacatctctctgtagatcatcaaactgcatgcatatttactaaaccacttcctcaaactcagttttccaagtttcgtgacaagttaactctgaaagaatcgagtgtaacttgacagggggtgttagagctagttatggtttaggtgtctgttatttttctattacaagagtttgttactcttttttgtcacgtttcttgattgtctaatgtaacagtgtactctatataatagaacatcaactcatcttcttccttgagctttttctctcattttctctctgcttcttcactttcttctttctttctcaactcccataaatcaaattattataatgatttcttttcaatatcatataatatttatgtttagtagattgaaacaaatatagttatcaatgatcataacacaatatgcgctaatacatgtggaataacaagaagatgaaaaaaatttattacatcacttttccactataataatcatgcaaatcaatatatgaaaaaaaaaattacttttgatctatataagttgaagaatacttgaaatcctctcgataaatgactaataatatattttttaggtttaaaggatatatagatataaatagatagatatatgttgggttttgtgccctaaataaaatccattacaatctcattagttatcaatctaagaa

SEQ ID NO: 127744 - DNA, 780 bp, Cannabis sativa
atttatagtagttcactccgtgtacggtgacaataatagagttacgtctattatgagtttaatttttcacgagataaattacagaaaaataactaagtctagaatcctaatttttagaaagagatgttctgaccttatggctgcttttctgaacttaaaaaataagctagtggagctcttcttttataggtggacgaggtcctatcaaataagaataaataatccaaaaaaatatgaaaaaatacatttaagttatttttgaccgtagatgatgatttgacggtaaaaattaactttagaggttgattttcaattttcagagcttgagtcgcactggcaagacccgctctgggtaagttacaacttaaatttataactcctggtgaaatttggagtcgatgaagtgtgagacatgactggatagaatattgaaatatcttcaaagtgcaagttagaattagatcgcgtcaatcagatcaatattgagtgagttatgaccatttcactgaaggttgttttaggtccagcgcccaagtcggtgagtgggaaaacgcatcagagatgtattttttgatgcctaagtaatattttgacatcacttagtccatttatgtgttatgccaaaattggtcactagtttttagattgctcttctgcagaaatgagagactcaaaactacccacttttcgagtaattcaccttgtcgaaaaaagtgaaaatatgaagttgtgaatttgactcttatgagttcatggctcttagttattatgaaaaactag

SEQ ID NO: 127745 - DNA, 782 bp, Cannabis sativa
ataggacataatatcttgatttgtcaagacttggtgaggcactatggtagaatggcaaacaaacctagttgcatgatcaaactggacctccaaaaagcttatgatacaattgaatggagctttctagaagagatgctaactggcttaaatttccttgagaaattcatacaattagttgtgaattgtatcaaaactcccaaattttctctgatgtttaatggaacacttcatggtttctttgaagccaagagggggattggacaaggggatctgatatctcccttgttatttgtcttaggcatcgagttcttatctagattaatgatggaagttggggaaaaagagtgcttcaaattccatgatagatgctctgaaccgaaactcaatcatcttgcttttgctgatgatgttcttttgttctgtcatggagacttcatgagtattctttacatgttgcgggcactaaataccttctcacttacatctggattgtatccaaatgcaagcaaaactgctatatattgtagtaatatgcagcccagagaagtgaaccatattgtgcagatttcaggtttcataaggcaggagatgcctttcacctacctgggaattccaatctgtgggaagaggatatcagggaaagaatgtgaaatgcttgctgaaagaatgactactagaattaaaagctggagttccaggaatctctcttttgctgggagaatcactctaataaattcagtcttaattgctatacaggcctattggagtcaaatgatgatctt

SEQ ID NO: 127746 - DNA, 512 bp, Cannabis sativa
gtaattattctagccttcatcattggaaagtgtctgcatagtaaaaaaaggtcgaattttaggctatatatcttttttttcgaaagggaagggaagtttagtagttataatttttatttttcgttctcgaaagatgacttgtttctgtgttagatgctacatcaatggtatgaatttgatgtgtctcccgattaaaatttgaaactccagtcggtggtggagagatgccaagatgtggggctgggttagaggtgttttagggccagtttgtcacagtaacagtagtgagagtagctatgctgtgagaataatagaaaaaagtttaatatttggtaaatttaaaaaaattgtgagttgttaagatttattataacgataataataatgttatgatcgagtttatcataattataaatatatttatatgtaaaaatttattttatataatattttattttttatatgtttttaattttttttttcaaatttaaatttatatgcatttgataaaa

SEQ ID NO: 127747 - DNA, 586 bp, Cannabis sativa
tgtgtataattatcatccatgtgtgtatttatcctatctaggctcaaaaagtgttcattcaaatgtattaatattatacaatgctttaaggtgcagtgccactcagagaacaacgatgtataatttgttctaccagggatttcgccgaggttggtttatactctgttaataacagaaaaagaacattaatcttaattagtgtaatagcacaatatttacgtatcttatattagaatttagagatttacttgttaacatttgatagaccacatatttttatttgaagaataaattgactattatttagttgacaaaaattgtgcgttaacacaaattacaattagtttagtttagaataggtggatatatggattatgtgtttgatgatttgttgtggtaaaatagtgaactagtgatgttgatgaatagttaatggtttagtaaatgaaaatggtttgggttagaagatagttgtatgagaaagtagtaggctttattgatagtttggatgttagttacactatttggaatttttgatgggatatttatagttgttcacctcttacattttatagttagaaattag

SEQ ID NO: 127748 - DNA, 645 bp, Cannabis sativa
  modified_base (566)..(579): a, c, t, g, unknown or other
taaaattattgatcattaatgataactatatacatatttatataaaattctaacctgagatttcttagtccccaccaaaaagagtagatgaacttttgaggaaaatcgtttgattctaggagatcagattgaagggcttcatgaaatatcccaaaatcaaagattgttgcattcttgggatttattggacagtattcagtgatcagatttgtcatatttcttggttctgattccctaatttgattacaaatatgattattgttaaacttttcacatgattcttttccatataagttacaagctctttcccagcatgaggtttctctttggaatgagtaaaagtaccaaaagcttccaaacacctaataataaatcaaaacaatattacaaattaatagtcacatataatcgctcataataagaaaaaaaaatatgtaccttttgttttttctttgactaatcaatagctattaatagtcaattataacatgtatataaatttgtagttggtgagttggtaagaaactagtttggttaaataatcagtacaaaaaatcttacttttnnnnnnnnnnnnnnttgtgactaaaaataaaaaaattgtgactaattataaattaatattcttatatgttgtgactaaaa

SEQ ID NO: 127749 - DNA, 646 bp, Cannabis sativa
tagtaaatatgagtataatattacctttatttgtctttcctttacaactttctcattttgatttctgatttgtgctttcgacttacttattttataatctcaaaataataatattgattgattgaaagttggttatcattattattatttatagattagcaacaaatgatctaaatcattttacaaaaccattcatcctaatgctcaaggtgagatctttactgtttaatttcaatcttaaaattttatataatttttatgggcccaccaatgtttcactttcaaccaatcatgtttactatagtgctttctacatgagacatcgttagcttaaaaaggtggcaactttttcggagacattaacgatacattcaatattttgttcctaaacggaaaagtctataataaagagatgttaataattactttgtttaaaaaaaaaaacagagatgaggaacaaagtacaatcaatccgtacaaagtttgtgaaagattataatataaaataaatgcaattaatgacatctttttgtttccactccaataaaagagtgtttatatatttagtatcttgtgttttatctaaatacaagtttgatactctgtatttttaataatgcttatttaatactttatattttaaaat

SEQ ID NO: 127750 - DNA, 936 bp, Cannabis sativa
  modified_base (27)..(28): a, c, t, g, unknown or other
actaatcagattgtaaagagttttatnnagggcataaaacccaacagctaccccctaaggttaagaactttctttggagaacttgctcaaggtgcctgcctactcgatctcagttgaggttgagacatgttcaactggaaacaaactgcccctggtgtcaaaatattgcagaaacttctctacatttgtttgttccctgtcctatagctatgccgtgctggagtacaattaatttcgagacaaaagttgaacagttcactacctttgctgcttggtttcagcatggtttggttacttagaacgctgcaacaaagttggaagtttctatgatatcctcgtctatatgaaagcaccggaatgagaaaatttggaatgctaagtcacctacggttgatgaaatagttatgtcagcaaaactcaccttcacaaactggagtaatgctaaggaaagatgtctaacaactccctcagctcagacagcaggagttagaaccgagcattggacccccctctttttcctaagttgaaggttaatgttgatggagctctttttcaacaggaaggaagatttggagctggtatggtggcacgtacagttgctggtttggtgttggagactaggcagattgcacaccagggtgtggtttcaccaattgttgcagaagctttaagtatacaagaggcattaagttggataaaaaataaacaatggtgtgatgttattttggagactgattgcctaagtgtggttaatgatattcattctaaaaaacctatggtttccacatatggtttggttattcatgattgtaaggcattgctaatagaattacccctggtttcaatttcttttgtaaaacgatccgtgaatagagttgcgcatgctttagcacgtaattccattcacatggctgattgtacattcagtatggcttc

SEQ ID NO: 127751 - DNA, 673 bp, Cannabis sativa
cttgcaaatttctagcacctttgtttcgtgttttgggcaattttcttacaaaagacttttagctaaagggtaaatagtattatttatatatttatttattttaataaacatagttcaaaaattagagatatcattgataagtgatatgttagaataatgttcttcaaagataactaggcgactaacaagtactaataagtcacagataaagtagactttcttagggttcacaattcgtgctatcgtgtcatcaagataacacgattatgacacgattatcattataaattaaatatatgaaaattaatttgtgttatcgtgtaaacacaattatgacatgacacgattactaaatgtgtcgacacgactatgacatgacatgattaaggtaaacacgaacatgatacgattattaaatgtgtcaaaaactaaacacgaacacgacacgattattaaacgtgtcagttactcaaacacaaacatgacacgattattaaacgtgtcatccaaactcacttattttgtattgttttctaattatgtcgttgtgtcgtgacccatattgccaaccctagatttagctaaataataagctactatattaattgtgattagttttattaaaaggtaggctaattagtaattttttcccatgaactttgacatgtactaa

SEQ ID NO: 127752 - DNA, 1018 bp, Cannabis sativa
cttcacctcacctttcttagttacttcctttcttaaatatgtaaataaattgtcaaaagaaaatgttattttaaaaataaaaataaagtagagtatttaatggtgacacaatattattcaatattttttttttagctaattaggatttttgttcataaattttgacatgtaccaaataatacccgtgaaattttcaagctgttaaaaattcctcttgaattattgaaattgttaaatttaaagacttctgtccatttttatttaattttgctattgtggtaattgtccatgtattaaattatacccctcaaactttaatatctactaaatcatacccctctaaaccttaatatgtatcaaattgtactctaaattttcattcacatcggattttctttagtaaaattagacaaaaattcttaaattcaataattcaaaaaaaattattaacgacctgaaaaatttaggagcataatttgagataaaaatccaaattaacctttttttttgtttgactatgactacgaacaagcaggtttcactacatggcagtagcagacaagaggcaaagaagcatgcccttacctgatgacaggttaccccctagaggtcaagccttagcatatcctgaggctgttttgcttctcaatcctattgagcctgaattaaagggagaggtcaataattttttttatttaattattatatttgttacttcaaattagttagttaaatttgtgtaaataaatatgtttaggttgatgacaagtatcagtattcatgtgagaacaaggatatcaaggtccatggatggatctcaaaggagcctagtgtgggcttttggttaatcacacccagtcatgagtaccggtctggtgggccccttaaacaaaacctcacttctcatgtcggcccaactgctcttgcggtatgattatttaaagggctatttacaaaaatatgggaaaataaagataagttttgatatatatggcataaaaacttaattacactaaat

SEQ ID NO: 127753 - DNA, 1022 bp, Cannabis sativa
gtaaaataatttccaacatggtcctgagagcttcttctactctagtgcgttcttcaatgtcctaattccattgagcttgacccacatagaccttgggtttaaatatccatgccttagctttagtaatcatgggatgagatggatctaaaggagttgttttttgtactagtgcatccagtgacagacacaagtttatgttatagggtgggcgtaattttctttttacgtataaaaatacgggtataaatacatgtgtgtcgtgctagtccagatcatatttttttcaagttttctaaaatacgagttatgtcgtgtcaacccataaaaaaacatggaccatgtcgtgtcatgccataaaaaaatatggggtgtgtcatgctctgcaacaattttataaggtgcaaatcctatagtttcatgctgacccatttttcttaaatagaccaacccgttttcttaaatgggctcaaattcatgctctatatttctgtatttttctattaaaaatggatgagctaattactaaaatatatgtgtatttatagttttaattacttttacatcttttctcaataatagttacacacaatcatataaaaatattataattattagaatttgaatattactatcattttaattaaataaatatttattattgttaaattatcaagatttttaatgtgtcgtactttcgagcttatctattcgtgcttacgtaatatgcttttgggcttgtcgtgcctaagcctatatttttcgtgttgtatcatgccaattcgcagagtaccatgtcatgtctaagcctatattttgtgtcgtgtcgtgcttcatcacatattttttcatggcagatcgtgcttgtgcctctcgggctcgtgccaattttgtaccgtgtcaaaaagtctgactcatatttacaacactaatggtagttctcatgttgcatattagaatctgaaattccgtattttaatatttccagtttgattatttaattaagtgattaattaaatgcggaa

SEQ ID NO: 127754 - DNA, 809 bp, Cannabis sativa
ttcttttgtaattggatctctcttgttcttgagtgatcgatttctgtaaccactattgattcatcaataaagtttttagagctgttatttttcaggcatgtaggcacaagttcaattgggttgttgttcgaacctcataaaagaaaagtgttcatttaagttttttgcactgtcatttcatttgttctcagtttttggattgtttactttgatcattgttggtttagaattatattttcattgttggtgttctttgttgtgtgtccttgaatgagatgaatcgagtttcaccacaaatggtagcagagcttggtggagaagaggcttagcattgaagaattgtttcgagattcaaagaacacaacttgaaaatgtctttagcaaagtttgaaatggacaagttcacaaggacaaatgatttcaatttgtagcgcatcaagatgaaagcattgcttgttcattagggtatctcagaggcaatcaatccaactcaactagaagaaattaaagatgaaaaggtcaagagagaaactgaattgaaggctcataatgttgtcctttaaagtcatgagaatgatgttttgagagaagtctcagatgaggaaactgcatcaagattgtagatcaaacttacctccatttacctaaagaaatccttggctaataagttgtacttaaagaagaaactttatgccataaagatggatgaaagcaagggattgggaagacacttggatgagtttaatggaattgttcttcacttgaacaatataggtgtcaagatagaagaagaagatcaagccataatc

SEQ ID NO: 127755 - DNA, 958 bp, Cannabis sativa
ttcaaataattatactattttaattattgactaaaataaataactaaaatattaaataaaactaacactacgtggcttggcacgtaacaatcacctagtatttagaaaagtatgcatttgtggttgtccattagaccagtaccctttgcttgttggtatatcatatatgtcaacaaaaaaatattattcttaattttatcttctttatttctttatatcttttttggcagccattcagaaattgcagggttaggcacctttttctttttcttttttttttttttttaattgccctcttggccacaaattcaatggagctgacttgtttttcacgttccataagttgttagtttaaacactatttgacttagtgataagagtgacagcctcaaattattattcttctattaatattgatttggtatgtacttacttatataacatattttgatcttaattatatgacaaaagacaaaaattgagaatcacagtcacactcaaaaccaaaacccaatgtgattatactaaaatatcaattgatgtgaatatgcaaagcttaattaactaaaaaaaaaaaaagttcctcatgattatttcaaagtcacgtctcataaaattacttatttaccaaaagaaaaaagtcacgtctcataagaagattacatttctgtttaattaaatgagagctttgtaaattctgcttaaaagtagcattttacattcaacttataagaatctcatatgatatgatatgatatatatataggggaattctaggggctgcttcttttgtccttattgtaacaatagggaaacaaattgacccaatcacaaacttaacaaaacagagtgttgataaattttaggaaatcagaataggagattatttcattatttaattgatattttactgtttattgatttatttaatttttttctactaattatttatttagat

SEQ ID NO: 127756 - DNA, 1283 bp, Cannabis sativa
tttatcactgactatcacatcagtgtaaatccagtggactgatgaatgatgagacataatcttttgaagcatataatcacaattaccttccactgtgttaaaatcataattgtgaataactatatgttctagatttaacagaaattgtatattaaaccataaacatgaatgatacatgtaaacataaatgacttctaatattttattgataacaaataagattatattgaaatgagttttacttagggcatgaaatcccaacatagcgtttcttctagggtggttgttgagttctggttgtcaaaggtgtgggtgggtgggggaagactaatggcttgtttgtggggagcttcaaagatatggcaacagagttaggcaaccttgccgtgggtttatgggaggatcccgacggttttgatctgggtggcagactttggattgggctcagtgatggtggtgtggcggtgagggggatgcaatgtgttagtggtgactgatttttctagttttttgttttattttcaataatggttctgttgttatgggtttagtttgtccatttttgtgtggagtgtttgctgtctatttttgatagtatggtgctttgttattttgtcacaatttgttcatgtcactggtccattagttcggcaaaggttgacacccatcgtagttttgctttgggttgacaatgcacatattgtagcgggtaaataccattttagaccctgtattttgcaaaagttacagattagatcctctgttttgttaaatgataaaatagacccagtattttctaaaatggtacaaataggattttgaactgattttttgtcaaaataaaacttaattataatccgacctagaagtgttatgataaaattggttaaattttttacatctgctcgtgataggaattaccttcaagttggttatactaaaaaaaataattgaaaattgagttcagggtcttatttatattattttaaaaaatataaagtctactttttcatttaagaaaaacaaagtcaaaatgatatttaccgtagcgctgagaataccaaatatattgtttcaccttttaggcttcgtttggagtcctgtgtaagggccttgtattgtattaaattataataccacaatgtttgggtgggaccttgtattgtaataaatattacatccctaatttttaatacaacctattttgtattattgtataaggaataaaagtcatgtataaggttgtattgtcttattagcccaaactctctctctctctctct

SEQ ID NO: 127757 - DNA, 1298 bp, Cannabis sativa
attctaaatatcaaaatttgaaaataatttttaataaaaaaataaacaatatgaacaaatttattattaattgcaacactttagatggattcacttttaataaaaaacaaaactatatatatgaacaaatttattattaattgcaatactttagatggattaattatatttaggtttaaatgactacatagatgctgaccctttacgtggcaacatttaataatttgttattttttttatttaaaaaaagtcacccaataatttcttataaagtaagaattctattatatagccacattttatataaaatagatatattttggagatactctaaaaaagtagttcaatttgcctcgttataaaaaatataaaattaattatttttatattttcaaatcatttattattaataaattagatttttttttcctggatttttatagcaatatattgataactttttaaaacaagaaaacaaaaaacaaaagtgatctccaaataattatgttattaattgtatccaactctcctaattatctaaattatccactttattttggttgggagcgggtgagagtgtttaaagatatgaggctgtgctgatgagatcatgtcaaattggaaaacaacatgttaacccctttgaaactttccagctagccagaaaagcactcaaactataagtaaacacatggaaataaggacaagtataatttacaataataaggtatatggaactttgtcaattaaaaatttaaataaataaatgaggttatatatatatatatatatatatatatatgggcatgtccagattttaacttaaataaatgtactagctagatcgtaatataactcgaacacatatatatgtagggtggtgttggtagtttgtgaaatcttacaaaaataaatagtgaagtatgtgagtaattgcagttctacttgggatagaatcattttattagaagtgtataaatagtgtaagtttgagatatgggtatgggccccaagggctattcagttttgcgcgcatactactgcaaaaacttcctttagaggtggtttttaaaccctttcaacatcagttttggcgaagttcgctactgacgctgatcagagggacactaaacgattaaaaaccgacaccatatatacccctacggcgtcggttattatctagaaacaaacgccataggggtgtatatggcgtcagttcctagctaataaccgacgccataggtggcgtaggaaccgacgccaaaaacgagcactttttaatttttttaattttatat

SEQ ID NO: 127758 - DNA, 3152 bp, Cannabis sativa
ctgatattataaccccaaaaaaaacgacagctcccttctatgagctacaagtcgtttatttattattcagaaaccctaaaacacctttagacatatataagtttcttttcattcaaacagacagcctccactttaaaaaccctagcagaaaaccctagagatgccctcgtcttcgatgttcaactctgaagaacacgaagacatcagcaccaatatcagcccagaaaaaccagaaattaaatccaaaaaacaacccaatcccagttcgaacaaacccctttaaaccgaaccttcttctccgtggttcttctctgaagaacacgaagaacaccaacataaaaatacctagaaaaatacagcaccgcaagcaattatttgaaatgaagaaaagaaaataaaggaaggagtgcaccaattttatagaggttccccaaaaaattattgttgggtacatcctcttcgagctcgcctcagattgctcgtttttattatagaccttcaaaggtcaaaacattacaccaaatcacaattacgattggtaatctgtaattatttactgtgtttgaaaactctctctttctctctgtttcttactaaatcaatactgactttttctgctctcttttccatgaacaatcaatatctgagtttattttcactaagataagattgagtaaccaccatgctagtttaattttttatgctctgctccaaaacagattcatactccaaatcatttttttccttatccacttatattttatttttacaattttaaaaaatacacttaacatttaagggtcagttttgtacgtacgattagattggactggacaagattagatggaattatttaccccaccctgctagatgggataaataataccagacatattagattagttgtaatagttatccagacttctaacattcccaaccactggattagacaaattaatatgtgttatccaatccagtcatgcgtaccaaacagaccctaatagttaaatctttttgatataatatagtagctgcagaatttcaagaaacatgaaattaattttaaacaaaaaaaaaaagacttaacttcgtattgtaatatttttaatttaactttttttgttttttttttttttgcaaatattttggaaaaattaaaaggcacttttatggttccaaggaagcattttatagcttagtagattaatatcttatgaaaagatacttttatggatcttggcagagattagtaaaagaaatttcttttttttttaaaaaaaaaaatatatcttctcatgtttcagtaactcaagggactcggatgcaaaaacattgaataaaaaaataaaaaaactaaatgcatactgcaactttagtaataaaaaggcatgcgtgttggaataaaaaatgtcagcatttatcaaaactaagaaaaacagccaatattggaggaccattaatccagaagctgaacaagttaaaaaaattgtattaaactgtttacattcccttagtcacaagtaaaactgtataaatatagcttgtgatttgcttgatctcctaccaaaacgctttctactacaaaaattgttatctctcacatccaaaaagtacccctttttctctgaatattgaaaccaatgtcccataacttgtcagccatgcaagaggaccttctccaaaatgttgaaggcttgccactgaacatgaatctttctgaggtagaagtgcctacagtgggagcagtagatgaaagtgtgctggataagaaacgagtgatattgtaggaattttattctttctttgcccttcacacaacaaagtgattaatcaaagccccaaggtcaaatctgacagtttacccagtcaaagaaagcttttttctttctgatatatattataacccaaaaaaaaaaaacgacagctcccttctatgacctacaagtcagtaatttattgttcagaaaccctaaaacacctctagacatatataagcttcttttcattcaaacacacagcctccactttaaaaaccctagcagagaaccctatagctaccttcgtcttcgatgttcctctctgaagaacacgaagacagcagcaccaatatcagcccagaaaaaccagaaattaaatcaaaaaacaacctaatcccagttcgaacaaacccccttaaaccgaaccttcttcttcgtggttcttctctgaagaacacgaagaacaccgacataaaaatacccggaaaaatacaacaccgcaagcagttatttgaaatgcaaaaaagaaaataaaggaaagagtgcaccgattttatagaggttccccaaaaattattgttgggtacatcctcttcgagctcgccttagattgctcgtttccattatagaccttcaaagataaaaagattacaccaaatcacgggtacgattggtaatctacaattatttagagtgtttgaaaactctctctttctctctgtttattactaaatcaatactgactttttctcctctcttttccatgaacaatcaccatatgagtttattttcactgagataagattgagtaaccaccatgctagtttaattttttatgctctgctcaaaaaagattcatactccaaatattttttttttccttatccacttatattttatttttacaattttaaaaaatacacttaacatttagggtcagtttggtacgcaggattagactggactggacaagattagttggaattatttaccccaccctgctagatgggataaataattccagacatattagattagttgtaatagttatccagacttctaacattcccaaacactggattagacaaattaatctgtgttatccaatccagtcacgcgtaccaaacataccctaatagttaaatcttttttatataatatagtagcagcagaatttcaagaaacatgaaattaattttaaacaaaaaaaaaaaagatctctctctctctttttttttgttttttgcaaaattttggaaaaaatgaaaaagcacttttatgattccaatgaagcattttatagcttagtagactactatcttatgaaaagatacttttatggatcgtggcagagattagtaaaagaaatttcttttaaaaaaatatatatcttat

SEQ ID NO: 127759 - DNA, 610 bp, Cannabis sativa
attagtatttttgtaaatattaaatagtataaatgtttatttttgcttgtagtagtataaatgtttatttaaagtaatattaacccaaaatagaaaaaatcccaagaattttggattttttttgaggcatcgttataattaaggtgtgtttttatttgttatctatagagataatcttgtgaggtagttatttagaatatatatatgataacagatcgatttaaaaaatttgttttttttttgtcattagtatagtagtcttcaaacctctgtttatcaattgtttatatagatttataagacatatatttgatttggtttagtatttccttctatgtaataagattttttttttgtctttttgctcatgtatatatgcaacatgcttgatgaataatctattattttataagtttttgtgagttgtgtttgagtgtatgtatgtacagtatatataaattggtgttttgggataatgatgttgtgtcctttatttttctaagttatttttattggtagtctttagtactctattttagtttaatatgttgcttatataattttattagacatatatgtttgggttgatttacttttttttttttttttt

SEQ ID NO: 127760 - DNA, 826 bp, Cannabis sativa
acatgctaaaggtctttggccatttttgttatcctaatttgagaccttataataggaacaaacttctatacaggtccacaccttgtattttcctaggctattagatgtcacataaggggtataagtgcttgtctaaagatcatagactctatatatcttaggatgttgtgtttgatgaggtccattttccctatgctctagcctctacctcctttccatctaatactattcacttccactctcccacttctagtgttcctcccttaccatctcttctcaatgtttgcaatccaccaccactagctccctagaacacagtaccactagctccaccacctcctccatctccactagtttccccactccttctccacatcctgagtccctaacacctaattctgttgagataatgacacttttgttgccaatgtacctattggagactatcaaacaactactcttctcccaagagttaccactacttcctcttctcatgcccatgctaatattcatctgcctcctatagttgttgtgtctactcatcctataaccactagctaaaagcatgtatcaggaaacaaaaagctttcttgttgtttgtgagcccaggactgttaaatcttctctttaagatcctatataattggaataattccatgaacactgaaatctatgaattaaagaaaaactaaacatggatattggtgaagccacccccaaacagggaacctataggcagcaaataagtgttcagagcaaaacacaatgtgttgggttttgtgccctaaataaaatctattttaataaaatcagatttacttattaa

SEQ ID NO: 127761 - DNA, 1209 bp, Cannabis sativa
ctaataatataaaatctaagctttatatgtgtcatgtttaagataatataatagagaaaaattacagttttacaaacaatgagtatacttataccgctaagaataaacataaaatttatgccacttacaaacttaaaaatttgagtatttatatcttatttacctttttattaacaaaaccaaaatgagttggaaggccaattgttactcagacttataatatttgatattaggcataaaaagatccatttagttggatcgaaccgttatggtaaaattaagtatcgagtctcatataagaaaatagcctctcattgctaattaattttgagataaaatcttatgcaccttacctcaaattttaacatagaatctcaaattaatttaatttaattagagataaattaaactctaacgagtatccaatccaaatctaaaaatcggttcaaaaagaaaagccaaaagtgtcggtgtgatccgtggatagtgagccaaaaacagtccatgtgaactaaaatagtcacttgtgatcgatccagtcgtgcaagattggtgagcaaaaatagctattatcttgaggggatgttagagagtctcacattaataatttgtggaaattaaataccatacataagatgatacatgcattactcctctcattatcgattgatttatattgagttagtcattttgaaaaaaaaaaagcttttaagtttaattcatcgttgtagataaatatttaaatttaattttttacgataataatacctaagttatatttttaaaatttccgtacgcacctgactactaaatgtgaagtcattatccacgtgttattttttttattggtatatttaaactaatttttaaataaaaaataaaaatttaatgatctcaaccaatatagaaataccacgtggttattgacttgacacttaaatacctataaatgttttgaaaatataacttaaatattattaccgtcaaaaattaaacttaggtatttatctgcaactgagaattaaacttaaatatttattccacaagttactaaaaactatataatatgacagtctaacaaacaacaatatacaatgtttcgtcataaaataaaaataaaaaagataaataccattttggactttgtgttttgcaaaaactactaattggaccctctattttgttaaatgaaaaaatagaccttatatt

SEQ ID NO: 127762 - DNA, 1111 bp, Cannabis sativa
caaacaagcctcaaggcaatggttcgaaatattctcatcagctctaattgaagaaggttgcaaatattctgcctctgatcattccttattcatcatgcagaatggatcaagtttaatttttttattaatctatgtgatgatgttattttagctagcaatgacatcaaggaccttgaagctttgaagattaagcttaatgacaaattcaaataaaaaaatcttagagaacttagatacttcctcgggcttgaaatttcaaggtctaccaaaggaatttttgtttcacaaagaccttatgccttaaaattattagaagatttaggttatttgggatgcaagtctgttaatacacctttggtgatcaatttaaaattaagccaagatagtgatgataaacttggtgatcccactctttacaggaaaattattggtaagttacaatacttaaccataacaatgcctaatttgccttattctgttaataaggttggtcagttccttgcttcacctaaaaccattcacctaactgcagcccaaagagttatccaatatgtgaaaggaactccttgaaagtgaattttctactatgttaattctaaaataaaacttgaggcctatacagatgctgaatgggcatcttacgttgacacaagaagatctactactagtttttgtgtgtttgttggcaattatctcgtgtcttggaagagcatgaagcaacacattgtgtctcgatcatctactgaagcaaagtgtagggccatggctaatactacttgtgaattagtttggttgatgtctttactggaagaactgggaattgagcatcatggacctgctattttgcactgtgtcaacaaggcagcccaacaaatagtagctaatccagtcttccacaaacggaccaaacacatagaaattgattgtcatcttgttagacaaaaggttcaagaagaaataataaaaacctctcacacttcgagcaaagagcagattgtagatatatgtactaaagctttactgtcaactcaatttcaagctctcaaagacaaaatgagactatataatatatacattccatcttaagggggagtattagattgtaaggtgt

SEQ ID NO: 127763 - DNA, 1071 bp, Cannabis sativa
ttggtgagactagacttgtctcttcctaatgatttgatgactcataatgtagtcgtcaaatgatgtatggggtatcgtgaaatcaaggaattataggtttaaaccttcgagcacatcttttcagagtaatgtgtaggatgttcttcaacatgtcgcattaaatgcgtgtatagtaatttgacctcgagcagcgtgccatgctccgcctgtccttctatctcttctctgggtcaagttcacttacagagaaaaaaagacaaaactattatcctcttggtgcctccttcccgaggtgactaatctcttgaaagtcttatcaattaccaggctccagaggtgatttaatatgacacatctcgcagcaagggtcgcactgccacatggcttactcctaaagtgccacacattttgggaaaaattctaagcgacatttaccccataagtcccaatttgcaattttatgaaatgaggcttgcaaactacctcttggagcactaacatcacactcccataagaagcatgtgtgacagtatttaatgctatcgtccttgattttggtgaagatgattcaattttccttttcattgactttgatgctccattatttgtagggtattagattgttgcttgagtagtgtaaccatctatttataattgagcctctaaaaaactagccctagccatcggatcgtgggggtttaagtaagtttgaagtgagacatttatagaccattggatttttattttttttgagttcttaaaaatatatttaacctacactttgtaacatggagaggagttacaaggttaattacttttagttgatcacattttagtgtaataacagagatgttacacacaattgatgatatgattcaaagttatgaaatatagttgttataaaatatattaatactcatttatatgagaaaaataagatgttgtgtgtttgaattctaagtgtgatcacctaaaatttataaaaggtctttggtgctcatttgagatgaactagttttctatcaaaaaagtacattgctagaaaactctaaggcttgataattcccaaag

SEQ ID NO: 127764 - DNA, 560 bp, Cannabis sativa
acattgataccttttggtcttcgaactaaaatccaaaccttgtggtgaacagagtgattaattgcttcttgcattccattaatccattcttcataagtcatggcttccttcacatttttcggttcaaattgtgagacaaaacaaagaaaactaatcaaatttacatacctttttctcgttaccatgttttcttttccaagaatgagatcttttggatgactcagtttcactctggtgcttggttccttctgaatagaatcaataatgatgtttggtgaagcgagacaaactcttttagttcacttatttcagttacagcaacagattcaacatttgcttctttagaatttaagtctgctacattagaatctatatttgttacatctggtggagcattcagaaatttatgtatcttagcttctttggaaacttctaaaaaacctttaaatttatcaacaacctcattaggttattccataatagtttgagttctcatgtagtaaacacgatacgctctactatttgtggaatatccaataaacacaccaacatcactttta

SEQ ID NO: 127765 - DNA, 726 bp, Cannabis sativa
agtatagggtaattcccctaaaaaaaatagggttgaaattttatttttattttcattttcataatgatttattttatttttatatatgttttttacttttaaaaatcaaaattatttaacttttatactttaaagttgttatctcaatttttgaaaggggacaggagtgcctgggcggagtttaagtggcgcatgggcgctacattctgggtttttactattgagtgttcatattagtattttggtcataatgtcttcaattttgcttggaattagatgattcaggttgttctagaaagctgagaacaatatctaaaactttcatatttagttccaagtccagttctaccttgaaagctatcaaaagtcacaattacattctacttagtcaaatcgagctctcccgcctccaccatttaccatcaaaacgtgtttaaatcacgtcaaacagctcccaacgtatgattaatcatcaattctcctaaaaaaaataaaattatattaatcaacagttcaaagaacaaaaataataccattaacacgagtaaacgaccatatttataagataaatatggacttatcaggaacatttttgatgtaaatgttgctaacgaggagagaagtaacctgcccaagtctactcctggtagtcacttcgcaaggtttgctatttggactaagataatatgcgggaagtgttgtgaaaattatattgatttataattg

SEQ ID NO: 127766 - DNA, 558 bp, Cannabis sativa
tttctgagagagagtagtttcactgagaagaagacgaactcaaattcaagagtcagagaaaacagtaaaggtgatgatgaaatgcggcggcaaccaacaacacgaaaccagagttgggctttcactagtttaaaatttgatttatggtttttaagtcctaattttcgacaccaaccaatatttaagcactttgcggagaaaaaaatgcaatatataatttagtttaggaaaatttgttacattaagaataagtatggtcaattttttattataattatttagttaatttttatgtccgaaaatatatgcagaatatttttttttaagtttttttcatgacagttgttattttaaaatttacactggcgtggcccttacactttgcacagtacaacctagggctgttaaaaaaatttacaaactacccaactcgaataaattgcctaaaccaaaccgaataaaccgataaaaaataccacccgaataactttacgaaaaatttaaaccgcccaatgaatatattgggtgagttgaatattattctaaccctcccaaata

SEQ ID NO: 127767 - DNA, 685 bp, Cannabis sativa
aaaaaaaaaaaaaaaaagactccattcttgggcaactagacatttatcctatgcaggtaggatgcaacttattcattcaattctcttgggtttgggaaactactggatgaacatttttatccttcctcaaagcatagtcaaagaaatagagaaactttgtaggtttttcttatggggccaaagtggaaatagaagcaaaatgccttcttgggaaaaagtttgaaatcccaagaagcatggggccctcgaatttagggatggttccaattggaaccgtgctaagttcctttggtcgataatggaaaaataagatgttttgtgggtgaaatggatcaacagattcaacacgatctacctaaagggagctgatttttggtcttataatgaatacttcattctctgataaagaaaaatagaaaaaatgtatgatatttctaaaaaaaataaaaaatattacggttaaaataaaattataattgacagaatattattatgttttatttttttataagtaacacttaaattatgatgttgtttgtttattgaataataaaaaaaaaattatacaattaaaaatatacataactaaaataaaaattaagaatttataactaagtatgcgtgcataacttaattattatatatttttagaatgtgagaatgaaaaaatgtgagtaattttttt

SEQ ID NO: 127768 - DNA, 1216 bp, Cannabis sativa
tatatatactgaccatgaagggggtatgtgtttttgtttctgtaagtatagatgtgatctccattcttcaaactgctctcatcaattttgtgcgataacataattataatatttttatttctgaatgatcttatatatatcactctctcttttctctcactcctatttaatttagactaaaagcaataaaaaataatgattaataatattggtattctatacatataaatatatcctcagctcagttctacaccatatatatatatgtgggaaacaattattctcgtatatatttatatatatattgccttgttatattggactgattgacttttcttattatcaattaattattaataaagtagtgctgacttttcttagttatcaatttgaccaaaagtgtattcttattcttaaattctaagtaagctgacaattttaacctaagttgggctagttagtaagttagtataatataattagttattactagttattaatttcataagtctcgatacatttgacgcgtaagtctcacaaattatattgaaataatattttaaaacacttaaaaataaataaaatgttacataaaattcaaatatactaaagttgcatcataaaacttaaactaaagtaaaaatagtaaaaataattatgtttctataatttaaaccctaaattctattatattagaatatacttgactcctaaaacttgaattgaaatattaatagaaaatgcaataatgattagaactcatcacttgttttatcttgtttaggattttttttattgttattaatagttttaaattttttgcgaatgttcaattatagttattatattgctgaaattttagtagaattaggataaaagtatttgacataagtttctcttaaacttggttgttaagattttttttgttaatattcgttaaggataaattatggatgcatgaggagcgttggttattatatagttagtgatttagagtaagattagttactagttagttgcaaattatatttagtatactataattagttactaactagtaatttagtaagttttgtgatatattaattgtactgcggtcggatcgataggtggaataatatgcatgttagatgagtttaaatatcttaaatattcatctatagtagagtaaattctgcgaataaatatacagcagtcggatgggtggtaaattttt

SEQ ID NO: 127769 - DNA, 1070 bp, Cannabis sativa
  modified_base (1043)..(1044): a, c, t, g, unknown or other
tactcacctccccaatcagactgaatttgtttgataggaaggccaagttgaagctcaacttgagttttgaaggtgataaatgtggaaagagcctcattttttgttcttaacatgtatatccatgtatatcttgagaaagcatcaacaaagctaatgtagtagcgatatccacttgaggaattgatgggggcaggaccccataaatccgaatgtaatagttgcaatggagctgtataaactgtagtggatgttggaaatggtagcttatgaagtttcccaagacaacaagcagaacaaagagtatgagaaaagtctatgtttttattgcttgtttggatattacaagagtttagcacttgctgaactattttatgatgaggatggcctaatcttttgtgccacaaatcaaaagtattacatttagatgatacagtactagtattgctttgagttgatgaaggattacagggactttgtaaggtggctgggttggactcgacagtgagtaaagagcaggatgttggctgcttgtttatggaaacaagattgagttggttggaatcaaacttgtatagacccttctcaagcttcccaacaagtaaagtcttcaaagtaacctggtccttaacaacacaatgaaaggggtgaaactaaaaaaaaactctattatcttgatcctattgagacacactaagtaaatttttggtgatatgtggcacatgtaaaagattgtttaggacaagtgtttgatcatgaaaaggagaaataaaggaggaatgaccaatattttgaatgctcaaacctgtaccattgcccatgtgaacttgctgatctcccatatagctgctactagtggccagattttgttcatttggggtgagatggttggttgctcctgaatccggataccagctaggatcagtaacaacttccggtgtggcataatacgcttgtatctcggctatgttagcattaacatgccctggaaagttgttgaaggattcgggtccagtaaaggacttgttgttgggttttatgccctnnataaaactctttacaatctgattagt

SEQ ID NO: 127770 - DNA, 548 bp, Cannabis sativa
accacttttgtttttttaggtatccctttagttgtaatgcataaacataaaaactacttataacactatttgtctacgtacgtaccacccattcaataagactacatgtatatttatactttagaattaaatttgatatcaaaaataaagtatagatacgtaaaacagaataattatagacatattgaaaccatacatgtaatgaaagaatgaaagaattgaaatactttctgttattgatttttgagtttcaatttcagtaattgttttggaatgagaaatcagcttttaagctctctctccactctttttaaataaaatttgctatttgcacaaaataagtaaaaaacatttttataggtgagatactttattaattaaaaaattaattcagataataaatataaaaatctgactatatataaaatattatataattaaaagatattctgtaatatatacatacattatactactactattaacccgaaggagcaaggagcaatttactctcatatttatttattttaacatagtattatataaaa

SEQ ID NO: 127771 - DNA, 2538 bp, Cannabis sativa
cagtacaaaagtaaagaaaatgggttggggcagtaaaaaagttgtttttgccgtgtcccagtatttttgtaaagttttggtccaaaaacagtatatatgtaaatttcccatttaaaacatcataataaaaatagaaatattcttttttcattctttatgttcttcttctttttccatctctatattttttttaaagatctttcttctccattcttgatctttgatggaacccagagacaagcttagaggtagatctaggctatggcgactttcaatctttgggtgcgacgagggaagacgatgtgtggctaagtttaatcgacaatgaggtaccggtggtgagatcggactcaacaatagtgagagagaaatttagaaggaaaaatgtgagggagctagacaacgacaatgagatcatcaaagatgtctttgcttgcaagaagaatgattaggtcaaggagtgtaattgtgtaaggaggttatactcttcaatctttgattcaaatttttttcaattttatacttatttctaggtttgataaaaataaaagatttttttttattattattctttggtctttctttcgtatatatacttagtttgtgtgagatgatgatgatgatttcatccaatttaattaatatttttgggggttgaatattccctagatttagttcgattctatatctggggagttttgggtttcattctaataggtttttttttaattaaaatatatttttagttagtttaataatttatttttctaaaaaaatatataaaatgaccactcatatacagatatatatttttatttttaaatagctcataggcagataattggcaattaataattaataaaatatatacaatttaaaaataacaaaagtatacattaataaaatactaaggggtaatgtagggatattaaaaatttaaatgctgagagggtaccaaagtagttagtttttacaaatagagaatactaattgatcattatttaaaacagaaggtactaattatgtatttcaacaaaacacagggtaccaaatgagtatttacccattaataatcaaccgacgccatagagtgttactaaatgaaattttaataaaagcacctacagagttggttatttcgtaataacccactcagtaggtgataattttttaatcttaataaaaaaatttatacggtcggttttttgtaataacctacttagtaggtaattttttagttttaatgaaaataccatacggagtcaattattttgtaataactgactttgtaggtattttttactttaaataaaaaaaaatacatatagcagcggttattgtgtaataaccgatgccaaatgtctttatataaccctttctagctatcatcttcctcaaaccccaaaataccagcagctcttcttcctctcaaacccacaaaatcctcgcccaaccacacctttcttcccccaatttcttcatttttatccgtttttaccttaattttttaaaaaatcttacttttttcatatccataaacataatcccagagtttgatagtcttttatttgtttttttagggtaaactgaacttaaaggtggttgttgtagtagttgtagcttcgatcgctacttttgatggagaaatcgctgaatctcaacgtccataaaagtataaatataatctctaatagttttatttatgtaaatcactttatttattattttataaatttttttaggattttctaatattgttaagattgtgttcttgtagttgtatatggtagctggattttggtcagtattggtggctagatttcagtaataagataaaaatctaaactttaatagtatatatgtatgtattttgtattttaatgaatgtgtattatgtatacatattttgtaattatatatttattgtattgtatatgtatgtatactaatattataattatattgtatattttttatgtattgtatatgtatatattgactattttaaactaaaacttttgttaaattttatgaatgagaatgagataggagagtattaaataaaagtttagaaattaatttttaaaaataaattctacatttatcattttttttctatttttaattttattcatgtgtttttattttgtagtagatagtaaatagttagttacaactacttaacaagttactaatttttattcctattgatgtattttaattactaactagttactcattagtaactaagtggtaataaattaactagttactcataaattatataactaataagtagttaaataaataaatttttaattttgttgtatttcattatattgtaagttgtgagattaatttgtaaggattcgtttggtgttgatcggtttctagctaacttgagatatacatttactaacttttattactaattaatcatgaatgcttagtagaggttgaatatcttaaatatttgaaattccgtattttaatattcccagtttaattatctaattaagtgattaattaaatgcggaa

SEQ ID NO: 127772 - DNA, 1931 bp, Cannabis sativa
  modified_base (1538)..(1538): a, c, t, g, unknown or other
tggcaacaagacgggcctttaagcgagcaattgttccattttaattaaatttaacaatatacacccatttgcactctatagcttgctttcctgaagataaattaacccaagtcccaactatttgcaactaaagcattcatctcttctatcattgcagcaagccaaccattattagacattgcttcacgaatagttttaagaatagtgatagaatcaaaagaagcaatgaaagagcataaagaaaaggagagatgattataagaaacaaaaaaagaaataagatatgtacatcggcatttacctttacgtagtgcaatgggaagatcatctttaagttctagatctgatgacgaagatgcaggtacaagacatgaaatgggaggtggaggaggtggacgcctagtgtacactataggaggcctaggaagtggtggaggtggtggaggtgtaggcattttgggagctatgaccgaggcaggtaacggaacaagagactcgtcagaacatgtatcagacgcagagaatgtgacagaatataccaacaaatcatcatcctccacctaacgaggagtaggtgaagatgaaaattaaggtgtattttctacaaaagtagcatcaatagaaataacatatttgttgagatctggacaataacacatataccctttctgaatacgagaataaccaagagagacacactttaatgccttagggtctaatttggtgacatgtggacggacatcgcgagcaaaacaaacactgtcaaatgcccgagaagcaactggaaacaatgacttacaaggaaaaagaattttaaatgggatctcaccattaagtacagaggatggcatgcgattaataagaaagcatgctgtggaaactgcatcagcccaaaaagatttaggaactttcatttgaaacaagaggacacatgccgtttcaagaagatgtctgtttttacattctgctaccccattttgaggtgcaatatcaacacaagaagtttcatgaagcatgtcattagaggtcttgtaaaattgaaattgagcagatgtgtactctatggcattatcacttcgcaaagtacgaacagacacattgaattgaatttgaatttcagcacaaaaagcacaaatacagaaaacaactcagaacgatttttcattaaatataaccaagttatacgagaataatcatccacaaaagtaacaaaatacctgaattcaagttcagacaaaataagagaaggaccccaaacatcagaatgaactaactcaaaaggaatactaccagatttattgactcgatgactcaaactaacacgatgatgtttggcaaactgtcatgactcacaatctaatgaagataccttactatactgaggatagagttttttaagcaaagaaagggatgaatggcccaaacaacaatgagccttaaaagcagaagcaacactcggacaagcaatagaggttgctgaatgtggatcaagaacataaaggccaccagattcatgtcttttaccaataatcttcttngtcataagatcatgaaacaaacaattatcaagaaagaatgagattgaacaatttagattacgagtgagttgactaacagaaagcaaattaaaggacaaattaggtaaatgtaagactgatgacaaagtgagcaaaggtgtgggagccagatccaagaacagaagatagtgaaccatcaactaaagtaacaataaaagtgggactgagacaggaaaatttggagcaaaaccttataatgctccaatgaatctacatgtgcatcttacacgtgatggggaatcatttgaacatcttgagaaatatcacaaattggttggaaagtttaattatctaattgtgactcatccaaatattgcattctcagttagtgtcattagtcagtttatgtcttct

SEQ ID NO: 127773 - DNA, 1253 bp, Cannabis sativa
accaccgcgtactgcactccgcctttacctttaggtaattgtccgattaggtcaattccccatatggcaaagggccatggacttcacatctgaattatctcactaggggtgcacgggggatctttgaaaatctctggcatttatcacatttcctgacataggtctttaaatcttctatcatggtcagccaaaaatatccttgctttagtattttctttgataaactctaccatgccgcatgattaccaaaaaatccttcacgtacttcagacaagagctgtaaagcctctttttttgttacacatctaagaaatggcagggagaagcctcttctatacatcacaccttcaactatgatgtaccacacaacttttctcatcatttttcgagcctcatttttattttttggaagttcttcaatgttgagataagctgctatggatgtcatccagtttggaattgtgtctatcatttcgaattcttccatgtagttgatgttgggttattctaggaatttgattgggactaatccgtcactgtgctactcacaagccgtgctaaggcatcaatagttgtattttcttcccttgggatttgcttaaggttgtaacccttgaattgtgcgagcatgtcttggatcttacttagataagccatcatcttttctccacgagccatgtactctcctgagacttgatttactacaagctgtgaatcactacagacttcaatgtattcagcatgtacctcttaagcaagttttagctcagctatgagtgcttcatactctcattggaggctttgaatccaaatttgattgcttcgtgtaggggttgcccccaggtgtgatgagagcaattcctacacgagaaagctagtcactagctgatccgtccacatgtaatttccaggaaggtttgtctttgttctcttctggtagagactcttgtactggctcagggttatcttttgtattatcttcctctttgccagtacattctaccacaaaagtccggtaaggcctgtcctttaactactgtaggaggttgaaaaattatttcatactgtcccaactctatgtcccgtttgagtaaccgtccagaggcattaggcttttgcaacacttggctcaagggttggtcggtgtaagccgaaataggtgggcttggaaatagggccttaacttccttgtggctaagattaggtagtaagtgagtttatctgtaatatcccgataagtctaatggtaaata

SEQ ID NO: 127774 - DNA, 746 bp, Cannabis sativa
gatctttattaactagtaaatctgcttatattgaaatagattttatttaggacacaaaacccaacacatcactcatcaaatgagagatatttgatgaaaaaccttgtactgaaacagcaatatacttgcaacaataagtccattttattgtcgaactactctgaaagccatcttaccttttgttgaagaaaaacatcaagcattcaatttaaattgttgaacagatggagaataccattaaactctctgtttatcctttaagatctagaggtatcaccttttacaatgtcttaataaagatatttgtttgtattatatacgcataattgcctttggatacgacaaagagcttaaagctcaaaagagagtatatacatttatgtaaatatatatacgtatatattgtgtgagaacaatacaaatacactttcacaataaaataaaacaactaattaataatatatgctctcatcactatacttgcatacaacttaatcaaataaaaaaaattaataatattacttctattatatatagagaatataaatgagtggtgagtgagagaagaaaatagagggttgtaattaaaattttattatcattattaggtataaaaaaactaagttccacgttacacaattataatcaatatcaatatctatatatttatataatgctgttgtttggacagatgatgtggcaacatatatgagctctcctcatatttttttattttcttatttttt

SEQ ID NO: 127775 - DNA, 996 bp, Cannabis sativa
  modified_base (336)..(352): a, c, t, g, unknown or other
cctactttggtaactgatttcgaaggttaacaaaaattgattttacctttaaaaaaaaaaattaatctttagaaatataatactatatatataatatataatccttttcttttgccatgcttatgtattttataattctaatatggtgtcaatattagaatatttttttttatatatgttataaaattaatttatttattttatagggttataacaaataaataccatagattgactatatttggttacaatgatatggtcagattaatttattaaatatttattacccgatttgatttgtcgaattaatcgtcaaaatattctgacaattaatgnnnnnnnnnnnnnnnnngagtatctcacttataaatataaggtcacagttcccgaacccttcactcattctgtgcaaacaaccaattctatctaaaaagaggagagatcttaagcccgatttcccataccgaagttatcgttctgattgaagttcaaacatcaatagctagaagtatttcgattctttcatcacatatacggttttgatatatttatagtttatttcgctttacatatcaatcatatgtgctttatttttcatatcaaaattaatctaacaattggtattgttgactgagattttcggcaaccaattaaataatgtattgagaagagctgtagaaagtttaatgcagaagatttttacgtggttgggacattaatgagccttagtccacgagtcttttgtatttatgagagtatttattacaaagaatgtccttggtgaatctctctcttcttttctctcttcgattccttaactaaaatcgatcgacctattttcagtctgtttgtggggtatttatagtatttttctaagaggatccctagaaatggtcacttgtctttttgtgttagcttcataggggcacatattcttagcatatacaaaataggaaatacatgacctatactgtaggtatcttaggagttaggtgg

SEQ ID NO: 127776 - DNA, 1814 bp, Cannabis sativa
  modified_base (1198)..(1204): a, c, t, g, unknown or other
cttggaattactgtagtaattattgagtctttctttgactatagtctatatgcatacacacgtgtatcgtccgcccttatctttgtgcaagcaaattaatgtttttattttttattattttaatttaatttgtttatgttaaattattaatttattataataataataaaataaacgtgtttgaattgatcaataaaagtttcatattatatactattaattaaacaaaaatatcaagcacaacaattctctctcactctctatgagaaaaatttacatctccaacacggataaagtgtacaaatttcttgcacagcagcttattgtgtagtacagcatcagagtatcactcgagtctcagcatagtctggtcccacttagccaaaagataatcttggacatgcgctcgattcaccaacaaaccggtaaataaggccgaacagtgacctgccaacgacaacgccgcaaccgagtcatcaccagtagaagtcgcatccaaggcaagagtaacacaggtagtcccggtgttggaagttgccctttcaaacagacgccatcagaatgaagtaggcgcagtcacactagcagtccgcgtatcaaagcccaagtaagaccctgtttctaaccttgttgaggggagcactaggagaagtaaatgaagaagagcccccttcttcagataagtcgcatgcaagtctcaacaaactgctcatatctgtaaaacacaaagaggattattagtaaaagagaaatggcaagcaaattgataaagcaatatgataagaaaggtgaataacaatcatcaccaagtaagtcactctctacctaacaagccttttcctagaaggcccagactcagtatctgccaccatggcgtcctcattctccctcagagacttcgaggttcgcgagtcttatgtgcttgtgttcaccccagtagaagggatactgaaaaagttgattccaaaatcatccaaggtatgggtagaagccaaaatggcaatatccttcttaaacccaggcagtttagctatcgctaaagctctctcgtacatggccacagtaggcaagggtctaacaaatagttttgcctgttggaaactagtgtatctagacccaatgtctttcacaaggaaataacaggttttgaagtcacattctttttgtagagatttatgtcctaaaagtaagtaattannnnnnnatatattagagaatatataaaatacaattacaagataaatgatatattaattatcagagtataattattaaatatctaaaaaatccttattcataatgaaaaggtataatcttgtaaggaggtacaagagaattaagattataagatatgaataaaataagtcggtagtgtattaaagtattgagaatccttaatatagaactgctaagtacggtttactatacactaatgtatgtaattttgatttggatcaaatatgtagatggacatgtagtaaaggtattgtgtataattaaattatgcataactggaccgatatgtaataaacatatctttcattaactttgccgtttatcatatcacaatattaataaatcagcctgaatcctgagtatacatgaactcatgtttgtgttcattgagttctttgattcactcgttaaagtttcttagagaaaatgattgttataacttttatttagggagcgtaataacattagtggttggaaacatgttatacaagagtagaatctaagctttcctcactactacaatgttagcctttagaggcagttttttcaaccccatttataaaaagggaagctaaagg

SEQ ID NO: 127777 - DNA, 547 bp, Cannabis sativa
  modified_base (65)..(70): a, c, t, g, unknown or other
atacgtgtttaatttatcgttttagaaagttcatatttacggtgtttaaacaacatacttgtgannnnnnctaagatcctggtaaaataaaaatccaacaaactcacaaaggctctctatggcctcaaagaagctcctagagcttggtttgagaaactatcatcggctcctgtgcatcttggtttttcttttgctaagactgataattccttatttatcaaaacatccacacacactgctctctttgttcttgtgtatgtggatgacattttgataacaggaaacaatcaacttgaagtttcatctcttatatttgctcttagctcacagtttgctctcaaagacttaaggtctgtcaactattttcttggcattcaggttcttcctactgctgatggcatcattttatctcatcaaaagtatcttcaagatctaatttgtcgtcctgagatgcaacgagttaagactcaaagctcccctatgaacagtggtttatgttggcttattggaagctcggttatatagacctatggtccccatactagtt

SEQ ID NO: 127778 - DNA, 1308 bp, Cannabis sativa
tgcggctaggttcgaggagtatcgcgaactcgttaagatccgggccgggtcgggaagcccagccggcgagaccgcatgcaaggaggagaatgcgcggtgcgtggcggacgggaatgaggtcatgggttttcactgtctcggacccacgtcaggtggcggtgcgtacgacgcgtgtagcggcgcgtgggcttttccggcaggtaataaagggtcggtgatatgcacgtattctggtagcggtggggcccatgagagcgccggcggagggagaggaatgagagccatgttactctgccgagtcattgctggccgagtctccaaatcactcgggatcgactcgttgttgaatggccgagttgggttggactcagtgagtggggaaagtggcgagttgctcgtgtttgactcacgtgccgttttgccttgtttccttattatctacaaattgtaaaaacaccacaaggttccccttttttttttactgtctcttatatttttattttattttttcttgtaagagttggtgaatcttttttctacttactcgcatcatttatcaacattattttggggggtcattaaatacttgttttttttttttttttgggtgtgattagcggaaaaaaaatcttgttgataaatgttgattaactaatttgccatttctcgttcttatatgtaattccactttcatacaatttgggaaggtttctctttttcacttttctatttactgaaaaagaaaaggtttatttctttttttaggatttatggttgtttttttctttttcatttaaatattatacttggaaacaattatttatttagggtttgatacaaggaagcttgtgtttgtaataatcttgtgtattattatgtgtaatagagtaagttttaggtcaaagcaaagctaatgtttattattaatagattcttagtgttgaggcttgatgttgaagaagaaacaacacaaacacatggcaacaattcacctgaaatcattaatacttcaaatcaatattttagtgccaaaagactagattttgaaatataatatgatatatggtattatttgtttttttaggaaatggaaaaattcaaactgaacaaaaatataaacaaaggcagttgctaaatgcaaccccaacccaaagcaagaactataaagaaataatagaactcattacatccctatctctttttctaagtaaggtaatgttgatgcctctaactctcgctttgatagctagtttaatggatagactagtcttcttattaggaatgtcaatggggcgggtcggatctgat

SEQ ID NO: 127779 - DNA, 1171 bp, Cannabis sativa
cgtaaaaatataattttttttatacaaaatggtgccttgtgtaattatcccttaatttaacaccatgttaatttatataaatatggaatgttcatttattttattttattgcttatagttcatttatattatttgtttaactagtaaaatatactacgcttcgtgttatactatatttaatgataattaaattatacaaccatattacaataaatttacattgtcaatcaccatctcggtacttcattttaaacatcaaaataggtagatagattatttcaatgttgtattttgatccatgtatatttgtatttatatatattgacgcataaatctaaacacaaatatctggcaaaatttgctcggtagattgataagaatgtaagaaagttaagtataaataagagagacacaacaaatttataggagttcacttcccgtgacacgacagtaataaagctacgtctgcttcgagtttttatttctcacaagaattacaaagaattggctaagtgtgagggtttaaattctagagagagatactcatactctgaccttataaggatttaaaagaatgtgcaaaatgagctagatgagctctcattttatacagaaagaattcctattcaaaaaataattaagaagtacaaaaatatgaaaaaaaaaaatattttgggatgatcttggccattgatgatgattcatgatgatccaatggtgaaattagactcttggtgaaaatcatcaattttcaaaacttgaatcttgtccatcggatcgtttttgggttatctgctggaaaaatcgcaacattgttgaggactaattttggatccgaaatcattagaattacaatgtgggtgtgagacatggcttattaaatttttgaaataacttcgaaacacaagtttatcacgtcaatcggataaatattgagtgagtcatggttactgaaggttttatgcaccctacgaccaagtcaggttgacacccatcacccaagttgacattctaccattaacctagaagtcgggtgagtgccaaaacatcacagacatgaatttgctgatgcctaatattagaatatttctaattaaggaaataaaataatattattgattctgataaatgaatattttatatattcattgaatctggacagaatcaatta

SEQ ID NO: 127780 - DNA, 673 bp, Cannabis sativa
ccaagtttggaccttgttgtcatcttgtggatattgtgtttaccaggagcatttaggcaactagcaacaagaggcaaagctgctggtgaagaacaagcgggaggagatctggtatctgctatgacagtaggaagagaagtggatgttggtgaaggattggtaggcagactagtttgaacagcaacctcctgagtgtgaggaatgctagggctgtgtgatgcagaaataggaggaacttggcctcgggacagatcagtaccagtactgacaccagaaggatcaacacatgctgcagaatttgtacctgtatcaacaaataaaatctgttctggaggcaggttgttagttgcagagttaggcacaaaggtgttgtcaagtaaaacattttggtcactgtcagcatgcaatggaacatgatcaaccacagtattagaaacagtagggacagcatgtggttcaccttgatagagtaaatctatcatggtgtaaggctctttgtagtgggaacatttaggaattataccactaagggtgcatggggttatatgggattgaggagtgttggagtgtttagattcagtctcatagggaaaggagaactcatcaaaaatcacatctcgagagatgtataacctgccattagaatctaaacatttataacccttgtgattta

SEQ ID NO: 127781 - DNA, 1292 bp, Cannabis sativa
  modified_base (800)..(817): a, c, t, g, unknown or other
  modified_base (862)..(863): a, c, t, g, unknown or other
ttagtaatcttattaaccaatttgttagagtatttaaaaagtgacacgtgttaatctatcattgattgaaatcataatttttaaaaaaataattaaaaataaaaatattattaacgttttttattttttattttttttaaaaaaactcattattactgttttttttttaaaaaaacattttttccattacttttatttatttattttttcattttcattttctttctttagttttttccttcagatctatctcactccaacactcttttgctcaatccgccatcaaagcttgtaaggagaagtcagaggttccaacaaaggagtctccttgattttcagcacccaagtcaggcacaagaacagtttgacatcctctttctaattagtgttgcggatttctcgtgactctagccaatgaacccaggtgcacaagtcacgcatttgaacagttccacgaaactagacccatctccatctcatcgagtcatgaacccctaattcaacctaaatgaacttcttttgccaccacgcgacccacgatttcgttgagtggatctgctacattccattgacgattacaacgaccaacgacgagatcaagtaggcagcgaggacaatgataaacttccaagtcgtcaccctattcatcttctacatctggatgtttgggtgcatgactcgaatgatttgaatttgggatttggggcttggcggggcttagttggatttaggacttcaatgggtttggagctttgtctatcgtggcttgtgttgggattattttaccaggatctaaattnnnnnnnnnnnnnnnnnnattaacatcctaaatatgagtatctctaaaataatgaaattaaanncataagagtttagaaaaccttacaatggttgcagcagaataatatgactccttctgcccagatctctaacctttgttcctttctgtcgctgagtattatcaagatctaagcctggatctctttcacttcttcgggttggttaccaccgtcttccgcactatcaatcagtatttgacttgctatgtgtgggcatgacactctatcactaagggcgaattggttgaagaacaatgaaggaggtttagaaattctataaaaagtgtctctcatctactagttgttagagaatgaaaactaggtttaatttggttgaatgaatagtcacatgaggtcttcattaagtatttgatctaatccaatccgcacgatctaatccaatccgcaaaatgcggatatccgcacttgtacggattggattggattgaaaaa

SEQ ID NO: 127782 - DNA, 1006 bp, Cannabis sativa
agagaagagaggagagggtctgaatcgtccgttggccttccgcctgcaccgagaggaaggaacaaagagagagggagaggtggctgatggatgagatgggcaacttctgaccatggtggctatggaggttcaggagtagaaggaagaagacgaaggtgagagagaagagaaagggtaaggctgagaaagtctttaaaagaagaagagaaagggtcgtcgctattcaggcgtggtggtggtgatggtttggggttgggcgttggtggttggttgtttctggtagtgagaagaataagaagaagacgaagaagaaaagaaagaaattatttttaaataatttatttattttttaaaattaaaataataatttggaccattaagatttcaacacgtggcaattttaaaaaagtaaacggctcagttaaaattaagactaatagacaaataaaaagcatgaccttgacaactattaccgctatttttggaggttggagactaatctgcatcaaagtgacctttttgaggacttttgctgcaaatttcccaaaagtatatatatcatttactaattaatttttggataatataataaggataaatattaatagtttggattgggtgtgtttgaaaaagttaccgatgaagactttatattttgttaaatgaaaatttagattttttattttttaaaattgtactaaataataacatgagtttatttttcgttaaaataaaacttaataataacttgacctgaaagatttagaggaatcactttatatactattttttttaattttttttttaaatctaccgtttgggtttctaaaatgatttctctgatagtttctatgtaggttgctatacgattttttattgaggttgcctcgctagttgcaataaaaatttctatgtaaaattccgtaaaaatacaaaaataaatattttaaagtgtaaaaatgaaaaagttccaaagatttataataaaattaattatattttttgt

SEQ ID NO: 127783 - DNA, 931 bp, Cannabis sativa
tttttttttttaaaactaaaaataatttttaagttatgaaatcatacaatctctatatttttaaaatgggatatattaataacatcagcttaattttagtcaaaatagaacataataatacattgagttgtgatgttatgactagtttgtttacatttttttgtatttttatatactaaaaattggctttgagttggtatattttagtgttattatttatttttactaaaattgggcttagggtttcacccagactccaaacttggccttgaccggaccccatatcttgatcttgagttggactaagcatcaacctagacccttagcctgacctggaccctagtccttattcaggctcctagcccgactcgaatcccgacccagaccttgagcttggccacgacgtcaactcgaaccttggacccttggccccaagcccaaacccccagttcggactcaaattcgcacctcgacctagaccttgtaccctcgttccctgacttgcaccccaacttaggccctaacccctggcataatcttaactcgaacgttgaccttaaccccaatctcacctttgtctcacatcatttaaaataaattaataaaataaaagttacgaaacacattattttattttaaaatagaaaataaaatagctatcaaatatattatttatttttcaaaaataaagaataaaaactaaaaattgtattttcatttttctagtttaaaaaactcaaaaacaaaaactttaccaatccctccttgacttgttttgccaaaggcagtaattccccatatatagtatcaatcaagtcttttttttttttttgagataaacaatcctcaaagttgatcttcctatttttgtggataatttcgtttgttatataattttttgggtaagttgaaaaataccatttttattaat

SEQ ID NO: 127784 - DNA, 1426 bp, Cannabis sativa
tttatgcattttgctagtcgcaaagaaatccgtaacagtcttacaaaaatcatctcccaccgcatcccagtagtgtttgaaaaacaggacagacattccatcagggctcggggctttgtgactattcatggagaaaagagtattcctaatctcctcattgttgggcaccaaaatgaggtccttcttctcctcctcaaaaatattctcatggatcaaaagattgcagttaagcgaatgcacatcacccgatccagcaaaggcactgcggaacgattcaatgaattcctgcccaattaactccctggaagtaatccaattattgtctttatccatgatactttcgatggcattccgccttcctctaatagtagcagacaggaaaaagaacttcgaacatttatccccttcctttatccaagagattctagccctttgcttccaataaagagatttcctttccctcgcctcattcaattctctccggatactgcattcagtattccaatctcgatctcccgccgggagactctgcaataaattcaggttgttttctagatttttaatacgagagtccaaacaaccatattgagctctatgccactgactcaaagcaattctagttgccccaatctttttgaacacccgagccggggcccacggatgcgctacagaccgccaggcgtgggccaccacaaacttacttctttcatcgcgcgtccaaccttcctcgaacttgaagcttctcttgaatttacgtcccagcccctcagtaaaaagacacagcggtctatgatcagaattactggtttgggaggagcagatagcagcttttgggaataagcagagccactcttcatcaactagacatttatctagcgccgattttacatggtttaaccccgacctatgattatcccacgtcatcctatctccttgaataggcatgtcaacaagacctcgggattccaccagtcccgtgataaacggaataaactgatctttactgattgagccttcccgatccgactcacggagaacaaaattcgtatcacccataattaaccaagcgccaccaaacttatcacccaacttgactaactccgcccaaaaagtcttcttggcgtggaaatacggcgggccataaacacaggagagaagccacgggtgggtcgggggatccgaataaacaatcccactaatattattacgggtgcaggtaatacactcaaaagagaatccaagtttccaagctaatataattccaccagcagtcccactccccgacacataaatatgaaagtaaaagtgaagagaatgaagaatacgtattagtggagcagcatccactttgagttctgagataaaaacaaaatccggggaccgcaatctcactagggacttcagttcaagaactgtagaggtctgc

SEQ ID NO: 127785 - DNA, 2089 bp, Cannabis sativa
  modified_base (233)..(238): a, c, t, g, unknown or other
  modified_base (2056)..(2060): a, c, t, g, unknown or other
aataaatgtgggtttgcaaaattcctgtaacttttaatatttttatttggtaaacttacaaaaatattaaaatttgggttaatttttacaaaaatactgtcacgcggaaatcttttcaaaaatactgtgtttttacaaaacactagtaaaacgcaaagcagaacaactcaaaacaacagtagaacaactgaaaaacaccaatagaacaccagtaaaaacttaacacagtatannnnnntatgaaacttataaaaaaaacatagtaaaaaagtaaaaaataccgattggcagtatttttataaaaaaaatgaaaaaaattagtatacctgtaaatttcccttttatgggaaacttacaaaaatactagaatatactcatttaaaatttaaaactcgtttagctatttttatctaaggaatatactcatttaatacctatattttctttgattttttttttttgaaaacatatttggtaccttgtgcttttaataataccagttctcagttatattatcttaaagtaaaatttaatcaatataattttattaatttgatcaaacggttctcagttatattatgtaattaaataattaaatttaaatccagaatttataaaatttaagacagtttaattgtattaataaaattttataaaaaaaatgtttgaatttagggtaccaaatatgtatagtttaatatacaaggtgccaaataaatattattgaaaatacaaggtaccaaaatctgtatttatataaaacatagggtaccaaatgtgtataaaccttttcatctatttttagcagttcaataccaagttaattgtccatatgtacatagagtattctctacttggactcagtgtacacatgacacaatattattgacctacgtaaataaatatttaaaataaaaaatatatcatttaaaaaatacaaattttttctttcttttttgcccttttttttctcatttacaacgttctccccttggagaaccaaaatgcaaaccctcctaattttttagtaggcaaatgttatacccaatttacgagaaattaaaaaagtcaaacctaaaaatttgaccaagactcgagagaaccaaatgagattgagatataatatttgagggtctcatgatacatcaaggaagtctatgaaaacattaaccaactacttggtaccgggacccacacccaagggtgcccaatgttgctaaaaattatagtctacgcaagtgtacgtatctattgcaagtaattactcacacaggtacgtatctatcatcatagaggaacgagtcgatcttgaggtacccatcaggagaaggacggaccttgtatgtagatggggaatcgaatagtgaaggttcaggtgggggaattgatattgataagtcctaacaaatttaaagtacatgctgctttaatgtttgaattccttacctcgaacaacgaagccgaatacgaaactctaatcgcaggtttaaaacttgctcttgaaatgaaagtcgagtacctcgaagcattcagcgattcccaaatcatggtttgtcaggtcaatggtgaatatttggccagaggaggacgcttggtgaagtacctctcttatacttgtgagttgttgtctaaatgcaaaaaagttattcttagtagaatacctcgtgcttataattctcatgcagatactttggcccgtttggcctcaataagagaagcagaattactcgatgtaattcctattgatgtgttggctcatccaacaattaatcgcgaagaaactatgcagatcgatgttattgaacatgtcgcttggatgaccctaattgttgcctatttaaaaattggcgcactccctaaagataagcttgaagctaaaagattacgatatcgagctgctcgatatgtaatttatgacgacaaattctatcgcagaaggttttagccaaccgttgcttaaatacatcgatggggatgaatacgactacattcttcgagaaaaacacggtggtatttgtggtaatcatacaggtggtaattgttggaaattattttnnnnngatctatttactatcatgtatgttggatt

SEQ ID NO: 127786 - DNA, 1087 bp, Cannabis sativa
tggtttcatgtaataagttttcaagatgtataaatttttaaaataattttttttttttgcacattttttgtaattatattattgttgtacaattatgaaaaaaaaagcccttttgtttattttaaaggcaaacggtctgcgagctttatttgttttggtgcgtgtgttaataaactaccaataaaaatagaattcttcttaatttattataaaataaaacaaagaatttccttcttgtagagatgacaatacccgtctcgaccacaattttttttttttttataaaaagttaattaaaacaaaaagcatttattaaaatatcaatctgctaatacgaactgtcatcctaaattttattcactatcatttctaaagtggttttaaaatgagtttgaaggaggaaaaaattaagtttcaaattttattttaggattattttacaaatacacaaaaataacaaaaaaaattaccaaaatacggttttacggaattttaaatatttttacgatttttttgattttatgtaaagaaaatatggtctttttatgttgtactcttgttaatttgttgttgattttatgttatctatatgttattttttgttgttattttcttgttatttttatgtattttttttattattttcgtatagtttctataaaaaatcgtaaaaatatatatatatatatatataaaaaattaaaacatagaaatataattttttaaaaaaaaaaaaaaatgtatttttatgtaattttgtcttttatttttacatcaaaatctagggacatcctaaagttcagttaaaacataaagtgggatgacctatttatttatttgggaccattagatttttggtgaatttaaataaatggtctagattttattttaaatagtcaaataatttttgagtatcttataattaaggtattcatgtcatttgagttggtgtacttataaccgaaggaaaaaatattctttctcattttctttatcttaattttttttttggtgattctacaatgcaccccaaggaatgtactgatgcacccttaacttgtttcggcatccagaaaaattttttagt

SEQ ID NO: 127787 - DNA, 763 bp, Cannabis sativa
aatgtgttaatttatgtaatatgtgtgtatatataataatatattgtataattatattattttgtagtttttttttttttgttaaaaagtgatattaaaaaaaaccattgcctaacccgaaacccgacccaacccatctgaaaccgaaactcaaaaaccctattttcatacatgcaggttcggttccaagattccaaaatctgaactcaaaacacttaaactcaaaaactcaaaatccgttaaaactcacgcgatgtgcacccttattgagtacaaatctagtccgactatacccaagacacagagtctgttccactctaaagccatcttttgtatgttagctaaagaatgtactaagaaataggggatgttctaataatattgtaaaaagaaattataaaataaacaataataatatataatttttttaaatgataaaagtacacaataaatattttaaattatttcattatttttttaaaaagtgcatagttagatttttttttcttctttgggatgtataatcctttagtgtgtatgagattattattttatcaataatattaattattgtttttctttggaaaaaaataagtttttaattaatttagaagaattctctaattatttgaatgactcatcaagaaaataatgcagcaatcaaataagccaatagaaagtaatagaataatattatcgtacgaagtttcccgacaactcaaaaactttcttctattctactcaaaaaaagaaaaaaaaaaaa

SEQ ID NO: 127788 - DNA, 1464 bp, Cannabis sativa
  modified_base (710)..(710): a, c, t, g, unknown or other
cgaatactcgcacttgtctttccatataaatttcttcttgattattaataatactatataatttggtgttgcgaaattcactcgacaacatggacgtccagatttaatcctttttttattttattttcccactgaaatataaaactaataactaaaacaaattaataaaacctaaaacaaagaaataaaacttaaaacaaataaataaaaaaaatctaaaattaatctaaaacctttcaacattttagaaaaaaaaattcttagttcatttcagaaccattatcgacactcaaaacccaaagccctaaatcaaacctaaatccctaggtcgatggtttgagaatctaaattcgtagctcgaagctttgagaacgacgatgatggacgaaggttcagaacaatgaagcttggatgaaggctgagaagaatggatggggagggttcttacagtagttctggtatcaataatagaaggttgagagtagctggcggttcaatccatgaaagggaacctcaaaattgctactgtggtatcctgtggattggaagaacattgaacacggaggcaaacccaggtcgtcgtttcaagaggtgcagattttcaagtgtaaggattacattttccccttatattaagttttttgtttgtgttaactataagaaaacacagtagttatttttcaaaatttattcaggctgatggaggatgnagttctttgaatggatggatgttgaatcttgtggaaggcgcagagaaataattctaggtctcttgaggaagataaccaaacttgaagatcaattgatgttgtatgaagcaaataaacatttgaaagtaaatcaagatttgggaaaggttcatggttgtgattgtggtcacatatgggtattgagaaattagaaaaaaaatttgatgcttatttgtgtatttatttttgtattttatctggtaaagtagtagtaatatctatgtcatgccaactttcaacattgtgtaatggacatggcacctgtattgccattgttattgagtttgtaatgtatatggtactggttttggtgtttgtataatggagattgttaatgctatttgtgtgatcaaaactgaaattcttgatgcaatatggtacttccaacttaagtataattgcttacaatttttaagacaattgtattgtcaacttaggtatatttacttacagtttttgatacacttgaaattgtgttttaggtacaattaaaactgcgtcatttgaaacaaaacctgtaattctatttttgctattacaagatcacaaaaaaaatgcaaaaagataacatatagtgtttcacaagtatataaacctgtgatcaaaaacatcatacaacaaaacattcagctacttataccattaacaaagcataaggcaatgttttaattctatgatcaaagcacaaagcacaaggcaatgtgatcaaaaagat

SEQ ID NO: 127789 - DNA, 1154 bp, Cannabis sativa
  modified_base (32)..(40): a, c, t, g, unknown or other
  modified_base (1107)..(1108): a, c, t, g, unknown or other
ttaggattttaataacatacttgttagtaaannnnnnnnnctggtaaaataattccaacaggaatagtgtgggggaaccaaggagaagcaaggcaatgttacaacactgtcgtacatctattagttttggtggtatgagggggcgaagagccttttgcagaagaacatgacaaattggacccccgtatcgggtccgaagtgactttacaacctatggaggacatcgaggaagtgagagtgtgcgacctcgacccatctaaagttattcgtctaggaaaaaatctagaatcagaggagcggagtaagatcatcgacactataaaggcagctacggacgtctttccctggtgccatggggatatgaccgggataagcccctacgtaatcactcatgtcctgaatgtcaacccagatatgcctccggtacaacaaaaaagacgcccgctaaatccagtgaaggtcgatgccctggaaaaagaagtggataagttgttatccaacggcttcatccgggatgtatactacccagaatgattggccaacccagttctggtacctaaatcgaatgggacatggcgagtctttatagactttgctgatcttcacaaggcatgcccaaaggactgcttctcgttgccccagattgatcagatggtggacgccacctcgggttttgagttgctatcctttatggatgcctattcgagctaccatcaaattaaaatgcatgtcactgatcaagaatgtactagcttcaggaccgacaagggggtatactgctacctggtcatgcccttcggattaaagaactctggagcaacttaccagcgcatggtcaaccaaatactcaaaggtctcctgagatggaacattgaagtatacgtagacaacatgttggtcaaatctagaatgtgcatgggccatgcagacgacctcacaaagtgctttaaggtagtctggaggtatgggatgaaacttaatcccaaaaattgcacttttggcgtcaaattaggaaaatttctggggttcatcgtaagtcagcctaggatagaggtgaaccctaaaaaaatacaggccttgttaaacatgttggaattattttaccannatcttagatctactcacaagtgtgttgattaacaccctaaatatga

SEQ ID NO: 127790 - DNA, 717 bp, Cannabis sativa
attcataatcaaacatagatttcataattaaaccctatttatcagctaatttttaaattaaaactaagcggtctttacacttttcttactgagtctgttgagtgacagtcattcttttcatgtgtaggtaagggcaaagctaaggctgaacagcagtgagcccgagcagatgaaaattgtacatgtcggggcagttaggcctggagcatacaatctttgggacagtaggctgcattttgtatagtcactagacgacaacttttgtatcgaatattttgtaactcagttgtaaatattttaaacacgagatcccggttatagatatgttatttactttgatatttaaaagtattccagaaaagtgtaaatgaatcacgatttttgataaacccattgattagcaacggatgacacaattatataaaatcaggataacatacctaatctaataggatgttaaattttgcatcaagatttaattatgcattagcatgacagtaaaagttaatgcaaaaatattacaatactattatttctaccaaagattgtatttctaaattaaaaaaatatataaatatataggaaatgtttatggtggagaccttggttttgtccctatggtaggaattcttttctagcccttgattattgatctaatggtaataaagttaaggaaacatgatagtaataatagaacctagcttatagtatttttac

SEQ ID NO: 127791 - DNA, 882 bp, Cannabis sativa
cataaaactaatgtcctgactttaatttttagatctataaaatgtagatctcaaaaaattaaacaagagttcccaaacaaccaaattcaagtataattcaaaaaaattacatcaatacgatagtaaaatgtttatcctggtgtatttttattattttctaaatttctaatggtgaatttgttcatattaaatcatgaaaagacatgtagatagagttacgtacgtggaaatactgttctgatttttaatgtttcataacagttgcattacagttgcataaatattttgccaacagttatttcatttgattgaaatcttcgtttggtgcaactttcgaccaattatctaacaatcttcgtcttattgaaatcttcgtctgatgcaaccttcgtctgatacaaccttcgtctaatgcaaccttcggccaaccacccaccaaccatcgtttgattgtgtaagtgataatgtaagaagtattttaataattaaaatcacatgaaaagtataaatattgtccagactttatggaagtatttttttttaataaagtgtcaatttatattttttatgtaataattttaattttttatatatattatgattctttttcatatttttttattcctaaattatatcagagaagggttatattttctcccttttgacatacataacattctaactgatttcattttccctttatttttctcttaatttaatttagggtcattattaattaattttgtttgataattccaacttaccaaaattgtcaaccattttgttaactgttatttctttcaatcaaatatataattgaggaattaccgcatatactattttttaacttttttttttaaatttacggtttgggattctaaa

SEQ ID NO: 127792 - DNA, 674 bp, Cannabis sativa
ttttagaaattaatattaggatgttaatgaaacatacttgtttgtaaatctagatcatggtaaaataattccaacagcatcaacaagaggtacacctttaaattctgtcaatttcacaatgattttgactatgacacaaatggagattcaatttttgatcaggaaaacaatcctgatctgcgttgttatgtgcaaaatgaccaaatttaggcataggatgcccaaacagagaccaaataccattgccagtggcgcgtctcctagcggtcataattggcataccccatatagcaggcaaaataagcaagcccatggagcgctatgctcggaccctccatcatgagcaaaaaaagcaaaatcctagttgtagaggaaagagattccaagcaacttaagcttggagaaccttccatctccttcatagagggagatgttgcgtaagtcaggttccctcataatgaccccctggtcataactgcacaaatagggaacatgacagttgccaggtgcatgattaacaatggagcctcttccaacattcttttcaaatcaacctaggaaaaaatggggctccaattaatagatctagcatcctgtacacaattgatgtatgacttctttggccaaggccttgctgttggggattattgtaccaagatctagatttactacca

SEQ ID NO: 127793 - DNA, 1614 bp, Cannabis sativa
ttggatcttgtctgggttttgggtttgctttaaaataacatttatttgaggttgagggggttgagcttcatgttgtagttgcagaggatgtttaagcattcttctaggtcctccacatgccccgagcctttttggacttaacaagcatgtcgtccacatagaccacaatgttgtggccgataagatctttaaacattttattcataagccactgatatgtggccccgtcattcttcaacccaaagggcgtgactatgtagtaataacaggcctaagtttgtcaagaagcttgtatggtcctgatctggcggatgcatcttctcctttctggctttggacaatgccaagttgtaatggtgatgggaagattgttggactcctctcaacatgctacgccatgccttgttgggagttttagatagagaaggtagatggatgttattgccttcacgccgtatagggctggtcagcctattatggcgttgaaagtccagggaatgtgaatgacgatgaactgcgccatcaatgttctggtggttagattttctccaatagtgagaggtaatttcatatacctgagtggtgttatgccttggccaaagaagccatacatcacttgactgtagggtgccaaattagcgagttggagccccatcttttcatatgttgatttgaaaataatgttgaaggaggctccattgtccaccatgtaccttgctacagtcatattccctacttgtctagtatcgacgagggagtcgttgtgaagcaaactaacttgggtaggatctccttttaagatagagcttatgggctctccaagctttggttgtttcgagtctgttcttcgattgctaggatgttgcttttgggctcatgatggagtgttcaagcacagcactgcctagctctgttggtctcacctagaatatgtggtccgctaatgaagacccctaagtgtcctaccaccggatgtttgggcagacttgttgccacctacctctgtgcgtggaagtcatggggttgtaggatgcaggctggccggcaatacaatgcctgcaggttgaggtctggtcagtcatgctcctgccaaggtctagcatgtcatgttcctgcctgaattcggcaggttatgttcctacaagttttggcaagaggaggctagcctttggagatggaggccagcctgtttgggcatgctttgctttgggagttttggtaggagagtgaagcatgtgcacctctcctccttttgccttagacttcatggcgtaggggaatcattgaatttccctcttttgtcattatgttggtcagagccatcgttgttacgcttgcctctgccattctaattgttggagaattgacagagatcttctgcgctagtcggcatgttgaacagtgcttggggcactataaggccctacgtttgtctttgctttattttgacaagatcctccagccgtgaaggtatttgtcttgatgaaaagaaattaatatagaattcttgagagaattcttcccaagaattaaatcttcttgaggccagcttgaaatactattattgggctatttcaactagagttaccaaaagatataactgttggaaatatt

SEQ ID NO: 127794 - DNA, 915 bp, Cannabis sativa
gaactttattaagcacttgtttatttggatgaccaagtctattgtgccatagttttacaagttgagagtttcttgaacaagaagaggaaatcacagtattactagtattattacaagggacagtggagagtgtgtttgcttgatacaagggattattcttttttatagtagctagaaaacttgaagaagaggaaccagtaaccttgtgaagaagttgagggatgatttgataaaggccacctttaagagcaccctgaagaagagggatcctcgagtgattgtccttaacaaaacacaaattaggagtaaattcaatagtgacattattgtcacgagtaaatttggaagtacttattaaattctttgttatggctgaagcatgaagaatatttttaagataaagggattttcttatagctaaagtactattaccaatgttatctatagaaagagaagaaccattacctacaacaatcgttttttttgcctttttaggaggtttgttgttggagattgccactgtcttgagtgacatgaaaagaggcaagcatcatcaccatgagttccagttgaagcaacaagagcttcaggttgatttggcttgagttagcattgttctcataagggtcattgtaagaaatgtcaaatcttctataacacttttgaactatatggcatgtgcgaccacagaggtgacaaattggacgattaccattcgagtaacctctgccaccaccattgttcggtcttccaccataagagcttcttccacggcctcaaaagttgttagatccaccgtgtccattcgggttaggagggccagatcaatttttcttgaactgtgcatagttggccgaagctccatgtatatcatgttgggttttatgccctaaataaaacttcatttcaatgtaa

SEQ ID NO: 127795 - DNA, 803 bp, Cannabis sativa
agagagagagagagagagacttaactcatattttgttttactttttacacttttatctaaaagcctctgttaaatgtcacgatgaactgcccacatatatatataagtgtacacgtggtaaatttttaatggtctaaataattttaattttcaatataataaaaattatattaaaatttcaaaaacagaaatagaaaaaagaataattagaaaacatttcttttactttttctgaaatacactaattaataaccctaacatatctttataacatgagaaattaaattatagatagataattgagtggcacctttgaaatttcaaaataatgttatttgataagaatataagaatacgttatttagatttatgttaaaaacatatttcaaaattacctcaacttttgaaaaaaaaaaatataaaaaatacgaaatatgtaaaaaaaaataaataaagaacaaataacaaattacaaaaatacaaaaagtaaaaatagtaattacagtgtttattatttttttatatataacaacaaagtttattatttactaacttactaaacatttttttacacttatataacaaatttttatccatatttttataactaattacatataccgtaaattacaatattttttccaagaatccccatttaatttttccaatattttttgtttgaatatttatatttccttgttctcaaaaaaaaatatatatatatatatatatactagttaagagttacgtgccgaggcacgtaaatattagttttagttgaagtttagttttttatatttttt

SEQ ID NO: 127796 - DNA, 1456 bp, Cannabis sativa
  modified_base (38)..(43): a, c, t, g, unknown or other
caaacatgacttgtttttaaaaacttcaaaaactattnnnnnntctcatttctaaaaacaattttttgaaaacaaaaaataaaaaataataccaaacatgctctaagatttttgagtttttttattaaaaaaaatatattgcttctgatttttttttatttttttattttaaaaaattaggtggcatttggttggatgtaatgaaatggaaaggaaacaatctttattccattatttttttttgttatatattaaagtattggaatgacctttccaccattttggtagaatgattattctattttaaaatagaaggaaagatcatttcaatgtatgatgacaaaaaaattaataattttttttatcaattttttatgcattttaaattttattcaattccactcctattcctattctcattctcattcctctcttatgttttcattccaccttagagtttgaaaagaaagaaaaaagaagtaaaaaagaaagaagaaaaagaaattgtttttattttttatttaaatttatttttaaaatatttagtatgtgaaccaattaaattttaccatgtgtacaaaaaagaagaaggaaaaaaaagaaattatttttattttttctttaaatttacttttaaaatatgtggaccaattaaattgtgtcatgtgtacattgtgtacatgtgtacataatgtatgtatacatggacaatctaccttgacagttaacagccaaaagtagatgaaagcagcaaactactaattgaacatgggtttcggagttttaccatcaaaaataaaaattggggtttaattgctagcgaggtgatactttggggagctttgctgcaatttactaaaaaaattaaaaaattcttccagatgccgaaacaggtagatggtgcatcagtgcatcccttttaagacggagcattgtagaagcacccaatatttttatattagtccaaatttaaattaaattttatatatttaaaaaattatgataattgaattatatttaattttttaattattctttgagttaatatttttttttacaatttttataaaatattaatggtttacatatatcattgtaattatgttattccattcacctgtattaagtaattgatgtcatttatatataatttgtatttattgaataaaaaataatacaaaatttttaaaaagtttttgggggttaaactcttttatttgtcgttttacttgtatttaattatttaagttcaaattttagtagtaaaaccctccaaactactgaactgatagcaaatttaaggtgtcatccggttaagtgtcattatatactgtttatgcatacactcttttatacataacaagtttatattggtacacctaatattattatttaaaaattattttcaaattcattttaaaattaaataaaattgtaaaaataaaataaaatgttt

SEQ ID NO: 127797 - DNA, 731 bp, Cannabis sativa
tagttggactaataacgatactgatacataaaaaggtgctagacaccactggtgccctttaaaatttctataatgtaatcacacaatatagtttattctttcaaaaaatcataagcaataatttcctttgaataaaaaggaattttgccatgtatgaggtcaagcagattctttgcattaattactgataaaagtaatcagtgttgagtccatttacatcctacatttcggataattttgaatatttttactattattttataattaaattagttaattaccaaattatatgccttgtcaatagttgttatgtatcgtgtttttaaattagtcgtaccgtattgtatttttttttttttttcgtgttatgtcgtattaattaacagtatcatattatatcgggcttaaatttatatttttgtatcaagttgtgttagtggaaaatgctcaaattgtattgatttttacgtacttaaaaatgggtgaggacatcacataggtcatgttgtgaattattctcttctcttttttttttttttataaatcaaaattgttctttctttatgtatgtaataattaagttgacaaaataaaaggactgaacaaataatttggagaagttaaaaccagaaatgaatttatatatatatatactagatagagttacgtggcaagtcacgtaaatattaggtttattttaaattcttgtagtttttgtttaagaatttagt

SEQ ID NO: 127798 - DNA, 627 bp, Cannabis sativa
taatgctataataagtgaaattcagccttaaatttctcttttaggtttagacaaaatccactaattaaatagaaaagaaaaacaacagaaggatttattttccaaatcaatctaatccttttggccataattatcattaatttgtttcaatatttcattctctataaattcaaaccatactccatattcttctccttattattagaataaaattctccattaaattattataaggtctaagtattttgaaatttaaaaaaatggccaagtttatgacattttttacaatagcccttcttcttagttttgtgacattcatctctgctgctcgccctaacgattttctcgtacctcaagaaaaggtatgtttcgtttttgttttgtttttttttttttgttaagattacatattttataatttttttttgaattttttcaataaaataatttatttttttttcgaaaaaagtaaatttttataaactttgccaaaaaaagcaataaaaataaaattatttctttgggattatttcacaaatacacaaaaaacaacaaaaaaaatttacaaaaatatagttgtatggaattttaaatatttttacaattttcataattttatttacaaaa

SEQ ID NO: 127799 - DNA, 1399 bp, Cannabis sativa
  modified_base (31)..(38): a, c, t, g, unknown or other
ttattataaaaataaatggtatttttaaaannnnnnnnaaaaatatgtatatttttaaaagatattttttatttgggcccttagaatgagtgggccctaagtgcgagcctagcctgtcttagcgtagggctaactctgtttttaatcatattcaacaaattattctgtaagaccatctctaatggaagatctaaaatttgtgttatggcacgaaaaatgagtttgtattatatttggcccactatttacagttgtgctccaatgcacaagatgtaaaatatgaaaaaaaaaaataataataattatattgatggttatttaatatttgattgaaaatatagaaaaaatatttttttttcttttattatttaaataatagtaatatggtaaataaagaatctacaatctagtaaaagtcaataaatcataataattagtgacattatagtaaatagaaaagtaacatttattgtaagttaaatttagcaaaatgttatatcttgtgctaaatttagcacacattttaaaacactattggagtagtagttaagtgtgttaaaatataacaatacactatatttttggcactctattagatatgctctaaccaaattcttactcatatgtaattgtgtttaacttaattaagttgatttgtaaccatttacactaaacttaaactcaaagttgtaaattttgtgcaaattttaagttgtatactatatcataattactataatattaaactcctttgaattaaatctccatcaatattaataagaacatgttctttatttaattatttacaaattatacctttttaataaataaaagtgtgatttgccatttttttttttaagtacgaagcaaatatcttaaagtaagaatacttactagttactattattagcttttttattttctgctagaaattaaataggaacattcctacctatgtgatctatttatgttttagctatgaattttatcattgaatttcaagtatatattttaaatctacctaaatttatagtcacataaaaaatatttaacaccttttacatacaataatatatatttaacttttactgtaaatagtatatgagtgagctgcatcattttttattttatggttaaaattaattatatatcagtatgtgtgaaaagataatagaatatataaggtgaatgaattaatcctctcgtaattaattttgagatggaacatcattcactttatcccaaaaagttaacatggtatcagagaaaaaaataaaaaaacactctaatgactatccgacccaaaaaaaaatctatcaaagtagagccaaataaagaggccaccaaaaattcgaaaataactaatctaagagccaaagtcaaaaaagctacttgtgat

SEQ ID NO: 127800 - DNA, 2131 bp, Cannabis sativa
aaaataatatgattctggttttctttctacagtttagtaaacagcataataaaatattgtttctgattattttttattttaaaccaatacattttcgattgattattttgattccaattacagtttagtaaacgcgccattaacataaatggggttaaatgctagttgtttccgtttcaaaaactatagcttccattttgatgaggttatattgtttccatttttcgagattgaattctttccaatttcaatgttagttgtttctattttttttttatgatatttgttttcatttcaaatatacgaggttaaattctagttgtttccattttttattatatttgtttccatttcacatatatgatgttaaatgctagttgtttccatttcgaggttaaatggtttctattttttgagattaaattgttttcattttcgaggttaaattgtttctattttcaatgtgagttgtttctattcttttataataattgtttccatttcacatataacaggttaaatgctagttgtttccattttacaaactatagtttctatttcgtaattaaattgtttcctgtttttgatattaaatgctagttgtttccatttcgaagttaaatgatttctattttttgagattaaatgccaattgtttctatttcacaaattataatttccatttcgagattatatgctagttgtttccatttaacattttgtgaggttataatacacatttttttatatttttattttgtgcatggaaaaatttaaaattatttaattagttaaaattttcaactaaacatgtgattaccttcaggaaccacgggtttggcttagtcttgaaaaagtgactatcagacctgaatgtttcattaatcgactttgcttatgggcaaattggtcgatctaattggacccagtgaatgaccccatcattcttaatgggcttactatacaaacaatataattctggtgctatcctaataaggtttacataaatatgattttaaacttacaaaggatagcaccagaaatatactgtttgtttagtaagaagagaatagaagggatgaaccataaactcgaaatgccttatatttgcaaaccaaagcaaagcaacaacaacatgaacaaagttggaaactaaacaatgttgatatggacaagtatcagtgccaattatcgtgtcatggaaatatttggactgggtcataattatacaatattgcaaggcattgatgagttcttgagttgtttgttggtgtaagcataatattataatcttttgtggtttaatatgaataactctttctactaaccaaagtagaaaaaaatgcatatacaaaaagtttagtcaaccctaaaaaattacagataaaaacaagacggctattataggacataaaattctctaaacgtaaaaaagctaagttgcttcttttctttgtttttcttttaatctatttcacaaatcttgccagccaagaagagaggaggaaaaccactacgggtgttcatccaatccaattcgcactattttgcttagtgcatccgatccgcactaagtgcggatttcattttttagatccaatccaatccacacaatagctcaaatccaatccgtaaaagtacggattgaatcggttattttggattgattactttttaatattaaattatataatatttatgaaaaaaatattttatttttacataactagcaacaaaataaaaaaaaaaattatagttattttatgtctccaacaacatattaaaataaataaaataataaattcaaaagaagaaaaaaaattgtatgtataaaaaatatttaattttattttaaattgtatgtagaaatatatatactatatataagaatagaatatacatttgatctattaagttttacaatataatttcattacatgtattagacttttacattactattttctttacattaaaatattatttatatatataattttttaatattttataaataagtgtggattagattggatcaattacttttatatgtcaatcaacatccaatctacacaagtacagattttaaattttccaatccaatcccatccgcactttgcggattgaattg

SEQ ID NO: 127801 - DNA, 1591 bp, Cannabis sativa
gagtattattataaattgataatgccaactagaaatgccaactagaaatttaacatgtcaatttaacatgtcattttaacatgtcataatcctatgtcataatcctttttctaaagtgtttatggtttgattctctaattaattaacatattcttatgcacaattaatttgaagaataccaatttaagcacagttctttcaagtcatataagaaaaatagcatattcatatgttatttacaaatcacacttttctagggtaatattcatgcattattcaagtaattccactaatcttattttttctaaaaccaagattaacttgtaacttactaatggtgatcaaacaaaagtaagcaattacacaataaatactcttgaatgaacaaaaccaattcactaaacatagtaacaagaaaaccaaatcacaatttttagtcaccaaaataaatttagcgaaaaaaaaaagaaaagaaaagaaattaactcaattttaccccaaatcaaaccaaaccttctagaacacctaattaagccacaataagcataattcaagcaataaaaatagttatagaccctagaatccaagacctccactaaagacctaagtttgagtttaaaaactcaaacattggtctttctcaaccatagtaactaaaattagttttaaacatcgtaattgactgagatttaactctaggaaacatttttaaacccttttcaaccaaacaacatctgaaacttagaaaattgcatgctaacctaagctaaaaattagaaaattcaaatagaaagaagggaaactggcttaccttggatccttacgaattcctaatagaaaccctctgaacttggctggaaattgaagaagaaaaactgattttcttggttccaagaggtggccgaaccaatagagagaaagaaagactagattttgattttctatttattattgataacataatgagatatagtaatgattcagcttagaataattagataaccataggatttactatattatcccctttcttcaccaagaagaaaactaaaaatctaggggtaaaatagtcctaaactataattccaaacattctcgacattctaaatgtctatctattttgctcgctaaaaccaagatcctataccttttctaagtgactctatagactaatcgtcgcattccactattaccgggcataaaaatatgaaaaacataaaattcatatacatcatgattaatacacatagaatttaaatatatccccataatcataaaaataataattaaaagtctatttctaaaattaagctctaattatctactaattctcatattaaagttaagcagtcattacaattattcccaattaaaaggatttcatccccgaaatataacctaaataattccagatattgagccctcatatgagactccaactcctaggtggcttcctccaccttaatatttttccagagtacctagaccaatgctatggtcttattccgaaggactttatcttttctatcaaggatttacactggttgctcctcatatgacaaatctggttggagatctaggttttcataac

SEQ ID NO: 127802 - DNA, 1525 bp, Cannabis sativa
gagcatagagaagtaaaccatatagaatatatagcaatagcctcaaccacacactcaattttatgattgttttttaaaattttattatgacaatttagtttcatgtgacccatacctggaagcaaagcactgaatcatcgtagaacccacccacccctccctcaatggatcgagaaacatctccaagaatcttattcacctcactgtattattgatagaattccaaagcccatctaagaacccattcacccttaagaatcctatgtgcatggacaaacttgttcgattgaaaccgaattcgctaaaccaacaccaacaatttttcaatatcaacttgacacatcatagaagtgttaggaagacttatatagtatcaaattatttttcatgtaaataattttttaaaaatttaattattccctataacatgttatctaaaatctttgaattatatatgagtaacagaatacttttagtggttatttcatagaggaatatgacttcttccattcagtgatctaactcttgttcattttggtcacaatgtattatgaatcattgaatttggatctccataggactcagaacaaagcaccaatttcatcgtaatcttccatagtgatctgggtgttaatattgcccacacattactagaaagaaagattttgaaaacacatcactagtgatgaatgttgaaaattatctatagtcatgataacctcgtaatgtgttttcactatggtggaaatcattctgggggatgaaaattctaagaaaaatcttacattttgcgtagagggttatcatgaaattctacctacgcgtaatggtttgtttagacggaatatcgcctctagtacttcttgtcagctatgtggttttagaggagagtcgaatgctcatgcaattttctgatgtcccgtttcacaagccatttgaaatcttctggaattctcttttctacatgaagtaaaagaagagattaatttcaagaatgttttactttatgcttctgaagtggtggaaagagatgccattgcaaaattaattatgtgttcctgggcaatatgaacagaaagaaataagattactcatggccaacagacaagaaaaccacaacatgtagttgagtggataattagttattatgattcgatcatttcaattaaggatggtcccgaaaaaagtctccaaactaatggaaggaatagaggagctttggctagaaattctagaggtgcccaagaagagagtttacactctaaacttatggtggatgcagcagtattaagcaccatgagcttagttggattaggtgatgttatattatcagaagataatatagttcacgttgcgttgagcaaactcctcaaaggttagtcatagtgggtacattaaaaatattattcgtttcttattttattattgtgataattttcaaaggaaactgttgatatcctaggtatgggagtattgcatggcttatttgttgttgttaattctatttttggcatatttaattgac

SEQ ID NO: 127803 - DNA, 714 bp, Cannabis sativa
tgaacttgaaagtgtgaataagactcctggtcagagtaatacttcacacttgctcatgatgaacaagaaattccataaagcagctaaccagaacagggttggatacctaaagtaggtagaaagctttcctaattaagttattctcccgtagtatttaaatttcttccttgagagttatggagcgctctttttcaaagagcctacgtttatgttttacaagcttgaagttaactttgtctatgttgagggcatgacagatgacctaggggctgatctcgatgatgtcctcatgcgaccaagaaaaaatgtcttgatttgtcctaaggtaacccatgagaatctaactcaaaaccttcgtgaggtttgttccaatctccagaggtctttgtcgtctctcaagcctttgtgggagaggccttgctcattcttgttgggttttatgccctaaaaaaaactccatttcaatgtaatcattatcttcaaatatcaataaaaaaacagaagtatttttcatcactttgtgtgtcatttggttcatgtaatcatttacttgtttatttgattaataaattcatccaaacccatatcacatttatattcttgtttattgtgtcgccagcacagtggaaagtaatcaagagtatgtggttaactatataatcctagatttatcagtacacagggtttaactgatatgtgaatctacaacatagt

SEQ ID NO: 127804 - DNA, 712 bp, Cannabis sativa
  modified_base (681)..(681): a, c, t, g, unknown or other
cgcatcgcaccgtgcagtttaggaaaaattcaaatcgcgactacactgcaaagaatttcaaaccacattttttttgcggtgcgagcgatttgagtggtttgatgaccacccctagtcgacgtggtttcatagtgcttaagcttgatatgaataagacatatgattgtatggaatagaatttttacaataaatgatgcgtaagtttgggtttgctaatagatggattgatatgattatggactgtgttatgactctaaaatattcatttttgataaacggtcaatcgataggacaggtgcttccgactaggggtattcgacaagtctgtccattatcgccatatttattcctcttttgtacggaagccttgtcattgttgttgaagcatgctaaagctaactctgaattatttagatttcgatgttcaagatcgggtcctagggtctttcatttgatctttgcatatggtagccttattttaagccgtaccaatgtggatgaagtggtaattattaaaaatattttacatgtttatgagaatgcttcgagaaaaaagattaatttggaaaatttggccatttcattcagcccaaatgttccccaaccagatcaaaatgggatggttagcttgcttggactaacccttgtatcctttctgtcacagagtatcaccaagatctnagcccaaatgtccttctcttcaatttggatt

SEQ ID NO: 127805 - DNA, 530 bp, Cannabis sativa
atttttgataaaaatttccttttttattaaattatttattattagataaataataactatttttactttttaattttttttagaatatttgaactaaagactataggtccaattaaaaattaaatttatttttttcttgattttcattagttttcatattttatatatttgttagttgagatttaaattagtcatttatgattaagttgatgattctacaattgaatatttttattaattaataaagggattttaaattagtcatttttgactaacttgttaaatactatttataatattttttagaagtgcatatatatattgaatagtttgtacatttatcatatttactaccttagaaacatgattggatctatcaaaaagtgtgttgagattatatatatatatgcttacaattgggctagatgcgaccatatgtatgttggaaaaattctcattacaagagagaataggaggattacaattaaaatactcaaaatacaaataaaagtatttcatcaagattacaa

SEQ ID NO: 127806 - DNA, 830 bp, Cannabis sativa
tctaaaaaaaaactgatccaagagcaaaagtcaaaaaaatgtcacttgtgatttggggataatgagcgaaataaaatagagccaaatccaaaaaatactgatccaaaaagtatagtaaaatgagccacttgtaatcagggatagtgagccaaaaaagagtcacttatgatggagttgtccaagatggtgagcatataaaatagccactatcttgaggggatgttagagagtctcacattgttaatgtgtgaaaagataataaaatatataagtaatgaactatttctcccattgctaattggttttgagatggaaccccactcatcttattctaaaattctaacacaaaattatctctctttccctttctctctctctttggtttggccattacaaggaagcaccaagaaacccaaccccattctttgtaaattcagactaaaattaagggtttcgagcaagaatttcaagtggttagtgaagtgatatctcaagttcactctttctctttaaatttctaaggaaaaagcttggtttagttatgcaattttttgatttagattctgtttaagtttaggggttgttgggttcgttttggagttctgttttggatattttttgtgatggttttggaagttatttattggctttggtgataattagctagtgagaatacaattataccccaaacaactcttaaatttgttgaatcaatagggcttgattggtttagaatttgaaaacaattttatgtttttaaaaacttaaaatgtgggggtccacataaaaatacttgattggtttggtgttttcaaaaactaaatttgaat

SEQ ID NO: 127807 - DNA, 503 bp, Cannabis sativa
  modified_base (337)..(337): a, c, t, g, unknown or other
  modified_base (456)..(478): a, c, t, g, unknown or other
atgttcaggtttgtgagtgggtcaggggtccggtctgggtagagagccgagagccgaaggctggggtccacttctgggtctagggccgggattcaagtttgaattgagtcttgtttatattagggtctcaaaatattgtagtattttttaaaaaataaaataaaaatgaaactattttcaaaaaatattaattaaaagtgacttgtattttaaaatttttaaatattatttttttattcagttttttaaaacataattttaaaaataaaaaacagaaagcaatgtgaaacatgctcaaaattgggataattttataaatacataaaaataataaaanaaattacaaaaatacggttttaagaaattttaaatattttttacgcattttttaattttatttacaccaaatacgatttttttatgttgtattcatgttaattttttgttatctgtatnnnnnnnnnnnnnnnnnnnnnnntgttatttagatgttatttttatgt

SEQ ID NO: 127808 - DNA, 1156 bp, Cannabis sativa
  modified_base (710)..(710): a, c, t, g, unknown or other
tctctctctctctctctcagtctcctctctcggtttccctgttagttcgtcgctgttactagcaagtctcccacaaccacgagacgagggccatttttggcttcaatgaccgcgaaaacttgatgaagaaccagatctcccctctcctaagtttttcatctcctgtctctcttcgttcaccgatagccaggcctagtcctcccaaatctgatcgagcaacaagccaagagctgaaggaggaggaaaaagaagaagaagaagatatgggttcgcattttttcgaactacaagcccatatttgtttttttttttaaatactaccattgttaaataaggtttgttattatttttctctgccatttctggagtttcttcggctttctatggaggtggtttggacacggatgaaatgcagttttgaattttcgggttttaatgtaaagaccgcttaatttaaatttagaaattaacagataattagggtttaattacgaaaattatttattgatatttaaataattatttatgatgatctatttgaattcagaatgcattttgtatgtcatatatagaaatttcatatttatgcatgttcagtgcctggcaacatgcaacgcggtgtatggctcggtagaatcacatcttagtattttagtatagcggggcggtatttttaatcattgggaatgttgagattagtcaggaatttngaatttcccaaaatacccttagtgacttttagtaatttttagtgtttaaaagggcaaaatggtcttttgtatcaagttgtatttggtcttttgtgggttaagttaagctaatttttatgattattggctgagttattttggtaagtttatgtgattaaaataagagtgttatatcattttcaaaaaaaaaaaaaaaaacaaagcaagtaaaggaaactctctctctctctctctcatgaaccctagaagctaggtgggggaattcaatttgtttcttcagcgattcaagcagattttgagggaaatccaagctctaggtaagctcatgactatcctcttaagtatcttgagttctaagaaaaatgatatttttgcatgaattgagttgttgctgctgtggttgctgtgattagttgttgttgttttcagaagcttaaatatgttta

SEQ ID NO: 127809 - DNA, 731 bp, Cannabis sativa
  modified_base (29)..(54): a, c, t, g, unknown or other
aaatgcgctggtaaaagtaacttttaccnnnnnnnnnnnnnnnnnnnnnnnnnnaagtgacatttcttgtagtgtgaagctagaaagcttcaaaacaaggtgttttcaatcaaaaacaaggtgtcataaatgtagttattattgttgctaaaagtacactaaattagttataacaaattgtacttggccactttgattaagattaatagtaaaaattttaactaaaatattatgagaattaaagtttaattgatcaaacaataatattgcaacttcatctactaaaagtcttatattaaaccaaattaattaattagctatcctactcaaatagtcaaggggcctttaattagagccattaatattgggtgcctttatattagaatataattatatttagagtgcctttatagaccatatggaagatttgaagtaacatgtttttgctaatgaataattaataatacataagctttaggtatctacattataaatggtagctgtaatttgagccacttattaaccctctaaatctaattttgggtgggtaaacctccaaagctaccatttggttgacaactttaaacttctcatgtttttcctagttatttacaagcatgaaacaccacatgatcatctatacactacaaaaaaatatcacttttagtgataactttttggtcacaacaaaaaatttacttgtgactaaatatagtatttagacacaaatt

SEQ ID NO: 127810 - DNA, 3637 bp, Cannabis sativa
ctcaaaaagacaaactccatagggtcacgacatcatcttaggcgcctacctttgtttaggacaaggttggtatcttttgtcctgccaacttttgcctggacaaattttgtcttaaccatttttgtgcttttcctatttaattaatttaaaaaattatttatttatttattaacacaaataaataattactatttttccaattcaaaatagatttttctgaacatctttatactactcttaattccctactcttgacattatttcaaggtggcgatttggggaccatggacctataattttaatatcttataaattagattgttttttgagtctcatcaaccaaataatcccttgtttattaattccatgattactccactataaatgtagaattaaactcttaataattatagaattatacactactacaaaatccctttttaagtccatcaaagttggactttataagtattactagtctattttgtgttggacatagtatcaagggacataaaaaaggtatttttctagtctaacaatattgttgcactagaaaaacatatctagtcccactagactggacgtgaaagtgagacccaactcaaacatatctatatagtctaattctactagacttgaaatactataaatttaactttataaaataatattaaataatttatatattatttatattaaaattttaattataaatttactaaaaagaattgtatatataaatatacagagtacttctagaaaattaatattaacaaataaatatacatcatattttatttaaaagaaataaaatacacaaattaaatgaataaaaaaaccccaagcctttttagatctcaaaaaaaaaaatcaaggccactcttcatgcacagcggcctccacctgcgaggagaatcaagctcgcctcctacgaaaccccaaaatccaagagccctcagctctgtgaaaccacaacttctgttcctaagaaacccccaaatctgagaacccgcagctccgcgaaactacggcctcccgcctctacgaaacccttaaatctaaaagatacccacctccgataaaacccatctttgcctccaacaaaacccctaactccgagaatgcgaaccctcaagccccacctatattagcgtcttccctaaaaaggaaagaaatcaccgttcccaaaccatcgaacaccagtcgcgcgtcgttctctagccgtcgatgcccaaccgccgtccacatgctactgaagcccagtcgtcatcaaaatgagaagagaagagaaggttgaaaattaggaggctagggttttttattgtttaaggagatagaggagatgagagaattatttttttctgaaaataatggaagagcattttccatacgccttattgttttttattttctttttattaactaatatggtaggttatgagtaatttaatttccattttctaaaaaaaagtaatttaatttccataccatagtttaaaaaagatccatatgcttcacttgcaatatagtgttggacgagaatttaacccaaaaataataataaaaaaatatataatgaaatttttaaatatataacgtcttttttctctttttagtctaatattaatggacataatacaaaaaaatttctagtccatgattattggacttaaaatctatttaaaaaaaatttaatgtccaacaatatatttgtttgactagaaaaagagacattaaaaaggttatttgtagtagtgatatttattgattttaactgtagtgtcaatttatataatcaattccagttattagccctccatgtgttggttcgtatttagttttggtcaaattactgttaacccttataattacttctttattttttagctccattaattgactagtgaaagtataattcaagatcccatctgaatttgcgcgtaactttctaatactagaattaacacataaagggaaccaaccgtctatctgttaggaaagttaggattccataattttatatcatgttctcagccatcaatattattagattcccaaaatagaatttgtaagaatcatctactttgacaaactttaacgagtgaatcaaacaaactaataacatgaataagggttcatgataactgagaatttagttcaatctactattgatcattattattatatgaattaggtttttatgataaatgacatgttaataaacataacttcatttatatcagcccttgtcatacataatctatattatatataatacatttacttagatgtctcactacatcagtaatttgaacaaagattacttgcaccatagaataggcatcagtgaaccatctaagtaagtataaattaaagattccataactttaatatgttaggactgttttattcatagctaagtggtcttagttctctgtacagctataagccacaacctcatacatgagtaaagaatcttccaatatttaatataaattattcaatcataaatattaataatataatattcaagcatatatcaaaattttaaactctttattaataatccaaaatatctttataggcttttcaaggcataaaccccaacaatcttccacttaccctaaaagtaaattgggcatcaaccttagttatatgacccataaaagattttgcttgaactgtctttgtgaatggatctgctaggttatattctaacatgatctccaagattgtcacatcacctctctcaactatatctcttagtagatggtacttcctctcaatctgcttgcctctcttgtggctccttggttcctttgagttggccacccctccactattgtcactgtagagcaccaatagtttttctacttctagaactacttccagagctgtgtagaatttcttcatctaaaatacttctttagctgcttcacaagcagctatatattcgatttccatggttgaatccgcaatactggtttgtttaatgcttctccagactacaactcatccaccaagagtaaatactaaccaagatatcaacttttgttgactatcttcgcctgattaaaaaaaatcaaaatcaatatatctagtaagatttaactctccactgaatttatacaagcatgagatttcttttttctaaaaatgccggagaatgtgatttatagctatccaatgttccaaacttggactagattcataacaataaacaatccctacaacatagcatatgttgggccttgtacacaacattgcgtacatcaagctcccaactacttttgcataagggtactttctcatgtcctcttcctcttaggagtttttagactttgatccttacatagagtaattccatgtctggatagtagttgtcaattcttggaattctctattaagtgtctttctagcaccttatcaatataagttgcttgagaaagtgataatgttatcgtctttctatgtatatagattttgatcccgaaaacacatcttgcctctcccaaatccttcatttggattttatcaactaacaactattttacatctgataatctttctacattatttctaatagtaaaatttcatctacataaagaactaggaataccactatattacccttaat

SEQ ID NO: 127811 - DNA, 788 bp, Cannabis sativa
  modified_base (368)..(368): a, c, t, g, unknown or other
aaattatttttaatttcctttttttggaaattatatgtgttttaatctttatataattagttaaagcctctctcaatggcattacagtctctttcccacgctcttatctcaagagcacagcaggtaattctctcgctttctctgtaaatgagtcattacatatatcattttgaagcttattaaatctgaaatgatgtataagtttaacttttagttgattgaagttggtactttattttgaagaatttttgaataattttcaagatgaatttattatatcaatttttttatcaaagtttggatttgagtaatataagaggattgtattactaaacatcttttgaaatattatatatataaatatatanatatatatatttatataaatcagagaagaatggacgaaaaaaaacattgtatctatttatttatgaatatactaactgactaaaatactcaacaacaaaaaacagtatccattattaaaacatttaaataaacaaacaatataccttattgtgatcaagtcctccaattgaagcttgcctcgatctggaaattttccttcaaaatggcctcacacacctattataaagaaatttaagttatttatcataaatttgaattagtatccacatatatcatacatacattactatatctaatctaaacatataaatatacattatacctttttgtctttcagtccttgcttttcaaaactcttcaatccaaaaatcgatacttttcataataatatatagatatagatattgaggtttcggatg

SEQ ID NO: 127812 - DNA, 1615 bp, Cannabis sativa
cattactcctaccatcacaaatcagcatcctatgtgcactaggagtaagtctgggattcgaaaaccaagagtgttaatggcttctttatatcccaaaaccattaaggcagctatgcaaaatgaagaagatgaagaaggcagagaacctataggttgtaagtgggtcaatagaattaaagaagatgaagaaggcaatgttgttcaatacaaagcaagacttgtggccaagggttatcatcaacaagaagggtataattttaatgaaactttcagtcctgttatcaagcttgtcaccattagaattgtgttaactattgctctaacaaaaggttggccagtacggcagctagatgttaataatgcttttctaaatggtgacttgcatgaagaaatctatatgatgcagccacctggttttgtggatcctactgctcctcgtaaagtgtgcaaacttcaaaaggccatttatgggttaaagcaagcaccaagagcatggtttgaaaaattatcctctgttttaattgctttaggcttttcttctgaaaaaactgatcattttctctttgttaagattgattcttcttgttgcttgtatgtgctagtgtatgttgatgatatattgatcacaggttctaacaccaccaaagtttcatccttgatcaccaagttacaccaatcttttgctcttaaggatcttggtgtattgaattattttcttggcataaaggctttgtcaacaaagaccggtctcatcctttctcaaaagaagtacattcaagatctattatgtaaagctgagatgcaaggagctaaaacacatagcactcccatgaatagtggattgaaactgtccaactatggtagtgatcctgtgcttgatcccacacaatacaggtctatagtgggagccttacaatatgccaccattacaagacctgacattgcctttagtgttaataaggtatgtcagttcatgcataatcctcttcaatctcattgggtagctgttaagaggattctaaggtatttggcaggtacacttgactatggtcttcatttgcaaagagtttctaattttcaccttgaagcatatcgtgatgctgactgggcagctgatcctgatgatagaagatcaacaactgggttttgtgtcttctttggtgaaaatttgatatcttggcagtccaagaagcaaccaacaatctccaggtcctccacagaagcagagttcagaagtcttgctattgtggtgtctgagatctcttggttaaaatccttactttctgagcttcatgtgtctgctactgctactcctatggtctggtgtgataatattagttcggttatgctagctgccaatcatgttcttcatgctcgaacaaaacacatcgaaattgatctatattttgttcgtgacaaagtcattaacaaagaaattcaggtacaacatgttcctatcgagcatcaagtagcagaatgtcttacaaagcctatatcaagcaacatgtttccaatcttaaggaccaaactcagtgtctcttgctgagaggacacttcgtttgaggggggctgtcaagagaagagagttagttagctgttcaaactaacttttggt

SEQ ID NO: 127813 - DNA, 584 bp, Cannabis sativa
agtaactttttgttataactaaaaatcacatttagtcataaaaaaaattatgttgtaactaaaaagttgtaactaaaaaattgtcactaaatgcagctattttttgtagtggcttcctcccctcattggaaggtatcttttatttttctctttgttttagacaaccttgcttctttgtgttgtaatattgtttgggtgcctagaagattaaataaagttgcccatgtgttggctcaatataggttgaataataattattttggttttttgaatttttgggaggtgaatccccatgtgatcaccaatattttatctttttttttttaatgaattttcttgaagtttttccgctataaaatattattaagcatctcaagaataccaagattctcaaaatacttcaagtcttttttttttttttttttgaaaataaaacgtatatatattaaaaggaaacgaatagtcatacctcatggttattacagaaaatattactcggaatagtagagacttctaccataccataaacattgttggcaaccgcccacttggccacattgtgggccgcgaaattacagtttcta

SEQ ID NO: 127814 - DNA, 1824 bp, Cannabis sativa
  modified_base (1765)..(1769): a, c, t, g, unknown or other
gagagagagagagagagatagggtaagagagaaacaaaacaaaaaaaattctctttattttcttaaaatttattccttttaccaaatatagcataaaggacaaaatgaccattttgcccctagggccaaaaacacacacataagcacataagggcatttaagtcatttcacacataaataatcccaattaaatttttagattattcaccaataattaaaattccaataattcaattcaaattatttttctggcccgaacccagttcgacccgaaataaccggttgtgactataccgccccaatttgtcaaaacacacctgaaaaagacaacacagacatactatataatagtatagtcccataagcaatttaataaattaatttcacttttttacccttctcgggttaaaattactaaaatgcccctagctcttcaacagggtcttaacacgtcataaatcatataaattcacatatattaaatcatataataatataattcctcaataatacataattatctaattatggttctgctaatccattctcatatttctagggtattacaccaaccatcacctactaaggctggccaacacatgtaaagacttggccaactcttgacaaagttgacaggaacatgatctacaagatcttgacaggagcatggtcagccagacctcaacttacaagtattgtatggccaaccagcctacatcctgtaggtgcatggccagccagattttggcctagcaagattttgttgtgtagctctcattcatggacaacaagtgaagcaacaaactgggccttaacaacccacaaaaatagacataatatatctatttaaggggtaatttagtcatttttatttattaattaataatgtgaataatggttttatttacctatttttaaggatattaggcatgtaagctctactatataaagatcagtagtctatctctaaaaccctaagtcattaagccttaaagctcgctaagctctccatgctatgtttgaaaaccctaatcctctcttctacacccctaaggcctccctctttctctctcacacgcctccaaggctctctcactttctcattagtgatttgcctactaattcatacattgtaatcttaacagagctacttcatatcctattactatagtgatctaagtagtattatctctcgatatcaatacaacaaaaaggagaataggtcattacccgctaactaagggggccaaacctctataaaataatgtatctcacttacttttgttttcttattatgtaactcgttgtaagcatcaacattaaatatgactctgctgttggttggctaaattttgaggtcaacaatacccttctatttcaatacgcaggagtgatcgagaacaagatagccgaaactctgctaaaattcctctaagctttattcttcatcaagagaaaccaagagagcagagttaggatttcttgcaaacactattttaaaatcattacacacgcctcttaaggccaatatatagacttgtggactagggttgtaaagaccccatagtttaaattttgaaattagcatataattaggatttaattatgaaaattatttatggatatttaaataattatttatgttgatttatttgagttcagaatgcatttttatgtcatatagtgaaatttcataattttgcattttcggggcccgacaacatggagcgcggtgtatggctcagttgttgggttttatgccctnnnnnaaactcatttcaatataatcagaagatcggaagagcgtcgtgtagggaaagagtg

SEQ ID NO: 127815 - DNA, 785 bp, Cannabis sativa
  modified_base (290)..(291): a, c, t, g, unknown or other
aagtctgagtctctgcttcagagacccttaaatgccttgtgcctcgccaaaggagacagaatgcccaagagatccgaaggtttaagcatgcaccttatgggtgtaaccatgttcctcttaaacctcctgggggctcgagagatgcatgccaacctattctccaagtgtggaagatcactaggagtgtttcacgtctttaatcgtctttcccgaaagggaagcgttgcttgaagtctactttactcccagtgactcttccacccattaatcttttcaagcaaagtctaagnntgaatttttatacaacttcagccttccttcccagaagccaaagcttgttacgtaaaatttcaacgtgattctcgcttgcacgttgtttttcctgcaaaaaagatcactgggggtatgatatgccttgaaccctccttcctggctaagaaggactgcttcaagtctgctctacccctcgtgatgctaccctattgatcttttcaagcaaattctaagcttgaatttttatacaacttcatcctttcttccaagaagctgaagcttattacataaaaattcaatgtggctcttgcatgcacgttgctttttatgcaggaaaaatcactaagggtacgatactccttcaaccctccttcctgtcttggaaggattgcttaaagtatgccctaccccttgtgatgcttttccccttgatcttttcaagtgaagtctaagcttaaatttttatacaactttaggcttccttcccagaagctaaagcttgctacataaaa

SEQ ID NO: 127816 - DNA, 897 bp, Cannabis sativa
tgcggatcggattggatccaaaatatgaaatccgcacgtagtgcggattgaatgttgtttgaccaaaaaagtgcggattggatcggatgaacatgcttaagtataagattttcaaaaaaaacaaaaaaagagcttgtagtgtaagaaatgaataagtggatgtacttatgcgttttccacattattatcagctgtatttatgaaatatttgtttaattagcacgtcattttgtcaagataaataaattaagaaaaaaaaaaaaaaacacaccctgatgttgtccaatacgtgggaaacatttttataggttaagtgatctttacttatagatgtttaaataaagaaacaataacagggtcttttgtctccaagcgcaataagaaactaaagctaaagcaagaaaagaaaacgactgcaaaatacaaaaactacataatataagaaaacataaggaatcaagatccctaataaaaaatgatatctcatatttttgttaaataattttaagttttacacgtaattaatattttatttattaaaaaaattaaatttttaagtgaatcaataaaaatagttagcatatttaatgtaaattaaattaattaaagtgttaaatttaaattaatttaacaaaataggacaacactaatttttataggagatcttaattcaagaacctatatttatgcattgctgttgctgtctaataataacttattacgacttgtgttggaatgaaatacattgctttttgtataaattaaaaatattccaaacttgatacgcaccacttatttggtagaaattatatgtggttcctaaatattcaagtgttagacttcttcatttaatcatactcatattgcataagtattagttaagtttttttttttttt

SEQ ID NO: 127817 - DNA, 1054 bp, Cannabis sativa
aaatgaacaagtaaggagacaaggagtcaccctgacgaagaccacaagagggcgtgatgttaccaaactgaccaccattaacaccatatgaatttatacatttttaatattaacaaacatatataatctaaattaatttttaaaatttactacttttttcaaattattcttccatattcattatgttaattcaataaaaaaatttatctatttttatttttctcttataaaattgctaaattttaagtgtattttatttttttttccttaatatttaaattacattatataaatatatatgtttttttattgaacattatatatattagattgtgagaattaagggaaaactaagtataaattaaagaaatttttacataataaactaaaatttgagaaaatacaaaaatacattaatatggagaaatttttattttgcgatttattttttatttacaaaagtatggatttcagtaaactgttcgatattattttttggttgttttatagtttatttatagttgtaatgaagttaattttttcgttattttcagttgttttatagttgatttgtaaatgttgtaatggttatttcttgttattttttagttattttcttactttttgttaagaaaaatatatttttataattttaaaacttgaaaatcgtatttttataaataaaaacgttaaatcataaaattataaataaaacataaaaaaaatatttttaaaaaaaccctaaattaaaaaatatatattatggaaaacaaaataaatttatactttttgtgcgtacatgataaaactccagatgataattatgaagtaatttttctttagatgtataattagtagtgaaacatgacatgatttttctaattatattgtgataattatattactaacatatgaacgtattaatattacacaatatatatttatatatagtaggttaatattaaattgtgacagtcagtagtcccgtgatccgtaagcggaaatactgggtaagctgtgcaatcccacactgcctggggaaggtcaagtggga

SEQ ID NO: 127818 - DNA, 892 bp, Cannabis sativa
ttgaaaaatatattctcaatatataaatgaaagacttcagattgtgtcagaaaacatattattatgtcatgttccttgaaatgtttatgcatagtcatgaatggtgggctaagtttaaaaggctataaagatctctccacagaccacaaataataccagtctgacagagctctctaattcaaatttctatgccatgttcctttggccacaagtcatagaaaacaaaagccactaacatggctataattttgccatcattttggtcataaatgtgtcccatttagctataataagcatggcttcttctcaatcactaattaacctaatatacctgtaaagactagtagtgtcataatttattaatttctcacaagttcagtcaagttctttaaggtatatttagaaactatcttcaactagcttgataatgaaagcatatactgcccacaataaggtataatataaaaatctggcttagcaaattagattttaattaagtaatatggacatacatgacaattaacttggaaaatgcccattatgcttagcttttcaaaagcaaatgtaaacagagaaaattttagtgaccacagatacttcctagtgcaaaatgtcaaacatgagcacccaatacttaaccaagcttatataatcaagtatccaaagacatcatttttgggcagggttttccttttccttttttttttttattggggacatgctcaaatttggccaaggctgcaagcctgcaactatggattttgtgttacttgatatattgatactggctagattgaagggaaatacaaagaaaccactaaatttttatctggtatgttattttagtatatatatataaaaatatatacttatcttatcttatcttatctta

SEQ ID NO: 127819 - DNA, 526 bp, Cannabis sativa
tatttccataacaatttaatacccttttgatacccataacataattggtcacttaattttgtatcacactttataatagtatatacattatacatatgtgccgacgtaggattttaatccagcacataccacttatgtgcaaaagtggttgttgatcttaattttgtaaattaaatatggggtttaaactccattcgtcacataaaaaaaaattgatgtatttgttaataatatatagtctcttcaaatggttggtgttttcgtccagttcgacactctttctctccataaatattataaatgagaaattgtaaatagtattattagaaatgattattaatatagtatgtgtataagagcattcccatgatcactaactattccatcaacatctttatagcttagttataataaatttgcacaaatttcaataaaatgcatctttgcatatagctatggagagagagtgagctaaaaaaattttatttattttcttactgttataaatattaataattatgtggat

SEQ ID NO: 127820 - DNA, 1209 bp, Cannabis sativa
taattgaacccacaattcaaggtgcgataacactacctgcctcggattttccccttgtttcaccctctcgaagattaatggcgctctatcaaacgtccatgggcttccttctataaccctttcaatgtccacttcatggtaaaattgaaaaaagaataaattcggctctagttccttcacataaagtccccttcctggttgccatagagtggcgattttattctgcattgcgtgaaaatcgatagaacaatttgttaagaacgttcccaccaaaagccatctatcgtctatttccgaagaatcctcaacaacattatcaaaaatcagtccttcctcatcctcatcatgaatcgaaaacgcagcagccatcctctccacagtatccccttgatccattataatcaaataaatttacttgagacaaaacaacaaagcaaaatgatcaaaaccaaaaaacagtcaacgaacaaacaaccatgtcaaaaagacaagactagttgatgttatacaatgttatacaatgttttttatattcttgttctttgaaatccttaaatgacatgggtaggttgagatatcctttaataattgaattgttgattatttgaagagaataatcaacaaaacattgacatccttatgtggctttcttttattggtcttataaggcacttatgtgaatggaagaagccaatgattgaatcctagttctatagttcacaatacacagaaaatacaatctttcagcaaaaaaaaaaaaatacaatggaccatttcaaccaagaacaagttaacaaccatttgtttttaattttgaggaggaagttacctaattttaatagtttttttttttttcattataaaacgaagcactttacagttttttcactcatttatcaaagtggaccaattgaaaaataaattagggtgtatatcacgagtattgattcaatacataaatattcatggtatatttcttttcatttcatacgtgcaccaattaaattgctttataatggaggtattaatatatctattttaagggtatctattaaaaaaatttccaaaaaaacattaacttttgggtgattctacgataaacccccttaaaaggtatgtattgatgcacccttgacttgtttcggcatccagaagaattttttagtctatttttttttttatattcatatatgttatagctatttaaga

SEQ ID NO: 127821 - DNA, 1003 bp, Cannabis sativa
tattattattattatcatttcatttcattcatagtacagaaaactccatttaaactgacagtttcaacattcttgaatgcattgtctataatttatttatgaatatgagttaggtaaatgaaatcaaaagaatgagtgtttttttttccttttcttcttccaccccaaaaaaaaaaacaaaaaattgtgaaaatgagatggaatttaattttaagttagttgttacttggaataaattaaaaccattattctttttaatcaaaccaactgaagtgatagtgatttaataaatgcacatgactgtttttaaactctcaaaaccaataaaaatagacaatattaatattaataataaattcatcataagtagacaaatgggttttaaaatttattccttgtatgaattattaaagctgaaaaaaatgcattgaattgataaatatgggcagaaaaagatgaaaggttttaaagaagagaagaacagtatagaggcaaaggcaaggttaaggaagggttgtccttattcacatatcaaaatcctatattgggaaccaggttaatatcctgttcccattttgggacacttttattggaacatatatattgtttttttgtttcaaattaataagattccactgttgtgttaaattacatttttaccctcactctctctttctttccccctcttttgattcccgcctcctcaccggttcacctgctctacctgtcattctcagctttttttcccggttattacagcaataccgcaccttattattattattataaaaaataaattaaattgatcgtaattccaaacatttcacaagtaaccctgaattatcaattattcactaatttgtaatttaaagagagtaattatatgtgtacctaaatattatggagaattttgataaactccgtatctgtaaaaaaatattttagtctaatttttttataattatttaaaattatttgtaaatttttttagaaaatttcaata

SEQ ID NO: 127822 - DNA, 507 bp, Cannabis sativa
ttgactataccaatactatgcaagcaatagaagagacaatcgaggtacttattgattgttttgataatacgaaagtattaaaaattggttctaaactaacttttcagcagcgagaaaagcttgcacttttctcaaatagaatctggatatttttgcatgaaaaaattcagacatggtcgaaatatcaccagaggtcatgcgtcaccagttgaacattgactctgaactgcgaggagtacgacgaaagtgtcacaaaatggacccagcgaggtaccaagtgcttaaagaggtggtggatcatttgttggtatgtggcttcataagggagtcattttaccaaaggtggttagctaatcctattcttgtaccaaagcgtaatggctcatggtgaacacgcatcgaatttactgatttaaataaagcttgtcccaaagacaactttcctttaccaagcattgacaaacttgttgatgccaccgcagatcatgaactccttagctttatgga

SEQ ID NO: 127823 - DNA, 1776 bp, Cannabis sativa
  modified_base (275)..(278): a, c, t, g, unknown or other
acaatacttgttgtgactaaaactaaattaataacaatttgtactacatactatgttttagtcacaagtaatattttgttgtgactatttaaattttaaaaaatcaaccccattcaaatgctttcattaggtgatgtaataaaatgaagattaggggctcgtttggtacagcgtataaaggtcatattgtattaaataataattaacactatgtttggataaaaaaatgtattgtattaattattacgactaaaatttttaatacaatgtatgtnnnnttatttaatacataacaaatggtttgtattataatatttacaaatgatttggggttaacactaatctccaactcgaactcggacttgggacccggacccagacccgaacctaaacctagccgaaacctggactcgtatccaaacccagacccagacccgaacccgggacctggacctaggacccggacccaaacccgaacctggacctggacccagactcggaccgggacccaaacccagactcggacccaaactcaagacccagacccggacccagaccccagacctagactctggactcggacccaaatccaaacccagacctagaccctagactcggacccaaactcaaacccagacccggacctgaacccggacctaggaccgagattgggacctgggacccaaacccgaacccaaactcggaccccaacccgaacccggaccccaacccgaacccggaccccgacctcgacctgggactccgacccaaacccagaacccatacccaaacccaggacccgacctgaacccagacctgacccaagacccgggactccgacctgaatctgaacccgtagttgatgttggggttaagtgtattgaaaatatattataactttacacgatcaattaatacaagtcaataccaaacattgtattgtacattgtattgtattaaataatcctactataatacaatacaatacaatcaaatacagtataatacaatacgatacaatacggcgtaccaaacgagccctaaatgtagagaatactattgtttcttcaaatgttgtttaattagtttcatttattttttcattttttataaattagaaattaataaaaatatattatttaaataatagagataaaaaaaattaaaaatatatatggtataatataaaaattaactataaaataaataaaatacagttttcgtgatatattttcagaatgctctaattagtactcttcttaaatttcatatattttttttaaatactcgtgagattcaatctaattaatcaatcaagtaatgggttattaaattatatatcatgaaaaggaattattcattataatgaattataatatatattattgctatatatttgtaggactgccttcaatattttagctagaggaccactacaagaaaaaaaaagtgtagtttataaataatatttttaaatagtatcatatggttatatattttacaaaatacgaaaaaatttcaattattttataaattgttattgattgcaatacaataaaaaaaagacaaaaaaaaaaaataaaatgtttgaaaaatataataaatattaaataatagtaatgattttttatttttttgcttaaaaaagtaataaaattgaaaatgagttttgagaattggtatggaagtgaccaataacaagttgttagccccttgaaaaattaggttcattaaaaaaaattaagggattatttcacaaaaacataaaaacaacaa

SEQ ID NO: 127824 - DNA, 549 bp, Cannabis sativa
gagagagagagagagagagatgctctaatttaatccttagggttatatgtttagatattcgggtttcaattaattaagcaggcttttttttggtgcctcatatgcgttcatttgtaattaatgctactttgcattggtttaaaactgacgtaaaagagctcaacgccaagttaaaacttatgcaaagtagcttaggttacaaacatatgcaaaagttctaaaccaattaattgtattagttttaggtattaaatgatgtgttgtctgattaaaaagtactattttagattagtgactaatcttatttttgatattatgtaaactattcaattttttttttttaaatttacaattagttttaaataactacaacatacacaattataagaaaataaactaataaactcttttatatgttgaatgtgacagttaaaagttctgtgatctgtaagggaaataccgggtaagctgtgcaatcccacaccgcctgggaaggtcaagtgtgatgattctgagactgtgtatgtatgtgactacatagttgaagag

SEQ ID NO: 127825 - DNA, 579 bp, Cannabis sativa
ccactcaaagagctcttgcatccaccactagaggcgatggtgagggagaaatttttctagagaatatggcttggaaattcaaaaatggggattttgaaagtctgagatactgaaagagaagaaagggattgggaaaatccttttatacctcagtcaggatcttttttttttgatgaatcaggaaatgtgctggctcaaaaactttgtttacaacctaatagcaaccaagtagggcctaaactaatcaactatacagttatattccataaaacttttaaaaaaaatacaatgctaaattacaatgtaaaaagccatgctttatcttcattcttgatctttttttggctagaaaagttttattctttggattcaaccaactttgatctctttggacaacttagtcgtatcatgctgctctttctcccataagaaactgttcctcatcctccataggtggtaaaccagacttgcaatagcagctgcaagaaccaatttcctgtagctactaattttggctcttccaatttatcgaataaggttggaactgttgggttttgtgccctaaataaaacccattac

SEQ ID NO: 127826 - DNA, 1265 bp, Cannabis sativa
ttatgatattaaaaaaaattaaaagttaaaataaaattaacacacgtgacttgtcacgtaatatctatctagtatatatatatttatataattgaagttcatataaaagcaattgaatatataagtataaattaatgttacgtatgttacatgtgttaattatatataattaattagtaccatgccatttagttttggaaagtaattataattttacatagtttaaacgttcatcacaagtcaattttattgactaaacaattttctttttagaaatttacaagttttttattaatttataacatgatttacatgaagaaaaaattgctagcatgcatggaaaaaacgcatgacatgtatgaaacatgtggacaccataaatggtgaggcctaaatagctaaataatggtgctggtctgattcatattttgaaaagtctgtaataatatgagttttgttgtactgactcataaaaagatatgaatcatgttaggttatgccaatattttaaaagataagtccgacacggcctataaacccacattttcttgtcgtgcttgaacttgtgccaggctgtttttcataaacgggtttgcctatttttcataaataggtttgcccgtctttttatacgagtcaaactcgagcttcatcacttttctatttttttcttacaattaataaattaatcactaaattatatgtattttttatagtttaaattatttttatataattttttaacaatactttatacataatcatataaaaaattaattaaaatgattaataattaaatattttttagtaaatacatatgtattcattattatttcgggcttattctacaatatcgtgttgagcctatattttgtgtcatgttgtgctgatttgcagtatcataatgtgtcatgcttaaatccatatttttcatgttacattgtaattgtgcctcccgaactcgtctcagatttacaactctaagcttaatacaaaatttattatattttttataatttttgtatataaaatatatatttttgaaagaaaatgagagccctatttatatatatataatatataaataattagcatttttaaaattaggaagaacctcacacatataatgcttcattaagttaagtgaggccttataaaattggagtttttataaaaaatactatattttgggtaaaaatttatagttttactgtcataaaaatttttttacaaaaatattatctttttacaaaacaaccgtaaaa

SEQ ID NO: 127827 - DNA, 595 bp, Cannabis sativa
  modified_base (549)..(570): a, c, t, g, unknown or other
tatatgtgtttaattatcgttttacaaagttcatatttagggtgttaaacaaggtacttgtaagtagatctaagatcttggtaaaataaattccaacagtcttgtgtaaaggatgtagtctcgggtaaagggcgtggcttgaatttgattaatggtgatggtattgggcttgggtctaggccgagtagtagttttgtgcctttgttgattgggttggagagtaatggtgaaggcaaacaaatgggtggtggaccattgactggggccccacacactaactctcttcgggcgtgtgagtcttttgggcctttagggccgacgtctttggaggttaatgagcctaaggatttttctacttgtgggtaggaggcccaactaagccaaaatgaagaaagggcttttactaattttttccaacctcaagaaacaactttacaagagttaaaaaattttggtagccttgacttgtatgagattcgagctttgggtggtgatattggagtcttggctacatctgaaactaatgaaagaactgttggaaattatttnnnnnnnnnnnnnnnnnnnnnnacaagtatattgattaacaccctaa

SEQ ID NO: 127828 - DNA, 836 bp, Cannabis sativa
attttccaagaagaaaaaacaattatcattaactaaagataatgtcaatcaacaatcatcatctccataaataggagcttagttcataacatccataatcaaatccataattaaaattgaaatagaaaatagcatagaaaaatgaaagagaagagaaaagaactagttgaagcaattgatccaggtcgccacaagccgctcttcaagtctcctcctttgtttctagggctcgcaatctgaataataatcacttttcacgaacttccatctaaataaaccaagccttctcattaaaatttgtgaaattacaaaattatccaaaaattgggtcattaaggcttcgtctcggcgaagctttttccgcgtcgcggcgaagcttttccccgtcacggcgggatttggcagcaagcaaagaactttgtacattttctttcaactttttcatctcttgtcctctattcttgtaaatacttcctttaaacatccggggacctaaaaataaaagaatcaagcgtaaaatagccctaaaactagaaacaaagaacgaaaactacccgaaaatacgacccaaaacttagactaaaattagcctaacaattctcaactctcaatttctaacattggtgatagttctatcacagctgatcgaattctatatctaaaaaatatattacatgtgcctgccatttccaaaaatgtcattagtatatctcaattttgttgggattttatgccctaaataaaacccattacaatacaatctgatttgttatcaatagaagattaaaagtcatttatgtttacatgtagttttcatgtttgtggtttaatgtata

SEQ ID NO: 127829 - DNA, 1179 bp, Cannabis sativa
agagaatgttgtaaatagagtcaaggaaactacaaaagttagaatacttgttgtgtggccaaaaaaagttagtataattgattaaacatggtttcatacattgtaaaaagcattgagattttgaggtcttctatttgaagatgctctttagttgtaaattggtatagtaaatgaatatacttgctgaatttctatgaatttctaattattcttaaaaaaaaaatccaaattattcttaaaatatattcaatttttattttattcacaaacacatatagtaaacaatcaaacaaaaattgttaaaaatcaaataaatgttgtaaacaaactaaaattttgtcaaatttttattttatcttatttatatttaaaactcatattttaaaaagcaattattaaaaattaataaaagtataaattattttaaaaaatagaaaattaaactaaaaatttatgtttacttgaaaaaaatctagttttctagagaaaaaaaaaaattcaaacttgggcccattaaattaaatttttacacatgcaagtcatgaattttcgatataattttttcatatctaaataaattttaaataaaaaataattaattataaaaattttgattttcttttttgttttttaaatcattcaaaatgattttttttagatttgaattaattgtttttaaaagaaatatatattgaatttttttatattttcttttaaaaaggactacgatttgatagtactatttaaaatttaggggacaaaaatattaattaacaatgatagtttagcatttaaattttaaatgacaaaatgagacagtacttaacaaaatgactaaatttttgtaaattttaaagtttgtaggaaaatattaacaagccatatattttaagaattatgatttagtagtgtattcataagttcaaagaataaaaatgctacttattaatacgcagaaaatcaataatttttattgtacaatttacaatatgttatataaagaattaattaattagttagatatttaagaatcataaaagcattaattaaaaaaggtaattagaattcactacaaaaaaattgttacttagtgataatttttagttacaatataatttttttgtaagtaaatgtgacttttagtcacaacaaaatgttattacttgtgactaaaacata

SEQ ID NO: 127830 - DNA, 735 bp, Cannabis sativa
tgtataaacagaatgattgaacctatatgaaaggtccagccgctttagtaaacttcttatattttagccagaagaaaacaaagttactaaatgcttgtattttagacatgcctactcttgtattacaacttagatttttttctcctttataggcacttgaggtagcaggtcacgtagcaggatcatccgtctctacatcacctctcccgtacaacgccatggccagccagtgtgaagcccttggcacaggcacaagaaagaagctctccaattggttggcccacgaaaattatcatggcaaagcagctgagaaatcttttccagcttttcccttcaataatagccgcagaactctccaccaggttagtttatggggcataactaatacatgaacctttctcatgtcgattttctaaaccacaaatcgaaactagctttaatctcattttgtttttaaatgtttgaactgttagcatttcttaatgaaaatgattaatataaaagttatgatgccatttgaaacagataacaagtgagtgtgaaggtgaaagtagtggtcctggccagggagctgcatttccccaggatccatggttgtcgatgaggcttcctcctgctagtccctttgacaattttctcaaggcagctggctgttaaaaggctactactactataaatctaacactatgtcaaagtgcttatcagtgttgtaaatcactaggagattcactgttt

SEQ ID NO: 127831 - DNA, 2076 bp, Cannabis sativa
gtcttgctagagagtcttgtttttcgtcagattgtgtttttaatcagcataatgtctctgctggtttcaagtctattgtaatggctgaaagtgtttaaataaatttttcactttgactcaagttatctagaaaaatagtaaaaaatatatatactcttcatatatcaaattaattatcttaaaaaaaatagaccacaataatattatttttagatcaaaataattaataatttaatctgaaaagatttttgaaataataaattgagagagagaaagttaataaaaaatgataaaacttatatattttgttagagcattgttataaggcaccagtggtgcctagcaccttctcgacatgtcacgttgcgattggttagcgataatccttaaaaactattatattaaattatatgtgacccgatacttagttggaccaatagcgatactgacacataggaggtgctaggcaccacgggtgtcctttagcattagaaagagaaaaaaaaaaaacaaagacggatggatggaaggaaaagaagaaaaggattattctagtcaaccgtattaatagcaattaatttatcataattatatttattatgattttcattattaagtctaatattgaatgttacccttcaaataagagcattgctattaggtaccagtggtgtctagcacctttacaacatatcgcgttacgattggctagcgatacttcttaaaagctattatattaaattatatgagacccgatacttagttggatcaatagcgatattaatacataggagggtgctaggcaccactggtaccctttaacatttctcctacaataattatacctcagatataaattctatcacttcctacatgtagccaaggatatagctaaataaaacacaatattctctattttaccttttggtttacctcaggtgatgtatgtttgatttaggattctttacctatttttttatgtagcgtttgattggaatgaatgaaaacatagaaatgaaaatggaaatgagaatagaataaaatttaaaaaaaataaaaaaaattgataaaaaaaattattaaattttttctaatcatgcattggaatggtttttcctttcatttcaaaatagaattgtcattcaccaaaatggtagaaaagtcattctattataatgacattctaacactttaatatataactaaataaaagaacaaaatagagattgtttcctttcctttccattctattttattatttccaaccaaacgtcaccttagttatttagctactatacctttgttgccggggatgctcttagttgatgtggtggtaacctgataccaatatcaataataaaagtaaaatatgtaacctaccataactagttataataaataatagaggaatttattgtgaaatttctttatgttttaatttatataggcgtttgattggaggtaatgaaatggaatagaatggaaaggaaacaattttcattctatttctttgtttggttgcatataatagtattgaaatgtcattctaatggaatggcatttccactattttggtggaatgactattccattttgaaatggaaggaaatgtcattctaatgcatgatgagaaaaattttaataatttttttatcaattttttttatacatttaaattttattccattcctattcctattcccattcccattctcattcctatccatatgttttcattcctcccaaccaaacgccaattcttttattttttttcttgtgaaaaaattctcctaagtttactttttttatacataaatttaaggtgttagttagatattactgttaaataccaactaaattattattgtatcgacttcaaaattttattgttacatatacacatgaatacagtagtcatctagttaatgtttaacggtaatatttaattggtgtgtcaaatttgcaaataaaactaaacttagactatctctaatgggagatgtaaaaattgtgttatatttagcacaaaaagtagttgtgtggtaaatttacatcaaattttaactttgtgctcca

SEQ ID NO: 127832 - DNA, 637 bp, Cannabis sativa
cactggaatatcttacatttgtgtaaaatgttactaaaacaataaatgtcacctaatgtaggaattagttacattttctaatgtcatttattctcatttttggtgtagtgaaagcaactattattatgtataaacactaaatattaagaaaataaagaaaatgtttttaaaaaataataattaataaataaaaaatacttttaagaacgataaaagtctgtccttaaaatttgaaaggcactccacataatattttatttttataattattatgaataaaatatttatcaccctaaaaatattaaatattgtccttaccaaaattttaaattgaaataaaaaaagacaattattagctgctaatgaatatcgtctctaaccacaggttccctatgctcttttttttagtgaattgtctttgctttatttgtagctttgtaataatggtgaatatgactagttcgtatgagaatgaaatatttattttcttgtgaaattactgatatcattgctttattaatgttgtacatttatatttagagatttttacacctcatgtcaaaattgacaccttttttacatttttatccatacacggttttttaaacttttttaacttttacatttttcaatttta

SEQ ID NO: 127833 - DNA, 730 bp, Cannabis sativa
ggattataattgaagagaaaaatcacatttattctatataataataataataataactagttcatttgcaagggaaaatatagaatatttagtaagaattttaatgtaatattatatatgtagtgttacttgtgatgatggtagtggggatataataccccttgtagaggaagggttggagtataaaatatatataattgaccaaataaaataatcatttataattattatttttttttaaagataatatcttattttaatttttatcatatatttttttatcatatatttttttatcatatatttttttatatacttgtgatgagacactaaagcaaaaagaacttgctaaagaagaacttttcatttttttttctttttttttgctgaaattgctcaagaagaacttggttaaaagacagagctaaaaaaacatagtgcaaaccataggtgtaaatatataggtcgtcgtgtcgtgtggtgctttgaaaaaaagtgttgtgttttgcaacaattttataggatagacggcatggcccgcaagtctagtattttcatatcttgctctcgtatttgtgttgtgttttattcgagttgacccgttcttaaatagaccaacctattttcttatacgggctcaaattcttgttccatatttttatatttttattataattaatgagctaaatactaaaatatatgtttattttatagttttaattatttttat

SEQ ID NO: 127834 - DNA, 767 bp, Cannabis sativa
  modified_base (693)..(704): a, c, t, g, unknown or other
atctactactactgagtggcatgcaatcaaaacaagcctataatctacaacaattgaggagcacacaatcaataacaacaagaatacacagttcaggttcaaaatttaacacttcataaatctatacataatagattacatactctgatatataaaattataatccctaatttttttattttttgatgagccaacactaccagatcataatataattatacataatgataaagaataacaatccctaaaatgtatatttaataattgatcttgcatataaatccaaaagatatatattcggctgcatagattcataatcatgcccactaaagaaaaatggctaaatagagatattataccagggtaatccagttcatgacaaataaataaacatacacacacaaaaaaaaaatgaatcagataaaataatataaatacacaaagaaagatggagagattgattgtacatgttggagcttgaagctttgctaccgcctgtccttcgtcgagcactcgagattggggtcttggatggaagccgtcgagaaagagagaggttgggactgggacggacggagtcgtccttaaggctggggctgaggtgagagagtgggagtcgtcggtgcggcggggttggagatgagggagcgatggagccgtcgtgaaaaataatgggaattttacaaaaatacnnnnnnnnnnnnaaaactttacaattatactgggacacggcaaaaacaacatttttactgtcccagcccaatttc

SEQ ID NO: 127835 - DNA, 1243 bp, Cannabis sativa
tttttttatgaatgattttttagtgtatcattttttatacaatatttttctagtgaattattttattattattattaatattattattatttgacaccttaaaatatccaacactatacagacgtgacacttaataattggttaacagtttctcatattatttattaaattaaattttatgaaactcgatattgaaatgcaccaataacgataagccaccgtgtatggtgtttagcacctactttagtatttttcttatactctccaatgaatagtgtacaatttgagctaaaaaaataagtcaatactacataaaaattcaattaaataataaataaaatgtaaaaaaaaatgattaattatattaatacgtggcaaaagattaaataaaaagtaatatttattgtgatgtaaaatttgtctcatgctatattttgtgccaaatttggcataactttaagcatgtgctaaatttggacgactttatacaccaccattagagattacttttatgaagatagcctaaaatatgcatatatactacacctttagctttccattggagatgctcttaatatgtacatattcttattcgctttaattagaattttaatttcttttccaattatattgtaataccctaagattaaggaatcagattagtaaactctaactagttaaatattattaatgtagaattatattatcatataatttaatatatggaattatattgattgatgacattttaagaccccgttggtgagccaggggcatttttctaattatgacgcgagaagggtaaaatcgtaattataatgatacatcgtgcttatggattatattattacatagtatatgtattctgtctttctaaaagtattttctgacaagttggcgcggcataatcacaatcggatattttgggccgaattgggttcgggacccgaaatacattttagggatttcattttggctttatgtgaataattgagaaatctgaaatttatatatgttgtgtgtgtatgatttatgacaattataccctgatgtgtgtgtatgagatttattggcctaggggtattttggtcgtttgatcatatttgatatatttaacaaaatggaatttgaactttggggaaatgttacgaaaattataaacactacgcaagtatacgcaatcaagtagtaaactcacacaggtgaggtcgaaccacatggaattagattaaatactactaaa

SEQ ID NO: 127836 - DNA, 2075 bp, Cannabis sativa
  modified_base (284)..(299): a, c, t, g, unknown or other
ttcttaatcaatcttttggattaaaaccagacccggacctaaattccctcctcacggccttggcgttgaacccgacttctgacccaaacccgaacccgaatccaatcccggatcttgacccgacttaaataaaataaaaaaataaaaatgaaaatgaactttacagaacacacttttgttttctgtttctaaaattgaaaaacaaaagtggttacagaatgcatttttattttttaaaaataaatattttaaaaacaaagattttactttcattttgtgattannnnnnnnnnnnnnnnaagtgttaccaaacggtacctaagattttacttttacaattgtggataacggtaattgcaactttttttgtaattgaggaaaaatatgatggtttttgtatgaacctatcaatacaaagcactaaacaaaaacaattgaagacaaagtctctaaggcttgtaaaggttaagccaaagagaagaaccattccattatttatagagagaaggatatagagaaattgagaaaccaactaaagaaaagacggagcaacaatgtaacagaattagttacagttaggtacaaacagtaaaaacagaaacaactaattaactgtaggagttagttggttgacatcccccctcaagcaaaatggtgtggtgcacacttgaagcttggtttttaggtagttgaattgctctttatgagtggcttcgtaagtatatcagttgtttgatcaatggatggtacgaacctaacttcaagttgtttagctaaaatctgatctcgcacaaagtgcagatcaatttcaatgtgttttgacctggcgtgaaagattggatttgcagcaagagatgctgcaccttaattatcgacccagattacaggagcagctggtaacgtgaagtgcaactcagacagaacatagcagagccatttcacctatggtgctatattagctaaggctctaaactcgctctctgtactgcttcgggctactacattttgtttttttgctttccatgagattaagttgccccctaaaaacactgcataaccgccagtggaacatctgtcattgggtgagcttgcccaatctgcatcagaataggcatggagagacaaatgtaaagctagtctgagatgaattccctcatgtatggtacctttaagatatctaaacaatcttttgcatgcttcctagtgcacattgctgggagcatggatgaactgactaagcttattcacaatgaatgtgatgtctggtctggttaaggtcaagtactgcaaagcacctattgtacttcgaaactgagtctgatatgcaaaaggttctccattgtccaatgtgagaacatgagcagagctggtgggatttgaagcaggtttagccccttccatattgagttttgtgagtagatttgttatatatttggactaggacaggtacataccagtggagtttcaaagtaccttaactcctaaaaaagagtgaagggcccccaagtctttaagagagaactctttgttgagttcttgtatgaggcacctaatactagtcaaatttggacctgtgatcaggatgtcgtcgatataaaccagaaggataatgagatgaggtcctgatccataaacaaacatggaggagtcagctcttgaggctttgaaccctttactgagtaatgtattcttcagtttttcattctaggccctaggtgcctgttttaatccgtaaattgctttatttaatttgcaaacatgagttggttttagcttgtcttcgaaccctggaggttgaaccatgaaaactatctctgtcaaggtgtcattgagaaaggcatttgacacatctaattgggtgactttccactggtatgatacaacaattgtgagaattatttgaattgttgctggttttacgacggggtaaaagtttctgagtagtctatgccaggagtttggtgacatccttttgacaccaatcttgatttgaatttggcaagagtgccatctgcattcaacttcaccctgtgaacccacttgtttcctacaacatgctgttggaatttatttta

SEQ ID NO: 127837 - DNA, 1490 bp, Cannabis sativa
cacattttaggatgggagtgtcccgctcctcttgaaattgtatatttttactctgtcaaagcagtccccacgaggaagcaatgtgtatggggcttctattatctcgagacccacacaaacgaccataggattgtagtgaggtttccaaataagacagattttaaggagacttttttctggaaaaccggcctttctcctatcaacacaattgcatttcacatgatacgtaagtaaactttatctcaaaaacttgagttattttcatttttacggctttaagctcgctcacttatttcatttgttgtgttgacatcagtcactaaaagaccaattcctactcctaagatggtcgaccgccataaaatcctgttgggtcttccctttagattgggatcgactcattttctcttgaatgaagccaatttgagattgtcagccttctcggctcagatgagtacacttgtgactacaagtttctaaagtactcttcgtgggagaaggtcccagtttcagctgacaaagagagtcaggattacgtggcttgcatacactatcgccagggaataactcctcaggaagctaaagaaggaacctcccaaggtatataatcaatgtggatggtcactaactgtgcttagagcagaacgtactttgcaagtaacattccaagatagctgatataatttttacacttggaaccctttcctcgtaaaccgtatgtcacagaggcttgatagttggtatcctaggtttcatgtctagcttagttgtactagttcatattatgggatcgctgagcagtatgggaccaacctagacagagcaagccacccatattaaaattggatttagatccaattactattatgacatattcatgatcacgggatctagggaatttagtaactataatagttcgtcctcgtcatcttttgatgattatggtaactctctttaagtgggagtttgttccctattttattttcatttattttttgattaagtgtctgatgtatctcttttgtctcacagatatggacctagacttcgagaatatgttcaatagcccccgcttgttgaaaaaaaagctaaaaaatgagctgccaggcaaacgaaacatcgagttctattaaagagcccagaaggacaaaactactaccaacaagaagaagacctcaaaccaacttactatcaagctagcagagtctccagataaagctgcgcctactgtggcgtgcgccaatgaacaacccactgggtttgtacatcaagtgaaattctctggttctaacttggagatggttcttctcgagccctcctgcccctttcccctcgaagttgggactgaaggttcataactctactcgctgcatgctaccaacagctggcgacactatcaaacctttgaatccaatgactgggatgttgggttttatgccttaaataaaactcatttcaatataatcagacttacttattaatatagatca

SEQ ID NO: 127838 - DNA, 1045 bp, Cannabis sativa
ccgatccaatccaatatccaatggatgttggatcgattggatgactgaaattaattagatcagatggtaaaatctagaatctaatatataattggattaaatttggatagacctaaaaacattggatgtgatccaatgaacacccctagtcaggatttaaactttcaaaatcccattaatccaatgcctgggacaacttggcagagaaatatggtaaaaagggcagttgcaatactcgagtatttgcctgacagtttgccattaataaaggtgtcaatcgaataggtggaaatcgaatcattttttgccaaaaatgaggaaagtaattataaataataaatgacctacgcttgtgttggatgaggcccggtgatgtcatttctagagataagtagcaagtctcattatacaaaggtgtgtaaaataagacttgggggtaaatgttgccatgaatttcttccaacgcacgtggcaagtcaggaataagctatgtggcaggatagcctaagcaccaggagtgattatgctaaacctcttgagaaaactgttggggactcattggccatgtccgggaagtcctccaggagctcaagttaaattttgctagcctaaggaatcaagcccacctcaaggagctggatgaaatacacaggtccggttgctaggtcccaaacttgagtcattgtggatgcattaaatgcggcatggagaaaacatctgggagtggtcttgaaaagacgtgacaaagggtttaaatccattattctataattacacactgccctatgatccttatgacggctgcataataaactatcacttcaatccacaagggttaagggcttatgtcaccaaatacctagagaaagcctatgcaacctaccaagcatacaaacatgccctattatctaattttggaaacttatgtaagtgatgcttctacacttacgacaatagtaacattttcatcatttttatgagactataaataccctaactacattttgagaaaggggtcaaaaaaaatggtgtaaacaccctctgt

SEQ ID NO: 127839 - DNA, 875 bp, Cannabis sativa
agtatgatggagaatgaggataatagttggaacactccatttatcctttccaactttaattagaagctagaaacatacttgccattccttcttcaattttccagtaataggacaaaaggatgtagtcccatgatcaatcagggaggtactcgatgaaaagtggttattgggcagatattagagcttattcaattttgcaagcatctacatctcaaggagaatctaaatgatggaaagtgtttttgaaacttaatatttctaacaaagttaaattctctctttgcaagcgtctctagattggatctcgaccgatgtaaacctttctaaaagaggagtggattctgatggtttatgtcaagtttgaatccactgctcatgccttgttttagtgcaaataactcaaaggtgttgggagtttgttcttttcatatgcttaccggtttcccaaaaggtattatcttatatgaggttgtccttaagttggcaagtaccctttctttttaaggaagtgaggatttttgttgttatttgtttgagagtttggcatagaagaaacaagtgggtccataacaattaattgtggagtggtagctttacaaaaagtgaggcagttgaccttcttcaaagttcaagatcaaatgacctctcaatccctaaccgccatgtccaatcaaactccaagtttgagaactctagtttggcttgttaaacatttatatgtatgaaataaaatatatgtatgtgtatatataaatacggaataaacgaatctatacactatataacttaaggatcgaaatacctccagccattgattttgagcttcaatcccacacaagctttgatctgcgaagaaaactgattgatgtgggtaa

SEQ ID NO: 127840 - DNA, 634 bp, Cannabis sativa
ctatagagtaactaagatgggaccagcaccagaattgtgctcgttggaggagtcatcaacatataatttctaggaaggtccactgtccccctaagctccagtatgaggcatgtagacctggtcttcacaaatcatatgatcgtctttgtcatggctagtgtattcaggaatgaagtctggtaatgcctgtcctttgactgttgtttgaggctggtaggtgatctcaaacggacctagttctactgcctacttgtgtaggcaccttgatgcttctgggttcatcagaacttgcataagtggttgattggtgaacacctttattgtgtgattttggaattacgacctaagttttttagaggctaggacaaagcattaggctagcttctcaattaggggataccttgaatcaacctcaatgaggttcttgttgatatagtagaacgggtgttgtacttcttcttcctcacgcactagagcaatactagctgcatgcttcttgatttccaagtagatgtatagctctttaccatctattggctttactaagataggtggcttgactagatgatgtttgattatttggaaggcttactcgcattcatcagtcaattcaaaccccttgttgcttccattt

SEQ ID NO: 127841 - DNA, 574 bp, Cannabis sativa
  modified_base (450)..(451): a, c, t, g, unknown or other
  modified_base (533)..(538): a, c, t, g, unknown or other
ttggtgggttcacaaggttcttgggccttcaagccaatgtgggatgccagaggaagaaatgcatcaagatttgtaaaaagtgatgaacttccttttctttatatatcttggtgtttctatatgttattatagttgtggagtgtgattacttagtcgatcaaatgactaagagaatcagaatttggagcactcagaatctctcatacgcttgatcgattcggtgcttttaaccatccatgcctatttggctaaaatggttctcccaaacaaacaatatcttggtgatgaaaaaaaaaataaatattattttggtttttgtgttttgcaaaaattattaattaaattttttgttttattaaataacaaaatagactttatattttccaaaatggtaagaatatgactctaagctcaatttttaacaagtttattttttaatataaccaactnnaagacaatttctaacacgaataaatacagaaaatgtaaccagttttgtcaaaacatctagatcatattattattaaattttnnnnnnacaaaaaatcagttcagggtcttatttgtacaattt

SEQ ID NO: 127842 - DNA, 1509 bp, Cannabis sativa
tgagaattcagattatcatgttcattagcatgagaagactctcctgtatgtaattgccttggttgtggatgaccacgcaggtgaagttgagggacagttgcagtgagactcttcttagcaagtcgtgtcagcaaaggccaagtatctcccttggcgaaatccgttcgataacgatcatatgaagaagtaggcagggccgaacctttaataaagggctggtattccaaggcaggttcttcaccattatctagtttctcaagaaaaatggaacacttgttatatggatgaccaattatcccacattccatacagtattcaggaagcctctcatatcgaaaatcaacccagaacttgtctttaacatggcccaaagaaatcattcgtcctcttttcaaaggcttagtaacatccataagaactcggatacgtaaaaagggtccctagccttcattaagagagtcctcgaacacatcctcaaattttccaatgatattaccaagagcaatagccaaagtttttgtcttactgagaaatagaaggcggtatacttgaacccaaaatggagtaaactttaaatcatcactgttaaaattctgtccaacaactggggtatgcaacaccacatggtgattctgaaaatgaaaaggctcgcgatccagaacacgaagcttatctccttcgcagccaaaagtaagcatgaacaaatcggaagattcatagattttaacgggaaatctaccatcccagtgctcagacatttgctgttgcaaagttgaaagccaaacttttttcttagttaaaatcttagcatatagtacggtatcaacactaacagtgggggagatagcctcagaatcatgaaatttaaagattgattcttcatcctctgtaaggttgatcttagatttcatcttgtccaagagaggatccattgaatactaacaacagagaaaaaaagaagtagcgggatggtatgcaggggagtggaggaatgagatgatattgataaaatagtagcagagataaaggggatttatggaaaagtggaaggtaactgcagaaaactgtaatgaaagtacttaagttctggaaaaaagatgaataaaacagttaaacccataagggacaataaactgcctcagagcacaaaaacgtgggcagaccgctcttttattaattaatttgattttctttttgttatttataaatgtggaatttttataaatatgggaattgagggtatggtttacttttttatgccataaataaataacattatagggttatgggtttttaaattttttgacatttatatgggttttttttatgccatatttttgtaaaaaaaaagtagaaatcccatatttgtaaaacaataataaattttgctggaaaaattgtcgacaccggaaaagtagccggaaaaatcacggtcaccgaaaaatttgtcggaaaagtcgccggaaaagtcaccaaagtaaatgtcccagatataactaaaaatataac

SEQ ID NO: 127843 - DNA, 579 bp, Cannabis sativa
aatggaacaaggctgctattttcaagtatgtatgggctattgcaacaaagaagacaatttaagagtaaggtggattcataatgtctacctcaaaaatgaagagtggtaggagtacaaagctcaaattcaaggaagttagtattggaaacaaatagtggcagccaagaatctaatcaagctcctgactgatacaatttacaatgcacatgtagtatcatatctctcttggctataaaatgttatgccccactcaaaacaaagtaacatggtgcaatgaagtatatggggaagattcaatactccaaagcatatatagcttcatattatgattctcagttcaaaataggttgaggactagaaactacacaaatttcacattattgaggattctgcttgccttttttgctctcagcaggaagacacaacagagcacttgttctttctcttaggcttgtccacaacaagtcaaggtttggctgaaatggggagctcaatcaacagaattgacaaagctgctcaggtggatagacagagccagcatcaacagaattgaaattctttgcggtgcggtgcggtcgc

SEQ ID NO: 127844 - DNA, 774 bp, Cannabis sativa
gattaaatgtttaaaatacattaagtgaaaatgaagagagatcgagtagaagtaactaacctgttcttctgttcctctgaggctgtacggaaggaagtttgaggttggttcttcttgttgagttaattcagaagaagaaaaagaaatggctgtgctgtgctctgtttgtttgtagtgcacacagaccaaaacgaccagaagccctagatcgttttgatgggaaaggataagagaagagagtgaaataaaacgttgtcgtttttgagaaacgaataagcgcgccattggcttttagtgacacgtaagtttgtttttgtattttctgtccataatggattttgcttttattaaatgttgacacctaaacatgaagtacttactctcaagcaacctagatgcagcagcagctggtaagaccaaccacatgctccagttctggctctataatttttttattattgttttcgttttctttttcaaaacaacaaaaatatttcttaatttaaacatctaaaggataattatgagttttcataaactatccaatttaatttaatttgtacgctctaattcaaccatttgcaaagggtgaataatttaaaattcgtatttgtgtaaattaaatgttaatttacgtgcaaaaataatcaattaaattcaatcaacatatttatatttatttttaaaaaattatatatatatatataagtaatattttaaagtaaaataataataataatttaaaaatctaatacttatgatataaatatattt

SEQ ID NO: 127845 - DNA, 944 bp, Cannabis sativa
gaaccatgcctctttgttattacaaccattacatgtgaacaaggcatttcatcaaattgaaagcgttgacatgtgcatgtttttttctccatgtctactatataagactttttcacgtcatggactaggtatatcattagatttgatgtttcaacctgcatttgtttagaaaagtttgcatgtgttatttttttaattgaaaatgcataaaaattacagtaattaaactaacaccctattcaaacaatatttgtatgaaacaaacattcaaacaaaataccaaacaagatgcttaaaaaacaacagcaatgactctcgtttacgggaccaaaaccaaattctatcaatattagtggtccatattagattgtgttttctcaatcttctattatacatgagttgcatttgaacaaggaaaagtaaaaaaagttcaataaaatggcaaatataatataaattaagaaagcaaattaaattttcagtccaaactgacaactcaaaacccatatgcaataaaacacaacaccattacaacgattagatgcattttattgaagaagagtttgtatgtgttatttaattaatagattaaatttattatacaaggcagcatactttatacttgaggctcatttttctttgctgcaatagtgtttcttcagatatttttgccagatttgtgaatattcccaatgctctattcttgttgttccaataccacttttgtacaagactgttgaggcattctattaattttgcaactggtaattccttgatttctttgattgctgcattaactgattcagctatgttatttgtcataattgcatatcatttgttggagctgtatattcttgtccatttgccaataccaacttcatcaaacaagtatggttttatcctctcatcaatactgtccaagtctctcataaagtcttcaaatt

SEQ ID NO: 127846 - DNA, 1541 bp, Cannabis sativa
aacgcaatacagccaaggttattataaggtgaatggaattatcagagctcttttgtttttcttttctttctgttccctaaaaataaaaataacaacctagaatcaagatgcattcatatttggtttgtaatgaaaatgaactttcttgttataatagttcttacaatttctattgtccatttctatcttttccattgaaagacgcagcactaattgacaaagccatgcacatggaatatattagccctaatcataaaaattaaataagaaaaaaaagtttgcatgtacgattttagctcgtgcatctttctccactacctcaaccaaaacatgtgatgttatactattaacatattattgtcccgcataaaaaactagcagagtgattcacctttcggcatatacaagattctctaaacacagttatatttaagaccaacagctgagttttttcaaacaaaaagttcctaactttccatctcatacttatctgcttgtcaggcaagagataaaaaccaataaaattccaccatatggtaaagcttacccttgcttggctagttcttgaagtagcaaaccatttccagtcccaatgtccaagacactccaagaagtaagatatttatcaccatattcaacagaatcagatgtttcatcaacgtgatttggatggtgacctttagaaatatcaatgcataagcttttggtccaagaagaaacaacttccatgacatcagttccgaacctatagaaacagatagcaagaaaatagatgtattctaagtctctagcacaatttgtgaggacaaataacaaaggttttaagaacaaggagccagaagattcccacagatgtgtaggcccgggggcattccacactcaactgttatatatcagctcaacaaatcaaacaattaagcctcatttcaattaaaatggtgattcttacaaactctaattagtaatatacaaaagtgaacgcaattcatcaggtaatatacaaaagtgaacgcaattcatcaggtaatatacaaaagtgaatgccattcatcggattacaaagaagaagaagaagacggtagatgcttgcatgagacattgctgataattcatagtaaaaaaaataagcctatccaactttctggaataaagaacttagaagtaaaagcagtggtaaagtatattgtaccaaacttcaccggaatggccatgttcgcggaaattagtcaactcatcggcatatgcggaatcccaataactctgaagacctaacattgatgcctctgcttcagaatctggttcatccttgtcagaactgtacacataataaaacaccaaattctaaaaccagttgcctaagctacgtctattcaaacaatctagaataaccaaagcataatcagatgcctattcatacatggagaaagttccaattatacatatatttcaatgaattcactaacaaagtaatacataattccaacacacagccaatccaagtttgcaaccctaacttgtattcaataatcctagttgtttcc

SEQ ID NO: 127847 - DNA, 595 bp, Cannabis sativa
tatcaaaaaatattgggaaatacttttttgaatgcctaaaaaaagaaaaggaaaaaaaaaataaacacaaaaataaacacaaaatacaagactttgaaacaaactaaagaaacacattgtagatattaatcctctaaattcgcctataactaacttaactcatttaactaactctaacagttagttaagtttttttttttttttttttgaaggacagttagttaagtttgttacaagaatagttgtaaccaattgcacttgatttagttgtatagctatgattataaatagcttcacttccactatctctgtagagttcgaaggagtgatacagagagagagttagagagaattgttgtgagagcttagtaatcaagttcattgtgtttaagaagttgagggtgtctcgggattgggtgagagagactgaagattttcctctgtgtgtgtttcgagttcaaagttggtgtatgctctttcattggtatttgtattcccaaatctcctccattaatgaaagcttgatgatgtttctcagctggagtatggtcaaggatcatatttgatctcaaggaccgaaaccaggataaaaatt

SEQ ID NO: 127848 - DNA, 1026 bp, Cannabis sativa
aataacacactaaacaagtaatgaaaataaatctgtttctttattaataattgaatagaagaaaagattacattgaaataaaatgttattttgggcacaaagcccaacaaatatagtgggcaaagctgagaaaatgtggctacatggcattaatataatttcctgaagaagtcaaatgggccatttttcaaaggtcgaaggagatggtcttggacgtgcgggttacaagagataatcttgcaactaactatggttaatgtcacacttaattgcttcgtgggaatgatgggtcacaggttgaacgttagatggaccatgggtgatattgataggggccaacattcattctttctctggggctttccatgatgttaaggcccaactgaagagctcgtatggatatacaaagtgaatttttggacttcatattatataatgttggaatatgttggacatgaggtttaatggatttaggtttttcatcttctttgtaatttttaaacaacggtgctaaccttgctcccattaatgagacttttgctgtccttattcctaagaaaaaaaagccaaccagggttcgtgattttaagcccatcagtctttgttctactatttataaagtagttgttaagtccttagccaatatactaaaggtggtccgcactgatcttatttctcataattaaggatattttcttaataatagaatcatttttgataatattattatttccaataaaattattaatgcaattaataccaggaaaaatagaaaccttggttgggctaccctctaacttgacatggggaaagcttttgataaagttgagtagagttttgttaaacgcattctttcctacttaggtttctcaactaactttatctctcttatctctagttgtatttccactatctctttcaaactctgcattaataaaagtttatcctcctctatctttccttctaggggaatctgttgggttttatgcgctaaataaaactccatttcaatgtaatccattttat

SEQ ID NO: 127849 - DNA, 1443 bp, Cannabis sativa
ccgccggtattaattattaccggcggattccgccgttattaattattaccggcggtttggcctattaataccgaagaatgcctcggccggtaatatgaaaaactgttgtagtgttataaaaataattattaatataatttgaatgttttcttataaatactcaaattttatatcacgtcttataaataaattaatatataatcttagttttacatgttccaatagttttaagtatataattataatatcagtattatatttaaattttattattattttaacgtatttattattaataaatttatatcttattattattaataatcataaattataaagttttttaatatgtcctgttgtacttttcggacttgtcacgtgtcgtgctctttgagctagtctattcgtgtttacatgtcatacatttcatacttctcatgtcgtattatgcttaaggacatattttttgtactgtgtcgtgccaatttgtagcatcaaactgtgttatgcccaagcccgtatttttcatgcttagtcgtgcataaaaaattaatttcatccattcataatatatcaaattaaatatatatatatacataaatacataaatacccaacacagtatttaatcactactacaaatattgtaattcgcgacggtcttgaaaataatttttttcggggaccgtcgctaaaaaaattaagtaactgtttaaaaccgttaggaaaaatgagtattcccgctagttttgaacagtagctaaaacagtaggtgacagttattattaaaaacacatgaaaaattattaaaaaaattaacccatatactcgacggtttaaaatcgtcgggtataatatagccgaccgtcgggtatacccattattttttattaaatatacatataataagccttaatacatatcatatccatattacacgcacatcctgacgcgaattctttaaacgactatttaaaaacgttagagaaaactattttgtagtaagtctatataattattaagatagctcttgataccaattgttagatttaatggttcatatcagagttagaaaggagaagcagattttataaaaaaaattatttaatataaaccatacgcccaaggatctcaacataatgtctataaattaaatatagactaatgaatagagagataatacattttgtatcctattaggagattcttgctatctattaatattattacgaatatctagtccaagaacttcactaaagagttcacaccacaatttttcaagtcagcctcaacactcaagagtgagctattagattctataagatgattatgtttatgtatcacaatatattcttatgtcatgagacactgtgattgagataggcatgatcacaaactcacaccacacttgatagtgtgcggcgagagagagagagagagagag

SEQ ID NO: 127850 - DNA, 935 bp, Cannabis sativa
atgtatcaatacatatatattcatgcattgatttgtgacaactgactatattttttagtcatttatacatctatacattttgcagctttttgatattgaaattactgtttgatactttatagtttcagttttttatcaaatcgattataagcccatatcatttttctttagcgttatagctttcgcttaggcctttcaatagctagtaatattgatatgtataggggtataacatatgtgttgttctgcttggtggccggttttatccaaactccagacttgaatattgataaatagccttttattgatatacattatatcaatatttacatgatagatagtcttaaaatcttttgctgtctattcatttgaatttgtcatactttagagttctttttcatatataccatacatagatacacggatatatatatataacttgtatgatatttattgaaatattctattgcctagatttgactcaataaaggatgcaataggaaatatttttctctcagtaattcatttgagatagcagaagaatatacaggctatacattttaatataacaaatgactggatttattttgattcttttttgttttggtcatcgtccttttataccgtgccacctgaatttttttatttcttgaattgataaatacacaaatatatgtataatacacatatatatgcaatccacaacttgatttcttcaagaaattttataaaagagccagtaaaccaagtggacgacactagccaaaatctatcttctacaaccaagtagaaatttgtatttcccttttgcttatatactacattttgatttatttttcgaagtataatgatcaaaggaaaatattaaattatgctatgaatttgatagcataacaatatagatatttgtcttttcctcattgattatatatcac

SEQ ID NO: 127851 - DNA, 1421 bp, Cannabis sativa
tttttatttgagcatgatcgtgccattcttctagtagatctaactgaagtatttggttcttctcattgtcttcgatgtttaaaacatcttgtcgtaaggacccaactcctacctcgactggaaccatggctttgcacctgtaagagagtgagaaaggggtttcaccaatcattgactgaggggttgtattaaaaggccataagacttgcggtaattcttctagagaaacacctcttttctcttcgagctcaccttttatggtgtgtttaattattttattgactgcttcagtctgtccgttgctctggggatatgcaaccgctgaaaaaggctttttgtattcccaaatcttcggataatttttgcatttctttgcaatcaaattgtttcatattattagaaaataatttgtacagaatgccaaatctacagataattgtacgacacacaaactcacgcaatttcatagttgttattatcgctaaggcttcgacctcaacccacttagtgaaatagtatacatccactactgaatattttactcctctcttaccttttggtaattcaccaatcaaatctatgtcctagactgtaaaatgtcatgagctggtgatagaatttaaatagcttggtagtttgttcacatatgtgacaatccgctaacatttgttgcacctttttgcgaagttaatcgcatctgcccataaatttggctaataatagccttgtcgcatgattttcagggctagggagtttccaccaatatgggtaccacatatgcctctgtgtacctcttggaggatgtaatcgcattcttcaccatcgatacacctcaaaagtggttgattgaaacttctgcaatatagcttgtcgtcatagatcacatatcgagcgatttagtatcggaatcttctggcttcgagattattgtcaggaactttaccagttttcaagtaagtaataattagggtcatctaagtgttgcacatcctgagactgtgtatcaccgaaggcaataataatggcattcattggagtagaaggaacctcatctctacgttgggttcctaatattctagatacacatcatcctcatcaaaatcatactcacgacctccatcatctaccggctgtgatggttgcttttgtaacaaactatcacggtcgcaacttaatccatcctaagattctccatctctttctaactactctgaaaggtagccttcatctcagtctgtgcagccgaaattgcaaattattggtctttgaccttcttcaatctcttcgccaaccctaggtaatcgatgtcatttattagcccaagatatgtttccaagaagggagtgaattggaaatttaaactaatttcgataaattaaaacttttaacacaaaattaagcaattgaacacttaatcaaat

SEQ ID NO: 127852 - DNA, 524 bp, Cannabis sativa
ttttctctatttttcttatttatttagagtttctaacaaaaaaaaagttgtatattaattataatttattatttttcagttttaaattataaaactaatgagtgttgttaatgacactcagtgtgctgagccgtcaaatggttagaattggtttgtttgtccagttagttattttccgttggtctgttatttgccctaacggtttgtaaccaactttagtcttctggattcattgtatataaatctctctgtaacaaaccttttctcaatcaataaaaaatactcttcaattctttcgtttctctctttcgtttcactcaacatggtatcagagctctgtcgtctttagctatggaaaatcaattcgtccccaccaatggaggttcgtcgatcccttcaccatcgtcaacaacaaatccaggtcatactccattcaacaatgttcttcctaaaacctgtaacgccctaatgctaaggcacgctacaatgctttttcaattatagtgcagtctttgctaatcaaa

SEQ ID NO: 127853 - DNA, 1456 bp, Cannabis sativa
  modified_base (210)..(210): a, c, t, g, unknown or other
tagagccaatgtggaagaggatcgggaggcaacaatggcaaggtttttgaatggattgaatcgggagattgctaatacagttgagttacaccattatgtggaattggaagatttggtgcatatggcaataaaggtttaaaggcaactcaagaagggtagttcgagctcaatgccaaggccatgtccacacaatccaaatacaacaccttngaggtcaaacttcccaaagaaagaggatcaacctagttcatccttgacacccaaaccagccacaacaactacaacccctcatggaaaaacaaccactatttcatctcgctgtagtgagataaagtatttcaaatgtcaagggcgaggacacatagctagccaatgtctaaataagagagttatggtgattcgtgaaaatggcgaggtagattctaaaaatgaagaagagtttgttgatatgccaccattagaagatgcttctataaaagatgaagagtatgggccaaaatacgatgatatgcttgcactagtcactagacgagcattaaacttgcaagcaaaagaagaggaagaagaggcacaatgcgagaacattcttcatactcgttgtcatgtgaaagacaatgtatgtagtgtgatcatttatgggggtagttgtactaacgttgcaagttcctccatggttgagaagctgggactttcaatgcataaacatccacgtccttacaagttgccatagttgaatgatagtggtgaagtgagagttacctataagttttggtatctttctgaattggcaagtatgaggataaggtattgtgcgatgcggtccaaatttaagctggacaccttcttctaggaaggccatagcaatttgattagcaagtccaccacgagggcttcaccaataagtactcattcatgttccgtcaacgaacaatcacgctagctcctttgacaccaaaataagtctatgaagaccaagtgagattgaaaaatttgagtgataaaaataaattgagtgataaaaagaacttgagtgaacaacagaaagagagtccaaagataaatgagaatgagaaaaaagagaactaaggagagaaaataatcgaagcgtacaaaataatttttatgctagaaaaagttaaattacgtgatcttggcgtacaaaacaaccaatgattctgtttgtttacaaggaggctctttgaaacaataaccaacttattcttcgctgcctagtgttgttatttatattttgcaggaattcgaggatgtgtttcctgaggaggtaccacatggtgtgccacctgtttgagaaattcaacatcaaattaaattaattccagttgcttcaattccaaactgcccagcatatagaactaatcctgatgaaactaagggaatacaaaggcaagttgaaggattgatgaccaaagggcatgtgagagaaagcatgagccct

SEQ ID NO: 127854 - DNA, 1071 bp, Cannabis sativa
aaaaaaacagacacatattattaaatataaaatattatattaaacagataattaaaatattaagtgagtcccgtcggggtgggagtgtcattcccgtctccatcacgtttaacggggataaaaaatgatctccatccttactttgttctccatttaaacgaaaaatctctattccattaaaaacgggtccatcagagccatctcataaaaaaatatgcatccctagtccaagcaaagcaggtcattttaaatctccttctttttttaatatatttttataaataaaaaatattcaatcaaaaaatttatgaaatatattacaaagcacaaaatcaaccaaacacttactaattaattgatatgtaatactattaccctgaaatgtaataaaagcatctctaatagaatattattatgtatatatattttttagaatatgtttataatattaaactttaatatggtagtatataatgtaattcaaatttaacatatgtgaagagttgtgtaaaatttatcatgaaatatagtatctgctaaattttatatcacggtaaatattacttttttttatttattcttttatcacttatttaatttttaataattttttatacttttaattatatatttattatagttcatatatactttcaataaaaatttaatatttttattaaatttttgtacaattttctattaaaacaaaatttattttacactaaattataacataattatttaatttaatctaaatattgatttactattttttagctaaatttgatacaaaatttaaaatatttactagagatagtctaagtaacattttttgcaaataattattgttacttttacaaaattattaaattaaaataacctaatttaatttatgagaaattatttcatatactattttttaatttttattttaaatttacagtttgagttgttacaatggtttcgtcggtagtttctatgggggttgttatacagattttgattagaatttaggttatttcgttagttgctataaaagtttctgtgtaaaatttcgtaaaaattaaaaaa

SEQ ID NO: 127855 - DNA, 549 bp, Cannabis sativa
gggcataaaacccaacacatccttgtatttctttggaaatagaatttcgagcaaggcttgtatttatttagggtttgcctttatccctcgttgacttactatgaatcctaagaattttcctgattctaccttgaaagtagacttcttgggattgagtacctcaaaacactctcgaagatagtcaaaatggttcttacttgttttggatttgacatatcatccacgtaaacttccatgttccttcccagtaggttttcaaacacctagttaactaaccattggtaggttgctcccacatttttgagctcgaagggcatgacatggaaacaatatactcgtttgtcagtctagaagctagtgcattcttcatcagccacatgcattttgatttggttttagcctgagtaggcatccataaaggctagcaactcatagccaaaatgtaacatctataatttgattaattcttggaagtgggaagcaatctttggggtaggctttgtttagatttgtgaaatctatgcacactcaccatgtcccatttggcat

SEQ ID NO: 127856 - DNA, 553 bp, Cannabis sativa
cctattgctactagcgctgcaaccactttaaaaacccaaaccgtaaatttgaaaaaaatgttaaaaaacagtatatggagtagttctcctttattttataagtacaactatttgaatgtactttatttaaaagcgttaaattattttaaatttctcaaaatttacataatatttttaataacattatcataattattattatgaactttatttgtatgtatttttgaagaccgtttgtgccacagtattaattatggggctcgtaatcataatactaatttttttggagttatttttaagtataaaattagaatattataatttgatttggccaaagttttggaggtgaaattctaagttagatcaaggttcattggtggcaatatgtgattcttgagagagattgatttgttattgttcaagcaatttgtagtaatttggctaggaatgtttatccgatcaaatccgcacttttttggtcaaacaacatctaatccgcactaagtgcggatttcatattttggatccaatctgatccgcataatagtttaaa

SEQ ID NO: 127857 - DNA, 537 bp, Cannabis sativa
  modified_base (48)..(48): a, c, t, g, unknown or other
attcatattaggttgttaatcctacatacatgatagtaaatagatccnggtaaaataatttccaacagtgcctaggttgacaatctatcaatctgggcaccttcgaaatgtccgatcgaaggtctaacttttacattgaatccttcttcattaaaaatgttgaaataggtccttccaaagaaaaaataacatttcctaggcataaaaaagggcctagtgcccaggttgacacctggggctggccatgcgcccaggttgacaatttgccaacacaggctacaaaaaatagagtttataaaattatttcgagcatgatctctatctctagaaaatattgagaatcaactgtttctagggaccaaacaaaactttcaaagcggcaaaagagggacccaatgcccaagttgacacctgagactggaccctgcgcctaggttaacattttgtcaacttcggctgtttttcaatttagttcagcaaaatgtgctccaggaatcttcaccgtcatcataaataatgaagattcaagtaaacttg

SEQ ID NO: 127858 - DNA, 810 bp, Cannabis sativa
catgaagcagccagagtgacgtatgtataagagtcattatttcgtgggtgtaagagcccaatagaagcttgaagcgggaacattacatgtaaagccccccaaccacaaaccttgcgcaacagagaaggggaaaatataaaataaatgaccatgactctcaacaaaatcagtacacattgaataataaagagaaggattagacacttgaacatttggagtttatctttggtcatcaattaagagttcatcatctactaaagtgtgaatttatgcttgggaatcgagagcttactccacaccacgagcataatctattttctcaatttcaagaagacaaacttgccaaccttaaattttctatttacaacatcattaaatatcacggattgagagatagtcatcttaagtttgaggagttttttataatcaagcctcgttccatgtcaattggggctttgggctaaaaaattagactttttttcataataaaatattaaatatagtattttaaaagataaattgggttttttaaaataaataaacaatagtaaaaatataaaatatagtatttttaaaagataatttttagaaccttttctattaataattttttggacttgggtggaggccttgggtgtgggcccttgctagcaactacgccccttgagttggcctacttctagtatcatcgggggttttttagccttgtgttgttaaatgtattttatatgggaaacttataaaaatactggaatttgggttaagttttacaaaaatattgtcacacggaaaagttttcaaaaatactgt

SEQ ID NO: 127859 - DNA, 806 bp, Cannabis sativa
aaaacagataggggtacatcaatatatctattttatgggggtgcattgtagaattttcctatattttatattttttaaaatagtgaaaataatatcaagagtttaatttttaataattttatattttactataaccaactttaaaataatttttaatataaacagatacaaaaaatataaccactctagatcagattattattagattttattttgacaaataacttatttcagggtcctatttgtacaattttagaatatatgggatccattttatcatttaacaaaacaaataatcaaattaataacttttacaaaatacaagatccaaaatagtatttactaatattaaataaaagtgtcttttttcattattattttgatttttttatatatgtttttataatttttctcttacattttttttttaaaaaataaaataaaaaaaatttctcataaaatatctcctcttcaaaatttcctttgaactattaagttaaatttaaggatttttattcaatttaataagaaaagtctaatatggataaaatttaaaggcatgttaaagttcgagacacatactttagtatatcaaagtctacataaacaatcactgaattaataaaactgaatgaaattagacaaaaatccgtaaaggcaacaatctcaatagtttaatgaaatttttaatggctaaaaaaattcaaaaaacatcataggatatatgtaaaaatttagaaggcaaaaatcatactctttaatgaatatgaaaagaagattttttttttttttttttataatctatt

SEQ ID NO: 127860 - DNA, 607 bp, Cannabis sativa
ataccttttatgtgtgtattttatatggttttagatatggttttagaagttcgttttagaagttcatgtttaggatgttaaaaacatactttttcgtaaatctaggtcttggtaaaatatattctaacactctacacttgtaagttgcaattcttgattcatactttgtattgctacgggtgttgtagaagattccatctatagtgatctagatagtattaaccctcgatattaatacaactaaacagggagtaggtcattacccgccatcacaagggggtcaaacctctataacaaatctattttttattgcttttcattcttatttgcgcaaatacatggcaagcatcagatatacacgatcccactgtcggttgatcactttttgaggtcaacaataaattttacaaataaaaaaaaatacattataaatagataaaaaatttgcactaaaaaatatctgaagaatctcgatttaccgtccgtctcatcaaaattttatagtatatgagaactttagataattatgaggtgcttcaattggttaaagtaagcttgggttggatgcatggagtatgcaatggaagtgaccgatattgaacttgaa

SEQ ID NO: 127861 - DNA, 1129 bp, Cannabis sativa
gtatggtaaaaaaccaaaacctaggaagatcggaacactttcgatcaaccccaaaacgctagcaaccatgctttgtcttcttcctcaagctcgaatctttgggctttaatctctaacccttgaacctacaaaatccaaacgcaaactagagccaaacaataacaaagatctagatcgatctttgttggttcgagataaacaaaaaatacacacaagaacacaaagagatttgatctcaaagttcaccccaaattagggctacgtctctattaagctcgcctcagatgcttgatcatgcaccatcaatcctcaacagtttacaagataatggtggagattccaagatacaatccaacaggtaatcttgatctctttctctctttctttttattttgttttacagagttagtctctcaaactttcttctaaactctttgattttctctttttttggggtctctttccgcaagatgctactctctctaacggagatgaagattagatcaggttgtttctgaacttgagcctccttcgttttatagagttctaattctgttagttgcgagtatgagagtctgaatgctgagttagaccgttggtagctgtaataatagttagttgatagtgctgtaaaaaaactctttatatagaaatttaacaatacttatcaaagtagaaccaagtaatttaattatgaaataattaattttaactgaaagacaacctatatcacactattaagctaagcaaattaaaaatagctaagccacacctatattcaatgttctcaatgttcttatataacaccataaaactaaaacaaatttagaaatactaagcttatagccacaaaggttgggggattcatttgggaattgagttaaacttcaatttcatcattgaattagattgtttgaatgtcatttttatcatttctaaaaagcacaactattgtggcgatttaaatagtatcctccaaacaaaaatcttatcccaaggaattgtgttgttagtttttagtttagttttagagagacaaattgtgagttagccaagtatactaagtggaattactattgtttggaatagaatttttccttcttttgcttgtgctatttttttttttttt

SEQ ID NO: 127862 - DNA, 696 bp, Cannabis sativa
acttggataaacgatcaaattctaaggtatactcggccactgtcctcttcccttgagtcagcttcaaaaaatcttccatatgcaaagttatgatggtaattttataaaaattttcttcaaacaagatcttaaattcttcccaagacatgatgctaacatctcaggtctatcccaccagacgcgggcatgctcttgaaacatgaatgcaacacaattaactcgtttagttcccatcactctcatattatccagaatgtaggtaacaatgctcattcattgctctgcataataatatcagtacctccaaaaaacgttgtaggttgcagcttaataaaattctcaaacaatgaatctcgatgtggcaaaataaatctagggttacccaccactggaacaggagatggtggtaacactttttcaaatggatttggctgggccggttacctaaaccaacacaactcatcctcttgacgaagtatgacgcttcgtattttgagaaacatttgttgatagtcgacaggtggattagcattgttaacccccgcattatccctcgagtcctgcggagacacaggcggtgccagtggattggtttgatcattaccaggctctacgtgctcgccatgtggtctaggtgattgattagggtctatttttctcaaatagccctgaaatcaacaaccccagcgagttaag

SEQ ID NO: 127863 - DNA, 533 bp, Cannabis sativa
ttttactattttagaaaatatatggtccattttgtcatttaacaaaatacaaggtccaatctataacttttgcaaaatacagagtccaaaatggtatttaccctaataataaagaattcttatttttttaagggagggagcctagttgcgcttccgcttgcgctgcataagttgataagatttacttttattttttttgaggaaactaaattaattaattgattattagctgtgttttaattaattaatatatgtgttacgtatatccaaaggaagaaaatagactagtttggattccatggatccaaacataaaatgaaatagctctttttgtttttgttttatttttagttttagtagctaatttgtccttttgtgtcggctcttcctaatgatccatctccctcttttcatatgtatactagtgagatagcacgtgcttcgcacgtgagtggctcctaaaactatttaagtataactattttaagaaataattaatattttgtctcttgaacttacaacactatataatt

SEQ ID NO: 127864 - DNA, 572 bp, Cannabis sativa
taagctttttgtcttgtaatggtttgtttgtgttttttgacttttaccaactctctcatcttatctattctaggtgataattactattattgtaacttgaatcagataatcaaagataaaatatatgttggtaaggtaatatgtcaactttgaatgctcttataactttttgaacaagttcatattgttacaatatcaatggaatctccaaacagaaagagatagaactggtgtacccttccaacacaacacaaggcattttccattcatctcaagagtacagtaagtcctacatgagaatctgtcaacaatgagattagcttggtatatagatgatgaactcaattcaagctcttccattccaaacctcccaaagaaagctctccacacatcaatcttaacatttcttatctttctctcttctccttctgcagccacaatgtttctgattgcctgacaacaataagttgcttcgatcaccatccgattcggctcagttctttccatgaaaaagtcaatgcaatcaaatagtgtgccatagaagaaaagggcttcaatgaaacggttaacaa

SEQ ID NO: 127865 - DNA, 837 bp, Cannabis sativa
  modified_base (782)..(786): a, c, t, g, unknown or other
ttaattgaacttgaaatcatttttatgataattttttttcccgttataataaagtaaagtataggaagtttttctaaaagataaattttatgtctttttttgtcttaacattgaggatttaaattttgggcttccttttcataagcaacgcagcactactaaataaagggcaaaatgatataagggaacttacacaaatattagaatttaggttaatttttttaaaaatataccatatgaattttttttcaaaaataacaatagaacacaaaacagaataactaaaaaataatcattaaacaacaatgcaagctgaacatagtacccagtatttttaaaagaaaaaaattcgccacacagtaaaaaaaaataaaaaaattaaaaatttcagtatgtggtgtaaataatccatgatataataacactttcggctgagtgttcggtaactaacaaatttttttttttagaaaaaaaacatatatgtataaaccaaactgtctctacaaagaatctgatctgaaagtgaactcactcaacgaaagcagaaacagcatagactaataatgcccataattaaaacagaataatggtaaatattgtttgctatttctcatctatcaatttctcttcttagagctttaacaacaactaatttgggctgagtgtacgtacttaatatttggtattttattgtgtcatatataatatcatagtagcatgatacattacaattagttatcggttatttatataataattaggtggcgtttgataacactttnnnnntcagttttctgtttttaaaagtagaaaaatgaaaatatttttcaaaaacat

SEQ ID NO: 127866 - DNA, 1172 bp, Cannabis sativa
  modified_base (1115)..(1127): a, c, t, g, unknown or other
attaaaaaattagaatgtagggtaattctccttattttatttatatagataattatttatcaaaaacactgtcattcttttcgtcacttatgtcgtattcttctcagaagttcttaaaagttacttctcaaattaggatccaaaactgtaaccaaaactaagaactttaacatttccttttaaaaaaaaaaattaaggttgagactccaaaattctctaatagtgaaatcaaagagcaatgcaaaaaaagcttttgtacatttgtctcctcccagatcatatccaccaaacaaaacttttactttgttttttgatttcgtcattagagaatttttgagtctcaacttttatttttcttttaaaaataaatatcaaagcctttagttttagttacacttttgggtactttgaggagcaacttttaaaaacattagagggagagaaatagagagagagagggaggaagaagaagaagaagagagaagtgacagaaagaatgataatatttttgacaaataattgaggaaataacattaaatatgaatataaaatgaaacaactacacatactaaaaaattaactctacatgaagtttaatacctatactgaattattatcctataacttatttattattatacacctgaattcttttagtcagttaaaaattatctccaaactatttatagtattttagtattgtaaagtgatcatgttgtaaattttttatcacatgtggcaaacaaaataacggtgtggctatttaaaatattgtcacattatggtcacattgtgtaattaattagaaaaaaaataatttaaatttttttgattttgttttacttaattttattttaaatcaataattaatttttagttgaatgaattcttttttaaaaaatatataatttagttttttaattttaaatgacatacataatgcttatgtggtaataatttaaacaactacctcattattttgtgtatatagatgtatgattaatctcaatgagttaaaatatataacaaaaattaactaaaatagatatcattatatctatttagggtcaattgcggcataaatacctagctaatgtttcagattttatacactnnnnnnnnnnnnntttatttttggaggcaaaaatacataatgttacaattctcttaca

SEQ ID NO: 127867 - DNA, 1576 bp, Cannabis sativa
  modified_base (1446)..(1454): a, c, t, g, unknown or other
agtagtttccttttaatttataaattataaattttaaaatacacattacacattataaattataaaaaaaattaaaaatataattaaatatacctacaatgcaagtaataataactttatttaataataattacgtaaatcaatacaaaagagcatgttaataaaattttgaaataaatttatagtacacatttttaaaggattattttagtaaatctcttatctatttaggcacctaaattagctttgtaatttaattttttttttttcatgaccttatatattttaggtaattaggatcataagaaactataggcctaatactaatatttttaagtaattcaagtttttagtaattagattagattgaattagttcagttcaattggattgatcgttgcccacctctacaccatactgatatggtatccaataattagttaacaattttttaaatcatttattaaattaaaatttgtgagaactatattaaaatacatcaataacaatataatacattaatatttttgttattaatatgttcatatctttattaaaattgatttaaattttaattcttttacatttgatatgctaatttaatcaaatgtattatctgtctttatttaaagataattgatctcaaaaaaaaaaaagataattgatacaaataaaatatattaaatagatatatattgtgcttaaaattacaagaggatgatcaattttatcttaaacattttcctagtacaaaaataatgtactgttttcttctatacaaaattagttggtggaaaacgatgtagttttgatttaataataatattaataagtcactcatatattaaaatttcaagaactttagccacaattgaaacaagcattggttttgtattctacaaaacaacaggtccaacattttgcctcaactcaaataataaactccaaaatgaacatacatacatactttaagtactttaacacataaaaagttaacataattaaataatatcaacagctatttttgacatttatttgtttatttcattagatgtagcattgtttctcatctaaaaaatacaaatgatataatttttttcccttctttcttttatcaatatcaatttgatccctatgaaagcaactaagccattttgatgaatgaagtaaaatcatagcccaagataacaaaactaaactaactgaatctgaatataatcataatagttgcacaccaggtataccagtccacaaaagaatccttcggggtcgatctagaaacctcgcttgccatgctggttcgtcgctttcatgagtaaaaccgctctttatatacaacttctttgccggttcattgtcaaccgctacatgcacgtacagatcagatatacctaagaatatcacagaattcagttgaacaaagtgttgtggacattgtcccacatnnnnnnnnnggtagagaattgagccatatataatatataagaacatggactactccactcattgccaattgattttgagatggaaccccatgattctcaacacaaaagataaataatatataagaacaaga

SEQ ID NO: 127868 - DNA, 1169 bp, Cannabis sativa
ggactcagacccgaccctagccccggatccagactcgaatccaaactcaaatctagactcgaacttggtcccagcccgaatcggatccagtcccagctctagactcatatccggttcgaacccaaactcaaatccagacccgaactcagatcttggccccatacccatcttaaataaaattaacaaatgaaaattaaaataaaatttacaggaaataatttttatttttatttttaaaattaaaaaatataaacaaaattttaaaaatcaaatatttacttatatttttatgattaaaaaatgtaaaatagaaatgttacgaaagtccaccaaacaattttcagcgtaagaaataagttcgtaacatttagataacaaaataatgataatagtactatagtagggtgtggttctattcataccaaaattgataaaataatagaagacaaactacttgagattcgttgtccattctggttgacttgggcatttgtcaaaaaagtcataagattattatttatacttagtagctattggagtgtgcacgtctatgtaggctgaagagaatacaaaaccatgtatttcagggctcttattaggagagaagatgatcattacaacaacaacaacaataataataataataataagttgatcattcatgcacgaaaagtacagatattaaacttgaatacaatggtcgacttgataaacgcataaccagagtgagggaaagttaaatttaagccaataaaataacggtagccattaataaactctttaaattaatacttgttagaaattaacacagcattcctaagcacaagatcaaactaatcactctagaaacagattttgtatttttctttgttgagaaaactgatatattataggcggactatattatttgttataatataatatacattaaaataattaaatgtgacatattatatattaactaggcaactaattcgcttcgcgcagttataatatttttaagttgctaattatttaaatcaatgagtgatagaatctaaattatagcatacaattatgaattaacaatactttttaatggttggatctttttagacataaagtttgtttattctattaaggttgtatactgatttggtacgatatgttttatctaaatacaattttag

SEQ ID NO: 127869 - DNA, 824 bp, Cannabis sativa
acgctcctaaaatgtgagaatgactctccactctcaactctcaatcccaattattattaagatcgattcattcattgattgtttgagtcggtcatattcccattttggactttatcttactcccactccaaccccccaacgtctcttttttctgtcatcaaacccaaatccatacccttcatttcattttcattcatatttttcatcaccaaactctcattgactccttacccaaaaccaattaagaccttttcatttctcactttcacctattattccaaatacccatttcattacaacacacatacacactcttctcttctacatattcttaccttttctctctcaatgggctgcttggtcttcccagtttccatactcaaaagcaagtgcatgggttcacggctgagctaccaacctttgacccacgatgaagtgtttggcgaccaagaaaatcaaaatacggcggtgactgtggtggtgggaaaggaaaagagagagtttttagtgcacccttttgtcttgcaagaaaacccttttcgagttttgatcgatactaccatcaataataaagagaagatcaacaagaacagagttctgaaaaagaagaataagatgaagaagacaaaggttgtttttgtggatgtcgatgcaattttgttcgaacacatgttgtggttgatgtataatgattgttcttccttctttaacctcaatcttaacgaaattattgatttttattctcaagatatttaatttattaaatcataatataatagattatgaaacactaaattaagtaatatgtctctgttttttttttt

SEQ ID NO: 127870 - DNA, 2293 bp, Cannabis sativa
actgctgtgtattacgagatgattaatcagtgttgtgtattacgagatgattcatcactgactgtgtattacgaggtgattcatcattgactgtgtattacgatgtgattcatcactgactgtgtattacgaagtgattcatcactgcctgtgtattacaaagtgattcatcactgcctgtgtattacgaggtgattcaccactgctgtgtattacgagcagctataagatctttgtgttacgagtagctacaatatctctattacgagatgttgaatgtttatcaaaataatatcccgacaatgctgaaatacctctcttcatgaaccttgtgatctttatttagataagatcacctgcaggttgagtcctgagttttttttacttgtcccataatgtatttattgtgcgaatttattatttatgccacatggcattcaatttgacttatctattaaatagtccaaaaaatgagtacaacacacacaactacaacacttacatttttaggaagatttccaagttcaacaaatgctatgtaattttcatctcaaggaacattgaagtattctgaatgttctacaacgtcctcctcttcatggtcccaatcatggtaatgatcatagccttcatattgatttggtataggttgttgaggtggctcaataaaaaatgtagatgtctttgactcagaagatgatgctgataaaatctcaatgggttcttgaatttcaccaggcaaaacctcgtcactgcacctttatgccagtaagtcttcaaatgtcacaaacatgttgtaaaagtagtcttctttgttcttctgatctgtggggttcacaactacataaggcagcctccgacttccttttggcagcttctcaattgtacaccttttcaatgtttgaggaggatttaaaacatgtttgacatcatcaatatcttctttccactcttgtaaaagtagtagatctcgtaagaccaagtaaatggaaatttcaacataatttttaatttttaaatcctccaccatttaatcaatctctttttgttgtacaaccataaaacccaaatttaagtgctttccataaggcttgaacagaaagccaaataaaaatttgtatttgagttctctggccatatcttacaagtcatcctttgagagactttctactttgcaattgtcaaaaaaatcacacaccccaccttcatacccttctatttccacaagggataaaccatgtacccccgtggaataacttcactgtgaactgatcaaccttaccccctgaaatgaaaatatgaaagaacagtaagatgactattctaagggccctaaatcaggcaaaaatccatcttattggacaggttggacaaatcccctcaaacatttagcacccatgaaaaatgacaacacaaaaacaaaaatagcatatgcagatgtacctcactaacaaagacaaataaacatgaaagatttttttacaactcactttttcaactctttactcaatattcaaagcacctttaaaaccttatctacagctccacctaaaacacaattcctcgaacctctaaccaaaaactcaaccaagaatccaattataaaaccaacattttctcactcaaaaaccctgccaaccgtctaaaactaaaaaacctagaaatgagtttatccaaaacaaaaaacctagaaatgagacaagccgtaacaaaaaaccaaagaaacttaccataatcaggtgggggattgccaaaagattgtttgaaatattgcattgccaccatcgacgatcgagctcctcctctgaccatgcatcgccttctactttccaatttacgagaataaagaactgtatgggtttcctttcgattgtttcattaatgtgttttctctgtcttttttttttttttttgcaataatcaattttaatttctttcattttaattatggattcattaattttagtctctttattttacaatgcattaattagttctggatcttatgtaaagagtggcatatgacatggcaattttaatttggtgccacaaaagagccacctggcaaataacggagccagaccaacagaaggggtacaaagtaaaataattctgtagtttagagagttcaacctttaaatttcagtttagatggttgatcgtagaaaactctaaagttcaagagtattagtgtaatgaattcttattataattgaatgagaagaagtacagtatttatacagaaagatgtaacaagattattgttacaaaataaacaagtgggaagctgaaa

SEQ ID NO: 127871 - DNA, 681 bp, Cannabis sativa
aaaaattactaattagcctaaaacttttgctggcgcaaaatgaaaggcgctggcaaaaataatttttttcactacgtaaatctgtaggtaaaagttagatttttaccagcaaatgtatgctggtaaaattttgacctttttactaacgcagtttgcgagatgtaccagcacaataacgaaatacgcggataaaaatgacatttcttgtagtgataagcaccaattaattccttaattatatgacaaagtaaattagtgttaagaaatttcaattgttagggtctaatttctttccagtttccagccatcaaattaaactcataacattaatagtatggtataattaattaaaataatcaatatgattctaaatgcatgcatggcagctgccaaagttaggtctaaattatcttcatcctggaaaattacacgttgactagttgttgaatgtatatcatctccatctcaagttttgacctttataattatagccgcaatatatgattcatcactatataccatccgtcattagagtcaatatatgtacatattagatcacaaatgctatataaaggtacttcagtactttttcggtatcatattattatgggtaaatactattttggaccatgtgttttgtaaaagttattgattggactctgtgttttgttaaatgacaaa

SEQ ID NO: 127872 - DNA, 997 bp, Cannabis sativa
tttattataattagtttattttatttttttaatatgtaataaataagtaaatatgattttagtacacaaaaaaattattatagtcttttaataaaaacaacttaatctaaaagttgagttggagcagctttagcttttagctgtaacttctccaaaaattcttcaaaaagctgtttttgactgttttccaaacacatttttttcacagctttttcaaaaagtagcttttagctttttcaaaagttgtgccaaacaggccctaaaaagtgcggattggatcagatgaacacccctaaattataatataagaaaattttataacttttttaaaagggatgtgccgatgcacccctatatatttcggcatatggaaaaaaaaaattagtaccaattttttattgtcatgtatgttgtatttatttaagatatcttgtaaaatttttagaccttcagagaaatttaacatgccaaaaataggattcaaacaatctgttgcatgcgtgactcttttgttttatacgcatgtgaaataaactgtttgaaccctgctttctatactgtaaattattttaatttttttagaattttttagaatatcttaaataattataacgtacacaactgtaaaaaaaattgcactaaaacattttttcgaataccgaaacagaaaagaagtgcatcggtattttatttttaagagtgcacattgtaaagcaccctaaaatatatagattaaatatgtgtaacatagagtgtatgacaaactatcattattttgtaacatatgaaaagttacttgttgttatgagtaaccttcacaattatcactaatattatgagtgtaaaaagtattccatatcataatttaaagttcttaaaagctataggagttatagttaccggagaatgagttttatactcatttattgagtccttagcatccattaggggtgttcattggatcacatccaatgtttttaggcctatccagatccga

SEQ ID NO: 127873 - DNA, 553 bp, Cannabis sativa
caaggaagatctttgtttatgtttcagcattctttgggccatttagaatgggagaaatcactctttgtttaatactaatgcttctcccattgcagatgtggaaaattgggtgcttgattacttgcaagaatattcaagagctcaagaggtttctaacattgcaggccatgtttcaccagtttatgctcagcaaccacctcctccaccaaaacaagagatgtatgttcttagtactgatgcagctcttagtagagagggttccaacttccaagatgggtttcggtgctgttgttcaagatcacaggggcgaggtagtttctggtttatattcttctatgcttggtgtttttttctccaactttggtcgaagctcaagctctctttgcagctcttcaatggtgtgatcttgtggaatttcctttggattcaatcagatttgattgtctggttttagtgaataaaatcaataacaaatggaaggacagatcttttttagatttaattagtagagtaatatctgttagactatatatatagtgtatgtaatatagca

SEQ ID NO: 127874 - DNA, 1062 bp, Cannabis sativa
agtctaatttttgtaaaaataaaataaaatttcatagtaaatattataattaaatggcttaactattaaaataattatagtaggagtatatgtaaaaaattatttataattattaattgctaaaagatgtcttgttaaatatttaattaattattttaagaaaataattaattgattgtaaaaaaaaaagtttttacctattggtaacctgctattataggtaaaagaaaaatataaccatgatggttacaacaaaaatgtaatcactgagtagtcgcccatatatgttaatataataaccaattttattgctgagagtcaaataatacattgatcattaaataaagaggaatttcttccaactaagaaacctcattttccatttgtagtgcatttgcatgatatgttgaagatatacacccagaaatacagataacaaagacttaatagatcttaaaaagcagttccattcaaagacacccttcgaaaaaaaaaaaaaaatagacaaaaattgacaataattcaaacatcactctcgacaaaggaagaaaaaaactagcaatgaacaactctaggtcagagggagatcgatcttagtagcatgaatgtgagaatcttgtgtttatgaggattgacttcctcgaaaaagaaaataatgttttaactgcaaacaaaaaaaaaatttattggtagggaaaaaaatataaaataataatcataataataaataaataatgttgcaaatttaataatatggtttaactacaaataaataatattgataaatgttaatctatgtgaaaatgagagaatttatctttatcaaatgtaattgatttgagtagtagatcttgaacataagttactttaaaaaattaatacttttaaataactcaatagtttttataactctaacaaccatttgtaaaaatactctaataataataataataataataataaaatctaccccatatctcctatttaagaggaattacctcatataataataggggtttctatacgattttttgttgggatttagattgcagcgctagttgc

SEQ ID NO: 127875 - DNA, 1082 bp, Cannabis sativa
  modified_base (590)..(618): a, c, t, g, unknown or other
ttgttttgttttatcgctgcaaaactggtttctgcagtaacagaattacattctgcttttgcaagtgtatacaattttatattttcgtatatattattaatatttgtaaaaatttggtttttcattatatattattatgtatcatagatggatctacagttctaactatgtagtacatgtacatccattaattcatgactatatctgaatatgttgtactatttcttttaaggaaataaattaaagtgaagttctataactttttagatttattataaattaaggcgacatgtggacttgttgaaagatatatcttactatatactatgagcctatatacctttttacataaaatttcgtctaaatcctattttattgttagattagatgtcatatttgctttaaattaaatcatatatatgtatcatatgttgggaattcacatttctgtctattctaagtttctatatcttttattttttattggttgttttgtttcattatattgtaattaggcaagtaattttgcaaaaaatatcacattttatttagtaaaatttatcaatgttaaataataataataataatannnnnnnnnnnnnnnnnnnnnnnnnnnnnaataataataataatacaatatcattttatatcaaatacaaatattattaccatgcatatatctattcttattattgttatattaatttatttcactaaatttacgaattgattattattaatattaaaattttgttttactacatcattttttaaaaagaaaatataataaaaatgatatgatttagaagatgatatttttttttgggtcaattaagttgcattatgcatattttgtgcttgtatgtgttgtaacatttataacttaacaatttgtcaaaatatttaatatgttttcaactaaattttttcttaattagttataaaaaatatgacaaataattaaaaaatccaattcaaaaaaaaaaataattgaaaaataaaaaattgcagcacatacaaagtacgtgctactcacactataatatatatagagagagaaatgttaaagggcaccagtagtg

SEQ ID NO: 127876 - DNA, 893 bp, Cannabis sativa
gaatccttaaaaaaggaccccacccctcattaagagaatcctcataaacgtccacatattccccaataatgttaccaagggctttagcaagccccttggttttgctaagaaatggaagtctataaatctgcacccaaaatggagtggatatgaaagtgcccgagtgtacattttggccaggcagtggggagtgcagcacaatatggtgattttggaaatgaaaaggctctttaagaaggacacgagccttgtccccagcgcaaccaaaactgagtgaaaacatatcagaagactctgtaattgtgattggaaatcgaccattccaatgttgcgccatttggtttttgaaagtagatagccagactttcttattagtgagaacctttgcaaataaaacatggtcttcattagaaatattagcagcaaaccccataccagacaaatcaaaaacagattcttcatcctctgttaaattaattagccctttcatcttgttagtataaggatccatgaagacaacactcagtcgaagccagaagagatcagaaaaaatagaagaagaagaagttatcaatagcagttgatgaagaaacagaggaaaaaactggaagaaacctgggataacatgaagaaaaaaaggaaaaaactgtcttaactgaaaaaaaaactgccacagagcacaacatagtgggcagacgctcttattttttgtatattatatcagtacttgtattttgatagaataataatattttttatatctcattccataatataaattcaaatgctgcgaaaaaatatattttgcttcaattattagtcttgaaaattttattttagttttcgttttcttattacacttttacaatttttcatttatgtcgttaagtttt

SEQ ID NO: 127877 - DNA, 762 bp, Cannabis sativa
caccacaaaaaactatcaataacagagctataaattttagtggccatgccatagatattccgtacaagttatcataaccttaactaattaccatttaatcaattatataaagttacaaattgaacattatttaacaatttaaattttgagttttttaaataatacaaaatagactttaaacttaatttttagttaatttttagagatataaataatctgaaactaattttagcatgaataaatataaaaatataattatttttgtcgtaacacaatcaaatttaattattattaagttttaatcaaataaaaattaagctctgattttattttatactatttcgaagaatataatgtttaaattattattttataaaataatataacttataaaatataaaatttaaaatagtatttatttttttttatttatttattttactacacacatagttgtctttacacttattaataaaaaggataaatataaagcactcacatcacaataaagtggttaataatttttgataatctttattaaaataaaatatataaaaatttatactaataataatacatagatgttaatgaaactaataaattaaaatttttttcaaatatcgaaataaatagaggtgcatgtattataaaatcattggtgcatataattataatagatgtatatgtatagtactagcaaaaatctacgtgcaaggcacgtatattaaattttatgctagtttttttttatgttatttgaaa

SEQ ID NO: 127878 - DNA, 1571 bp, Cannabis sativa
agtttataaaatcacacacgtggcgtccctataggatagggcgttacacttttctagtctaattttttacatagttgtgtacattttagttatttaagacatcctgtaaaattttgataaattcaaaaaaatttaacactctgaaaataaggtttaaattgtctgttgcacgtgtgattcttttatcttatacgcgtgtgaaattaattgtttgaacattgcattctatattataaattattctgaatttctcaaaattttggaggatatcttaagcaactataaagtatactaggactgagcatgaaatttagaaaaccgaaaaagtcgttcaaactaacctgccgaacaccactggaaccgaaactggctgaactggaaattgaaaaaaccactaacggttaaaactgtcattgaacggtcagttttttttttaggtaataaaccgactgaaaaaactaaaatcgatcgaaaaaactgaaactgaccattatacatatatactaattttaagtttttttttttttactttgtgtggtgtagttactcataatatatactaatataatattatttattagtattaaagttgaaagaatacgacaattagtttttgaacaattaaatttatatggttgtagttgtagaatgtagaacaatgtgcttacagaataaattagatcgtattttaaagaaaagagaaagaaattcgatttgggtgattaaaactgaccaaaccaaagttcaaaatagtcagttttaagacatgttctcgattggttggtcagtttttggattgcaacaatccagactaaaaattgaattctggatttttatatagaaaaaaattgaccaaaccgaccaatgctcagccctaacgtatacgactatgaaaactaaaaaaataatagataccgaaatagataagggtagaccgatagacctattttgaaggggtgcattgtaaaaatacctttaatttattgtgtaaatttaaatgtaaataccataaattattattattttcatgatttaagtaaaattattacatcttcttcattaatgtaatattttttcttaatgtattatttttgttattgcaatattatattttaatttattaaattttaatgattttacaatattattatctataaattaattagtatgtttatttaaatcattaattaaatattataattgtagtgattttaatatattaatataatattgaaaatattattttattttatataaaaataatataataataaaaatgattttgttaatataaattttggtgttaccagtagagtaaaaataattttttacactaaaaatctaataacaatataacaccaaatttaatatatacgtgagagtaggggtgagcaaaaactccaaaaaactaaccaaccgagtacaccaaccgtctgaataccgaaaaaatcgaaaaagtaaaacaaccgcctttagttaaaactgcctttgcacggtcggttttagtgttaatggcaaaccgaccgattaaactaaaaaccgaccgaacatatatattatacactatacat

SEQ ID NO: 127879 - DNA, 573 bp, Cannabis sativa
ggtaaaataaattccaacaacagcgagggtgtcggggatggggaggggataagggaatctctgtaatctgcataagagtgaagaatatagtcaatacagtgatttacattatccatcctgttattatgaaccttatcattctaaaccctccaaatcgtgtcaataacaataaacacataaaggaagacctcgtcttcatttatgcctctactttttaggctccttaaaaatttaagccagtcccacatacggatacctgtaccagagatggagaagatatcccacgggaaagagcgccaaaggtggaaaaccaggttacaatggtcttgtgcaacttacttttaaactatgacacgtgaattttacctctcaataatttttttttttataaaatactctctttgaactagtgttgtagatgaaggtgggttttttgacacggtacgaaactggcacgagcacgacctgacacaatacatatatgttgtaacgccctaatgctaaggcacgctaccgtgctttttcaattatagtgctatctttgctaatcaaagatttttctcgaaaaacgtg

SEQ ID NO: 127880 - DNA, 1510 bp, Cannabis sativa
agagagagagagagagagagcagaccactaatggcgtctaggacatgaaccgcaatgacttggtctccaggcaaagccactttgacgagagcccaggtgagcaactcccgacttcgagagtcgagcttgactcccaccaagaccgttcttttaccggcttccggttggccggcagaatggtcgacgaccatggtgatgccacgacgacgatgaaaagcaggaggttccggtgggaagtggggaaaattgggaaaaatggagaatcggggaaaaggaagggagggtgagataactccggagagagaagaagactgagtgtgttttgtttggtcttgtggggtttgagaagtgagaaagaaagagacaggaaaagaaaagaaatggttgctgtctatggctatggctatggctgcggctgtggctgtggttgtgtggggtcactctcagattaagattgtaacgttactgttaacgttaccgtccacactccatcacagtttcactttcacagatctctttttttgtttttactttattttattttctaccattattattattattattattactatctctcttgtcctaggataggattattcttctttgagcttggggattttacaattaaaaagctaagataagatatgggtttatccaatccacaccgacaaaccacacatgcttttcatcacattatattttggtcacttttcatcataattggttgtatgaaattactctttagaaaaaccagtttagtttagtttaatttagaaataataacaattaataatattatttaacaaaaataagattttgggtctctctacgctgcttttggtataaaaaaaattataataatgtatgctataattattaaagatattttataaaataatatttgtacaatttattttacatgtctataaaataaaaaaaattacatatctaatagattgattaaattttgttgttgagtgtattaaattttttcgaattttttaaaattttacagaatatcttaaataattacaacatacataaatataaaaaaaaaaaaaaaaaattggactaagaactctctccgatgtgataagcctattattttagaattttccaaagatttgtattctaattttttgttttaaaagaaagttttcattctaatttaagtatcgccattaagtttatattaataaatcaatgatacataatttgaaattaattgtttgtaaatagtattaatagtaagagatatgaaatatagattaaaataatcttgtttttttctgtgttaaaaatgtgtgtgtgttttttttttttggaaagaatgttaaaaatgtatatacagcagaacctttatccaagaatacacttagcaccaattaaattatattctaatcgggaagttataactaaatagagttacactagaaaaaaaattcaaaaactagaaaaatatcaatgtaataataataacaataaataatcattaatactatatcat

SEQ ID NO: 127881 - DNA, 960 bp, Cannabis sativa
atagttcagggggcatttttaatgatcttaaaagttcagggggcatgatttggtacatgtcaaagttcgaggggcaaatatcctaattagcctacatatattgatattagaattagtttttaatttactaattttttatttgaagtgagttactatttgttatatagttattttttttattataatttcaaaaaaaaaaaaaatgaaattagttgcgcgaaaaaaaaaaaaaaagctatatttcctagttagataaaatttacaactaatttttttttttaaaaaaaaagagggtaacattttgatattttttttatgtaggaaaaagggatcaaatggtttagattctttctccacttattcggtcattttgacaattttgagaatcacgtgttagctatagggactttatatttcaacctgtcttaattgagtcatcggtaactaactcaagaatttccatcacaaatgacggggtattaagttaaataactatcttccaaagctacttttgctaaataacctttttataaaattatcttaattttttttattaatcaataaagtaaattactaatataccacctaaacacaacctaaactcctgtcctaatccccacgtatttttcttcttctcttgtttatgttttcatctcttcttcatctttttatctcaaccaactccaataataagctcaactattattttgttttcttttcacctcattgttttttttaagatttttttttcataaattcatctccatatcttctccttaaatctgtcatttactcccttaaaattcctaaaaataaaaccctaatttgtaatcaatccaatctccatagattaaactcaagaaattcttttagtttaatcaccattccagtaagttttattatatatattttccaatttatataaatatatcatattatcatattatatatgtatatata

SEQ ID NO: 127882 - DNA, 1378 bp, Cannabis sativa
aatgagttatattaaaaaactcgtaaatgcatcaaattataataaaataaatcaatgaataattgagattttaaataaaacaagatatatgtaaaactagtttaataaaattttatattaaatatgtacaaaaataatataattatatataatatatatatgttcgatcgattatcggtttaatcggtcggtttgccattgatactaaaaactgaccatgttcaggtggttttaaccgaaggcaatttttttggttttcaatttctttcggtgtgcgaacaatcaatgtactcgatttgatcgatttcttagattttttgctcacagaaagaaaaaaaaaactatttgaacttgcaaaataaaccatgtgaattatttgactactttttatttagtcacatggtattataaatttttgtagtagacactcttaaagatccttttagaagatctttcaatgtgttttaacattcagaaaaaactttcaaaataatttacaatcttgaaaataaaatttaaacaattacataccacgcgtacaagaaaaaacaattcacatataataaaatatatagatcttattttcggctataacaaataaaagatctaccaaaacatccctttaaaagagggtctaccaaaatatccctttaagagaatgtactggagacttaccccatgatattatactattattagccacaacataacttaataataaaaatacattaaaaaaaggatagatttagaaattaatattttattttattttatttttctttcgtaaagtattttattattattaatttttttgaataaatcttgtaaatttattaatagcaatccactaaaataatagcttgtaatctaaaggagagatctcacttgttagagggattaaaattaagaaaatgaggcaaataatttgtctaattcttagatcgtttgacaaataaattaaaaataaaacaagatgaaaaatattggaacatcacaataaccttaataatatatatatatatatattcagtttcatctaccgctaagaagatacagcagtagaaattattgcagtatgttcattcaaccttgcagcttgagcactcaactattatgcaatgtaagtaattgtactcttaacaacctcttcacgtagaatttgttattcacaactactaaaagcgatttattagtgtaaagaataaagaataactaacaacaaaataaaataaaactatgtaaacactcaaaactatgtcacaaagataagattaaaatacttaaaattaggggtgttcaataaaatttacaaaccgcccaacccgaataaaccgcccaaatcaaaccgaataaatcgacaaaaaatacaacccgaaat

SEQ ID NO: 127883 - DNA, 733 bp, Cannabis sativa
atatattaatatatataacacttctcaattaattaccactaccactctcatcccatacaaaattttgtctagatgaaacataagtacaaaaataatactaccaacttaattaatactgaaacggacagctctgaaatttttacatttgaaaaacaataataataatataatgcataaatataatcacataattaacaccacaaatatacctggtcatcacacaccaatactagctattcttgttccctttgacaagcttaatcctcttgacaccgctgcaccttaaccacttaatatatttgtacagaagtgaatgtaatgtggttgaatatcctcttatggtaggtagctcaatatgtacagcctcaaacagcggcatcaaaaccaagaaatagcatgagattattcttctgggggatattttaagctacgcatccatagtttgcaggacaggtttagaaggagttagttcctctcttctattcggtttcgatctttccttcccggccttctgagaattgggtgtgcctttaacagcacctctattgatttgcctggctgcttgagcgccggaacctccccctgatccaaccaaaagcaacaattaaacggacaataacaagaactaaaaaggtttgactctattacaattatattctaaaattttttttttgagttttaaaaattaaaagtacttattgcttttaactatctcatttgcaggttttttttt

SEQ ID NO: 127884 - DNA, 1394 bp, Cannabis sativa
  modified_base (44)..(47): a, c, t, g, unknown or other
  modified_base (78)..(81): a, c, t, g, unknown or other
  modified_base (107)..(110): a, c, t, g, unknown or other
tgcaacataaatgcgatttttgatatttcttaattagtaaatcnnnnttgatatttcttaattagtaaatctgattannnntttcttaattagtaaatctgattatnnnnaaatgagttttatttaaggcacaacatccaatacttggttccctcgaaacctcttgttctgacttgagcgaccaggtgcagatggttcctttattttttgatcggtggtcgagttactaccgcccctaccataaccagaggtaggatgagtagtggctccaccaacaacttgtgtcccttgggactctagaatgcactcaactatgccctcagctcacactgcttttcccatcatatcagcataagtggcgttatcatctgttgtgatcattaggtcgtgtttgatcttgggattcaaccaatctagatacttttctttcttgctaaaatctgttggcacaattcttgaggccaacctagccaacctattgaactgagttgtatattctataatgggcatatttccattctgagtcagctgagtaaattcttttccctttgctctacgaactaccttgttatagtactttgcattgaacaattcttggaactcttcccaagtaatgttagtgaaatcccgagtaagagccaacatatcccaccataccagggcatcctcttggaatcggaatgtggcacaagccactctgttgttgccagtgactcccataaaatttataatccgtgtaataacaatcagccactactcgactttcatcacatctggacctcctacaaagacttggggtggctgcttacgaaacctttcgtacagtggtcccatttggttcacaatagcaacgggccctacctgcatagcagaggcagaagccacctgcattttaggagcacgtattgtaggggtaccctgttgcctcagacatctgactttttcatcttgttcgttaattctggcttgcattgctgcaaacatgttttcccaatcctgggtagcctgcggtgggttagcatctccacaatcgcgtgccctgcctcagccacgaatattcaagggaaactgaactccctgaccgccactagatctgaccaaatttccctagcttctcgtgttctgcctggcgtccattctaatagaatatcctacgaaaccaagaactaaccttgtcagatcgcgatcaagaataatttactaataatcacttattccaaaaattaaaacatgcacctattcaactatcaaactaataacatgcttcctactagacttgtcttaaaacatactaataaaataactactaaaacaataaaggcttactgaaccgtgagtcgagcttatctctgatgatgattgtacttgtcgtgacaatcttcggaagataacct

SEQ ID NO: 127885 - DNA, 1208 bp, Cannabis sativa
aatgggttcatcaaattaaactctgatgcagcattgattggctcaaatcaagactgattcccaaaggttatctccaagcacttggcattggttatgctaaaatgttcagccatgtagttaaaccaatacgagtgagaatggttctcactttagttgtgatattcaactggtgagttagacaacttgatgtgtataatgccttctttaatggcaatcttcaagacactatttatatgactcatcctcaaggatttgaagatccatccaaacctaatcatgtgtataatttaatttacataaagctatctatagccttaagtaggcccctagagcctaaaatgataagctcaaaaccaatttggttgtcaggggttttataacattaaggcaagattcttctttgttcatctttggtactaatcacaatttagtcatcctacttgtctatgtagatgacatcctcataacttgtcctaacactcaacttatcaccaaacttgttgctgatttgaacaccttctttgaactaaaagatcttggataggtacattattttctaggtgttaagattcataaagattcagatagtatgtacttgtcttaaagcaaatacatcactgattttctagtcaaagtacaattagagggtggcaaaccatattcttgccctacaagaattgctcagaaactttctttatctaaatggactccctttgaagataaaaccctttacagaagtacattaggtgcactatagtatttgactctcacaaggcccgattttgccttcattatacataatctatctcagtctcatactagtgtatattgggaagcttgtaaacggctgctgagatatctgaaaggcacactatctgaaggacttttgcttcgaccaatttctaggctatctcttgaagcttattcagatgatgattaggccaatttccttaatgacaggcattcaaccggtggttatactatattttttagacttaatcccatctctaggtcagctaaaaagtaacaagtaattgctcgatcatcaacaaaattagaattttgggctctggctaatactgcagcataaatcaaatggattctctcccttttgactgaacttcgggtttcacttgcaaatattctcattatatggtttgataaccaaggtgtaatgccccgatttcccgagacgtcacactagctag

SEQ ID NO: 127886 - DNA, 1691 bp, Cannabis sativa
ctaatttaatgcacaaaaagagctaaataactctattttcatagagttatcaatagcttatcaaagaaagatggctaaatacttcaacgccaaggtcaaagatagaaaattcaccattggcaaactagtcctacgaagggtctttccagccacttaagaacccagagtgggggtactcgggccaaattgggaaggaccatacgaaatcgaggatgaatttggctccgagacctataagctcaaaagaatggatggatccacagtgcctagggcctggaatgccgaccacctccgcaaatactatcaataaaaaagtaaaagtttatattctttaaaataacctgtgccggacaaatatatgcaatatcctatgcaagtttcaaagctaagtgacttaaaaatttcttttcatgtcacttaggggggtattaaggcataatatatggtcaaaaaacaggatgaatataagaaagtaaaaggttaaataaattcaaaagtcatacaaattgttcaaaagacaaatagtaaaggcctagggccgagccataataagtctccccttataagaaagtagaattgtcttataagtagggggaggataaaataaaagaaaaataattattacttaatcaacctagggagaaagatgaggacccctgcgttcctccaatactgcctcaagctttttgtttttctcccgaaaacgggccagaacttcctcacgcttggggtagaaaggaagacgaggttcaaaattgttggccttctagcacatgaacaccccatcgtcaaaacgcttcgagcagtgttgacaggtgacgggggataggagagcatcccttttggccttggtcgcctccttgcgggcttgttccttgaactcacaaagctctttcacttcgacagttaagctagttgtcatttttaagtcatttttgtgaaactcctccaaaaatcgtaacttagcagtgagttcttgaactttttccttggaatctcgaagattcctcctggccgcggaaataatctcgtccctggccgtcagcacctcccaatggtttttctccatgaggccctccttccttcgggcttcatcttggattgccttcttctgctcctttgacttctaaagactcttcatcacctcctccgtgccacaaaactcagacatggtaaacccgtggtcgatcaaagtctttgaaagaggaccagactctgcagcaatctagcagccaatagggaaaagttagagccttgtattaaaaaaaaagaaaagagaaaagaggcatatgaaatttgaaaggtgagaacttactgcagtaagggccacgctcatgtcctgaattcgatacacagggttggtaaaagcccaggtcgcatatctcttcatgggaagttgggtcaggtcggcggcaaaatggctcatcattttcgaagcaaagggagctaggctaggccccacaaagcacttaaaccagtgtgtcaaaggatctaaattcaaatcctagacgtctctggcatactcacctcggaaagacccatcctgggcatcccttagcaatttcttcagggcctccgcctccgcattcctcttggtatgtttgttaggctaaaattagtctaagtttcgggtcatattttcggttagtttttgttggaaattattttaacaggatctagatttactaaca

SEQ ID NO: 127887 - DNA, 1011 bp, Cannabis sativa
cgtcaacactacacttagctctacaacatataatgaaaattccaaatcgctttgtacggagaggaaaaaatcaaaagagattagaagggctcatcaatatcaaaaaaacgtagagaggaaagccctagtcaaacgttaaaggcatagctaaaggttgtcggaggcatgaatcgacatcaggatcacgactggcgagagaagatgacacaaaggccacaccagaaggcttgagacctataacggtgtcataagaaacaactcagagtccgacaacaaatctcgaaggaacgaggaaacagttcaaaatcacctgagtacgaagagaaaaaatggccttttagtcatgtactttctcaataagtgcataatgttgatccacttctttcatcttcttaatgtgaatagttataattttaatttttatgaaattatgtaaattataattttcatgaatatacatcaaacttttgagacatttgaaataatttgtaatacaacaagtagagtttaaatggttagacacatgtaaaataaattatttaagcactgcatttattttttaaattatcttaaattttttaaattttttaatatatttttttaaatgtcaaaataaataaatagtcgatctgtgtatttttttaataagataccctatcatgtatgtataaacttattcttttgaaactaaatatattatagatattcgtatatatatatgtggaacactttttaatgggtaatacttattaatgggtactaaaaaaaattaataatataataatctattaaccttttatagcaagttaccaataatatattttttaaaaaattatatttatcttttacaaaattagaaataataattacaactaatagcatggaaaaattataaattatttttagaaactaattcaaattactatcttattattttattgaagataaataccattttggaccctgtgttttgtaaaagttaccgatttgaccatctattttgttaaatga

SEQ ID NO: 127888 - DNA, 705 bp, Cannabis sativa
tttactcttgggggtggagcagtagtttggagaagtactaaacaaatcgcgatatcggactcgacgatggaagcaaaatacataaaaaatgacacgtgccttttttgtcgtgcctaaaagttggtgcctaaatacttcaacgggcaccacaaatagcatcgtgccaattgactgatcaaattacacgacacctgtagtgcccacttagaataaaaaattctataaatcatacatttaggcatgacaaagtcgtgcctgtggatttaattttccttttaataaaaataattttgtattttcaaattaatttatatttatatttaaaaaaatataatcatccaaaactaataaaaattaatatataaaagtgtcttctactatataaattaggaatcaacactacaataaaaatattcaattaaataaatacaacaactaaaataagttttcaaataaataataatacttatatcatcatatgcatacaattacaaataacaataataataaataataatcctaattgcgtggattctttctcatcatcatcatcatcgccattctctctagaccgttgttgtggaatttatgatatttgcagatagtatggttgctgcgatacttttggcatttgcgggtagtatggtgttgggttttatgccctaaataaaacttcatttcaatgtaatccattttattcaacat

SEQ ID NO: 127889 - DNA, 1014 bp, Cannabis sativa
tttcgggccgaaccgggtttgggcccgaaatgtaaattgaattgattatttgacatgtgataatctggaatttaatgactaacctgtagtgattcagaaataagagaacgacaaaaagtgaggacgtaataagtaggtgagattgtgcgtggatatatgtgtgagtgtgttgggggctcacgtgcgagcccatgagggggctcgcatgcgagccatgcatgtatgcgggtgtgtgtgcgcgttgagtgtatgtgtgtgttgtgtgtgctggttgggggctcgcatgcaagccatgaatgcattgtgtacattgtgtgcataggtgtgtgtgtttcacgagttgtaagtgcgaggtgggagttgaatgtatattgacgagaatgtcgttagatggggaaacaaaagaaaaggcgtgcaaaagaatggcatacaaccacgcctcgtgcaagatctgaaagcaaggaggtatgagtagtggagatgcatttaatagtaagtgtatctcaagccaatagaacctacaaataccacattcgcatatgatgtgggttagaaaataaatagttctgtaactcaggcattaaatacaatagagagaaaacgctcatccattaatacttgtatttctttttatcttcgtcatcatcttgtcatccattcaaatgtcaggccaaatagtaaatttattaaaaaaaaataatatatattatacataaaataaatatataatatttatttataatatattaggattcaacttttgaataaaatatgtataaacaagttatataacccaaaatatttatatgaatttgaaccattgatataaaaattcatttattcaaaattgtaataccatatacaacatgatcatatgcaggtccaaaaccgttgtaattccaactctcactacaccaaaaatagaaataggtgacatttgattttgtgacatttggtgaaaaatgttataaaaatattaatttagtgacatttagcaaaaaaatgtaactaaat

SEQ ID NO: 127890 - DNA, 884 bp, Cannabis sativa
tactccactcattgccaattggttttgagatggaatcccatgattcccaacattgagttaaactatagtatatgatagttattttataagacatattttaaatgataaaattgttattataaatttaatattaaaaaataaaataaaatcaattactcttaatggcatgggaagttctccctttcttttctctcttgtttaatcaagttctcttttttctaaatttaataaattaaataaataaatgtaagagaatgaatcacttaccattgattcctattgcttattagtaaacacatcattaaaggggtatttcagtagactttctctatttgtttcgacatgtaagagagtttcttaatctaattttttttcataattgtgtatattataattatggaatttttcagttttaactaaaaaaagtaactatattacaaaaatatttctagctggctaaataaataaatatacagcccaaataaaaaaaattacacaaataccagttacacataccttcaacacatgatctatgcttcatgggcaactatgcgcaaccatcgcggaaccatgcagcaacccaacgcaaccaaaacaaaaattaaacctgaaagagaactactattaattctgacgacttcaccggagaagacgaccagaatcaataaaaacatgatttgtttcgaattcatgaaaaaaaaaatgtagaaaaactactacgaaactaaaattctaccaaaaattcagtttaatttgtataaaactaatgttctgactttagtttttagatccatgaaaaagttgaactggagttcctaaacaatccaactcaagtataattcaaaaaaaaaaaaattacatcaatactataataaaatatttat

SEQ ID NO: 127891 - DNA, 597 bp, Cannabis sativa
tgttaaagcatattttgaaatttaaaacataagatgatctaaagggctaacaaattattacaaaaaattaaagcaacaaaattatctctcaatgtttactggaccaaattatttgcaggcatttgaaactgtaatttcttctgctgttctgtatgttgaacatattttaggctttgaccttgcttttttggcatgttacaataccatatatcaatgatgaatcaagtctaattttccattcttcttagctgtttttttttctgtcattacttgacttggaacttatttaatatccagtttgcgctgtttatttattattattggtctttgttcgtggatgttgagaatcctaacccattgtactgctggagtttgtttttcttgttcttattcattcttctgactgaagcttgtgtttctgataaatagatatgggatatcaggacaaagaaattgaaacaagaccttccaggccatgcagatgaggtatgtttgttcttcaaattagaatctttacacaaagtgttagaccatctcctaaaagttgagctatattttgtacaaaaagtagttttgtgatatttttacatcaacttt

SEQ ID NO: 127892 - DNA, 2207 bp, Cannabis sativa
  modified_base (2168)..(2177): a, c, t, g, unknown or other
agactcagtaaaaaaagcatataatatacaatatattacaaacttgtatttaggcgcccatacacctattcacaaggcttaacaaatgattaagaatgttcttaacaaagatacgacctctgtactacatgcactatgtactactattgtactagtgttggtaggatttgaaccgtactctgagtaccactaagtgttgtaccacatacactacgtacctaggtgtactagtgttggtaacaccggattgtactcttaaatatcataggttgtacaatatgcacttaatacaactactgtactggtgttggtagcatatcaatcatataatagtatgcatataaaatacatacacatacatatatatattcgatgctagttttactttgtttttgaattcaagcgtgtcagtcgacctgaatggaaaatcacgtattgaacagaggccctatgtcacaatcacataaaacaagtaaacaactttctaaacctttttggggatctaaactagaaactaaaattttttcattgataaatagcatggcaaagccctaagtatcgagaaaacagaagaaaattaatgaaatggaaaaactgcctgaaaaacagcaggtcatttctataaaacggtaagccgtttttttggattctacaccaataaaaacggtaggctatttttttggattctgcaccaataaaaacggtaggccatttctacaaaaatagcttgcagtttttcattgtagaaaaacagactctcaaagccaccctaatttgaccccatacttgaatctaagctctaaaacacctaataacataataataaaccaattctaagtgataaaatcaagtattacacaaaaatacacaatcaactataattgagccaaatttgagttcttgaactcacacttgctgaacatcaaattaaacccttaaataccaacctagcaagctcaaaacatctttaataaactttaaaaacacaacaaactaaaccttaactcacacaaaaactaatttaccattttgcatgctgtaagtaaagaaaaccttccaaaagcttaaggagaagagaggtttagggttgccttgaatttaaaccttaaatcgcaaaagaaactccttaaaattgatgaagaacacttgctattttgctggtttttgttgtgttcgaacaattaaggagagggaaagaagcacaaatcaattttcttttcataattttttaatttttgttttatctaattaatcaatatcaacacttaattaaaatgactaaaatgcatgcacttaaatgcttaaatgataaaatagcttaggaataaaatggtccaaaacgataactactgatattctaaatatcaacttatgaatacccctctaaataaaaaggttctaaactaaccaatgtgactaattgaccatccgtcgcattttccatcgtccccgagcaaaaatcataaaaactgtaaattttgtatgtaacataaataatactcttagagtttaataaaatatctaaaattgagaaactataactttaatgcctatttctgaaaataggacccacaataaatataaaatcatgtataatcattaaatatcaatattaatgctaattgtctttactaatccataatctaatcatgcggtcattacaatagtggtgaacactttgaagcaaggagataacgactcaagaatgatgcatacttgagtcctctcatgaataactccatatgtctctcctcatatattagctcatttatgtgaaatacattagttctcacagggacaccctgttggtttttatggttcatatcagagttagaaaaactgaagaggatttgataaaaatagtttttatctaatatgaaccataagcccaagtatctcaagataatatatatagattaaatctagagtaatgaaaataagacaatacttcttgaagcctatcacggtatcattgctatcttttagtataataaacgatcatccaatctaaaaacttttgttgaaaaattcacacctcaattttctaagccaacctcaacactcatgaatagagtgggctattagatcttaattgatgaattaaattaaatattatagtgtgtacttaactcatgagacactatgattgagataggaaagaacacaannnnnnnnnnctctatagctgtgtgtgtgtgtgtgtgtgt

SEQ ID NO: 127893 - DNA, 978 bp, Cannabis sativa
cgagccccaagtcgtctccaactgctctaccgttgtaggtccatggttgatgtcttcaccacccaaacacccagtaagttcactcaaaccgctggcttattcgatacattttaatggcatttgtgattttgggtacacaatcgatgttcgtgtttgaagggttttggttcgacgagattaggttcgacgagcatggtgttcgacaagcttggtgttcgacgacttggtgttcgacgtttatggttgacagtggctttgaatctgaatttttttttattgtttaagtttattttgttataagtttaaactgatactttgaatatgatttgggtttattttattttaaataaatatgtatcaaataagctaatctaggttatttatttatttatttttgtaatttttaatagaaattgatatgaatttgtattaaggctcatataatttataatttcagtttaaaattgtattcatagattgtaatacattttgttcataatcttaataaaaatatttcgtattttgttattttattttttagttttattattttagttgaaacaataatatgcttacatttagttaatgaaaattattattattatatttaatttattatatataattaatataaaatattatttataatatataaaatttgaatttaatcaaattaaatattatttttttagaaaaatatataatatagtggcactttttgtgtgtcactatatctctaaaaatattaataaaaaagaaaaaaggatatagtgacacttcatgtgtgtggctattaccttttcagtctgacaaaacgtgactctatacgcctatagtgacacgcataaaatgaatggaaaaggtttcagacgtgtgaagtggtcactaaaaattgtctttccagtaaccttcatcagtgacgcgcgttgaagtgtcactatacacttttagagttactctatgtgtgtcactaaaacc

SEQ ID NO: 127894 - DNA, 979 bp, Cannabis sativa
ccagtcaggaggagcactcaaacacaatcatgatccacctccaccaccctaacactcaaaagcattcctaccatttccatatagttttctagagagaagataacttggcctccatttcctcctccatatttcaatcttccagtcaggcttacatctataccaaaggaagttagagcgcacatggaggtcattgaacagtttcacttgaagaggcatggcagtgagtatgacgaatgaataaggttaccaacaacatttcttccaggcgtaatgctgagtttgctgattacgataagtgggatgagcctccaactgacatcatagatggagtagagatgacggagagactttgtcctagagttaggactgatgtggctccattcttatctgatataatggaccagagtgctacaactagttgtaaagttaggactaacaggctcacaatgatggcaagtggggaccccatttacatggtggatactatgaggacccaagccaatgatgtaagttgacttttactttaattatttcagacaaaagctatgtttattttgtttgtctgattcatttaaaattattttcataggtgagcctgatgttggagaggagctgctccttggtcaacaaactagcctatgaacttgtgttgatgaagtctgaatgttccaatgctgaacaaaggagagaagaggccaccaaagctgtagcagatgctaatgccaagatggattccatcattaaacaaagggtaaatgattctttagataaggctattgcacatgagatgaaggtgaccaaggtcgagaaagaccatggggaaaagttcaaaatatactcaagctctctctcaaatcagtgacttagaggtagattttgttggaatttattttaccaggatcttagatctactgacaagtatgtttattaacaccctaaatatgaactttctaagacgatgaaataaacacatataaag

SEQ ID NO: 127895 - DNA, 1264 bp, Cannabis sativa
catttataggattaaaatttgaaaatatggcattagtaaaataaaagataagtagttgaaaaaattgcaaaattatagctagtggggcccgttatcatgactggccattagtgtttaattttgatattattttatcttttttttaatccatgtaatttcaatcctaaccctaggtgaaatagtataaaaaggaataggatgctctcattctcatccaaccaaaataacctatttttcattctgttaggcaactagaaatcttgagagcctccttctctttactaatttcaaaatcctctctgcccctcttcatattttttagcctatagtgaaagagtacatgacaacccatagaaagtcaagtactcaatcatagtgtgtaagactgtgaataatccaacacttgaaggagaatcaagctcagatatcttgtttatactctgtgacaaaaatgaacaaaggttagagatttgagtggaaggagagatattatttcgctgccaccaatataagggcacttaaaatttatatgtgtttaattctattattttagagaatttatatttagggtgttaatcaacatatttgttagtaaatatagatcctgataaaatatattctaatagtgtaaacactaggggaaaggctgttagtcctcgaggaggagaatgagattatagattgtttaccttagtttgtgttgcgcacgattacgcgggtatacgtcatacatgatactcctcttcttgcagtctttccatcctctgacttggtagtcagtttgtgttaggaacagtagggcctctactgcatgcaaggttgcaaataagttgattcaagttaatgccatctaggtttttctcacctgagcgttccctacagttaaaagtcacattagtacgttcattacaacgtctagtgtcattagttacctgattatcagaacgacattagtttgggactcatggtggataccaatcttgaatctgatctcgtcctgtgatatttgcctataatgcctgcatctactcatgcatagtcaagtattgcatagttgttagttggatgatgccctttcaggctaagcatgtgttatcagtggaaattgtcccatagtagttgtcggtgttgaagttcttcaacatggcctcaaaattgaggaaacaagttataacgccccgatttctcgagacgtcacactagctagtccgtttaaaaccatttaagataaagacaataaaagacttctttaatgaaaaataac

SEQ ID NO: 127896 - DNA, 1018 bp, Cannabis sativa
gcatacaattgtacatgtttacaagatatacatcgcatactttttgcgaataccaaattattaaatacttttctcatatatcttctgtgtctacattacttattaccaactattcaaaattcaatcattgccgactatcataaacaaattaatggtggaaaaaaaaatggctgttaataatttctatgtccttacaattttaaagaccaattaagagttaagagttaattttaaactgattatacagattactagcttgaagctgaatcactttgacaaactacgtagagtacgactttatttacagaggaaaggaatgaatagtagctcctggaacatctttctatacaattctgctacacatatcctataacagaaatattatgatataatgaatttattccaagtgattcagcttcaagctagaatgttaatgaatttactcaaaaatagaatgtttggtataagagtttcacttggtgggttttagttgggagagattgagattaagggcatctcaaactcaagtacttaagagtttgacattaccccaaaatataagtatatatcaaaaattcatccctaacctcgagaacatgcttatatcgagcatcttttgagaaaccatcgaacctattgaatttttactagcaagaaacgcaaaaaacccaaaaaaatgcagaaaaaaccaaatccaattgttttgcaaaaattcaacacaacagacaaacaaaggtatagatttgttcgaaaatgacattaaacatgtaaaaaccaacactaatgaataaatgttagagaatgtcacattcccatggatgcttccctccaagtacccaaaaataataaaagggtaattagtaatttttctgcctgaactttgacatgtactaaatcgtctttcttgaatttttattgccgttaaaaattcctcccgaactattgctattgttaaatttaaagacttttgtctaattttagtaaagaaattctaacatgaatgaaagttcaaggggca

SEQ ID NO: 127897 - DNA, 2156 bp, Cannabis sativa
tttttttttttttttaagtaagtagttttcataagtggttcttttttattgttgttcataattgagttttaagttttaattttatattaaattattttaagaaactggtttttatttgtttgtttttattttggttattttactaactggtttctcacatttcactgtttttttttattcttttatggtttatttataaatcaatgaattgtattgcacaaaacgaattttatacaacttatgcacacccaattagggtcgaaatctatgtacaagtatatatcaatctaaagccaagattatttgagatctataatgcaagaaaccattctctgtcattactcttaatctttttaggtattactctatcaatccgagtcttaagtgtccattttgtttcttcaacaatacggctcgggttgactcttgtcttttgccaaacagcttcattacggtttctccatatgttgtacaccagtcctattgcagcagcagcgaggacacctttcttaaactttgacagtttggatctcaatccatttgaggagctgctggaggttgctagtttgagcatgccaatccagccaagtcttcacgtcctgtaagcgctagccagcaactctacactcaaagaataagtgttgacaagattccatctgcaattcacacaagctgcaaataccatgaacctgaacaccaaaccgcaacagtctatcttgagtcttcagtctattaagcattgccaaccaagctataacactatgtttaggggtgttcagcctagaccaagtttccttgcaccaatacagtcgggttaatgggggtagaaacagtttgtaacctgctgaaacactgtacttctgcttctgaaaaatagcaggatccaccaaacttctaagttgatctttgagggctaccatcttcttccaataccagctaaagtgtatggaaggagagtagtcccactaatcctgattctcaatatatacactatgaacccatctaagtcacaagctctcttgcttatttgagatagcccatatgtacttgcatattgcagctttgttccatacttctagattcttgatccctagccctccagatgccttgggttgacaaatgctattccaagcaacagaccctgcaccctagaacatggcttgacctttccaaagaaaagccctacaaatgacttcaatggacctcaatactttctttggaagaatcatcatttgactccagtaggcctgtatagcaataagaactgagttaattaaagtgatcctcccaacaaaagaaagattcctcgaactccaacttctaattctagcagtcattttcttagctaatatatcacattctttccctgagatctttttcccacaaattggaattcccagacaggtgaatggcatctcctgccttatgaaccctaaaatctgcataatgtggttcacttcaccaggctgcatgttactacagtatatggcagttttgctggcatttgggtataatccagatgtgagtgagaatgtttttagagcctgcaacatgtataggacactcatgaaatccctatgacagaataataagacatcatcagcaaaagcaaggtgattcagcttcaaagtagaacatctatcatggaatttgaacccctcttgttcccccactttcttcatcaatctagataagtactccatgcccagtacaaagagcaagggagatatcgggtcaccttgtctaatccccctcttggcttcgaagaaaccatgaagtgttccattgaacatcaaagagaattttggagttgtaatacagttcataactagttgaatgaatttcaaaggaaacttcaaaccagttagcatctcttcaaggaagctccacgcaattgtatcatacgccttttggagatccagtttaatcatgcagctaggcttatttgccttttgtggtttttattgtatttttgtctctttaattttctttgtttctttttttctctttgattttaatttctgattccctttgttatatttgttgcatactgtatgtttaaatcaactctaatttttaagcaagttaaaaaaaaattaaatgccaaaataaagaatgaagttagaagtttggttattaggtattgatataaaatt

SEQ ID NO: 127898 - DNA, 700 bp, Cannabis sativa
aaatgcaaaaaaaaaaaaaaactgttgtgaagtataaaaataaaattaagaataaactctccaacttctacaattgttttgttttgtacttattacatacactctaatcttaatttttcttttataagtataagggttgatggtatcaaactttaaaatttaagaagtttgaccgaattatactctaattttatttatttgaccaattcctataagtactgtacattaattgaaaattttctttaattttgacaaaagatatgaatatgacttcaaatcagttttttgtagtactctttagttagcccattttattatataattttgacctaattaatgcagcaaatttagataatatcgttgtaatagatacttgtatatatagtagtgattttttattgtatgtctctagggagaaaaaagatagaagacaaagatcttattgtatgcatgcatattcatggaatgacatatataggaattgactactaaaaaataattttggaaaacaaaaatattttttcttatataataaattatagggtgattctacaatacatcccttttaaacggatgtattgatgtaccttatatttgtttcggcatccaaaaaaaaatttagtctaattatttttcttcatattcatgtacattatagctatttaagatatcctacaaaatttttgagaaattcgaaata

SEQ ID NO: 127899 - DNA, 777 bp, Cannabis sativa
catattgtgccataaaaaaatatggaatgtattattttatgcttagattcatattgacccattcttatacagattcaaattcgtactctatttttttatattctatttttacaatttataagataattactaagttatgtgtatttgtttttttataattttaattattttttaacattttttcacataaaatcatgtaaaaaattcactaaaactattaaaatttaaatatttactagtaaatacttaaattattattaccattatcaaatataaattttttaatatgttgcattttaaaataaattatttatgtcatctatgtcgtgcttaaacttatattttcatacggtatcatacctaaactaatatcatttcatgtctaatcatactcggtatagaaggaaaacttacaaaaatactaaaatttgagttagtttttacaaaaatactatcacacagaaatcttttcaagaatactgtgtttttataaaacactaatagaacacaaagcagtataactcaaaacaacagtagaacaactaaaaaacaccagaagaataactagtgaaaacttaacacagtatactgcaatatgaaacttataaaaaaatacagtaaaaatataaaaaataccgcttgatagtatttttataaagaaaatgacaaaaattagtataccataaaaatttcccgtataaaaaagcgtaacctatatttagagcactacttacttagggtgcgtttggtaacatttttttaatcagttttttattt

SEQ ID NO: 127900 - DNA, 1266 bp, Cannabis sativa
atatcaaggcttgttaatcgatgttcatactaactaaaccattttggacactaacagtgcgcccactttcgaaattaggataatgataaaagagtatacttaaaatctaaacgaggagagatttagggctgaagatcagaaagcacaactctactttatgttaagaaacggtaacctcaccactaatacacaattacctcactaatgcacacttacctcagtaatacattgtgtactgtatagttgtgctaaaggcacattttgttcgttctattatcgccttttcgttttcatttgtgtaaaaggttgtggtcccctgcctataacaaaattttgtaagggcttatcccaatatatatggaataccctcaacctcactattcttgagttgcgttttgcaattttcctttattttgaaaagtccctttctcatcttggtatcaaagcaaacctgctcatgcttcaatgttgtctagtaccagaggcaagaaaaaagtaatgagtgaggaattttttgctctttcgagaaacaagacatgggttctgataaagcaaggcttgttgctaagggatccatctaagacaatgcctagattttagggggacctttaatcctatgatcaaaccttcaacaattcaggtagtgctatctataacaattctaaaaggtggatagtgatataacttgacattgataatgcttttctaaatagaaagttagaagagattgtgtatagggtgcaaccatagagctttgtgacaaggacaaaatggattatgtctgcaagctagagaaatctctttacggactaaactaggctccaagggcctatttgagaaacttaagagtactttgatcacctggaactttgagaattgaaaagcggacacttcataatttatgttgaaaactccacaattttttgttatgtctctcatctatgtagatgatattataattacagggaggaactcaatagaactcaagaagttcatagatcaaattgaacaagatttttttctctcaaagatcttggagatcttaattacttccttggaattgaggtatacaaagacacaatgtatcttattcaagggaagtatattacataattgcttaagaagatgaatatgctgaattcgaagccttttcccacacctacgattgttggaaaatcattgtcactttaaaaatggttaagttctggacaaaccaaccacctatcaaagcattataagggcaatgcaatacctcacacatacaag

SEQ ID NO: 127901 - DNA, 3351 bp, Cannabis sativa
  modified_base (235)..(236): a, c, t, g, unknown or other
  modified_base (329)..(335): a, c, t, g, unknown or other
  modified_base (2895)..(2909): a, c, t, g, unknown or other
  modified_base (3076)..(3083): a, c, t, g, unknown or other
ataatttctgaattgtgtatgaatttacattgaactttcattatgtttttctgttattaattattgtagtacaaatttcgagtcttcattgttggtctaacttaatttgttgtttttaatgggagaaattccaaaggattgtcatctgttagacaaatataaaagggttagatctcaacggataaatatttgtaaatgcgacatctagttatacatccaaagatgacaacttagnntagtgtttacaatatgaaacaataaaaaaatttataaaataagaataactctgactctcgcctaaacgaaacattgttggattcttattttannnnnnnttatcctttagtttttcctcttaagtttttcattaagaaattgcttcagaagtatatcatttgataaaaaggattataaatcatatgcttatgatgtcattctattttcttctatgaaattgagtggcacaatggactatattctagatattcattcccaaaatgatataaatcctcgatcttagagaatctctgtaataccctaagattatgtaatggattagcaaaaccctaattagataattatgtattattaaggaattatattattatataatttaatatatgagaattaatgtgaaaaatgacatgttaagaccccgttggtgagtcaggggcattttagtaattttgacccgagaagggtaaaacagtgaaattaatttattaacatgcttatgggactatattattatataatatgcatgtgttgtctttttcaggtgtgtattgacaggttggcgtggtatagtcacaaccgggtatttcgggccgaaccgggttcggggtcgaaatacaattctgggattaattattggcactatatttatgtgtggatattctgaaaattatttgagtatgtgttatgcatgaaatgacttaaatgcccttgtatgtgtatgagtgtgctttatagccctaggggcaaattggtcatttttacctttaaattatatttgataaaagaatggaattttgagtaaatgaaaatgaattttctggttttgtttccctcatacccggaccctctctctctttctctaacctatttcaaaaatttagaatttcctggaattggcttgaattgaagctttgagtttgtggatctttgagcttagctttggactgaatttgaggtagtttttacagctttaatctttgtaattaatgctgaattttattgttgtaagagcatgaaatagatggaagatgatcttagtttgcatgttggcgttctcttagtaatttgagcatgtttatacatgaatcttttgattatatattggattgtgtttggatgagctttgaatgtaattctagggtatttttcatggttgaaacctagttttacttattgaatgtgttgctgaaatttgaggttgagcatgcttgagaatttaagaatatgtttatggaattttgatgagttatgctcaagttttgagctcttcttgaatctggattttgagagttttatagttgggttttaatgcatgaaaatgtattctaaactctctgtttgattagtagaaaatctatttgatagttttgggttttggttgaaaattgggttgaattggatgagtttatgggtttggaacccaggtgtcgcggcatggcttttgcatgccgcagcccgccctcgagtttctgggcaaattgaagtactaactttgaatatgcataactttgtgatccgaactccgttttggaagttctatatatcgtgggaaagctcgttccgagctctatatgattatttgtattttgaatgccatgtatatactttataaatgtgaaatcagggcttaaccctatttgtgtaaatcccggaattgtgactaggattactgacacttggtcaggaacacatgggatttggaatctctactattgcgggacattaggtaaggcaatagtttagcatgtagagttatgcacggtggcacttatactggaaatgatatacgtgagtaattagtaaccgggattatggttattaccctaacatgagcggtttaatagcctagggttatttccctagtgatatatgttgtgtaaatgctatgccatcttaaatatattagtatattgagattcagggttatgtgttcaaggcataaccaggttggactcggtaactagatccgagatgaaccattctaaggccttattgtatttagacgtgtgagcgcaacacgtaggtctatgttacatagacataaataggcatgtaagcgtaacatgcaggtctgtgtcatacaggcatatgagaatagcattaatgtttatattgtatgataaatatgtttatcgatattttatattgtcttggtgggcttggctaacaggtgctctactgtgcaggaaagggtaaatctgtttctgatcagccatgagtatgggagctgaacagcgcatgtacatgtttggaccacactagaccaagcgggttggggtctaccagcgatgaattttgtgactctattttgccgcttaggtcggctagtagaaacggacttgtaataatattttgtaaaaatatttttgggatcccaacacttgtaacttttgtttgtaaagttaagattattattacaagtttattttcattccatttgtaattaaagtttaatttctgcgctaattttattagtaatcccatttaggggattagggatttcttaagtatcatgggtagcgtgcctaatgaattagggtgttacaatctcctacttgtatatgcttactaaaggcaacttaagcttagagttagattagtagtggtggtccgagaaagaataattactctaggaatatttggtataaatttaagtcnnnnnnnnnnnnnnntagattccaaatagaaatttttaatttcaatttctaggatacattggacaatacagtaaaactttcacaagttgttaatattcattttctacaatgtatccgaattgtatgttaatgtatggactatgagttttgtattctgtgaccagaatccacttgaactattnnnnnnnntctttgttgtaactagacctaagtcatcaaaagaccacaaccacataacatatatatctacgtcatttgtatcttgttcatagtggtttttacaagatcattctctgcaaagagaaaacatgcctatatacacttgaaagtaagatcttctatattcaaacatatggatgaacattcagaggtggatatgagttatcgttaaattcttaagacgatcactctagatttaccttatgcaaagaaatttgaaatgtttaagaaatttcat

SEQ ID NO: 127902 - DNA, 822 bp, Cannabis sativa
attcactcattccatacgtgtgtcggtgtgttatacgtcagcaaagacataatgaagaaaaaaaaaaacaagtatatcattttcgaactcgcatcgacgtacacattggttgacggttgaaatagtagttaagtcgatcgtaaatttacatttttttgtgacattatttcttaattttactattgtttaataaatttgaaacgtttccttcaaaaaaaataaataaatttgaaacgtaaattaaaattctactattaaatactactgtattatcacttgggtacatgcatatgtggcatgtattattgattttgaattttagtctcacctgtacataataataataataatctcaattgagatttaatggtagtatttaattagtgtcattaatttaaaaatagaaataaaattaaaaaagtattaccacccaaaaaaaaaaaaatcagaagttttaactttgtgcaaaaattaaaatatgagaagattttctctctaattattttattacatattattaatcttttctagaataatttgacgcacaaaactaccgtcttttctacaatgattccatttataaacatttttttgttgggtaaactttaattttactagaaacatgctatttacaaaaacatcatgtaattttacatatttaagacggtacaatggaaaataaaaatatatatattttcactaggaatgaacttggactaagacaaattagacctgcgcttaaggcacttagttaagagctcaaaaaagtatttctcttttaaaaataggctaattagtaattttttttctccgaactttgac

SEQ ID NO: 127903 - DNA, 687 bp, Cannabis sativa
gtgagatactacttgattgcgtacacttgcgtaataaacataaaattcgtaacagcgtgtcccaccactttctctgaacttcaaaattctaggtataaccttcacccttcctcaatttctctgatagattgaaagattattccatttcagggtttgattcttgtttgttttttgtagaattcgtccccaaaatagtactcacggatgagctaaggaagcagatcaccttctacaaacccttcacaaaggaagaactgaaggtggaggacctggtgaccaccaacttgctacgccaatatggcctcattgccacattccaaagcattcatggagttagtggtacaggtcaacctcaaacccctagtgacctcaaagagcaaatcgctcttaaattgtcagttttgataacaaaggcgactaaggacaaagagcttcttgctgctacctgggaaagtcatcatccaaaacccctcatgaaagaagaagaaatccagtctaagttccgagcagagtaccataagtaagaacttcaagaacgagtacttctagaagaggtaaatttcctttccacgtaatttgtaccccctgcctatctcagatgtcactggtagaccaaggggttttgaccattttttcctaagcttggatcctcgtagatatccgatgtaatgccctgaccctcaggga

SEQ ID NO: 127904 - DNA, 1517 bp, Cannabis sativa
  modified_base (202)..(204): a, c, t, g, unknown or other
  modified_base (252)..(268): a, c, t, g, unknown or other
tagatcttggtaaaacatattccaacacctcaatgttctcctttagcgatatatcgtttctcgttatgcactaagtatcagttcgtacaattactcctcgcttaagaccttacagtcaatgggttacaaaatatactctcacacttacacaattaatgagttattccataaaagatatgacaccgattcacattctctttannntgacacgtgtcctccagccgaattttaagtataataataataataatnnnnnnnnnnnnnnnnntaataataataataataacaatggcaatggtggtggtggtgagtgttataaaaataaaaagaatccatttgatctattaatagatagttaattataattttttttcatgcatttttattttttgataaaaatgtaaaattctcacataataatataataaattgaaatataaacataatgtcaaatcattttttttaaatatatttatctcatatacatataaaatatatatggatagataaatagattgttattaatattactataacaataaatattaataaaagaatgccaacaattttcagttacaaaattaatgtatgtgattttttttctattaccaaaattgatgtaaataagttgcttcttcttctctctttttttgggaccaaatgtgatgtcctcactaaaataaaagaatgatatgtatattaatctttaccattctttatattgatctaactacatagtacattaatatatttttatttacaatatatatatacgatctttaaaaaagaaataaaaaaaacaaaacaacatataaataaagaactatattaaaatttgataaaatgtaacaaaaataataaagggtaacatatgaaacttaaaagagaaaaaacaaattaatatatcttagcaaaaacatggctttcttttggactaaaatatcgattgtaatttgtccgactaatttttgaaatattcaaattttaaatgttgttgatctatcattttataaccacattcacctgtaatagtgtaagttagctcttcatatcaccattaatgctctcatcactatgtagagatcaagactttataaatgacattgcatttgaatatgataagccttgttggatctataatttcaaaattaatttcatatatatataaggtgattgcttaagcttttccctaaaatccattttatatataatgtgattacttataaatagttaatatatacaaatatatatatatatatatatatgagattgtatacaaaaaataggtacattcaacaataataattgaaaatgaagaatacatactttattaatcataatcataccaatagcttcctttctaatcccatatgataattttctaaagaaccttccagttctaaaatttatatgacatatttaaaaatactaatagaaaatagaaaatgcataccttattaatcataaccataccaatagtttgacgctcttcctaatcccataggataatttttttt

SEQ ID NO: 127905 - DNA, 1320 bp, Cannabis sativa
ggcataaaacccaacagttgtcatctgcgaaaagaagatgggagatagaaggagtagaacgatagatagaaatccccttaaatagatgatcctgagtttttgaatggataatagcagagagaccttcagccaagaggagaaacaaatagggagaaaggggatccccctgcctgatgcccctggaaggatgaataggagtggaaaaattattattgatgcatagtttaaaagtaacctaggaaatacaatttgaaataagggaaataaggttatagggaaacctaaatgagtaagaatacgcctaactctccatgtctagtttgagggttgcccatccaagcttgccattctttctagtatttatggcattaataatctcattagcaatgataatattatcaaaaataattctattgttaaggaaagcaccttagttgtgggaaataagatcattaagaacctctttcagtctattggcaatggatttagacactactttgtagattgtggagcaaagactaatagatctgaaatcttgaactctggaggcattatttttcttagggatacgaacaagggagtttcattgattggattaagattagcaccattattaaggatagtaagcacaactgtacagagatcttgacctaaaatagaccaatacttctgatagaaaatggggtttaagccatcgagaccaggggctttatcccttaaaagttggaaaagggctcttttgacttcaacaaactcaaaaggtttagcaagatactcatattgttgattattaatgcgttttgtgacccctctgagaacaatactgatagagtctaagtcaagacctttagaagtaaaaagttcaaaataaaactgaaaaaagctattagtaatatccgttagattagaaatgacagtaatatcatccaaggtaatggccttgataaaattgttcgttttcctagtggaggctctattatgaaattacttagggtttttatctccagccttgagccaattggccctggatctttgcttccaaaaaatttcttccttaagtaacaaagcatccagagaagattgaaggtgattagccttaaaccctaaaccccaaaaggaataagatgtctctcattctatcacatctctcataacctaattcagactattttgtcagataacaaaattgagagtctccttctatagaatttcaaaatccttctccctcttcttcttcattattttcaaaccatagtgaagagtgcatgcccactcatatcaagtaaagtactcaatcatagtgtggaagattgtgaagaa

SEQ ID NO: 127906 - DNA, 2203 bp, Cannabis sativa
ggtgtccttttgcattggattgctgtgatgagttgtgtttttgttttttgttttcaatattgattgttataatgtttttggtgtaggatcggccatctaccaaggttcatgctgctccaggaggtggatcatctttgggttacctctttggtggggttgggaactaagttcatctccttccaattaacccatcaataatatgttattggcaatatattttagaaaccatttctaaaaagtaaaaagatcttacttgttttgatcagtgatctttgtttctacaatggccttattgtggattgaaaattgcatagatactataaaatattgggtgaattattatatctaagttgtgggattactaatgtctgtttctgttttgccttttcttcttgcccctaaattcttatattcgtttgaaggattatttttataaatatataaaaatggcaaaatttttagtttttatttttatttttattttttttttacatttgtaagaatttttttttatacaaaatacgatgagttgttttttgttatttttgaaaaattgttattttgacgttgctcaccgaaaaaataatgtgattctttttttacaacaaacgaagtattgtttttctattgttttagaataatattattttgacattgctgatatgggaaaataatatttttctcaacaaaaaaaaaaagtgaaaatctataacagaaaatctatataaaaaaaaaagtaaatataaaaaagtacataaaaatgtaaataaaaaataattgtaaaaatgttaaaaatatatatatttttttaagtgtattgtataaattttcatctatatataaaccgaatcaattttatttagtttacttttaccaattttatacaatattttgaaattttagtttagttttctcttattttaaataatattttatattataaatttattttcatttaacagagatacatattataggtgatagaattatattgatgctaaaatgaaagctcaagctaaccgtagagtaattttccatcaagatcttgaaactaaagctacctgattttagtattcaagaaaaaatgtagcatagcttctttagttagcgaagtaaaattattttgttgagaaaaggagatgaaaacaattcttattttcatgcttatcttaggaaataaaaaaacagaatagctacctttgtgaatgaagaaggaagattggtggataatttttggaggtggtggatcattttttgaataatttcaagaggtttatgggcagctcgggctctgctcatgtcaacatcaatttgaatgctgtaacattttattaatttagacacgccgctataatttcttaattactatactgacctttactaatgaaaggattttaaataaaattgtttttaatcaaaattttataataattaaatattttcataaataaacactgtcaatgtaaataaattacaaaatttgggatcccgaaatctattttttttaatggacatattaaataggttgcctagcgactacaaatatgagcccatattgttctgaagatcagaatactccagatctaaccatctagatatatacaatcttcactgagctctaatactcacagcagttcagtcctgacctttacatacacatgaaagaatatatgtgagttgatagactcagttgaaaagcataacacataaacatataaccgacctgtaactaggcacctatacacctactcacaagtctaaaattgggtcatgaatgttcttgacaaaagcccatcataaatctatcggtatctcagtacaactctatgtacatttcaccaataccctgatatgctaatttgacggatttataattggggttttttcataaatgtacaacaaaaataacataattacaaaaatgtgcaaaaaatattattttaaaaacttatacattttgaaacttattacatgaaaccattttaatcattaaataatatagaccattaatgataaaactaattaccttaaatagattaacgtaattaatatttgtaatattttatccttatgtttattatattaatattttaaaattattaataataaaatatgtttattaaaactcacaataaatattttcataaaattaattaaataaataataaatatttttataaaaataaacaagttaaatattttt

SEQ ID NO: 127907 - DNA, 805 bp, Cannabis sativa
ttaaaataaataaataaaatcaagttagtatcaaattacaagtaatttattaattatttttaataaatttttaaattaatcaaaaatcatttaatagattataaatacaaacatcataattacatatttatacatattctcaatctatttatagcaattaaacccttgcaatcaattttgtcatgtcaatccttattaattatttttaataattttcagcaattaagatctatcataagatggtctttctgtcatcttttttagaggccatgcccatctataatgattgctcaaattttatttgtttatttatttattttatgagttttttccttaaagcaaaaataattggcaatgcacatgattaaaaagggttagtttgtggctcacatgactccccacgtgcttttgctaccatatattaattctatatttctcacattacaaccctaattctttggcatgtgaatttatttatatataacatataattacaaatgtctttttttaatattacaaatgtgttattaagtaactataaatgaaagacttgctagagtaaattaaggagcaaaatatggtagataatttattataaattattggtcaaaaacattaagaatatccaagctctaacacaatagattggtcaaaaatttcggccacatatctttgagttgataaataaattataatgggctcgtttggaacgccggtcgtattgtattgtattgtattatattgaattggattatatataatactatgttaaaatttaattataataaaatattatatatttagg

SEQ ID NO: 127908 - DNA, 548 bp, Cannabis sativa
catccatagaacacctcaattaccatatgtgccataagattttcatgcgatttatggaattaagtatttatatatattaaagtttttatatgtgtatatatattagtttaaattttttcgggcccaaaaattatgggtcctgggacacccccggctgccccaccctctggccggccctggcttagttcactaagataatttaagagagtaaattcaaattaatttggagtgctacggtaattacaacccgaggtgttccaaaattaaaattcatactaattaatgatatttttgttgactttaatattaagaaagctcatattgatattgctactgatcttaggggtgtttaaggattggtttggttcggatttttatattttttagaactaaaccagtataacggttttttgaattttggaaaccaaaccaaaccaataaaattttcaaaccaaaccaaaccattaagaacaatttggtttggttcgaaaatacggtttaagtagaatttataattattcatatttttttaagtaattgtactattt

SEQ ID NO: 127909 - DNA, 1870 bp, Cannabis sativa
atttagggcataaaatcccaatatgtcccactccacccaatcaccttgattagttcttagcttatgaatgtgattgatacgacgccgagaacttgcttttgcatgaaaaattttactattttgatctctagattgcaaccacaactactttgatcgctgacgccaataaatctctttctgatcaagaatagtaaatagtttcttctgaatcaactggaatcataggcacaaaattaaatcattcttattgtgaagctttttaagattgattttacaagcttttaactttcgcccaaagttcgttttaatatttctcccccaaactcgtagcttatcactacacacctgcaccttttgcttaattcattaaataacttcctttctaactctccttgactagttgaaaacacattggatctaccaaccaagcattctaaaatttaaaccacctcccacttaccgccaatgcaaatcttttgggctttaacaaaataggactgtgatccaaagatgagtcttccaaattataaagtcttgccatatcaagttgacgtaactaaagcctgatcaatacgaatttccataaacttggaagtaaccctaccatgatcccaagtaaacagataaccaaccagttccatatctctcaaccccacatctttaagagctttattaaacctgtccactaaccacccaggatatggtgccccaccctgcttatctatttgatccaccacattattcacgtctccaatcacacaccaaggcaagctagtgctatgcaccaaagtttgaagcaaatcccaagtcttcccacattgtgctctaccagactcaccataaagcctagttaacctccaagcctccataccgtcgacctttgtaataacatcaatatggttttgaaaaaaattaattaagtttgcctaatcttccttatgccataacattgttacacccccacttctacctctcggctccaccataaacattccttcaaactctagtggtttacgaatccattccattttatctttctttcataaaatttgataaagaaaaataaacataggcctcttttacgaacaatgtctttaaggaattgaacattccattggtttccaagcccacgacaattccaactgaggatagatcatgatgcagggcgggtctaaccaacataattcccacaacccctctgaattctcacgaccaaagtgaccacaaaacttccacaaaagccctagccttcactcctaagaaagatcttaacaaaaaaaaacccaataaaaggaacacacgcaacacacttgaatcacacgaacacactaggaaaaaacctaacgcatgtcaatagacaagactatttatagagaatacttaatctaattgtaatatgattagtgctaaaaaaagaaaaaaggaagaatcctaatattaggatttcaatcatgaaagatttccattgataagtcgaggagtggcataattgatcagcataaccacttttttgttaagcaacaaaatttatgtgtgtgcgcttcagtcactgtgactatcgtcgtctgcctagcttgatctgaaagtgattgagaccctttgaataaaaatctgccaataattcacactgttgtctctaattcttgggttggaaaaagaaattgaatctaacatcgaggcatccttcacctattaacgtggaaactttcactggtgatgtggacattaatgtttgacacgtgaaaagaaggataacgtcacagagttgagtagacctgagtcatagtagtcgacttgggagaggatgtaacgcccttacttatgtgaaataagatgccataaataaactggcgttaagatactaatgttg

SEQ ID NO: 127910 - DNA, 583 bp, Cannabis sativa
actcatttaatgtaccccgagatccatcttatgtaccacggaatacattccgtgaaagtacatcacaagacaaaatcgtgtctctataaatgtaagatgcatttcgaaaataatttcttcattaaaaaatattctgtattattaataataaaagaagtgatgggttgggtggagtcaatttgatcatcatggtttatgtaaaaaagtagtgtagaaaagaaacccgcgtgaagaccattacttattaccagatttaaataatgtgtagtgacctctttaatcatattatatcataaacgaataatcaaaagcagagtctccattaggtgaataatagaaaattagtttgttctgcttttaaattttgggaaaagcaagtaaattaataaagaaaattaatagtgcataaatgttaaggctttcgatttgaattgtatctattcattatgaactatatgattatctttctattacccatttctatgcaataacagtataatatccaaattaaaatagtatttaatttttcttgggatattaatagtgcgaggataattaactcatttatttgtgttgttagtga

SEQ ID NO: 127911 - DNA, 626 bp, Cannabis sativa
aaaaaaaaaaaaaattagcaactaataaaaattattcaaaactatttctattgagactgaaagtaccatacaaaaaaaaaacttatctgctaaaaatgttgttctctagcgaatgaagcatatcatttgaattcttaaaactcggaaatttctactccaataactctttaacttcaataagtcaatatttttataactctaataatcaataactaaagtactctaataaccaaatataaaaatttcaatttgagaccactaaaaaggaggagaatgatgaattttaatttgaaagcaactgtgtaatactgcatattaattaacccaaaaataataaatcaagagcatttcaattccaataaagcttgtaagtaatttgtactattactttgctgatcaacggagaaagtgcgaaaaaagggggaaaagttttgtagaagtaatgttcaccagaggcatggattccaaccatttgagatctcaatttcctttgcaaatcgtttcctctaaaatacccatttccaggtatgcttccctctttttgcaatatatatatatacatttatatatatttctctcttactttataatgatagaaattttactacaaatctttttcactcaat

SEQ ID NO: 127912 - DNA, 875 bp, Cannabis sativa
gtttacctgacccagtgtatcaccttggggagctccggtgttgttagttaaaaagaaagatggattactttgtatgtgtattgactaccaggaaataaagaagttgacaatcaagaataagtaccctttacctaggattgacgatttgtttgattgacttcagggaaagacagtcttctctaatcttcgataaatctatcattagttgagaatctgagaggaaattctaaagactgctttttcaaactaggtatgaccattataaattccttgttatgtcttttgaattaactaatgctcaagtagctttcatggatctaatgaatatgatttttaaggatttccttaatatatgtgttatagtatttatcaatgtcatcattgtatactctcattcagaaacggagcatgagcagcatttacggatggtcttacaacaactacaacagcacaagctttatgccaagtttaaaatatgtgaattctagctatcttaattatccttcttagggcacattgttagtaaggatgggatcatggttaatttaggaaagattgaatccatcatggattgaccgagaccaaagacaatcattgaagttagaacttttctaggttaagttagttattatcgtcgatttgttaaggggttttctaagatttcaatgcctttaatagaattaactaaaaagaattagtagtctttatggatagacaagtgtgaagcatgttttcaagagctaaagcagtgtttgatcatagctctgatactagcattaccatcagattgggaaaagtttgtagttttttgtgacacacccaaataaggtatggggtgtgttttgatgcaagctgtgttggaaatttattttacc

SEQ ID NO: 127913 - DNA, 1454 bp, Cannabis sativa
  modified_base (51)..(64): a, c, t, g, unknown or other
agtttaatttctgtgctattttgattagtaatctcgtttaggggattaggnnnnnnnnnnnnnnttggctagcgtgcctaattatttagggcgttacaggtgtagtgtaggatttagatgcatccatattggttattttttaggatatctagagcatattgcgactgggatagtagaatcttgtcccctgttctatgtgcttgaaaaccaaggaagtagttgattgtcctaagagttttcaaggaaaacttggactgaagatcagtgataactttgtgaatgttgaatttgcatctataattaatatatcatctacatataccaagattagtagaagctatccatctttgttggtgaaaaatagactgccatcaaaaactgaattgataaaaccccatgataatagagttgtttttagctgggcataccaagccctgggtgcatgttttaggccatacaaggctttcttaagttggcacacataggtggggtagttgggatcttcaaagccttcgggttgttgcatataaacaacttgatccaagtaactatttaggaaagtattattaatgtctatatgttgtatttcccagccataggttaccgccaatatgaacataattcgaatggtattagctttgataactggattgaaagtatcaaagtaatcttccccagcagtttgttgaaatcctttcgtaagtaagcgagcttttaatctctcaatagtatcatctgcttttattttgattctatagactcgtttgttttctataacattcattccatgatggtaaggaactagaatccatgtgttgtttctttttaaggcatgatattcttcacccattgccctgttccaaagatgattatctaaggctatttttagagatcttggttctttaagataacattcatattgtaattcagctgcaagtgattttggcttgtatatgcctgatttggatctagttgtcatgatatgagatgattgtggtgcagtgttttagttttgtgaaggctgagtagttgagacatgattgacttgggatctggtttgttggggtgcatagtgtataggatttaagttctgaactggttcagaattgtggtgacaaccacttgctattggtaaatgtctatgtgaaagagggatttggatggtgggaggctgttgtgagggttctagtgtggaattggcttgaggttaataagcagtagtgattgttgttgctggattggggcaataaattgcaccagttggtataggcatttgctgtaaggaagggaaagtaggtggtgagacagattttggggaaaatagctgagagtgtgggaaacaggcttcatcaaatgtaacacttctggcaatgtagattttgttgggttttgtgccctaaataaaacttatttcaatataatcagatttacttatcaataaagatcagaaataa

SEQ ID NO: 127914 - DNA, 1256 bp, Cannabis sativa
gaaagagatttgacacacgacccctactcaagtatgtgtgtgtgctttatctattgttgcgagtaggcttttgtgaatgctttgggggtcgacctgtcccaagttgatttccagtatttctcccatcatgctgtggaatttcctgatttcttagtagcgactgcctagcatttgtattcatgagagataatttcggtatatcaggttgttcattcccctggtggtttacgacgaaatccatgggaagttcctggaatgtcacgttgatgctattgatttctcgtatttccaatctttggtggattttctctatacattgggatatctctctcattcccaggttgttcttcctgagcatttgtagaatttccctaattattttcttatttcttagtcctagaacctcgaggccttccttgtggtcgccttgtagatgtatcaagctgagtttgaggagttgctccctatgtagccttggctgcctccgtttctcgttctaactcggcattcctccagtctcagtcaggcattgtcgaagttgcttattttctagttccaccaatgggacatatctggttggattatatgcgtcttcactatgcctttctagaatttgttcaccagttgggttgaaatctccaccgttccttccagaacgaggagtttcagttgcattggttctttgtgatccctgaggtttctttctagggcgatgggttatcctaaaaaaataatattacaaaaaatgtgcaaaaaaaatataattatacaattctatacaattttataaatacttacaaataatcatcatatattcacattatataataaaaataaacataaatgtttacaattttaacatgtcgattattttcaattactaattttttgaaaaaaaaaaaatgtgtaaagttaaatataaaaatacataagtcaatatttatattttgatatattattaaaataatatatttactaaaatttaatacaaaattatatttatacaaacatatttaaaaatttgtttatattttaaataaacaacatatatgcatgtttattaaatatttaattattattaatgtttataatactagtattgatctaatatgtttattatgataatattttaatagaatcaatataatttgtttattaaaagttcataaataagtttaaaaataaaacatttatgtttattttgttttatgaaacaaagctataaacaaatgtgaaattatgtataaacattatat

SEQ ID NO: 127915 - DNA, 1034 bp, Cannabis sativa
gaataatataattattatatataattatgatacttaaattcatatataataaaattatatatattataaaaaatggtgtatttatatatataattatgtcttagtataaatttataaaaatttctaggggggccacagcccctgttggggtgcatgtggctccgcccctggtaggcgcctatccataatataaggtgaccttattggttttattttttttggttaattgattatttaattagacaaatatttaaatttgaaaaagtggttaaatatattttaagttggttgagatattttctcaaagttagttgagaaatttcttcatcagaaatatcaataactaaattcagttataaatatttatttaaatgattaaatataatttaattaattgagaattaactattgtaaatagaattctgatttgagaaatcagaagatgttttttacactataattttcgaaataaatagggagaaaagaaaaactatttttctctcttaaaattttcttgctcgtgtattaagaaattaacatgaacaaattatacattttatcctagtggctcacactactccatgtgtgtggtggatcgatttgaaagactagcgaaaattattagatctaatttacaaaaagtttcgaggatatcttgatagtcatcaagaggtatatatttattttatgtaatttatgatttgatttaatgtttatatatttggagattcttaggactatattacgatgataatcatatatatatataattattccgttgcatacttgatttagtatcataaaactaatactactaaccaaagccatcaagccttcaacacataataagaacaaaaaaggtgatacagaatcaccctgacgaaaaccccttctaagaagaatagatccaaaaatgccaccattcaaaagaatagagtgttagggtttataatacacttaagaaatatataaatcacagatctaaacatattcctaaagtgctttaatatagaaaaccctaaatcataaatcta

SEQ ID NO: 127916 - DNA, 891 bp, Cannabis sativa
attaatctcaaaataaaatcttaataattgaagatatttagttctaaaagtttgtcgatttgatttattgtctctcaccgagaagagaaaagcttcgaaaagaataagacggtatatatgtgaatccttggtttttaataaatgcatgcattatgatagatatgattttatcttattttgtgtgcatatattttgcactttaatttttttttatttaagccacattttacaatgccacattttcttttttctttataaccctttttcccttttctaaaataaaaaacagaatattgtttttgttgcctaatttttccacctacatctacatgattttcttctttaagtgagattaagaaaaaagagtgatatttgcttctctgctcagctatggctcgttctcctccaaatgagaaggattctaggtttcacaagatgctaattcttttttggttataatttgtgttattttattgtgaataaattctagattatagagtttatagacctttgaatttgggtgaactctaaactctattggcctgtaattttttgtttacataaactcatttacagagttaaattgaccttattctctaatcagcaaagagaagaaaaggtatctccggtgagaaaattttgtcaaaatggagttgagtcttcttttcaactttcaattacatcaagtatgctttttaatttttgatctaaaattttgaaattagttttttgttggaatcatttcatggcaaagatatgatctcatatattttggtaacttgaactatttattattactattattagtcaattatttattcttataattcaactttttaatttacatttattaattatttaattttaattatttctcatgttttatatatt

SEQ ID NO: 127917 - DNA, 1467 bp, Cannabis sativa
atattattaattttaaaattatgatattaaaaaaactaaaaactaaaataaaattaacatacgtgacttggcatgtaacatctgtctagtatgaatatatatgtataagttgcttttatacaagacattaacgattgacaggataaattatattcatatgtaagtcataatttacaaataaaaataagtgtttcagaaaaatatataaaaataagtttctcaaaaaaaaaaaacaaagaaatgaatttatccaacattcttttattttattttattttatctatgaactaggctcggtcctaagcaatctaggtctatgcttaagacccacctagtagagggtccaaaaaaaattcttcttttaaaattatatatttttttttattgattttgaaaaatatcattttttcaaataaaaacttaaaaatatttttttttttatgatccaccaaatttgaaagacaaacataaatacattagtatgagtatataaactagaagaaaaaaaaaactaatatcgttacaacactcacattagcttttttactctactttttaaaatacatctttaaaattttatttttttaatttctttattttttctctaatcattcaaatattatatttttaaatatatatttactcatatattcctttataatattaatttataatatatatatacatataaaataaataataaaataataaaataagtttaaagtataaataatacagagtaaacattgaagaattaatggacgaaatcacgagtaactttgaccataacattaaagaattattggtacttagtatattttttggtgtcatattgtaattaagtagcggatctcatataatttaaaaaaaataattttaaaaatatatttttaactaattatagagtaccacttataaaaaatactaaacaacactaatgctaccggctgcccaataacaatcctggtatacatatatacattaccttcattctcatgtaactaattagtttgaggataaatgtgagtgaaaatatgaaagttgataggggacacaatcgtagttttctacttcaattaatattcacaacagtcctccttacaaggctttaattcattggttctcatattcaaaaaggatccaaaagaataaaaatggaaagtgaggccaactttggcgcaaaatataatatcgtcttttttggctctatttattgataatatttaagatgaaagtaacaacacaacggaaaacgacaagacgtactactcctcttctaatttccttcttatttacactttaaattaagactatttattaaaggagagttacctcgtatactatttacgaaattctccatataaattatttttgcaactagctctgcaacctaaagtaattgcaactagctctgcaattactttagaaactcaaactgtaaatttaaaagaaaaaaaaattaaaaaa

SEQ ID NO: 127918 - DNA, 1024 bp, Cannabis sativa
atactataataattggtttattgtgtgatttttttgggtgtacgtacgtacaattaggtgatgaatacatgaggccattcgtgatatggaaacctgaagtaacagtaacaaagagaactgataaagacgagttcctcatacttggaagtgatggtttatgggatgtggtttctaatcaacttgcatgtaaggttgtcaagaaatgctttcactctcaaaggaacagactttctaataacaaagaccttcttaaccgtggaggaagccgctcaaccgcggctgctgccctcttagccgagctggcaatggctcggggcagcagagataacattagtgttatagtcgtcgacctcgccaaaccctagctacgtagtacgtactcattattaattggttaatttgttatatagagtaaatactattttgaattttatattttgtaaaaattattgattggataatctgttttgttaaatgataattcgaacaatgctgtattttttttttttaaatgatacaaaataatattctgagcgcttattttcatcaaaagaaaactttataataacataatgtaaatgtgttataatcagactaattatatattttttttttatatctggtcgtacatagaaactagctacatgtattatattaagaaaaagttgaagaaagttgagctcaatgtattattttgtatcatattttaaaatataacatcttatttattatttaacaaaataataaattcaatctctaaattttgtaatacacagaattccaaatatatttcacctattatacctacatatatatttattgtcctcgttatatttctctttattattttaatagaagaatacatatcatttcaaaaaaaaaaaaaaaatcaaaaaaatagaggattataaatgatatatatatagatattcggttaattaggatttttgtcccctgaactttgacatgtaccaaatcatgctccctgaacttttaaggtcattgaaaatactcctgaactatt

SEQ ID NO: 127919 - DNA, 2061 bp, Cannabis sativa
ccatgatactcacacctcttactcaaatttctcttaaaattatccccttgtggtgtccgtgggggttttctattatgaaccatattgtaggtttctttgtacatattttttttattatccaccaggctaaagtactcggtatactttgattcataatctttcttagtttttttagaattctcattccgtcccaaaccctttcctcctcttttattccaggattggctcacattatgctttggagatttcattttaatctgtttgggtacctaaagaaatgggtttgtgtgggtgcttgtacgaatgcaaatggtctgtaaacaatcgagatgtattgatctctaagaacaagaatcgaaaaggacaccgaatgcttgctgataagcgtctccaagttgataaagccttgtgccttagccataaactcaaataattttttgacccttctcctctgtatttctccccataggagagaaccattggcaagtccagattacaaggccaccaattttatgtcattggacacgccgcctccatcattcgctgaatgaaactcttcaggctttctcccgcctattgcttaatgttaatgatggagcccatttctaagtcataatcacgggtagcaatgaattatttttagagggcagactgtagttccttctaggagtggattgatctgggagccaatctcttccaccaatcctcaacagatttggtcaaggttaaggagaagcacaaacacttggcatcctcactaactctttccacctacatcatcttgttgtacttagttaaatgaattttaggataagtgtgcccatcatacaactcgatttggggcattttgaagttctctgaaagtggagcttcatcgatctttcttatgtagggctccaaatcctcatcctcaaaatcagtgagggccccactttattttttgagcttcgtcaatgtagctatctgttcttctaatctctttgtaacactgtctggaagatctcttccacagaccttatcgtttaaatgattcttgaggtcattactaccacgtgcctcgccttctcgttttttacttctcgtacttggcgtttaaatgaattctgagatcgactgtggacaaactatcatcggagtactatccctctgtcccatcatcctgttttactaaatcgctagggcggtttttccttctcttgggctttggtactttcgtaccaatcttttttggtactacagggccttttggggctaaagggcttctgagcctggaggtgtcggtcaccttcaacgcttgagaaggcctgatggcttgattcgtgtttttctaaggaggttgaggaggatgcgggttcttggggtcacttacttttgcctttcccttatcctgtggaagagcagaggttccaacatcagtagggttttcccttgtgtttcctccaacgcactccattgaggggtcatctttagaatcttccccgtcaagatcttcaaacttggcatgaaggcgagccatcatcttctccatcttttgagaaaatttctcttggcgagctaacttctgtctagtcttaagtaactctttaaacattcaaaccacttcggtattactcataataatagtcatctttatagtatccatctctgacgtaatcttcattgtcttcttcctctttattattctcaacattcttatcatcatcgacatgatcatgctagttttctggatcaccctctcaatttttcacattggacgtatgcctgccccttacatcactcgactgggcatggtctagtgagagggggtttacttcttccatgaccatctcgaggccaccttgaagagtcttcttaggaaatgtctttcgtgtgaataccatggcaataacagtggtttatgtctttcttcagctctcaataaaagtaccaaaatatttatcgagattttcagaaactagatattaaagctaaagaaataatgacttgtagaaataaagagatgaagattttttatgtggtttgtgtttgggtattaataaaccttagtccacgagtcagtct

SEQ ID NO: 127920 - DNA, 935 bp, Cannabis sativa
  modified_base (102)..(103): a, c, t, g, unknown or other
  modified_base (876)..(895): a, c, t, g, unknown or other
ttgtacatatattaaaccacaaacatgaaaacaacaagcaaacataaattacttctaatctttattgataacaaatcatattagattgtaatgggttttatnnagggcataaaatcccaacaattttatcctgagtttttctccaatgatcaagagtaatagaagttgaaacaatgctttcatcaacaaaagaagttttttgtttccaaacaatgttatttctagcttttcaaagagcccaacaacacatgactgcacgacacattttttcctcattaaaaggtttaacaatcagctctagccagctaccaaaggagctgctgggatcaactatagaagccgtaccttgttgtaaccatcaagcttgtgcaaaggagcatgacattagagcatggttgatggattcgggtgtagaagaacagactgagcaaatagaagaaacattaacatgctttacaacaagttggaggcaagtaggaagacaactagtgagcgttaaagaaagttctttacctttggaggtattttcaagtgccaaagacgatgccaaaacccagaattgttggcactactatactcattttgttgattctggagcaaattataagcgcttttgacagagaagctcccagaatgctcttccttccaagaccaagaatctcttgtggcatttgaactgagaggattacccaagattagagaaatatctcagccattcaagatgttgcatatgctttcagcatcccatcttcgtgacccaaggtgaaacaaattaagagctaacacttttattgatgaggcctgaatgtgtttagtaaaatagtgatcttctgtaatgaccgctctagtaatatggattagaaaaggcaattagcnnnnnnnnnnnnnnnnnnnntattatttgtgaattaaatttaaatgtggaccccaatatt

SEQ ID NO: 127921 - DNA, 961 bp, Cannabis sativa
  modified_base (459)..(471): a, c, t, g, unknown or other
tgaatagagatatcgtgttagttaatttgagttaaatctatcatcgctcgagagaggttaataggttacattaggattcttgaaactacaaattatgagatagattaggataatcagtaaatttagattcatagtttgaaatagggaaaccaatgctttaggtttttactttttgattaaaaatcgttgtttgtctatttatttttctatttatcttattatttttttcttaattataatttactttgtgttatctaattaaagtataataattagtaaaatttaataattaatccatgtagattcgacaacctttttaatattaaaactttgctttaacaacactgtacacttgcagtaaaaatggtgtatcaatattcagtggtatatttaaatttaattattattctaatttatttataattaacaaatacaaatctattattattattattattnnnnnnnnnnnnnttattattattaaattataagatttttataatgtatcgtgtcgtatttttcgagcttgtcacatgccatgctattcgaatagtctattctttgcttacatgtcatgtctttcgtgcttgttttggcgtgtcgtgcttaagcacatattttcgtgtcgcgttgcgccagtttgtaatattgtgtcatctcgtacccgaacccatattttttcatgcccaatcatgctcgtgtcagtttcgtattgtgtcaaaaagcctgatccgtatttacagtattcgttactaaaaatatcttttttcaattttttaaaagtatattttttgtgaaatttattaaaatattatcatatgttcctaatgtaacacatacattaattatttcatcattttttttagtacatatatataaaaaaaaaaaatacttgatttttaaaagagaattagaatcattttattagtacatatataaaaaaaatacttgatttttaaaa

SEQ ID NO: 127922 - DNA, 1229 bp, Cannabis sativa
agtattaaactagtttataaaatcacacacgttgtgtccctatagaatatgacattacaacttggtatcagagcagtcatggctttaaaggtccgaagactagtcaaatatgtttatttgctgtgaagacaggttgactcatagtatagtaaatgtttatgttatttgccattaccttacttgtttagacaattatagtgtatgatgggaagaagtagcgtactgactatctatactaagaatatgtgcatggtatacacatattaatattgatatttgtctaagtttaagtgcttataagatgtagattaagtgtgtgataattatatatgcagccatgacaatcgaatagtctgattagtgagctatctaagttcagggcaaacggtaagggaaagaatcctttattgccacaacactgagaacatgcgaattttgctatacaggatatgattagacaacaataaaaacgtatccaagatttaagtgaatgacaggctcgtcctgtgtcaattcctgtactactgacacttcctgttgtatcattggatgtggtgaaatatatgaagctaacttactagtagatcagggagtgaaaactaaattaaccaccaattatgtgatagaatgaacaaaatggttccagggtaaccaggatagcggtcagggtgatgataagaaatggtaaccttatcttgagtgttcaagatgcaaaaaaaaagggcaccatttgggctaatgtagagccagatcttattttatgtggggtagtgggtcatctaataagatcctttctgtaattgaaaaaggttaatattaatgtagaagagtgtacgggtcctatccaagtactgattatgattcaagggaacccgagtatcagtcctttggtcgactcaagttagaattttatgggcaatattatagttgttgtttcaattaatatcaatattaaacattatatactcaataaggggatatcaaaagatctaaatggattgtgcatgtatgttagttagagataactcatctcacagagtagacaaattagaaaaatggcaatatgagttaaatttgctgatattcctaagtggaatataggacatgagtagttaatggaagtatctatctaattgatttgggaaaacaaaatcttttgattaaaagtgatctagtgttagtataagtggcacaatttatgagtattatctgaaaccttaggtaaattg

SEQ ID NO: 127923 - DNA, 1136 bp, Cannabis sativa
  modified_base (787)..(787): a, c, t, g, unknown or other
ctcagttgttaagaacaccttcttgctactccaagcacctcaatgaatttccttgttgagaacaagatcctcaaatatgcccagattgtgtcgccgaagttacgccggcgtaatcgtcttctccggtgccggcgagctccaaagtctttctacaacctgttttgatccgtcttttcgattggaaaatgctcctcaaaggagttaagtaccacttatatttcgcctcgaaatggccgttttgagatcgtcttctccaaacacagtacaccagcaaaaatggtgttcaaaattttgatttttcgtttcagtcccttttaccccatttcttcacgtcaaaactgaccattggggtcccataaacttaaacacaacctcctttgatctccgaaacaacttaaacacgttcaaattcaggtccgtttcaagaaccgtatttttgaacgtaaacaatggtgattttggaactgtttgatttcagacctcttaatcacatctaaaactcctcttggataaaataaaactcaaagaaataatctagagcagccaacccgaaatctcactttctcaccattcggtttcgttcgaccgcctctatctcactaccgtttgttttaacccgaaataacaatataaacatctcatatatatagtcctaaccccaatataaccctaaacaacttaaaaactaaaaataataatatatatacatataaaacatgtacacggtatatatatatttactaatttaataataataataatgatgatgatgataataataataatnataataatagtattaataatattaataataataatagcagtaataatactaataatactattaataataataataatattaaccataataaattaagcaatatgctataatatatttacttatatttttattatttatatacctttaataatattcacaaataataaaatattaaattatatccaataatttaattatttatctagcattatacatacccttaaaataaaaaataataaattttattgtcacttaaaaaaaaatcatacttcactaaactcataaatattcaaaatagtaaattatccccattgacaaacaaaataaactaaaagtaaaaaaaaaaaaa

SEQ ID NO: 127924 - DNA, 797 bp, Cannabis sativa
aattacaatgtggctttccaaatgcacccctaatgttcatctcaatattttaccatattcttcacataataaatatcttcttctagtattttatacaaaagtgggaggaaatctattaaaaaggttgaatagaagccaaccgaatgtaagaatgggtgtgagtgtgttgaaagaacgacattgactgaaagaaatcatggtagaagattttttgagtgttctagatgcaattatatttattttaatttgtacaaaacaatgttgaggttgtttatcattttataaaagggatagaacctcctcctccaaagactgagttagatttggttcaaaggtttgaggaggttgaagagagaaagtaaagatactctctaaaacttacagagaatagataaagaagttgagatattgatcaagttcagaaaagaaaagtgttcaagtttagcatttgtattattgtttcacttattgcaatattgttgttttttgttgttacaatctagcttgtatttgtaacttcatctaatattttgggttttaattttttgtatgttcaacactgataatgaattaaaattgacaataatttttttttgtttattgtttaaggatagaaaatataacatatgtgtttctataaaatagctttgtgtttaaatagcatttatttaaaataaaatgacctaaatataaatgcttattttcagatatttaaaaatgtacgatattatttgggttgattatgaaatctggcaaatggatgtcaagacagccttccttaatagaattcttgaaga

SEQ ID NO: 127925 - DNA, 561 bp, Cannabis sativa
aagatatatatggtaagaagttttctagtaagctatttttcttcatcaaatttttttgggaagaaacacttaagattgcaacgtaaatctttgaactgggtatcaagtaaagtactagttgaaactctttataaatatgtttgtggttagactaataatctaacataaggatatattgtctttgtggatgttcaactaaagcaatgtcttataagtacataaagaaaatttaaactctaaaataataaggaactatacagtatacactagtaatttatattaaaatattttatatttatagaataagataaaggaattaatattgaggtaaatgaacatttgatattcattgaatttagaaaatattaattgggtgatattttatgatcatattttgatattcattacactacaacatatttcttaattagtggcggacgactctgccgctaattgtggtgaatcctcaccctcaaaacaagttgttacagcagtaacaatgttcaagaaacacaaatcaaaactaaaaccaatcacaaaaccaaaacttgaacttaattg

SEQ ID NO: 127926 - DNA, 1048 bp, Cannabis sativa
ttacaaaaatataaattaacaaaaccactatacacaatttcaaatgcaaaaactcacatacaaatatacacatatataatcaaatatttaataacttctaacctattcaaaattaataaatttatttcatacatttaatttttacaataaatatattctaattgatctaacactaaaatatacttttcatataaaataaattgtaatgccaccatttcaagtttttattgggcatcctcccacacacttatgacttttatatacatatacatcataatctggttatttcatggaataataactagtcttacaaaccgacacgagtctttctaattggctttattctcattcgtacgcttctcaagaaaacttctcaggaggttgtctattctaagattactcaagtcatgttcttaagtgatggattaccgaaaaaaagatatacatcttatacatttttaatcattcttcaactgtgtcgtcccatatctacacagtcttaaaatcatcacatttgaccttttccaaacaaaataaaattgcacaacttactcgatctttttccttacaattcacatgactctcactatcccataaatcattaaatagaaatctaaattgaagaagtgaaactaggagagaatagaggactattcgatataatccaatgtattttgttgcacggaaaaaagtatttatgaaaatgttaaatgaaatgatgtattattttgagtttgtgtatacttttgccgatgcaatgagatgcatcaataaaatattttcctgcaaatatgtttttcttgtgctgtaaatttcttaccaatatttttcatactattctggatcaaacagaaaaattgttggcaaaagtgcaaaaaaatgtaatgtttttttgacatttttttcggccaacaaatttttttctaaaaatatcatctcacctttgtcaacaacacgaaattttcctattgacagaattaagctttgccagtgtgtttttgcaccaagaaatattaattttccgctcacaaaaataattatgttgaca

SEQ ID NO: 127927 - DNA, 778 bp, Cannabis sativa
ggggggggggggggggatggttttctaggctcagcgggtttggtgatagtggggaaaaaaagaggagaaatgtcattggggtctgataatggggtttctggcaaatggaggtcgagaagagtagatggtggtcagggtggtcctggttcagacgaggggaaggtagagacgaggtggatatggtgattaggacgaaaaacaaagaagatgtgaaaataggattttctgagaaacagaaatttagggtatttgagatttttttggttacgatattatttgagaaattatgttttggttttttttttcttctaaaaagcccttcacagatcgcaaagaatcccaacttacacctgttgtagcaataattttgcaaaaattcagcaaaaatattactggttgcttctttaactagtattacttttgctaaaaaattactgcagtaggtgaacttctccaaatcaatgataaaagccttttgttcatgttgagttttgctgcagcaaatttcaataaaaaatctagcaaaaaccttaaacctccaaatcacatccgaaactccaaattatgctcaaaaaactcctgaaataccaaaccaagtgtaaaatccacccaaacagtaaaaataaaaatgaaaacaaaacaaaataaaataaacataaagaaaaagaaaaataactaatatgattaggggtgtgcataaatcgatcaaatccaatgagaaccgaccgatccaattataaccaactgctaaacattggatatccaattatgatcggat

SEQ ID NO: 127928 - DNA, 541 bp, Cannabis sativa
tgcaataggagtttctatgtaaaattccgtaaaaatgtagaaaaaaaaaaaactgttttaaagtgtaaaaatgaaaaaaccaaaaaaaaaaaagttgatatttctattagagaaatgcatattttgtcagaaaaaatttcttcatatctttacctatgtttgcatcaatttatagtgtttggtttataattatttttttttttttttgatgtttgaccgcttgtattttgaaaattaggcactttggggcttgagatgatagataaagttttcacataaacaatgtgacttggtgtgaaaaaataggtttattggggtcaaaacttgccaataatggcctgcagagtcttacaatttctttgggtgtttaatttgcatttggttttgtggaatcacttagcttgcctctgacaaatgtttattatttgctatattattatgctaattatgatttttgtccttaaattttgacatatatcaaattatgttccttgaacttttaaagtcgttaaaaatgtccccagaactattgagattgttg

SEQ ID NO: 127929 - DNA, 1356 bp, Cannabis sativa
  modified_base (33)..(34): a, c, t, g, unknown or other
  modified_base (1237)..(1238): a, c, t, g, unknown or other
ttaatgtttttttatcaattttttatgcatttnnaattttattccattctattcctattttcattctcattcttatttctatgttttcattcatttcaactaaacatcacctaagtatctatataccctttgttttaaaataagtagaacttttttttttatctatttccaaaataatcttttttttttcttcttcatatataataatatatggttaatatggataactttccttatctatatacaactattaataataaatgaaatatttattatttttaacttttattttaaaatttatgagttcacttgttttgatagtttctatgtagattgctatgtaggttttggttgccatttatattgctctatgtgaatttatataaaatggaaaaaaaaaaaaattattttgaagtgtaataaaaaaaaaattaattattttatttgcttttatttttggtttagtttaatttattagtaaggatacattaatttaatgttgtttaataaaattacaaatttgtaatgccacaataattaaatttaagtgtatggtttatttagatatgcatgacaaattaaaaaagatattatgtaaatttgtgataaaaataatcaaacttttattaaaagttaaataatacaaaattagttggtattggagaaaaatccaactatgacttgattaattgaattttatatatgtagttaaattcagttaataaaattgattgaaatgatattaggtatttaaagttgaaggaaagattattatgtaagatatggtaagttctagtgtagtcgggtggggaacactgtaaagctacaaagatcatacagcgcgtgggcacattctttagtctaccaaagcaatttcatttgtattattattattgcggttagatacgaagaagaagaaggggctttaaagggaggcaactcgggtgacgtgtcaacatcttctactgcctctcattatagctattctggtagtttggtatcaaataaataaaattaaataaataaactcctctttagtgcttcttcttccgagataaaagatttgggctattttggtggagaaagaaaataacaaaaatataaagggaattttataattttgtatatattattctaattaattataaaatatgtgtaaaaaaatttattattattttctcatacttaaaaaaaaatttcaatttctttcataatatatggtaataattattgattnntatatatatggtaatattgattatgtttatttttatatttacaattataataaaaaacataccaataatataaaacattttatatatgtatttatttattttctgttaattaaacata

SEQ ID NO: 127930 - DNA, 556 bp, Cannabis sativa
  modified_base (522)..(530): a, c, t, g, unknown or other
attaaaaaataatataataataagtcttaaaaaaaaacaaatgagtaatatctactttattatgtaaggacattgaagagagaatatttaaactaggaaatatatgtaaccattagtaaaagttgtggtctgtatgtgaagttccgtaaaatagaaaacaaaaacaaacaaaatatgtagaaaaataaatgacaattcgtataaatgttaaattaccgaacatccatataaatataaaaagagtatcaatttaagtatttagtgtaatttttttttattaaaagtaaaataaaaagacatttttaggggaaaaaaaagaataaaatctcaaattaaaagtaatgtcattgatgcttttaaaaaaagtaatgttattggttgttagtaatacaatatgatattttattagtgaaacataaatttaatttaatattatttgaaaaaaataattatctctattttttatttttattttttatgctatgaaaaataagtagttatttaggtggcgtttggtaacannnnnnnnntcagttttctgtttttaaaagtagaa

SEQ ID NO: 127931 - DNA, 1568 bp, Cannabis sativa
ggtgcctagtcataatttagttgatgtttatgttatggttatacttttcatactgagtctatcgactcacatatattttttacatgtgtaggtaaagccaaaacaacgactgaacagtagtgagctcaagaaaatgaagattttacatattgggcgataagacctgaagttttcagactcttaggacagtaggcttcatttcaataagtcgctaggcgataacttttgtaactatagtattttaaaaacggttgtaactttaaaatgggatgtcagattatgtaaagtatttatatatttaagattaatgtttaattatgagatttttcattattcacattttttaataaactttttgattagcaaagaaatgcacagtaaattgaaatcacgatatcgtgcctaatctaccagggcgttacaattttgtcaaagcctccatgttgtcttccgaagatcgttgcaatatgtgcaatcatcatcagagataagcctgactcatggtttaataagccttcttatgctttagtggtttgatttagtagtatgtgatatgaaaagcctaataggaagcatgttagtagcccgatagatgagtaggcgcatgttgtagtttcttaagtaagtagtaattagatattaatcttgatagcattattatcaggctaactcatcgttttgcaggctaatctattggaatggacaccaggaagaatatgagaagtcaaggtaacttggttggatcaagtggctgtcagggagtttagtttcatggtgatgttgttggtcgaggtagaggccaaagaggtagagcacgcggttggggtaatgttaaccccctacaggcttctcaggatttggttcagagatttactgaaatgcgagcccaaatcaatgaaaaagatgaataaatatggtgtttaaggtagtagggtgctcgtgcaatgcctgctcccgatgtgcagacagctccagtccctgtagtgcaaggggagctagttgctattggtaaccgtatggaaccattatctgaaaggtttcgtaagcaagcacgtccaaactttttgggagctccagattttatgaaagtcgagaaatgactaacagtaatcaataggatattgaattttatgggagtcgctggcaatgatagagtggcttgtgctactttttaattccaggaggatgtcttggttttgtgggacatggtatccctcacccaggatgtaaccagaattacctgggaagaattttaagaattgttccatgcaaagtattacaatgaggtagttcgttgtacaaaaagaaaagaattcactcagtttgttcaatgagagaatatttttgttatagagtaaaagacttaattcgatagtttggcccagttagccttagggttagtgtcaattgattttagcaaaaatgaaaagtatttgacgattaccatagatgacatgaaaacctatgctactatggtagagaaggctctatgagttgagtgttggaaattattttactaggatcttagatctactcaaaagtatgttgattaacaccctaaatacgaa

SEQ ID NO: 127932 - DNA, 768 bp, Cannabis sativa
aattcctactcctccagcatacatacacatctcttctcgaatcacaacaacacaaaaattcctccatcaaaagtagagatggctcactcaacatctgttgctattgagcaaactattgctgcggatatcccatttgctccaccaggtttcaataactcttatgccacaactaatgaaaacaaaatgtcttccatcttcaccaaaagacaattggttactacaggaggaaatgttagaaatgtccttaaaagatgtcgcacaagagccactcctctagctgacactacaaactctctgctacactagcaacttgaaccttcttctgaattgtccaatcattcacatgaggcaattggtgatggcgtttctttggtgaaggctgctacttagccttgccaatcaccatgaatattgttagctggaatgctcggggctttagcaatccgagagcgttccgacatttgcgactgctcatttcacaaacctctcccgatgccattttcattatggaatctaaactttgtcctgattctataactaagtttcgcaatgtatttcaatttcctaatgtataaaagttcctagagttggtcttagtgggggtttattatttctttggaagtctcatgtactattttaaactatggaataaattttgttgactgttatataggggtgagcaaaaaatccaagaaaccgaccaaaccgagtaaaccgaccgtccgaacaccaaaaaaaccgacaccgaaaaaaccgaaaaccgaaaaa

SEQ ID NO: 127933 - DNA, 675 bp, Cannabis sativa
acgacatgtcgttttgcccgacagaggcaaacgacgtgtcattttctatcgtccctgtcaccgaaaaaatccacacacgggtcggcgagtctgcaacccatatcggcgcgacccggttcatgacccagtcgtatagactatcttcggtcaccaaatccgacgcagtttaagggtttttgttccatttttaatccactagtatttttcaatacccatttaattcaaaaacacaaaataatataccgaaaaattggtgaattcgaaatgtatcctccattgttaaacttctatgtaactcaatggaaaatataaaaaattgttcccaaaacatatatgaacacatttcaaatgatagaactcatattcatacaatataaacatattaatcaaaaaaattatcacaaatttcaaatttggaaaaaagggttatgaaaaattttgagctctaaaatcaataactttacctctgataccaattattaaattcaatcacaaattataagcattaaaagcaaatattttactcaccaactagcattactcatagtcataaatccaagatcaagtatttatttagaacatcaaatgaattaaatgcacatacctctaggaatgtcaatttgggccattttcgcgggccgggccgggcccccggcccgacgggccgactgtggc

SEQ ID NO: 127934 - DNA, 1109 bp, Cannabis sativa
agagagagagagagagttgagattcttaatttttttttatttaagaaaatgctcagtttcatagaaggggttaatccttatctcattcagcttattacatcaacaaaaacttggaatttactaaaaattcatagtcaaaattaataatgaataactagggcaagtgatttcttacccttacttaactaagaagtaaccatcatacttagggataaaatggtcttaagctatgacccccaaaattctcaacattctaaatgtctaataatattgccccactatttctaaggtaccaaaccatatttaagtgactataaatgccatacattacattccactgttataggacataaaatatgaaaataattaaatttcacatatatcataattaattcacctagaattcaaataaatatccataattaaaaaaataataactaaaagtctattttctaaaattaagctctaattatctgctaattctcgtaataaagctatgcggtcattacaacacgcatagtaacattgacatttgagtgattgaaaccagcgcactaggttgattatcaacctaggcactggactcaattttgatgcccttgggattgttgtttctcctcgattttacttgtatcttcgttatttctcatgactgataacattaccttgaacaaaaaattgatcggaaattgttagggtttacgtcctgaaaagcctgtaaagatattttaattattaataagagttgaatttgatacatttatgaatattaaattattaatatttaatattaaataatttatatataaatatcagataattttttattcatacatgaggttgtgatttgtattgtatagagaattaagatcatttaaccatgaataaaatagtcagtaatatattaaagtttaagaatctttaatcaatggttattagtgcagttcactgatgcccgttattcgatgcaagtaatctaaatttggattactgatgtagcatgccatctaagtgaagatggtgtatataataaagattatatatgacaaggaccgatatgaataaagttatctttgtcaaacttatcgtttactataaagatctaattc

SEQ ID NO: 127935 - DNA, 1545 bp, Cannabis sativa
ggtaaaataattccaacatttataacatgctctttacttctccaagcttttatatagttcatcttgattctgtacctgtatttaaattctctttttatattttgcggtgttgcttttatctttatgtttagaaactttgatttgatgtattctctatgaattttatagttgcttgcctttggtcttcatgtttaacatttattggtcatgtgtggatgtttgagaacctcctgattatgaatgtaattgttgacctattttttgatgctcgtagagaccaattacagctttgataaacacacttcagactatattcttgagagaacgacttccataccttgaattggaaattatttttgattgcatagtagctcaggaccctcttgagtgtttctttgtctttgtatgtatgtccttttttaacttctgggtagaatttatctgttatgagctttttgcgttgttaatgtcaacctctagatctatttttttacagatgttttctagtttttctaccatttctttagcaacaagatttacatagtcaactatgttgtattggttgttataaccttcttctgtttcaatttcttcttcttcctctgctggttgttccaatgtgtttgatttggttgtttgtgcgttgttctcaagcattacaatattttcttattcttgtgttattttatatgtgatctttggtattgcagcagttgttgtgttgttgttctgcgtgttgacgcataatgggtatgtggtaaaatctgtttctttgatgttcagttgcaagtaaaaaaaataggctcgaatcgttgaatatttttattggaggtattccctctttcgcttggtactagatttgcatggctgtttttgtggggttgcatgccaatgaggagactagaatttgtacaagctcttcatatttgcaatcttttgatatgaattttccactagcctcataattgacataattttttctttcttctcattatccattgctcttcaagagaacgggtatagattccctaacctacaatattttaacagtatttcatcaattcaacatttaacaaacacacaacaatagtaaaacaacagttaaaaaaccatcgacgtttgttctttttgtttcgatggtccagctatcatttaagtgtccagattttatctgtatctccaatttctaataaattgcatgttgttaaccaagaacgactctagaacaacgttggatatttgaaaattctatgcaaattactaattaacttttttttttcaaaagtgatgtatattaatctgcatttactttaatcacgcatgtatataataataatttcagaagctacatatcgtttttattattaaattccaaatctatgtttgaacatcattttaatttcgtatttaaaagaatttgggtgggtttaagtgtctaacctttttgattcgttaatttttggttttgatgaagctgttggtcgtttttttgttgtcgatttcatttttttttttttttttgtttcatctcgctaaaattaatgg

SEQ ID NO: 127936 - DNA, 1023 bp, Cannabis sativa
actgtatttttgttgtttttgtgcatttgtgaaattaacccttttattatcttctttgaataatgttgctatttatcatgtgaaacaatttactaataaggccgcacactgtttgacttgtggcttatattattggtctgatcgtaatttctttgaaaatactctttctattacttttaaatcttttgtaattgcgaatttagtttgctaataaaatttacctatttccattaaaaaaataaaattatttaaaaagttattaaacaaatataatcataacaaattacaattctgcgaccaagaagtggtaagtaataataagattttttttgatataattaattagatattaaaataaaaattattaacataaatgattctataaaaaaaatgatgaattaaagtgagaagattattcggaaaaacatataaaatgcaatattatttaaacaaaattaaattatataattttaaaaattgtttaattttaatataaaaagatattataataaaataaaataaaataaataaaatctatttcagaaattgagggtaatttggttaaataaaaatatagcattaatcttaattgaagggtaataaataataatatgaaaaaggcatgtaaatctatttacttaatttttttattttgatttaaaaaaaggaaaggaaatttatatatacatatataatatggtaaaataaaatgaatgagattgtttctcaaaacagaaccctctttctctctcttctctctctctattttctctactctttttttctctaactccggccggcagcaaggttcaccaaacaagatttctgagagttgaggactcgagtcaatccattctaaggcatcgtctcatcgcatcaggtatgggatgaccagattaagtggtgcttgttaggaatgctaaaattgatcatggtatttttagagtgcgtttggaatgctacagtgtaattgaatttgtgtgtaattagttactaaaaaatattattttcccatgtaattac

SEQ ID NO: 127937 - DNA, 818 bp, Cannabis sativa
aatatcaaccattagatttgatccaatggctaataatagaatacccattcataggtaatacccattaagagtatacccatatatatatattattaagcacactagtaattaacagagtccaacaccactataaggtggagtatataaaccgttagtgattatttataatatttcatgatagtgctaagtattctagtgcctttttttgtttcaacccagccataaacaatgaccaaaggaagcacctttaacaatagctttatactagtgttataaaataataggaaaattaagttttttaaaaagtaaataaatgataataattttattaatttttataatgcatatcaaaaaaatttctattaccactcatttgttttcattactcccaaatagtacttgtgaacttaatcttgtattcactttgacttcttgcttttgtacttttttattaatgttataaatatatgaaaatacatttcaaatcatgacactatagttaaagataatctaatgtagttatgtttgatgtaagtgttagagccttgcagatttgaagtgatatatatttgagtcgaatatagagtaggtagtatcactctaatgctatcttagtatcactctaactttatctcaaactcacgtcaagtatataaaattgcaccccactccattacccattaaggcgagtaatctccgccctattacccgtcccaacaggttaaattttaggtaaataccattttggaccctgtgttttgcaaaaattacagattagaccatgtattttgttaaatgacaaaatggaccttgtattt

SEQ ID NO: 127938 - DNA, 1183 bp, Cannabis sativa
ggtagttcaattgaatgggagcgttgatcataaatatggaatctatagcttcgataattatttagaagtgaaacgatgataaattttttaaagaatatgtagtacactttttagatgggtgcttcgttagacacttctatttattttggtatttagagattttatttttttttttataaattgtgtacgttgtaattatttaaaactacttgtaaattttaaaaagaaaatcaataatttacaatccataaaataggagtattcgtcaaactgccacatcatacaaaccgcctgtgccacaccacactgcataaaaaatacaatttgaaacttatcgcggtatagttgtagtttatatttttaccaaactatatagtgcaatgtgatttacggtttcaaatttaataattgcaatttaaaacaaaacatattgcattattataaaaatacaaagttttttaattctaagtccatacatgtgtaattgtgcacatctagcaaaattaatcattttttttcttcttaatattattacactacaaactactattcattatattatttgattatataatagattgattaaattgtgacaaatatattattataaaaataaaatatattaaagtatttgaaggttattttatatgaaaaataatgtaacaaacgcataaatattgtaataggaagagttaaaaatctaaaaataagatttgtaacctaaattacattgacaatttttgtaattaaagtgaaaatattacatgtcagagttatagaactaaatagagatgtttctagttgttagaaactgttataatattcatttatagtgtttaaataagtactggctatttgagaatgagtttgcttgaagaggagaattgaaactcaaaaattgtgtgttgaaattgtctcaggcgacatgtcgcctgttactggacaacatgtcacctaaactagtgttagaggattttcgatgttttagcgatattttatcaatatatgtgtttaccgagatttttgaaaaccaaatatttagagcttaagaaataaaaatggaataaataaaaaatgcaagatttttacgtggttcaggtgttaattatccttagtctatgagtccattttattaggctccttggccggtgaagatgagtactgttatcccaatttttgcact

SEQ ID NO: 127939 - DNA, 1118 bp, Cannabis sativa
  modified_base (1046)..(1092): a, c, t, g, unknown or other
ttttttatgcactttaaattttattccattctattcctattcctattcccattcacattcatatttctatgttttcattcctcccaatcgaacaccaccagtatatctaaattaacatataaatgtctatttaacaaattttctcgtaaacttaatatattattgtatatttatcagattgtaccatttaaaatttaaatttaacagacacacccattcaagtagagttaaacttccattccatttacaaacaaacccattattcacaaatgagacaccctttcagaaaagacaatcgtggttatcagtaacatataactgactcaaatcaaataagaagtatttaaagaaaaagagcctcttttcaccataaaaaaataaaaagagaaaagagccccatgaataaaattgcataaagcaataattcttatcaaagaatagataatgaagttaatgaatcaaataaatggagaggtagtattttttccattatgaaagtgttgaaaccagggggaaagatagaaagagaatggcaaagataacagagattgctaagaagcattttttttttagaaaataagagatcgctaaaaaaatttaagaagaagaaatcctaataaaataaaatttgttttctctacataattggcctcgactcctcactattcattatatgtatttataacaaaagttgtatgtatttataccgttactaggtggaactacgtgcaaggcacgttgtgtcttattatatattttcatataatattattttacatattccataaattttatgttctttttttagataaattttttaattatttaaaaatactacgttagattgtgttattctaattcataacatataagttttatataatttataatttaagatgaagaattagtaacttcttcttgttttgcttcttcaatagagtatagattgaaattcttgtatttttgagtcttcattttctcttgatcagcataaattaaatttgtagtatccaatacttacttgtcaatgttggaattattttacnnnnnnnnnnnnnnnnnnnnnnnnnnnnnnnnnnnnnnnnnnnnnnntgaacttctaaaacgattataagtaa

SEQ ID NO: 127940 - DNA, 1724 bp, Cannabis sativa
  modified_base (271)..(282): a, c, t, g, unknown or other
  modified_base (1481)..(1507): a, c, t, g, unknown or other
ttgacttgctatgtgtgggcatgaaactcattcactatgggtttcgaatatggaagaataatgaaggatgctgaaatcactaaggacataatatggaagacctaatggatgagaataaaagggaagtgaaaaagacagcccattaatgttatttatgtgtatcgaaaccataaaactaccaaaattagagacgtgcattttttcaaaaggaattatgacaagtagaccctctgtaatcattaaaaagcactttttattaaaaaagaacttnnnnnnnnnnnnttgttatacctgaaattcggctagcacttcaaaggaggacacatgtcaaactaggaagaatacgaatcaacaaatataatgataattatatttgaaaatggaataactcattaaatgcggaggtaacaaagtatatttacaccatgttgactataaggtcttacaagagataaagatatacaaactgttgtcttgcgttaacgggaaaccatacgacattggatgtgcaaggcgaggtatcaacctcgttacacatgaagagacataggcgagatataatgattgctaagacgcttagcgtataatacacaatatacaaactaagtataacagtctgataaacccaaacaactgataactaggtgtccatcttgttataggaaggcacgctcgtggtaccttcactaatcaactccaaacgtcatgcaatgagattcatagctctgtcgagtaagttctctcagatagaagttgacattcaaatgatgttggctgttgaagttcaccttgtcgccaagaactgtggttgtcagatggagcattatgtcttcaagcgtagaagcacaagatttgcattgttaacctcgaaaagatgtgggaaaaattctagtttgctatcagggttattgtttctatgttccaagcgagatgtcccagaatgatatgatttgcaacgtatttaatacacgtttacattgactcagtaaaagcggaccaatcatagctgtttaattttcatatttaaaccacacttattttacgtgggatgtaatcaaatcccacaattttaggagatacttgttgtaaaatatcagtcaacactgtaattaactgtcctcctatgtaattataaataggggcaagttatattgaaaaagggacgaaaaaatcaatagtgaaaaaggcttaagaattgtatcagaaatataataagattgattcatggactatgcagatttttaactgcaaaaccacgtaaaaaatctttgtgttctcacttttttcgttacagtttctattttctgtgcaagtttatcacaatttaggctcaaatatagttaacgaaaatctgcattaacagagacaaataattaagtatcttgaataaaattaacttaattattaattctattttaagctctaataaaaatatcctaatttaagtttgtctaaaattaattaacaaattaattttcaannnnnnnnnnnnnnnnnnnnnnnnnnnatattagaaaatataaattagtaactagaaattactatctagaatcttttctttaaattaagtgtgttattctaaattaattttaaaacaatctaatgaaaaattagttctatttattccaaaattaattgtgttgctaattcaattttaattaggttgaactagtataattagcctaatacaattatttaaataaggccaatgggccttcacaatt

SEQ ID NO: 127941 - DNA, 1973 bp, Cannabis sativa
acccgcccgaaactttttttaaaatttttttttgcgggttcaccagttcgggttcgggcgggttgctcgggttcgggtcaaacccgctcaaaatgttcagccctaacatgggcatatgtaatcaagctcccaataatattatccaagtaaattctctatcttattaattcctcccgactccactatagatttagaatgacacttctaattacatagaacgctctattcgtcaggaatagatacgctatgaattatccattattttaatctaaataatcaaagattctctatagatacactataaattattcatttttttaccaagacttggcatctttgatgatgggatcatctcaattttgatctttatcctggcaacctttgtgatggctagtcgcctcatgtggatcattagagtcccctactttggtcttcggatcagtaaaacgatgatcagactttgttcaggtgagggccatgattacttgaatgtaatctataagtggtctcactacttccttcaactcttattgaaagcaccaaaaatatttaccaaattttttggaaaactaattaaataattagtactgaagaaataaaataattaaaaaagagaaagtaaaaagggacaaatagttttttacgtggttggggcgttaattagccttagtccacaagtcagtgttattcagtagttcttagcttgaaaagcctttaggaatacaaagaatatatgtcctcaagtttttatgagcaagtgttgcaagagaatttaacccttaattcataggatttgataggtatttatagtagttttagaataacatttactttcccttttctctctattggggagtttacagtgaataacacacttgggttgtcttgtgaagtccagcccacgaaggagaggatttactgactaggcagatcatatttggcttgatttggtcaacactgtgtgctttgattgtgggcaataaactgtgaattaattgcttaatattcattttaggaagtttctccatttattctgatatgatgccctgttgaaatttggcaatcaattatttccttaattgttgcaggaataaaaaaagaaaactagaagagtcttttgggaacacgctgtctcacccctccgatctcatggtaccaaacttttgggaacacttcgccaatagcggaaggctctatggtcacagatacgttcctggaaggacttgtctaaatggacttgacccactttaccttcattgagggactcactgatgggccttgaatgctaatttggattccacgtgtccactgtcaaaaacgaggataccattagtttataataatatatatcatatatataatgttataaaacaaaaccttttaattaatcctttaaaataaaagaaaatatctaatttaatttaaattcaaatataatttttttataattgattaacagaaaccagttaaatccttttattttactattattttttaattaaataatttatccaataatatatttacttcaacatttaaaagataattaattaatttaatttaaattattttaacctataaaaaataatcaaacaaaattaacatggacctttatatgtcatcctacacgtgtgggccagacccacacgtgtggcctatattttaagaaatcaattttaacataaataaaatttattatttattctatcaataaataatagttgattatttattatttattgaaaaattaaataataattgattaactctcattaatctcttatttcacaagaattaaagtaaatattattttctctaaaataatatatttatttcttcaatattatttaagaaatagttaaatactatttaattatacaattcataattatcataattattgaaaacaataattttcataaattactattttacctttaagaatttacttttcatagaaattaattctcact

SEQ ID NO: 127942 - DNA, 751 bp, Cannabis sativa
  modified_base (663)..(669): a, c, t, g, unknown or other
aattattcataattagggggttttttgcttatccatttcttaattctgggtattacatctatacacctcctccatgtggtgttgggtttcggaaccagaactgggtttgcaagccatattaggtataatgactcccgcaggaaatcactggcaattaacttgaccacctctgtttttatagcatcagatctgacaggatttagaggtctccttttctgacggaccggtgttgcatcttcatagatgttcaaagcatggaaaatggtattataatcaattctagtcatgttagaatgactccaggctagtacatcttgattttccttaactatgttgattacatcttcttttatggtggggggaaggtgctttcctaccctaagggttttagtagggtcttctttgtagatgctcacttccttaattttctccagtggttctaaattctgctcaagtctgactcttggatctaattcgtctttgtgtccctccagtataacctttgtgtccatcatgtcctctgacccaagtgcttcgggtgcttcttccctaaccatatacacgactcaggttgatatgtttaacagtttctcgcgctgcgttggtttcccttaatggtgtcgatgcacccattattgtttgttttgtgccctaaataaaacnnnnnnnaatataatcagatttacaaattaataaagatcagaaattacattttatgttgcatggttcacatgatttattttatgattgt

SEQ ID NO: 127943 - DNA, 1315 bp, Cannabis sativa
tcgatccatccaatccagaaaaaatgagtaaaattttaatgttcatttatatatttatatattttatgtataacaatataaaatctaattactcatccaaagtaaatgaaaatactaattagttcgattggatgttggatgtattaaatttttagacaccccatcctacatccgatttgatctaattggatattcaaaaataacatccaatccgatctgatcacaattagattttcaaaaataacattcaatctgatctgatcacaattggatatccaatattgtttggcggtcagttgtaattagatcggtcggttgttattggattggataatttatgcacacccctcgaaatacaatgaataaatacaagcaaagctaaaaataaaaaagacatgacacatgacaaatctagagcataattagggttaatagtaatatagagagagactaagaatataagttgtattggtttcttattcttgttatgatgcaaaggttatcacacacaaaaaaatatataggttttgagaaataccattttatgtccttttttgaaatttaccactgtctttgtttaacttgttgtctatatatgttgcttcatattatgtcataaaggttaggtaatcattttctaatatcaccaaaaatataggttttgtattattggtagtcatctattatttgttttgtattttttttgattaattcgggtgtaattttaacaatatttatttaccgaaatttcagcatatcgttcacttatgacatctcgtacgcacatcattatagttggggaaaatgtacaacaggtgttatgcagggtcggctctaagcataggcgggttaggtatgcgcctaagacccacacattttaggagctcaaataagaaaatacattttaacaaatatacatattattttaataatttttaaaaatactatttatcttaatagtaaaggccctaatttttttttacctatggataggcccatttcaactcaggaccggccagtggcggaaccagacaaaaacccgaggagaggccaaataggaaagttaagcgaattgtatttttacctatttctttttagaaaatattaataaaattaggctatttaaaagttttataaccttgaactattacaatgattgtatcgtaccccttgaagttttttctgctaaaacatgtcaatgtagttgatgtgttattgtcagtgctacatatttaatttaaagttctaaaaaatattttcttattaactataaattataggatacatactattttggaccctctactttgtaaaa

SEQ ID NO: 127944 - DNA, 1505 bp, Cannabis sativa
agaaatagaaataggcatttagagttagagttataattataatttatctttatcaattctagagattttattaaactctaggagtattatatatattaaatatgaattatttaatttttatgattttgctcggcgatgacgaaaagtgcaatggatggccgttagagtcacatgggtaagtttagaatttatttcttagtgggacaaacatttgagatatttagaatactgagtttaagcggggttataattttagatcattttactcctaagcttatcgttacttaaattggaagaaagaagggcattttggtaattttctttaatggattaggtggcttaatcctaggttggcagctggccactcaatttctaagcctaaagtttatttgatttaatttaataaaagaaaagggaaaatgtgataattcaaggtctctgtctctctcttattttcggttgcctaagaaccaaaagaaatcaagccaaactcatcaaaatttctaggttttcaacaaggattctaagcgattttagtggaggtaaaaccctaatttgatccttttctagtttgctaaattattgtaggttttattgggtttttgtgtatgcttaggggatttagtttctgtgttggttagggtttcatgtagggttgtcttcctcagagttaattggtgtattaggatagttttgagttgttgttagttgattttgggtttgagctagtttgatctcttggaactcaaacttgactcaactatggaatgttgtgattttatgcaaatttcatgctactatttcttggaatgtactgtttgaggttgatacaagtgttctagaaggtctagtatagtttggacacaaattgggcaagttttgaacttgtttgggttacctggtgcaaactggttaactggttttataggccctataaaaccggttaactagatcaggggcacgtttcctgaaaaagttcaatttgtcagttcgaattatttttagagccttagttggttaattctttgataattaggacattgttataatatttatcgataccagaacccttagtagtgagtttggattctcgaattaggttttggcatgttatttacccgtttatgtaaatgtgacttagggcatccatctagcatgaggttttccattcaggtcggccaactcacttgaattcaaaaatgaggtaagaatagcatagaatgtgttatatatgcgattatgtgtatgtgtgatatatgcatgctattgtgattcgtacactaccaacactagtacagtagcggtactgagtacgttggtatagtgtacgatgtttaaagagtacaacacggtgttaccaacactagtacgggtaggtatagagtgtctgtggtataacacttggtggtactcgaggtacgagataaccctacccacactcgtgcagtaacagtgttgggattttatgtcctaaataaaacccattacaatctaatctgatttgt

SEQ ID NO: 127945 - DNA, 1614 bp, Cannabis sativa
cattctttgaacgtaagaataatttaaaatggtgtcttatgtaattattcatttattcattcaacatacataagataggtgaacaagagcatgattggggattcaccccgattaacatggcactaactttgtgtgtcaaaacataattggctaatatacgagtatttgattagcttctcgataaacaaaagagaggccaacaacactagcattcatcaataagcttctcatatgagataacagactatctacatcacatcaatcactctccttgttgtggattaattggattggttaaaaatagttagatttcactataaatcttagaattcttctttgtatcccaacttgaagacccgcatgtattgcttgaagtttcatctacaaaggtggccactcatgttacagaaccatagaagacacaaactccatcttccccacctcattcctcattacacaacttatacaggccactttggcaccactctttacttttatatctacatttattttaaatgttccagacttcgacgattgccatacatcagtctccgtcaatatatcgaattttggtcgtgtattagaccctttataatcagccaagtacttagtgcaccagtccaacacatccctagcccttggcttccttccatcgtgtattgtaatatcctaaaaacttaattataaataattaggacttattatataattatgagttaattagggtataatgagtaagattatgatcctaataatctaattcagcgtgaattatgaaatattttcataagtggataaataagcgtaattgattaattacgcatattttattaaaatatgtgggtatgatgtaagttatttgtgaaataaaaataaaaatagctttaagaataaataaatcgcatttacctttcttaagctcacaaagatatttgatacaagttctcttccagtgtcccattacgccacaatgaaaatacttgcctttagccttcttgtccttagacttgggactggctttgttcttcttggccttgggtgacttcttatcactattattgcccttattgttctatttctttttcttaccagaagaagaaggatagttgatttttgctccaacaatatttgattccccctttctttgatttatccttgttaaggttctcaaacgcggtcaactcgttcaacaattgagtcatgttgaactctagcttgttcatcacatagttgtggtaaaagccttgaagcaaggagatagcgactcaaggatcatacttacttgagtcctctcgtcaacaatgatagccccatgatgtgtctctgttgtctcatgcattagctcaatcatgtgcaatacgtgagttctaatagggacactcttctttatcttacaatttattttgatacgagtagcatcatgtcttgtttgattagactgttgtccaaacatggactgtagagaatttattatttgagatacattctccatatgttcatgcgccttacgtagaacatcgtccatgctaacaagtaggggtgttcattatatcacatccaatatttttaggcctatccagatccgatccaattatttattggatgttagatttt

SEQ ID NO: 127946 - DNA, 1369 bp, Cannabis sativa
  modified_base (1033)..(1035): a, c, t, g, unknown or other
agttcctggtaaaataacttccaacacatttttaatgtggggatagagaatttgatgaatggaacccactgaaactcgtaatgtccaatcctccaaatgccataagcaataaaatacttcttggtgtacccactaacttttgacatggctgcagtataagtgtcacccaaccattggtgaccgatctggctgaagtaaaagtacccagtcctattctactttggagcagactttaggtcaaaatagtatccaatctcgtaaggagtaggctaaggctagcctagctccctatataaaacaaacatcaccgaaaggtacttaataatttttgcggtgatttgtgtcaaacacatcccaaaagtaagcagcattgtctcaaaagtatggacaaaccagcaacactaccctctgctcaatatggcactctaatcaagccaaccaacctaagggaagtcagcgtgcccagtaatctctacggggtatctcacaatggacacccctcactaagccactagcaagtatcttgctaagagcatcatcagagagggtagaagcgggagagacccaacttcctccctgtgatctcgcatcaagtattcaggctcaaaagactaatccaagacgtgatccaagccaagcactgaaggctcaccaagcctatttagcgggataccatcggcatcgtaacgacccaagggatagttggagaggaaaataccaagttctgtatctctttctcctaactggtgcaacctcctcaagatcaaactcagcatcgagactctcagccccttggttaacctttagatcagcatcaacatgaggttgagtagcgtcctctacaatcctgactcgaccccttgtagccaccttagctacatgggggtcacacggaagcactctacgacaagtcaattttgttctaaccatgacaacaagataaccaaaggacctagacggctgtcacctcccctatccaggacctagaaccacttagatagaagagaaaaggggaggtgagcaacctgacaannntacaaacacattctagtcaacagtacccaagggtactttctaggttaatcacaatgtataaggtcaattatcgactgagtaccgtcttaagtacacttacaaagacatatagtaagtactatgttatacaactgaatataatggactcactaccgagccttatatagagttcctaaggggaaccatgcataagactacagttgtatatgcctccaaggctgtcacaagaccctagccgaggtcaacagagggtaaaaaactagctgcccccttggagctttggccttggccagccaaggttccaagccttagtggctggccagaccccatgacc

SEQ ID NO: 127947 - DNA, 765 bp, Cannabis sativa
tccatacacaattctaagtatctccgccggtgtccttccatacgaaagtgagtcttgatttgcagagagtacatttccagaaactcttccttcagcgcctagagctattggtactacaagcccttcatctttcacaccacttcgtcccagcctgttccttagctcagaaattcgatttgtgaactctgccacagttatattataaggctccactctcatctccctacgctcatacaacaatgctctaattacagcgtcttgccctgattccacacccaaaagaccagccacaagctgaatgaacaccatacaaaaaacatcaggtaagattttagagtactttcatcaccttatcttctctattctttacaacatcatcaaaaacttttaatttatttctgttttatctggcatattttaatttacacaatacatcaacttctttctttatataatttaaatatcatatatttgcatatcttttattatgtaaaacaaaaaatgggacaaagaaaataaagaaaattaattaaataatgagagagagagagagaaaaataaaaaatatgttttaactcataactattcattaagctaatggcgaggtaaaagttcaagggtataatacctcacttgatatagtgatattttaaacattttcggctaatttatacctcttagctattttaacttatctaagagcactcacaacaattcctttaaactcttatcttctttaaaaatttaaagagaatgacataaaaa

SEQ ID NO: 127948 - DNA, 1315 bp, Cannabis sativa
  modified_base (769)..(772): a, c, t, g, unknown or other
ttgtcaaatgcgagctaggactcatcatgcatgggatgaagattttgaacgtgagcgtttaacgaatgaaaagtggatggaggaatgtttaagagatggggtccccttctatcctccaggttttcctactggctgtcgtcggtgtaagaagaggttagtgacgggttccatcgtgatcctaggctctctatgtattttatgctggcatcaccctgatcgtgagtgttttttaatgcaactctcagtgttctagctttagttttatctaatttaatttttagcttctcttttttccctttttttcttatccttttgcttgttatggtctgttacttcggccaatgtcgtaacttgattgtaatttaattagtcggttttaggtattttttttttgtaaaagggtcttaccttgtagtttagttggggctcttattttgtgtgtattcgtatttacctgtttaaatattggtactacatagtttatcatgattatagtgtgtttattaccatttattattcgttctcttttgccttgtgagaccttcggtcttctcttaaaaagccatccaatgtgtcgtttctattactctatattacttattatgttattattattattttttaaaactagaaagacatattgaaaactggaaggacatataagcttttagagtttctcaagatttgaggggtgtttaattgattgacgcgtgttaccatcttaattgatctaggatttttgtatgatagactttgccaacctgcatgnnnnccacaaaagccttcatgaatttttctgatgatctcgtttgcttctataggaagaacacaccgaagtagatgcatggaataacctcttctatatagtttgccttcaactattgtgtagcgaggcactgaatacaagagttttcgtgcctcgtttttgtcatttgggagtttcccgtcgagtagatagttgattataggagtcatccatgtaggtgaactatctatcatcttgatgtcttccttttcacatatacttggctcgtttagcatctccactggaaccaagtttagctcatccaaatcattttgtggtgccagttttgctaaggcatcatcattagagttctgttctcttgggatttgctcgattttaataatatttccaagttcttccgaaccttctctagatacttagccattttcaggcccttagcctggtattccccgagaacgtgatttacaatcaattgcgaatcactatgacatatgagattcttgacctttcaacgctttggctatcctcaaaccagcgatcaaggcttca

SEQ ID NO: 127949 - DNA, 524 bp, Cannabis sativa
tgtaatatctctacttggttaaacaaaatgggaaataaattgtgtggatggggttctcttttgaagagagtttgagggtcttgctgatctttttttgaatctcagctgaagctaacttagaactcagaatccaagtagtggaacatatttaatgaaaagatattagtagtttttgtctttttttttttgatatggttgtggagattgtataaatgatctaatctctcagctatgactatgaactgaaattaagaaattaaatgtatgaaccttcaaattattatgtagtcctcaagtgtgcttcaaatctcttatcatgtgacaattccaatctttaagatcatcaactgtgatttcctcaaaataattttgaaggttgagcatttgttctctagttaaatgaaggtaaaatatatgtacaagtacatcgcctcctttggctatacaaagacaaaaaaaaaaaaaaaaacatttttctttctttaacaatctcaattgtacaacattcaagaatggaatgtgtc

SEQ ID NO: 127950 - DNA, 759 bp, Cannabis sativa
tatatgtattttataaaataatatttataactaccattagtttgtttctcaatatctttatataaagttcaatattattctattccagaagaaaaaataaaaaaatatagcccccttcatattatttcctttcaattctttccaaatatttgtatatcagcttctaattttgatcatcttattctaatttattcattcatattacttcatacttgaatatttattgtagtgaacaaaaaagcatcgttgtattcgtgtgggccgacaacatcagggagtagactgcaggatttacttgtgcttgaggatcaacaacaaagcttttctttttataggtatcaatttttcgagtaattcttgcaacaaatcttggtataggagttatatagatatagagaggtttgagattgattttgaagtttttctctattcttgccttcttggtttcccatatgattttgtatgtacatatatataattaaataagtaatgcttgaatctttgtgtagcgttgttcaattatataaagtggtatccaaaagaaaaatcaataatgcaatattcgtccataagagaacaacaacaaatgagtcttttaagggatgatagtttaaatcaaaagtataattattcaaccaaataaaatcaagtataatatatagtctttacgaatcaaaatcaagtatctattctatataaagtgtgcctatataacagaatttttagtatttctaaccctatttgattatttgattataa

SEQ ID NO: 127951 - DNA, 1280 bp, Cannabis sativa
ggacttaaatttggatcccttgactgactggtttaaccatttcgttggtcccaccttagctccctttacctcagaaataacaagccactttgctgccggactgactgagcttccaatgaagagatatgcggcctgtgcttctaataatcccatctaccagatccaggacgtgagtgcaacccttaccgtggtaagttcccatctgttagagatatattcaagcatcttttctttttgatgtctgatattacgtattcatatttttttgttggttaccagattgctgcagagaccgatcgcctcttgaagacattaattgaccatgggtataccatgtccgagtttgggggcatggaggaggccatgaagagtcttcgggagtcggaggagcaaaagagagttatccgggaggaagcccagtagaaagaggcccttatggagcggagccaccaggaggcgctgaaggctaagggtgaggcgttgaaggccaaggatgcgactgtggccacagcgaggcgggaccttcgggattctaaggaggcagtgcaggaattgaccaccaagctgaagtctctagaggagctgcaccaagcgaatatgcaaacgacaaccaacctaattgttgaagtgaaggggcttcatgagtttaaggagcaggctcaaaaggaggcagccaaggcgaagagagatgctcctggccccagtcacttgtcagcactgcaagaagcgcttcgatgatggagtcttcatggcccgtcaatccaacagtcagaatcttaatcttagcttttatcccaagcctgaagaggttttttcttactactgggagaagaagaagaggctggacgcagtgttggaggagcgaaggggtcctcctcttcctcctcgagccgattaaatcatttgcttatctccttcattattattattatcttttttttttgtttttttttcgcatatcctgtccttccccccacttctaagataattttttttaaggagagacttttatggcccgtccccaggccttttctttttaaggttttcttgttctaacaatctacattatgctcgaatatatttagtttttaaattccttatacttgatatgtttatatttgtccatgtgatatgccttagtagccccctaattgaatgaaaaacagttttttagtcactttgtcttacaaaattaaattagaggttgcatatatttgttcggtacaaattcctttacagaacataaactttgctttttgactattggtaatactttcaga

SEQ ID NO: 127952 - DNA, 871 bp, Cannabis sativa
ttatggtaatttagtttggcatctctttttttttttttttttaaacaagtagcatttagtttttgatattaagaatattaaattttaaaataaaattaataagtgtaatgcatctaacgtgtccatatttatgagctaacggaattgatagtaacagatgtaagagaattgtaacattaagtatttttacttccaaaaataaagataaatatttaagtgtataaaatctaaaacatgtatttatgccgcaatttatccttttaatttatactaaaatattatataaaaatattagataaaatacaatttaatataatactattaaaaaaaatttatctaatttacacgtctatattatcaaagttttcctccgttatatatattttgcaatatgaatattttagaggaaggacaaggatcaaaataattaaaaaaaaataattaaaaaaggtgattatagttagctagtttggtagacacgagccacttcgtttggtagctatatctaccattctctcctctaaccccaaaaataatataactaaatacccactattatttcatttagtcctatatatataatttccaaatcaaatagaaaaaacagacccgttatgcatatatatgccataatagaaacagagtactacgtactatataaacccttcaaataagactagtaaaaccaaaccaaagaactgagctatataaatatttatatatatatatatatatatatggctcccccaacagctacggcggccccggctcaaaccctgacggcactagcagaagagaaaacactccaagcgaagttcgtccgggacgaagacgagcgtccgaaggtggcgtacaaccaattcagcaatga

SEQ ID NO: 127953 - DNA, 598 bp, Cannabis sativa
atatacaacatatataatgcatctagaattcaaatatatctctgtaattaagaaaatattttcttaaggcctatttttagaaataagccctaatttctactaagagacatataatcataaaataataattaaatctttaattatttgttaattctcatgatttaacaatgcagtcattacaagcataattgcccatcatgtaattaatacaacatcaattacccacaaagataggacacaattttgaaaactagcattgtgatgtgacatccacatcaacatacataaagcaccccttgggcagggcttcaccagataagcctaaagttgatatattatttgtaaacaccccatcattgggaaaatggtaaatagtatgacctctatgcactataaatactcaataaatcttacatgcaaatatttggaaattcttggcttatttactcatggaagaatagagtgctcatattttattgtaatcccttaggcttttttagcctttgataataatattgactcatggactaatgcttgttaacgtcctaaccacgtaaaatccttgagtgttcttattttatttcctttgaattatatt

SEQ ID NO: 127954 - DNA, 2301 bp, Cannabis sativa
gacggttatagaaaccgacaggaatactttaaacgactgtttaaaaacgtcgggaaaacccatttttgtagtagtgtcttattgtttttatatttatcattactacttttgttttacttctttgatctcatactttaaatttcagaaatatatcatttttgttcatttaattttattagttaatcaaataacaaacttaaattcatttttttattagtaaaaaacaatctaatcataattcattatattgccaaaatcaagcaaaactaatcataaaattaatttttttattttttatttttttaggttgcatttagtaaccctttttaattagttttttattttaaaaattcaaaaagtaaaaatattttcaaaattatgttctataaaactattttaattttttaatttgaaaatttatttaaaaaaaaaaaaaaaataacttttaatattttttaaaccggttttttttttaataaatattttagactctgatattagaccttgatcgaactcaaacctgaccctggcactggcaccgaatctgacccttgacccggactcgaacctatatagactcgacttaaataaaataaaaaaaaataaatatgaaaatgaactttatagaacatttttttgttttctgtttttaaaattaaaaataaaagtggttatagaacgtatttttattttcaaaaacaaatttttaaaaacaaaaattaattttacttttttctttgtgattaaaaaaaagaaaacaaaagtattaccaaacgacacattaatataaccattttaaccgtcatttcaagggggaaaataattttgtgtataaatgctgtaaaacaaaatggttagcattgactttttttttttctttaaataatatatggatttattatttaaatagagagttaatctagtttattaaaatcaagagagctataagctattcttttctttcataattttggccattatataatatatataatttataagttatctaagatgtaacaaatagattaggtattccatcagaaaaaaataaataaaaaatagattaggtatctaagaaaataagaaccaagtaaaaccttaattaactcattaaattatagtagaatggaataatattgataacatattgattctccttgttcttgtattaatgtcattactaagtttgttttacttctattatgacattgaggataaattacattctcccactaagaaatgttttgttaaatttaaatcctgccaatgaatgattataagtacaaaaggtaataatattgttaatatattttttctgacattagcaagtgtgggaagaatcaatacatacatccacagaaagaaaataaagcaaatggtagaagaaaaaaaataatgaaaaataaattactcaaactatagctttagtctgtacaaaaagatgcattcaatcacacttggaagattggaaatggatcatcttccctttaatatattccttgggaatcacttgtcactgtcagagaaagcctcatgtaaaatttgcattacaacttttttagtttatattattattatttttgaaaatttctctttcttctaagttttcagtgctgaggaaaaatcttctatacttgcaacctctttgttttacttggtagttactaaccatatggccttacttgtcataacacatcaatcactttcttataccaaattacagtaaaacaagtagtttgtatattttttcttgaattgaaaacaaaacaacaaaagagggaaaaaaaaaacaaaagaaaacgagaaactctgtcatgagaatctcttaaagtatgtgaaatgtacatttttcagtcatcaatcactttctgttatggaagttttattttacccttgaattcaaaacaaaagggggagaagaagaagaagaattaagcatgagaaaaattaataaagatggtaagaatctctaaaagcagtcatcaaatgtaaatgtttagttttgaattttactatgctaaacatttgggacaaactatctagtacaagtactagttagaaaaaatatggggcacagtagttcaaaacttgttcatttgaaaattttcaatgtatgtatccacatttttatatatatttgaaaatagaaaatcaatatatattataacattaattgttaaaaaatcatcaaattaaaagtaattccatcagaagtaatatatactcctacatgaggattttgtttctatttttctcttgaagaagctgagggcccagccgctagtgtaactctgttcttct

SEQ ID NO: 127955 - DNA, 796 bp, Cannabis sativa
gtaagggtcggcagcaagcataggagctaaggtcgaaagtggggtggagtgaaagtcgggaacagctaattggatcaggcgattcttgttgtcgggtgtagggtactctttcgagtttctccttaagccgggttctgccccagttaatgttaaaccatactagtaccctcatttccaaaaagatatcattgaactgatggtgcgtgatctgacaagttgcgcctttgtcaagacaagcactagtccctactcttccccagttttgttggttaaaaagaaagatggtacatgccagttttatgtggactatcgcgctctgaataatgtcattgacgaactcctagatgcattgggaggagcagaggttttttctaagttagacttgcgagcatagtatcaccaaattaggatggatcgaagggacattcacaagacaacatttagaacccatgagggtcactacgagtttgttgtgatgccattcgatctcacaaatgccccatctacatttcaggcagcaatgaatcagatgtttcagccttgtcttcgtatttgtgttattgtattctttgatgacatattggtctgcagtaagacttgggcagagcacttgattcatcttcagcgggtactacaattgttaaggcagcatcaattttttgcaaaaggcaataagtgtcaatttttttagaggaccattgaatacttgggacacttagtatccgctcaaggtgttgggctttgtgccccaaataaaattatatttcaatgtatattttatattcatttatcaata

SEQ ID NO: 127956 - DNA, 1035 bp, Cannabis sativa
  modified_base (27)..(36): a, c, t, g, unknown or other
taagagtttgagagagagagagagagnnnnnnnnnnagagagagagagaaaagattgagaggtgcagagaaaagagagagattgtatttggcttttgtaagaagaatcttctgtagatgaaaaagattcttagtgtaaagtgtgagagttgaaacactttgtgaggactcaacaaagaatctcgtctcgactgtattgtacttattcttgctcaatcaataaattaaagaaggattacggtggtgttccagaactggagtagtagccatagatcacatcgatctatcgaacttgaaccagtatatttttttgtgttaatttctttattttctgcatttattgtttctgattgttatttactctgttttcccatgtttacatctaattgttgttcttggtttgataatcttgtcattgctaattgtttgattgtttaaaattttattcatttgattttgcacatttaatcataattttttcataaatactatactaaatttcaatttacactaaaacattatatatttttatgcctaaaaaaattaatactacataactttatatgaaaatattacataaaatataatttaatttaatattatacaatacaatacgatcgtaatacgacataacaaatgaactctttcctgactttttattgtaataccaaatgagtgaaaatggcattgtcccaaattctaaatttctaaatgtactagttgggtctaacgtgcttcgcacgtgagcccatagttcaaatattttttcaataaatttgtaatatgttgattatttttaccatcttcaatgggagctgtaaaaattgatttatatttgttacaaataatagttttgtgatatttttgcatcaatttttactattatgctctaatgtattattataaattttaatgcaaaatttagtttatcattagatgttcatctaacaatttattaaaaatataaaatgatatgcaaacatgttaattaaacttttataataaaatattaaaaatagcataatagtaattataa

SEQ ID NO: 127957 - DNA, 519 bp, Cannabis sativa
taatttttgagactaatacttttatttttaataatttataattagtcataatttttttaattttagttacacattttattatgacttaaataattgtttttttttcagtgagtgtagtatataaaattttataagatatatgtgctgttataaagtgtacatatatagttgtttaaaactctcccatgagttcatattctttaaaactcccttttcaaaataaacaagttatacatactatatatataataataataataatctctgtttatacatatctctctcatgcttcttcaacctatatgtaggtggagagagtagtgcagttccaatagtactctagaaataagtgataacaaagatttttgaacttttgtttgtaataataatagattaaagagaaggaaaaaactaaatagatggaagggtatgatgagtacaagccagcaatggctatgtttgcattacaattttcttatgcaggagttgctctgtccacaagagctgctttactacaag

SEQ ID NO: 127958 - DNA, 601 bp, Cannabis sativa
  modified_base (537)..(543): a, c, t, g, unknown or other
atttgatataatggaaactagaaagtaacattcatcaatgaaattaaaaatccatgtctcgagttttaaaataacccttaactaaaaaaaactacccgaaactagacattataatcaaaaattataataaatagtaagaatttaaggagaaaaaaagaactatgatcaagaacactcgaagtcgcaatcttcgtcttttccttgtttctctctgagtttcgctctcaattttgtagcttagaaattctaaaatccgtagcctaaaaagtcctatttataatgcttgaaaatatctcactaaaaaaagatatctctctgtagaaaaagataaaatttttgaaattgcccagaaatcacctcctccctgcagccccaagtagcctcgccacagccatgacgtcctgctgaaaaatttcgatcacgctatttgtattttggctataacttctttaatataacttagaattgacgattcaagatgtaaagcccgcttagttaatttggaaattaggagttgtttatgtttaattatgaaannnnnnntagctatttaaataatttatcactgttatttatagaattcagagatgcatggttatgt

SEQ ID NO: 127959 - DNA, 1354 bp, Cannabis sativa
tcttgcttgacagttttgcttgattgctttaggattcttgacagttgacatgtcgtgtatggtgactttgtcttattattgacaaattgtatttcatgtgtccttagttttttagcacttttaaataattatataagttatattttaataaacaataaaataagaatattctaagaaaaataattgatttaacaatgttaattttagttgtttagaagtaaacaggacgtgtttcacgtacagttatttataaaaatttaaattacatatatgaatattaattaaacaataaaatcatactaaataatttcaaacatatttttatgtataattttttaaaaatatatttattgaaaaaaataataaacctatttacagaactagtctaaagaattctagaaaagaaactcatcatacaatttcttatataaaaaaagtacagaaagaaataccttgaaaacaattgttatcatagtagctcacttgtagtcactactatatttaaacctgatgttatcactgtatcattaaaatctttcttagtaagtttgttttatacataaaataaattaaataataatcggttaatactcacttttatacataagtctatcaaactgttataaattaattagctggattattagttatcatatacaatcatatagtttatttttcttaaaaaaattaattaattaataatgtgttatacaaaattaatggtctctagtagaataaaaaagaatataagaaagtgaaaattaaagagagagaattttaagtagaataaaaaaactaaaataaaaaaatttaaaaaataaataaatagaggtatttttagattgtcacaccttttcttcccctaactcctttatttttattttattaattaaaatgtaaaaatataaatatatttttttaaaaattataaataaaaaataattatattttttctaaaatgacaatttagtcaaaatttagtgttttgattacttttttctaattatttgtccctgaactttgacatatactaaatcatgcctcctgaatttttaaggtcgttaaaaatgccatttgaactattgagattgttggatttaaatatttttttttcaattttagtaaaaaagtttaacatggatgaaagttcagaagacataatttaatacatgttaaagttcgatggacatgatttggtatatatcaaactttgggagtataatttaatacataaacaatctttgaaatagtaaaattgagtgaagtttgacaaaagtctttaaatccaacaatttcaatagttcaggggtatttttaacgatcttaaaaattcaggggcatgatttgatacatg

SEQ ID NO: 127960 - DNA, 1220 bp, Cannabis sativa
aactcgtggattagggtacaaccaaatctttaatcttaacctttatttatttcttcttaaagctctagatcttgtttattattcatttttgaaaaactcgataaataatatctactataccaatgtcctggaaatagcataacacttgctagtgtaagtataacttatcgtagaatgacttgttactataaattgagtgcattaattaatcttaggactttaaataaatatttatcatataataagaactatggtctactgtgatttatgtcacgtgattatctctatgctcgggaattagtataatttaatatttaacatataatcatgatattagatatgtaagcaatgtgattgaccaagttaaaataagttttattttcgttgttgataattgaattaaggttttaattaggacataaaatcctacaccaaaaaactcggcctagacccctagcctggatcttgacttgacatagatttgggcccagcccaaattcgaacccaaaccccaaactttgactcagacctcgaactcagacctagagccaaacccaaaactttgacctagaccgtagaccctagaaccctaatccctaactttctttcttacacctcacttaaataaaaatgacaaaaacaaaaataaaatttacgaaacacgtttttattttttgtttttgaaataacaaactaaaaaaagttatgcaacacatttttttgtcttttaaaaataaaaaataaaattctacttttattttttgattttaaagttaaaagataaaaatgttacggaatgcactaaaaatttaaggatatttatttcataaatatttgtttttttatatattttttctttattttttattgttaaaatttttactatttttaataggtatctgtatttcataatttaaataaaaaaccatttgagggtaatacttaatagagtatgtcacattggttattagtcaaatttaaatagtcccacaaaataataatggaaatgactattatcgaaaatatattggaaatttaataaagtataacacttataaaaaaaatatgactttaatggtcaatttcttattttatttattttttgatttacattgttttatataaatagttaattgtagggttgtacaaaaatttttcgtaaaccgcccaatccgaataacccgctcaaaccaaagtgacaaaactgataaaaaatacaa

SEQ ID NO: 127961 - DNA, 1543 bp, Cannabis sativa
  modified_base (965)..(975): a, c, t, g, unknown or other
  modified_base (1055)..(1060): a, c, t, g, unknown or other
tatatatatatataaaataccacttaaattatttttttccttcttttatataaataaatagatttttatttaataattaaagtgagttgtatagttgtatagttatgttttcattaagatattttttctgttagaaatttattagggtcacaattatatatgaaatgtgtgttgcgtcatcaaataaataagtcaaatttatgtggtctattttggaataaagtttatgacttaagggcatgattttaatatatggataccaattagacaatttctaatttgatgaggggccaaattggaaataataaaaaaggattaatttactgtttattcagttattaataaacaggtatttgtccctattttttgcatcgcttcacatatcgtattcttgaatccccatcatcaaaaactcaagtttcagagagaaaactttgattcaaaaaattggaagatcataccattcaaaatcgattctatggacttcggtacgcttccgctattctttaaccttattgtttgattctcataaattaattaggactatatacagatttacagtattcctaacatgtggtatcagagcatccctaaattaattcttgaggatttatagtagtattgatctttcattaaattttatttgcttttagaatattcatttaagtattcaagccgaatatatatatgtatttgctttggttgtaattatcgattactgtgtatatatatgtgtgctattggaaaattttttgtttctctcatggttcaatcgttacttacagcatatgtatatgcataattctgtgtggaattaaatttgtgagagatatattcttttgagaatatatatttgttggtttatcaatttagataatgactaattataatttttgcccctgaactttgacatgtatcaaatcatgccccctgaacttttaaggtcgttaaaaatgccccctgannnnnnnnnnntgttggatttaaagacttttgtctaatttcattcaattttactacttcagtgattatttatatactaaatcatgctcccnnnnnnttgatatctaccaaatcatggcccatgaactttgacatgtattaaatcatggtccctggactttcatccatgttagacttttttactaaaattggaaaaaagtccttaaattcaacaatctaaatagttcagggagcattttcaacgatcttaaaagttcaggagcatgatttagtacatgtcaaagttcagagacaaaaatcttaattagccttagataattgattgcactctcggtacgaaaccaatttgctatagagatatagcattgattactctttgtgataccaatatcctttccattgattactgctttgttttatctttataaagcatattatatatagctgtgttgttaaaaatgcccctgaactcaacaaggaactttaggtaacaaccccgcgctttgcgcggttattaattttttttaaagataaacatatacatattacattattgttgttgttgtttgttattcaagaa

SEQ ID NO: 127962 - DNA, 1298 bp, Cannabis sativa
  modified_base (451)..(452): a, c, t, g, unknown or other
  modified_base (1268)..(1272): a, c, t, g, unknown or other
tcattgcctaattagacaatcgataatctcagaacttgtgatgccatgtggtacattatacttttttgacctcaagtccttgtccaggtatgttggctgaccttcttagagaacgatcgataatcctgggccctatgtcataacagtgataaaccaataagtgtttatcccaaaacactacttaacattcgcgtaagacaatctagggttttctaccaaatctcacggtataaatatactaaaataaaacttatattttggctctaaaacatacacattatcatagagctcattgcaagcttcgaaacggtttatagaacgtccaaaacggatacctgagtgaaaagttattacaaaaaatataatttctgatctcctatgaatttttaaaaactatgaaacacgaaaatctcaattttcgcactcaccaaaacactaccaaaacttatcnnaatcactccaaacttcacagggcagatatataccataaatactaccatctttttgtaacagaaattgaaattgatcccttaaacggaaaacgccatttacgctcacactaagctttaaaaagttccaaactccatttctaacccaaaatcacctcattttcaacaagaaaacattggaactagtaccatgactacccgaaaacaatcttataaggtcaaaaccttcataactattctaattcataaaacccctacatgaaaccaattgttttaaacttaaaacaaaattaaaccttaccttaagcttttttgctctgagaatttgctatcctgctactatcggaccttagatcgctaggtttcaggttgaaaatcaaagaaattggatataatgggagaagattttatcaaaggggggagaacgagagtttcgttcgtttactgtttactgatataatttataatatatatatataaacttgaacttaaactacaagatttttaaaagttaatattataataatataataatattaataaaaactttattattaataattatcttttcatttcttaactactaagaaacttctacttctagggcgctacatcaaatcccacatactcctaattaccgcaatacttatactatcaacttatcacaatattcctatcaattctattaattaaacttgttatgatattcttcaagacaaggtttgggttgcgttttaatatattcagggaaggttatcgcttattcctataggaaattgaaggaatatgagtagcgctatctgttgggttttatgcccnnnnnaaaactctatttcaatgtaatccaga

SEQ ID NO: 127963 - DNA, 610 bp, Cannabis sativa
cctcagactcgaattcggaccatgccccgaaccccgaacttcagactcggactaagactcggctccggtctcggacccgacctcaaaacccgattccagacccagacccggatatgggccggggtcgagtttaagtttctggtaaagataatataattttatacaaactattaatacaagccaataccaaatataatattatattaaataatactaatccaatccaataaaaattcaagacaatactagcccataatatataacagaatgcattcttgtatttatttattattatttttttaaaatacgtttaattttagcaataaatagtttaaataggaacaaattgtgtgtaaaaaatgtgtaatttaaatgtgttattattattattattattataattattattaatcatcacttatatgtatgtgaatacacatgcatgcagccattagttatcttcttttagcatcgtttgattgactattttttttttttttttcagttctacacatctaaatgttagaaaattaataatatacccaagatctatttgtatataacatagaacacaatagtaatatatataataattaggtatgtgtacctg

SEQ ID NO: 127964 - DNA, 1757 bp, Cannabis sativa
gtccatctcccatggactatcattaaagatcaattttggagcatcctgttgctccaggagttcctcttccattttgacttcatcttgctaagtcctcttaggcataatttctataaaagaataaaaccgaaccagttaactacccaaactacctaatttagaaagggagcaggggagtcctaccccataaactgtttggaggggtcaattattttggaaggaaagttaggaatagcgaagacaaggaatggagtaaaaatcaacaaattaccaaaaccagaaggattatgggtatggacatttttttagcacttctgttgcaaaatgactaatctcaagaattcataacattggaatctaaaaacaacatggtttatgatacctaaatctatcaacaatgatattcacagaaacaacatggtttatgatgcctaaatctatcaacaatgatattcacaaagtcaggaaaccctaatttcattcaaaatagaacatgcaaatgaaatgtgtagcgacaaattcaaaaaacacaatcaaatggtgaaaaattgaatcaatacacacctgatagtgaaaacaaagatgttaagctgatcgtcgttgggtttggttgagaaagttgatctcacctttcatgaagacgagatgcaagggtaatcaacgaattgatttttgtattggtagaatttggagttttattgcctcctttctgtggtccacccatcaaactttcaaatgtttgaagatgattgatcaattcagttagatcaaagttaaacttgttcatgaaatattttgaggtgaatggtagaaaatctaaagtcaaactatcgaggatcatactcacttgagtatcttgatcaacaatagctctatggagtttagcttcctgaaagtaattgaagaagatgatcacaaaaaagttgaggttgtttcatatgagtattggtaaaattcttggtatagcttcaaacataatttgacatgattgtttaccaaacagctcaaccaactatccataatttcagatgttgtttctatagattcaaacctagtccttagagtaccaaccatgttggttagcatataaattgtacctattgacaaatttgttagcaccccccatggaatttttggacactcttcattcaatacaaagaaagagttctccctaataagaacaatattaatgttctctttcatttcaagaaatttttctaaaagccttttcagtggaaagctggcaaagaatgggattagaaacaacgatattaatgtacaatcactggaccatcattgagtttcgcatatattaggaatattatacttatgtggcatgcatgcataatcattttgagaatatatgcttaatgagttttactttagtttgaatatcacaactaggaatgtagatagttgattaaataaaatatttttgcattacaattaggagaggcttccaaaataattataatttttcagttgataatttgcatggatggatgtattatatgagatgagaaaaaaaataaattaaatattattttagattatgcatttcgcaaaagttattgattgaatcctctatttaataaatgagaatttaaatcctatattttttaaaatgatataaaatagtactttaagttcaattttgtcaaattgaaacttaatataacttgactagaggtattataacttaatataatttaaatacaaaaaaataaattgctaaaagatccttatatagtaataaa

SEQ ID NO: 127965 - DNA, 540 bp, Cannabis sativa
gtatctacttggggtgtgactctgcgaagaggaagagccagattcagcatcattttcctcattccgcatatgggccctactgcgtgggttacgtcactctaaccctttctggttgcactttgcggtcgaggttttgtgcagtcagatccctcgaggtcggcttatttatgttgagcccttcctgactggttcttcgttccctacgagtacggttagttcatcatctagaattagttacctgaggattatctgagcgggcagttggcactcaaggaggacgtcgagtcctgtttcgtccatcaatttcagcctgtaaagcccgcatttgatcctgtatcgtcgtgtactgatcagtggttagttgaacaatgccttcaaataccacgacaagcgtgataggtagaaattgccccaccgtggccgttagtgtggacatttcaccaatgtggaggaacaaactgagaggtgttatgtttgttcgtcctattcctccattgatggtgtcgacgggaggtatccttgtaacaccctaactaactt

SEQ ID NO: 127966 - DNA, 1170 bp, Cannabis sativa
ccagccgtttttatcggcggcgtttgtatcggcggcttggaatctctagtcgctctacacctcagtggccatctcatccctaggctcgtcgaagttggtgctctctgatattaattataattaattaattcgtaattaattactacgaactttttttttttaaatataaatattatatgaaatatagttttgtaatttttatgggttattttattttattttgaaacaaaaatgaagaagaaaatataataaccctctttgctatgttttgttttgtataaaatttcaattgcttttgtttttcctctttgaattttggtcaaaatgatctatattatatgagatgggaaagtcaaacaatcgtgtggttagattgatttgtggtctgatcatctagtttagtttagtattgggcaatctggatcgtctaatgtatggactttattcccttgactattattgtagaaggttagtttagaagatatcgatctctctcttcttatgttttttttttacatttttgtttataaaaatatcatgctattagtaaattatttcactaattttcaattttttttaagaaaattaaatccctctcaaaattgtttatttatttatttaaagaaattaaaatttagaaataattccttaactaaaaataataattatattttacctatttgggttaagaagaaacgttccacaaaaaaatgggtcccactcacaattattgagaaatggtatgattcttgttaaataggttctaagctatttgatttctattttcatttttatttataattttttttatttgaaaatagaggatcacatgtggaaatccattccctcactttcgattctttttgataattttcgggtgacggtttataattggatagtgatattttttaaaattatttttttaatggaatatttactaataagtaatagaattaatggtaaggtaatcattcttttatatttatattattaaaattaataaaaaaagagaacttaattaaataagggagaaaaaaaaagggacagtttctctcactaattttgtaagcagggtaatggattttagttatttttattttattttttaatattaaatatataataatggaaaattctacaatgcactcccttaaaatggatacattgatg

SEQ ID NO: 127967 - DNA, 788 bp, Cannabis sativa
aagatagttagggtgttacataaccgttaggatatgtactatcttcactaagctcatcagtcactgctgctctattttagccttacatttacatacacatagaaacataactaacagttggtagacttagtaaacaaagtataaaaacatacaatatatatttaacctataattaagtccctatacacctaattgccataaatctactacccgcgtccaacgtgtataactaagtctctaacgttcttaactaagtacaatttactataatacacaaatgtactcactactctaattgtactagtagtggtagcattaattcgtactttttatatttcctaacatatcagtatcctagtgcaactctatgtacaccatactactatttcttatatgttaatgtaattggcaatatatactatttgatacccaataatatcactagatcggtatctaaatgtaactctatgtacatccatagtgctatctctagtacaccaggtaaacagtatcataaaatatgtatatctaaaacatgcgtatatgtgcatctgaatactaatcttaccttaaatttgaatttaggtgtgccagtgtgatagtcagtagtctcgtgatccgtaaggagaaataccaggtaagctatgtaatcccacatcgtctagggaaggtcaagtgtgatgattccgaggctatgtagctacacagttaaagagagcttaaatagattgattgatactacctatattaacaaggtgcatctggtttttcggtagcccatctcgaaa

SEQ ID NO: 127968 - DNA, 1813 bp, Cannabis sativa
aaaagtccatgtggagacgaactttgattacttatcattgtattacttgtttgtgattgtgtacacttgcgcaattataaatcaatataaattttcacaacagagatttctaccagagacatccgagcaacttcgtctggactatgtttaggcttcaaacagtgagtaagttttcaatcttctcctcttttaactatgcatttttaatttctgggtttccattgtacaaaatacatttgttcttgacttgttgtagaagattcatagaaaatctagtcttgaaactttgtagctttctctataatatttcatacggcatcttcatcttgactttaatctcgcattgttcgtttttcaccttgctcattcaaagattagtgaaattttaacttttaacccaaaaattcaaaattgattggttatgacttaatttttgtacgttttttatcctttcaatctgttgagtattcctggtcggcatattttcatgtttattgttcaatatcccagccaaacactcatctcgtgtgttgtcttttatagatgaaccctggtgagttttgggtagtaaaacactgaattgacaaggatttgctttcaacttctgtacgaggatcaacctcatcttcgtgccagtccgtcctcttcaagtgacggactttctaactcgagctttgaagattgggaagtgaatagtgatcgttctcctactccagaacccgtagagcaacaccactattactcagagcaaatcacaagagaagggtacgaccgcttcatttgggaattgaagaaaggttggaggctttatcttccatccaacttgacgtatattgtccggcaaggtgtagttgataccctttctgttcgccgtccaagttctggtaactttggtatcccaataactctccctgctgttacgattgcacgacacacacattaatatcaatccaggagaaggatgatagcccacacaaagaagactttgtggaaaatcaacgcatctgatcctcacatggctcagcttgccacgttgccaagtgccgagcaagatccgcctgcggtggaggaggaggatcatgagggggacagtgaggtccaggagatagaagagtaggatgacgtccgtcctgatagcccttacgaagcggaggaagaaggagtggccgaacctccaaattttggagggtataacgaggctggggagccagtgtccacggagggtgacgtcttggtcgagggggaggactatgtcaccgaggagcttactaaggcagttccccataagaggtaaagtgccttaggggccagatggttgagccctctatccaaaataagtgaggcacgtatgaggaccttggataaggatgggtacttgggcggactggagtgttacgtcccttcttcgaatcaccgaccaacaaacccacagaaagggtgtggtgcttggtcgggtgctcacactaagcaaggggcaatggtgcctttgcactcgtacttcaagagggttgcagattattttcacctttgtctgacccagttcactcccaagggcattaagtacttgtcttccccgttcgtcctctacgccattcaaggatggggtgtgccgtccccacacgcggtcaactggttttttgacttgaagtctacccctaagcaaagcaggtctaactacttctacttctctcagccggaattcaagtggttgacgggcaccgtgggtaaggatgttagcaagattgggggttttgttgacgagtattactttgtggaaggcatggataccacctatactcggtttcaatagatc

SEQ ID NO: 127969 - DNA, 608 bp, Cannabis sativa
cttgggatctccagtctatatgtcaggttgccactatgagtgattcatcaatttaagggcaatagtcccattcctttcgatgttttaaggacttaagagtataaaattaccaacaacaattttttttctttaaaatcttgcaaactttaatggttactctacttaaatttttgtcataaatggttgattctcatcgaaatgatttcctttcttcaattttaaatagaatatgagaaattcaaatggaaagaaccagggcaaggaaatactttgatgcctaattaagtgtggattgtgttcttattttgatagagtaacgatatgacatgaaaaagttaacgatcccctagtgaagagaagaaatgagttagctatttctacaatgaaaaataaagagagtggttagaagaacttattctttccaccctttgatcaaaataggtattctacttgtatgtaattgaaagactaagaatcaccctactcttaattgaatttaattgaattgatgaatggaaactaaaataaattatttatttcttgcactaattgaaattggaagtagaattttataaactaataatttttgagtgattctacaatgcacc

SEQ ID NO: 127970 - DNA, 733 bp, Cannabis sativa
tctgcattctctgtagctagattcaaaatcaagcattccaccgccatctccaacttctccgccaggcaatgcagccacaacggaaggacaggaggccttaagaacacgatcagtagctagaatagagcgggagagggtttgtcgggcggagatagcagagatcttcgagaagacaaagcgagaatcggaatcagaagggaagccagtctgaactggcttgaggtaaaggaatcgctttctaagtagcggttggtgagaagagaggagaaatgaggcggcgattccggcggagacgagggttttgccgagggaggtgttggaggaccagatgaagtaggtgggagaggagagaggaataggtaggttaaggttgggttcgacattggaggaagaggagtaaggtttggattgacgacggaggaggaagacgtggcggtggcggtggcggtggcggaggaaggaggtgagaagagggagcatggtctgagtaagaaatttgaaatggagcggggaaagagaaagaaaggggttttaggtttggagggaaaggaaggacgagcgagtcattgtgagttagctaggtccgagttaggtaggtgacacctcactaactaacccggctccacatttccatgtcatattttattttggaataataatataatgcaccatttttttgtaaaatatttacatttttacatttaaagaatatttttttacatttttacagttt

SEQ ID NO: 127971 - DNA, 2330 bp, Cannabis sativa
cctaatggggcgggtacgagggttgactttcggggacggggcgggtatgggtttaaagattcatacccgagtcagaaacgtgacgggagcacgggaatagatacccgccctgaacctgccccgatatgatatatgtaaatatttaagttttaaaatcataattactacaattaaaataacttcaagccttagcctttttattgtttatactcttttttttactatacatactattccacttaagtttattgttttactaagtttttatgattattttttttaattctctttgagacattattttttttttcaaaaatatatatgtaatgggtacccgatgggaatccttctcccgtcgggaatccccgctccgccctagctttaatttaaacgggtattggggcgggtatgggggtgaatttaaggagcgggtatgggggtgggggagcaatatccgcacccgccccgccccgtttacatccctagggaagcttgtaaacggctagtgagatatctgaaagacactctctttgaaggacttttgcttcgaccagtttctaggctatctcttgaaacttattcagatgttgatttggctagttgccttgataacagacgttcaacaggtggctatgctgtatattttttttttcataaaaaaaaagtaataagtagttgctcgatcatcaacaaagtcaaaattttaggctctggctaatatagcaacagaaatcaaatggcttctctcccttctggctgaactttaggtttcacttgcagacattcccattatatgggttgataaccaaggttctgctgctttagccgctaatccaattttccatgtcaaatgcaaacatattaagattgatctccactttgtgtatgatgaaattttgcagcataaaatctcagttcgatatgtactctgtgttgatcagattgcggatgttcttactgagcctctacctaaggataaatttcagtaccttaagaccaaactcaaagttgttaacatctcttttcttttgaggcggatgataaccaacaaataattaatttaggctctaattctattttctatttcttgtaactacttctgttataaaagaaatcttttatcttatacaagcttatatatatataaataacactttcttcctcataatgcttaagcttttcttaagcatttgttttgaggttctatttttaattctttcttctatagaattctacaaaagtttgttctataatttttatttttaattttatttaagttgagtttaggtccaagtctgggttcggggccatggtctgagtctggaactggggccgaagccggagttcgggtcccaatgtctaggttgggatcggagtttaaaacattgtttataaaaaaaaaaaattgtttaaaaaaattatgaaaataatttgtttttcaaaatttttataattttgattcctaattaaaaaattgaaaattgaaaatagttttataaaacatgtttttagataatatttttacttatttaattataaaaacagaaaactaataaataagtgttattacccctatttttttttttttttttggcttaagacaaccaattggcttgggatgtccctcaatggtttaaaacatttaagtttacattttatttgtcaattatgacaatgcttaacaaaacaaaaataattccagaattatttttaacaaactgaaaataaatttataagtactgcaataatagatagattatcatttggagaacaatcaaatcttaaataatcaattattattatacacatgtgatgagctttcacatatataacaagatagatagatagaaaataatgcaataatgtacagaagataaactgagatcagtaacaataatattgccaaataggaatatcaattattatttttctaagaaaaaaaaaaacaaattaatatgaatgatgctattttgtcttcttcttttttttttttccttaaacttcaaaatgtgttgtgaagtcatcatttaaataactagttgaactttttactgattttgtcctttaaaatatatagcttgttaaaaattctcattgaacttttacatttgcagaaatttagtccttcctgttaggttcaatttcattattttgtttaaatgatgatgcatctttataaattaataactttactccctaaattttaaaaattatcagattctaccttcttaaaataaaaatgagaaaggtttaatatttttttaagtaaattttaaaaaagtaatttagatcttaaaaaaaaatcgttttaaataattaagaaaattaaa

SEQ ID NO: 127972 - DNA, 1036 bp, Cannabis sativa
tatattatatgccgcgttacatagggagtcggtaaaattagacccaactgtaaatggatataggttttaattacgattaattgggtagcaatagcatcaactaataataaaattgtccattaattcatgatcagttttgatttctctggtagaaaaaaaataccgaaaagttttgtcagtatatatattatgtataggcaaggtgttcaatatcgagggtcatgtggagtggatatctggaaacaaacagattttcaaggatttagattttgttgttgctatggtgggggagacatatgattcttataaatatatatatagtctatacttttaggctttgtattttttgtccctctttttcaaatcaaaacttcgacattacgtactatactaattaattagctaggtgatcttatattatttctcaccccattgatgtaaaacagctaatcatcgccatctgtttaattaattaattagtggctgtcatagtacgtgattaatatatatatactaaaaaaactatgttgacgcctgtttagttttatattaagtgctatataatttaattataaataatataaaaaataattatatataatttaatttattattatgtaattaaatttttttaataaaaagtgattaaaacaataaaaagtaatataattattgtgtaaagttatttttatgtatattcaatacatgtaaataattaattcttggatgaagaatattccatcattctttataaacatgtatcttctaatacatataatatgttgtttgttcaagtgtagtagtgtcttaaatgttaagtctaaaaaaaacacatagtatttcataatttatgcatatacatacatatatatatataaatatatatttctatcaaaaataaatatatatatttaatcaaacgtattgtaagagatgcctaggttgatgttacttgcaatgcacgtataattagttttgtttttaattatatagggatgaattaggtaatgtcaagtgcaatacatgtatgtttaac

SEQ ID NO: 127973 - DNA, 1660 bp, Cannabis sativa
aattacagttagctttgaaggttaaaagaaattttttacccataacaagaacaatttgggaatctttttcttagcctttttgaaaaaaaaaataggaaaaggggaagatgaactagcactagttataactataggttgtaaatactgtatgtgaaattggtatatattaactatataacgtgacttttaaaaaaaataaaaaaggagaagaaaaaatgcttgtagagagtaattgtattgagagaaagaatgtacatagaaaatgaacaagaaaacaaaaagtggggagagagagagatagacaaaaattttgatgtaagtccaaatcgtaaaaatataattaatgaaaagttaaaaggtaatgatgaaaataatgaactgtacaaaagaaaaaaataccaagcacaaataaaaaatgtaaaatactttacactttagtcatgagttgtaaatttccctattaaaatttctctttcattacttgatattggatcaaaatctaataatttattatttttaaaattaatatttattgtcaaatttatttaataactatcaatgggtaagacccattgagaagtattccatatatacatatatattagtttcattctcactgctagagaaattaatgtcatgtcatgttgatgggtgtttattggatcatcatccaatatttttaggtctatctagatgtgatctaattatatatcggatgtaagaatttaccatccgatctgatccaattaatttcaatcatccaattgatccaacatctattggatgttggattagatcggttctatccattggatgtattgggtttatttaatattttagatctagtattttttagatcggatcggatccatttaatattttaggtctaggatgtattggattagattgaatccatctaatcaaagaaaaaagagtaaaattttaatgttaattttatatataaatatatgttttacgtataacaatataaaatttaattactcatcaaaactaaataaaaatactaattatatagttctattggatgttggatgtgttagatatttaaatactctatctaacatccgattcgatccaatgaattggatattcaaaaataacattcaatccaatccgatcacaattagatatctaatatttggcggtcgattataattgaatcaatcgattatcattggattggataatttatacacaaccctagttgttacaataaaacctaaaactatcaatatgtttaccaataatatatatatataggtgtagacgtagtagctagctagtcgtgtacaggtgcttaattaattacttgatgcatacttgtcaatggattaattgcaaaacaattggagtcagtttcccactaaataacaggccatatcatgcatgttttaatttgcaagagccgctgggagcatgtttggttgattaaaattgtaatggaatcaaagttactaatgttcggtttgtgtttctaacttttataataaaattttattgttatgggctttacgctcttacatctcataaatagattataataacaattaaataataaaaggaataattacataagacactattttttgtaaaatatttatatttttacgtttaaagaatgttttttttttttacattt

SEQ ID NO: 127974 - DNA, 808 bp, Cannabis sativa
gatcggatgaacagccctaattttgaggttttactgttatatatacacaggtgtatgcagtacagtggtcatccaattgatatttaacggtaacatttaactggcgtgtcaaattcgcaaagaaaaataaacataaaggtgttttttcaccaaaaataaaaataagggagttaagtgtataacaattaaaacataagagagtttcgctaccaaaaaataataaaagttttaagtgttaagtgtataaaataattaaaatataaagaaatttcgaggtaaattgctcttttttaagaacttgttgaaagatattaatgagtagcggttgttgttaagtgcgtgcttttattcttttcttttctttttgttagaaatggtttttaatattaactatgaaagtaaatattgtaagacttattattatattgcatttgcatcaaatgtccattagtaataccttttaagaccattttcaatcgtttgtatcattttgatgtattttttctatgaatatattattttagtgtaataactccaacattatttcataataaatatcacataaaataaaaaaaaataattaaaaaatctcatattttatattatttatattaataactaatttatgatataattatgtttattagcaacaaattaagtattgtgcaatttgtgtagtttctggatcttttacagtatgtattcaataagggtatttgcggtacgggtggtgcggtttttaactattttttcaaatcaacccgcacatgcgatttttataattttccaaaccgtacccgcaccgcga

SEQ ID NO: 127975 - DNA, 538 bp, Cannabis sativa
tgtgtcaagaaatggtatctcttcctcttcgaacattcagtccatgtatccactgagaatggaagccctttaggcatttctattggcatccttccttgctcttcctcttcctcttcactcagtttctctctctctttatgcatagggaaatttgaatatacatttttacttccaaataaaacttccaggggaagaatcaggagggaaaagaaaaacttcccctgcgatctattattattattattatttaatttaggaatgttcgtgttggttagtgtgggttataattttttttcaaaccaaactaatatgcggtttttgtaatttctcaaaccgccactacataacgaagattttaaaactacaaaaatcacattgcgaaaaatacaatgcagcttgagccattttaagtattattatcaaatattataatgaaaattcaaaaatcaatttaataaaattttaacaatacaataaagaatgtattattaaagtcttaacatcataatatatatatatactagcaaaaaaactacgt

SEQ ID NO: 127976 - DNA, 580 bp, Cannabis sativa
attttgtcacctaacttgccaaaaaaagactttacaatatttattacatatcatcgtgtaagaagtgtgtatataattttgacatcaatattactttttgatttggcatccattacctccttccaagtattttttcacatcaccaaacattctctctaggcacctccaagcattttgtcaattaattgcacacactatatatgatgtcttataataattattataaaatatcactaactaattacaaaatgtcacatctagatagttggtgccttatagtaatgttcaaaacatcattgttagtcactttattaagatgcccaataccatattatgaacgtggcacgttataagtgattaatatttttttttatattatatagtaaattaaaatatgtgatagggaatatcaaattgcaccaatagtatattatgtcacctcttgttcaagcgcccctttggtatttttattttctcatcatgttaatacagtgctattgttaatcttatattttaatcatttttcttttaattcatgtgtccaaaaatatatattagaggtactttttttttttttttt

SEQ ID NO: 127977 - DNA, 1218 bp, Cannabis sativa
ctcttagaaagtttatttatgtaaacaagtagtaattaacttttaatgatactctaatcaaattatctacataaaaaaatcataaacacattttgctcaaaaatacaaatattctaattccttcaaataaagtatataagtagccatagtaatactgtgaagcaagctacaaactcgttttgtattcaaccacaataacaaatccaggtaagactacccaaatggcattgccaagccaacactaaataacttgcaagagttacttggggaaaggtcactcatagaaaaaatgagtatgacagtcatctcacacattgggcagaatgtaaaagtaatagcgatatgatacctcttgtcatcagtattgatctcatgttaacaagttattatgggaggcttgtcgatcaaatgataaatttatgttttgatatggataagtgacacctaattattttacaattatcaaccttagcataaggaatgagaaaagaattataaagcttgcttactcgaaatttaccctttatctagtatccatgattgattcttatgtgaaaacatctttaaggttgaggagtttaccccaatactaactcacatcccctttcttatcaacaacccaaaaatctcgatttttaagtatatggtattgatccttttaacccaaagaacatcttgctctgtagaaataacccaaatatactgagcaatattcgaggtattattccacttggttccttcacgaaaacccaaactaccatacttcttaggcttccaaacaagatcccacaaggctagatgtaattacgaaaatataaaacaacgcaagtgcactatcacaagtagtactcacagaagtgaggtcgaacccacagaaatagaagtcaattactaactaaattagacatatgtttctatttggtcgaaaaaaaaaattagaaacagaataatataaattgatcgaaaattaaagaaggtgattaaagctacttaaccatgaatgtgaaattaaagatataaattcaattgcttcaattacctaattataatgctatttaactattcttctttttttaagtaatgacagtttacaatataacctaaactcttttcagatcatataatttgcaatgtattgagtaataatctaaagattacacaggctatataatactctcgtttcatatcaaaacatatgtttgttcaattaaagcattc

SEQ ID NO: 127978 - DNA, 518 bp, Cannabis sativa
gagagagagagagagagttaaattgggtgttattttttttagatgtgtaaaatgggtataagggaacaagttaagtgtagattggtataattttatttgggggtattttttttagaaatgctaaagggtactcatggtacctaacacccctataatgtttattaattttattttcataaagattaaaaagaatcactaactaagtataaaatatcatatcattgaggtactagatactttagtaccatgccctattttttttttgtttgttagtgtggtctctttaatgtacagtttataaaatttccctcacaaatataacttggtagttggtacacattttggctatataacactattattggctcattggctttctattttcctttattactttcggcacaaattctgtgctctttctcgacgtaatatggtcgagaacaggggtggacccacattgtagcgagggggggggcagtcgctcctcctgaaaaaaaaatcgagaaaaaaatgtatgt

SEQ ID NO: 127979 - DNA, 625 bp, Cannabis sativa
taacaatctcaatagtttaaagagaatttttaatagccaaaaaagttcaaaagacataatttagtacatgttaaagtttaagaaacaaaaatcttaataacctaatttatatgactattaattagagtttttgtgcggaattattactactaccaaatcctataaagttttaaataaaatgtgtcaccacttgtatattttacataaaaattaattttttattgttaatcaataataaaatttaatattgatttattttttttaaaaaaaaatgttaaaattatatagatatggcgctaatacaataataatatattagccccatcaacattcatagttacatgggatatggagagaataatctcattgggtttgagtggcgactatatcattggcaagcgtcatcacctgcaaaaatgagaaaaaatcaaaatagagatcactacaacaaaacaaccttagatgttgtttccatgacttttataagaagtgaagctaaagtagataaaactactctgctttttaaaaagaaatttttacatgaaaaatccattttacacaatttattacaaaattactcatacacgcttatacctacttttttacttacaaagtttgttttatt

SEQ ID NO: 127980 - DNA, 516 bp, Cannabis sativa
  modified_base (419)..(420): a, c, t, g, unknown or other
tatgtcagagtattttaagtacaacacatataaaagaggtataaattagaggtaaatttaattaattaataaataaataaggtattttttaatttatcgtaaaataaaatgattattttaattttaaagcattcgcacgaatttatttaaaaattcaagtttgagagagtttcttaaaaaaaaaatacaattagtggactactgttatcattagtattattttaggagaatttatttcctttttactgcctaattttttatagttaattgagattttgaaaactttgtttttgacaacttctttttgatagcttttttattaattaaaaataatgatgaaaagttgagaaaactttctctttcacatttattttatgtatttgtacttatattatgggtgtgtttggtaacactttttnnatcagttttttatttttaaaattaaaaaagtaaaaatattttctaaaatcatttctataaaactgttttcactttttaagttttatttgagaatca

SEQ ID NO: 127981 - DNA, 1316 bp, Cannabis sativa
agaaagattgaatgaacatacttgaagagaggagttggttgcgtagctagtttggccaacaccaccattcatgtggaggatttgctctactacttccattgtaatgttattattatagcttttgctatattattattattttcaaatgagaatacctttaatcttaattgggttaattatcatgtgtttatatttatagtggtagctttttttttttggttaatagtaataaattataatagtagttagaggataatacaatatttgttataacaatttctttctttcttttttttttttaaaaaaaaataaaaattgaaagaagagatattcccatagaaagctgtgaacaattgactcaaacacaatctagtaattaaattcagccaccattggaccaccatggtaaagttagaagagaatagaaggaagaagagagtattatgggtaataatataaagtgcatgtacctatttatttatttatttttttttttttaattttgataagcttgtgtttaaaaaatttaatatgcaccaaatatatacatataaattcaaaattccctaattgttatatcaattagttacaatttttacaatttatctatatatttatgtttaataaagaatatctgggtaagcaataaccaattatgttaatcgattaatgttattaatatttttttttataataaatatgctgtaaatgatatattttgttggattaatattttttttttcatatgatttatttatatgatcaatataatgttaatttattttttttcatatatgattaaaccaagaagaataaaaattaagacaaacagacgtacgtttcagaaaacatgcatttttaatattgtcatgatttattttttggtctttttactatcctaagatttcacgttgtccttcctcctaccttaaaatgtaactaaaattaaaaaaaaaaaattacaacgtactaaaaaagcaatataggcacatgtactcttcactaaaatttatggctaattaattaactggcattgtctagctagaaattaactaccctaacatatgtagctccattaatggtgatcaattgaagtgggccaaattcatattctagatatgtgataattaataataatagtgttcgtttgcgtatgccgtattacatcatattgtattgtatagtattatattaaattgtatttcatgcgatatttttatataaaactatacgtagtattgacttttatgggtacttaaatatataatattttttcattcaaaaaaaatatatataatattttagtgtaaattaaa

SEQ ID NO: 127982 - DNA, 591 bp, Cannabis sativa
aaaactcaaagcttgctcaaacaaaaaaccagccatcaaaacaagcttaaatcaacatatctaaacatatttgaacttcaaaaacatacttcaaacaacaacaacatcaatagcaactaaaatcacaattttatgcaaaatacaatttcttacaattcaagaaactaaggtggaggttactaagagcttacctatagcttgagaccactaaaaacttgctgaacttagcttgaattgcagggtacacaccaaatgtagctgcttctaggtgggttcaaaagagagagagttgagagagaagatgctttctttttaaataattttccaatttttaaaataaatgaataaaaggtttcgttttattaaaataagctcagcttattaaacttaaaattcagattaataaagtccaaccaagtacactaaatgacaaatccaaaatagggtaaaaagaccaaagtgcccttgcccacactaaacaatcataaatcacttaagggtatttttgtccactttaaaatccaaccattcccaacatttccaatgtctaactatgctaccctgctatactaaaatactaggatgtgattc

SEQ ID NO: 127983 - DNA, 510 bp, Cannabis sativa
tctatatctatatatctatataatcttgatgatgaaatgatatcctagagttttgtttcatatattttttttattttttccatttttcttatttatttagactttttattattacctcaagacaatagtttgtaaccaaaaaataattatgtattctctgtataattctactatgtttgtattaatatttttttattaattataaaaattatttgtattcttctattaataaacctatttatatctttgtatagttttttattattattattattattgttttatatagtgccaaatataagtgtccattcattggcttgatgttaagaattttgtgttatgtatatctatattaatttttggtattctattttcatattataaaatttttctaatgtgctctgttatttcaattttatatttgtaaagtactcatagtaatgtagtcaaaactaaaagtcatttaaaattatatacatcaatatatatactaggtgaatgttacgtgcc

SEQ ID NO: 127984 - DNA, 887 bp, Cannabis sativa
atgtacgacagccgtcagatgaggaagttatttgatctgacggctgagattgatctgggtaattagggttaaaaagtaaaaacgtaccctgacactcattaaatgtactcttagacccatctaatgtaccacggaatacatttcgtgaaagtacatcactagacaaaattatatctctacatttatattcaaaatatgtatttatggtaagtacatttatatttaattattaccatatatatttattataaaaaataaatgaaaaaaaaaagtttctaattatatataaaaatgtattaaaaaacagtaataaaatattttgcacatattttataattaattaaaataatgtatatatttatgtaaaataaaaatggtacaacaaaagtgcaagtatatatagctttccttggtcagtagtcacggaaggttttcaaaatcaaaatcaaaatcaaacttgcaatcctcttacacagaccttttagttgcacacctttacgtttcatttaaggaaacttttaatatttacatgcaaccaatatatatattatataaatttcaattttagggatctgactactgaccaatttaatataaattttagaatgaataagatttgtattttaatgttatactattactatgtttaatgttaataattactcatttttttttaaagaaagttgtaacttcattagatcacaaacaagatctcttataacattacatttctgaaatagtatcattgcatattctccctttatcaaccctacaatattcttagataaattatgtgccatatgttataaatattattaattatgtggatgtccaaattttttatttattaccattaattgtaattaacattactcttttcttagttt

SEQ ID NO: 127985 - DNA, 1136 bp, Cannabis sativa
tggtaaaataattccaacatcttatacccaaaattttactaccatttcattggaggacacgtgtcaaattaagtagaatatggatcaatgcgtgtaacggtgattacatttaatggaataactcaataaatgtgggcgttgacatagtatattttcaacttgcaaactatgaggtcttatgggagataaagatatacaaactgttacctcatgtattaatgagaaaccatatggcattagacgcacaaggcgagacatcaacctcgttacacctggatacacgtaagtgatgcataatagctgtgaaaacacttagcgtataatatacagtatacaaactaagtacaacggtcgagtgaacccaagaaactaatagcgaggtgcttatctcactataggaaggcacgctcctagtactttcaccaatcaacttcagatattttttagtgagatcggtagtcttgatgagtcagttctctcgagcagaagctgacattcagatgacgttaactgctgaagtactccttgtaataagaactgggatggtcaaaatgaaatgttgtaccttcaagcgaagaagcgacgaggcgtacattatcaacctcggagagataggggaaaagctccagctcgctatcaaggtcattggtattgggttcctgtcgagacataccagaacgttatgatttaaaatgtgtttaatacatgattatcttgacccaataaaagcggactaatcacagctaagtaatattcaaatattaaccgcatttatattacgtgatatgtaatcaaaccccacgatttcaggtgataattgttgtaaagattacagtcaactctgtaattaacttcctgactatgtaattataaatagaggcaagttagactaaaatatgtgatgaaaaattcacaagagaagaaaggcccaaaaacagtatcagaaagctaataagattgactcgtgaacaatgtagaattttaactgcaaagccacgtaaaaaaaccttcgtgttcattcttttttttctatttctctgctatttttatttttctgtgcaagtttatcactattcagactcaaatttggttaacaaaaatctgcgttaacagtttaatatatacaatttctgtta

SEQ ID NO: 127986 - DNA, 1556 bp, Cannabis sativa
tacacaatttattttttatatataatttaaaatattttatatatccgccacgaagcgcgggatgtttactagtatatatatacatattcattttgacatatttattattacatgtacacaattaatataaataaatatattaggtgtgcgttttgtaatactttcttaattaattttttatctttttaattaaaaaagtaaaagtattttctaaaaatatgtttcataaaattatttttacttttttaattttttacttaagaattaaacttttaaaaattttgaaaataaaaaaaaaatatattttcaaaattttttaaacatttttttttcttaattaatattttagactttgaccccaagttggactttggaacccatactccggcttgagccctagtctcggacctagatccaactaaaataaaattaaaaaaataaaaattatagaacaaagttttattttctgcacttaaaattaaaaaataaaagttattataaaacagatttttattttttaaaaaaaaaaattgaataacacaaattttacttttatttttgtggttaaaaaattaaaaactaaagtgttactaaatgtcccctagattaacagatttataatttttttaaactggattaacacatttaattaagactcatattatataatgcgtacaaattaaattacataaaattcacactattatcataatagacaaataattattttaagatttttttccaaatttaatctacagtatatataatatataagaagattaatatttaacattaataaaaataattaaaagaagaagaagagagaataatggatatcacaatgagggatcgatggctacagttagcagcaaacaaccatcatgtgagcaataatgaatttctaactgcttttaaaaatcaccatcatgtgttacacgacaatgatattccaaaaacaaaataaatatcatcaataatcaacatatatttatatatactatatattggttagtagttgaaagtataattagttgattagggtattaactattaaggatccgactttatatataaagatataaaaactagagaccgatactaatcctttaataaagatatactatatctatatatacaatacaactatatctatatatacaatacaaatgaaaaatgctaaaggataccagtggtgcctagcaccttcctatgtgtcagtatcgctattggtccaactaagtatcggattccatgtaatttaatataatatagtttttagagaatatcgctaaccaatcgcaacgtgacatgtcgaaaggtactaaacaccactggtgtcttatagcaatgctcaatacaaatacaagtaatattgcctagctattgctctcaaccaattaatacccaatatatagctagttagtgtgtaccgagtacctatgctaattaatttcatgcaatccccgtttatgtcaaattacaagtaatttgctcttaattttatatatatctttatatattaaaagggtctatctaacggcatttcttggtttaac

SEQ ID NO: 127987 - DNA, 1595 bp, Cannabis sativa
aaacagtgatcatatgtggatcgtttgaactcgatttgttgcatatacgtgtcatatcttttattccattatcttggggactttttcaaaccatataaggacctgttgagcttgcatactaattcaactcctttcccttccacttgaaacctaggtggttacttcatgtagatctcttcatctaagaatttgttccaaaaggtagttttaacatcaagttattcaacttcaaactccatttaagcttccaaagacaatactaatctcatcatcatgtattttaccacatgtgagaatattttaacatagttaattccttccacctgagtaaagcccttagccactaacctagctatgaaccgtacttgtaatgaccacttagttatttttgagaattagtaattaataagggtctaatttcactagtatacttttaattattatttttataattttggagatatatttgaattctaggtgtgccatttatgttatatatataaattttttgtttttttttttgtatttttatgaccggtaatagtggaacgtgacgtatgacctatagagtcactttagtacgatttattatttttagaatagcagggtgagctgattagacatttggaatgttgaaattagtcggggttatggttttaaccattttgccccaaagtcattttactatttaagcatgcaagtggggggatttttgtcatttttggttaaggcttaggtggccttttcttgtgttggcagctggaaaattttgagttaattaagttaagttttattatggatttacttagaacattaagttgggaaaatgataaatttagacaatcaaccacttccctttctctttcttctttcggccctaggagattcctcacactaatctctattattttcagaaaaattcaagaaattttgggagctaagatccaagataaaacctagaactcttttcctttacttttaatggtgaaagttaggtttaaacatgcatatttgtgttttagttgttgtttaggtttgatttgttttgctgctattttttgaggttgtttaagcttattgggttgtaattaggtgtttgtttgtggtgttgatcaagtttgagttcatgaactcaaacttggttcaataatggctattttagaattattgtgtttcctgagaatttattgcttattatgacatgtttaggtatttgggagcttatggtgtgttttagggttggttttaggtcgttttgggggccctttttttttctgttgtgaaaaacagcaggctgtttgaacagaaacgacctaccatttttactggtgcaggacctagaaaaatggcctgccgttttttaggcaggttcctcatttcattgtttttctcatgttttctcggtgcttaggactttttcttgctagatatcgataggaaaacttttatttttgaggttaaagtccccgaaaagtgatttagcgtatcacttattaattttgtgtatattatgacttaggggtctgcaaaccgtcgagcagcagttccactcaggttgatcggcacacctaaattcagaatcgaggtaagattag

SEQ ID NO: 127988 - DNA, 1329 bp, Cannabis sativa
  modified_base (1297)..(1304): a, c, t, g, unknown or other
tgaagatgccaaggctgatgccaaaggtagggttaatacgatgactaggcgatatatcatcgagcctggtttgccaaccctgggatggatttgagtgttttgggagacaaggctggagagatgctagcattttgtgagcaaaccaagaaggatgaggcaagaaatgccgaggaagaggtcgaagaagaagaagaaccaactaagtctccaaccatgtagacttagttatttttattttatttttcaaacaatggcctttaggcgagacaatggtttgccccttgttgcatttttcataaaaattttgctttgttagatgaccaacattgctaatttacatatttacttttatgccttttatcctgcctttttcgagttatttatgtttttattttgtgttttaattcacaattaaacatttttctttcttgatttggcttaggatattttttagggttatgcgcatctccatgtcattatcctattgtagacaagcaattaataatcagttatactttttacgaacagtttgtattctgctattatttaaagcaaacttcaaatattttgaatgttcttttaagaactactttaatactttttgattgcttatatgaatagttaatcctctattcatattctagcttgtgtattatctctcaagacacatttgtatcttgttcataatacatgctataattatgcgagtcgttatttactcaggtcacatatagcttcttgttactttatgagaaaggatctcacttacaactgctaatttaattttatcttaaagaaaaggttttttaattcttgactttatattgtccaaagacaattttaatcaatcatcgttttctttgtgatttttttaaattttaaagttttcagcatttttatttatatttctaggtagaatatagttattatacacatatatgcccccgaagtaattttaaagagaataaacctttataattactttaaaaaattaaacgtttattcaaaataatgacatatcattacaaagattaatacaacatttacataataaactacatgtaataaggtcgtaaatgctcgtagcgagccattaagccaagctactttataaaccctggttccaactacagctttaatgatgtacggggcttcccaattcaggttgaacactccaactgctacatctcgcgtgtttgctgttatatgcatttttgcaagcatgacatgtggaaattaatcaagaaaaagtcaagaaatttttaaggttgcctaagtattgggttttatgccctannnnnnnntccatttcaatgtaatccattttat

SEQ ID NO: 127989 - DNA, 1411 bp, Cannabis sativa
atttacaaagaattcttctgactcacaagggttgtaagccacgctcctgttagcagggtgaagttgtaggaagtcttcccatagcaagatggtcaccttgcttacttgttctttgagccgatctgatttttacacttagtttgttcattgcacgctaaggactttcacaattgatacgtatcgctttcaccggtacttcgctattcgcatttagcgacgtatggtttttcactaatatactaagagccaatttgtacattgattcctcgcctaatgccttacagtcaatgggttacaattatactctcatacttatgtaattaatgagttattccacaaaagcaatgtcatcgattcacattcccttcgtcctgacacatgtccttcattgaagcggcaaccgaattttgggcataacaattgctccttaaaaagttcttttttattaaagagagatttttaataattgaagagggcatttcccccaaaatcctttcttggaaaaaaaggcatcctttgattctcgcagttgtatgatttcaaggatcattatgaatcgtctcttcatattctgcccatcttccaaccgttagatttcccaatctttagctttcttgtcactgaactttgtgtataaaagggcagctcaagcttgtcatttttcacaacttctggctttttggtgaaatccattctcagaatggatcacctcttttctactagaatgtcctttctgagttcggaagttcatccttcccaaatcatcttgcccaaatgcaccaactaatttccacttgttctcaaagacttcaagcctcaattggagctggaaatgatggattccaaggctaaggagcttccgaccaatccaaatcagggaaccctgtagcctaccatgggcgatcctcacaaatgatccctaagagcagagatcttgtgagcgatcttgaaggtcctcctcaggctggtaaagaattccagatgaaggttggcatggttgcagatgaacctaggataaagttggcgcagtttctatcaaagaatcctgccaatctaggacccaaatctatgccagaagatctttacaccatcctctttctaatatggaggaatttcctgaggctgggaaagagatctcgaattcaggaaatgagatcctttgataatgaggagaatgagatctatgcatagatcaaggatctctatgtgtagctggtctttctcgagctcatcggcttcccctctcatccttggtttaggaagatgactaatggtttgcccctagtggcatttttgtaaagacaaagttgtaaccagttttaggtttttccttatcttaaatgccttgtactattttcatttgtacttaatacaattatgtttgcctgcatttttattcacaatgtaaaca

SEQ ID NO: 127990 - DNA, 970 bp, Cannabis sativa
  modified_base (50)..(57): a, c, t, g, unknown or other
aaattttaattaatcacgatttccataaatctcgttgattagcaacgagnnnnnnnntacgtttaaaaatcacgtaacacgccttgtctagttagggtattacaaaagggatgccatgttcgttcagttgtgcctggcgagttcagttgttttccccaagaatgtgttttgaaagacgagggctgtagcgccagtgaatccttaaaaataggggcttagagtgtggaacacattagggaaggagacgttctatcacttaagcaatattttaaggacttctgcaatcaccttggggttgttccctttcaatctgctctaaattcttacaggatcctcgcctatctgaagtctctataccacatcttaggattggagtgtgcaacacccctcgagattttatgttttactccatcaaagcctaccctgtaaggaagcatggttcaagagacttttattatttagaaaccaatgatcaaatgatcattgttaggctttcaaataaaaaagagtctaaagaagacttcttctagacaacaggattccatccaatcaatactaccagattcagaattttatgtaagtataattcattctcaaaatcttgattttgagtttttagatttttaatgattttatacttatgctaattccgttctttcttccacatttttagccactacaaagagaccaatcccaacacttgagatctaaaagaggcacgagatcccggtgaatcttccatatggactgcgagtaggtgacttcttgttacatgataaatatttgaaatcaggtggtcttctcggaaacgatcaatgcaccatggactataaggatcccaagtaacctacatggcaacaagttccagtgtctgaggatgaagaagaccgcgactacgttgcccacatccattgtaacaccctaactaccttaggcgtattacgttatttttaaacgtactgtgcagctc

SEQ ID NO: 127991 - DNA, 1494 bp, Cannabis sativa
ttttttttttttttgtctttgttatttggagaatcttcattagggggcgaaatttcttttttttttattattgttttagtttccttttatttatcttagttgtaagttggctatataaagccttgtaaacactttggaaaattagattattttttaataaaattttgagatgttttcttcttgagtttgagaactattcaaacatatcatggagtattccttgtggcgttcaaccgacttatcaagcgaacttccaccaccatttgtggcgtcttccttcataccaaggttcatgcttaactaagcattgggtcgcggttttacatccaaatttcgagaattcttagaggctgccatgtttggtgtcgggtttcatcacaattgttagtgtggtttgtatcgcttgagggaaaatgttatcctatacatgtcttgcattcttcaacttgggcaaatggtttcactcctagcagcccacaaggattgataagatggtcaaagttatacatacatagaaaaatgtccggacagagtcatcaagggacatccgaccagctcgatcatatgatcaacttgcatgcaccagccaggaaatgtgagttggcaattttagcagtgattgatgatatctacaatcttccatgacaagaagtaatctgtactttcgtgggattgattcgtactttcagagaataaaatcaattaggtcaaaacacctgtggacttttcccttgtgttaggttagaacgcaccattctagggtcgtcgctgtttactctacccctaggtattccaatagggtttgtcattgaagggtaccttataggagccgttccttctatttctagttaatttgaggttgggaaggacctacttcttcatttccaggtatatatggtatggcactagaatttacatcgaggcccgcggtggctatggcttgtttcatggcacctaagacttcctacatccttctgttcatctctttttgctttgctttcccagctcaacattgtgttttgtggcatgccatcgtaatgagacaggtttagcatacttatcctccttagagtccttagggtgaccatctcgttagtaatctcgatcgttggtgtcactttcctcttctccaactcgggaggttacttcttcttctagacactcttgaggattaggtggcagaggaggttgttggttgtttctggtcatcaccattgtgacaaaagaatttcaggtgaaagctttctacagtcaatgaaagcaccaaaatgttgaccacttttttgacaactatttaatcttgttttagcaaaaattaactatgcataaaaaggaatcttttaacgtgattcaggtgttaattaacaccttagtccactagtcacttgtattaatgtgtaacaccctaactagcataggcgtattacgtgattttataaacatactgtgcagctcgttgctaatcaacgagttttatggaaaacgtgattaatt

SEQ ID NO: 127992 - DNA, 1150 bp, Cannabis sativa
  modified_base (1112)..(1114): a, c, t, g, unknown or other
gattacattgaattggagttttatttagggcataaaatccaacagtaactccttaggaaatacatcaagaaaatccttaacaactctaactaccccaggcccaaatgtttcgggtctgccagagtctatcaccactgttaaaaatcctacagttccactatctagtacatccctagcccttacaacagaaataactaggatcgaagacccctaaacagatccaacatgttaaactatgcttattccagttctataaggtcaacactcaactccctatcctcgatcgtaactgatatatacgtaatgcgcctgttagagataaccaactccgcactagacattggagttctacaccctctttctagaatatcacaaggcctacccaaaagatcaattacccgtgtagctacatatgagcgtgtagctcctgaatcaaataaaacaatataagaggagttgttgacaaaaagttgacctctcaccatagaaggactggttgcagcatcagcttgggtgatggcaaacacccgagcaggtatgggttttgcctctgagttctgctcttctttctttgcttgagggaaatcttacttgaaattccctaccatgccgcattgaaagcatgtcttctggttgcactcttccagatggtgtttcctacaatgtgggcactcagggtaagagtaaccctggcgtccatatctgccttggttcacatgaaacctcttgctttgccccgaaccaccagatgccagggtaactttcctcttctgatcaatgttggaatcaccaccatccctaccataaacaggactaggaagggtgggatttccaccaacattcagagtcactcggggctcctgaaggaatttcaccccaccctcagcccgtagagctttttcaaccatctctgcatatgatgttgcttcattagtagtcatcaccagatcatgctaatcttcacattcacacctactaggtacttttgtttcttgttgaaatctgttatcacgatacccacgacgagtttggccaaacggtggaactgtgcggtatattcagtgactgacatcccctcagtttgcactaactcagtgaactctttccgcttnnnactgcagacggcttcattataatacttggagttgaa

SEQ ID NO: 127993 - DNA, 866 bp, Cannabis sativa
  modified_base (813)..(815): a, c, t, g, unknown or other
taacaatctcaatagttcggggagaatttttaacggccaaaaaagtttaaggggcacgatttagtacatgtcaaagttcaagggagaaattactaattagctaatttaatatattaatatttttatacaacattttacaatattttactaaatttctacatttaactaaacaaaataatgtaattaatgtataactagatattactatgtataactaaatacaggataagttatcctggttcgatgagcttctactgctgattgtggtttgcagtattgttaattatgtgtgactttgtttcaccacgtcaaaaaaaaaaaacaattataagttttcagacaataactaaagccgatcttaaggtatatggaacctaagaaattaaattttagatctcttatatttatagtttaactatatattattaaaatgatagttctagtaatttagtgtaatggtaaaaattcttaagagtttcaaagttcaatccttcaaaactactcattaaatattcttttaaaaaaattgaaaaataaaagttgagaattgatccttaatctcttagcttaaaataagacctttactactatactaagtaatttttgttatatttttttacttatttaatattttatctattattaataatatttttagcgttcgagggccgaagcgcacgcctagttcgcttactctgaaaaccggccctgacaataacattctctattttattattctaattaatcaaattatatcgtatcaaataccctttagagcatctccaatgataatattttggagaatgcttgatnnngtggaaagcttatgtgacaaaatatagagatgctataccattggagataaa

SEQ ID NO: 127994 - DNA, 1165 bp, Cannabis sativa
gtatattttatttaaagaaaaaatattatgggcgtaagactgagtggagcctaagtgcatgcttagtccaccttaacacgtgcacgattgttataggtggtgtcattttgaatggaaaccctcaaaatgttacgaatcgataatcaagacatgttaaggtataaaaatcaccatgtgatcacttttttacaaaataaataaataaataaataaaccatcatttttactacatatattcttttattttgatagacatacatattctttttttttattattgagtacaatcgataatattattcctaaccaaatggttggtgtaaataatctctccaataataataatataaaataaaatcaaagtacatattccatttctttctatattattatatttggcaaattaaattaaacctagctttaatttcccgattttcagtatttctgtttttttttaatattattatttaagaaactatgatggaaatgattctaaagatctcacatatttagtgattaaatattagttgtcttaatcaaatatttttatagatttcataatcaaattaagttcatgcactgatttgacagtatcaaatttaattatttatttcaatatattgtttgcttttttaaaaaaataaataaaagttcttcatagttaatatatggccattattattattagggtttaaagggtaattaatctcattttatgataacaaaaataaaataattgaaattttaaaaaataaaaatggtatatggccatgcaagcacacgtgaagaacacgatatagaatcatttcattgttggctctgagtaggccacgtcattaattgagttttactttattttattatctctattattgatttttaacttaaaaaatttgggaaatttaaaaaaaaaaatattatttttattttatttataattttacgaactaaaatttttatttataataatacacttttaaaatttaaaattacaaaaatatattttgctacgtaaaaaagaaaataactaaaaagtaactaaaaatcaaccttaggatcactataaataaactataaaataactaaaaaaataattttatgacaactataatacaactacaaataaattataaaataacttaaaaaaacagtttattattttgta

SEQ ID NO: 127995 - DNA, 609 bp, Cannabis sativa
ttaaaactctctgttgttggctttctctctaggattatagtggagatgttgtaacaggggtgatcagcctatgataatatcatagagagagggatatgggagcgtgtgtttcaacgcctcatggctatgtgttggagggagattaaggtcctctaagaagacaaacggtcatcggaggaggagaagagatatgaggggaagagtctcgtttcagttttctaaggcctcatccgacagagcaaataagtctatcgtacttgattcctcctccaccttcaccaacccaactttccaaggtacattttttttctttcggtttccttccattctaattatatatttcttagaaatgttggaggattaataatttaaatgaatttaatttttagattttggtgggttcaagtactggagttttctttttcggattttaattgtaagaaataagactcataataataattactattctaatagaatttgaactttttgaggtggttaatcatgaaatatgcattatgtacagttattcctaatggaaggaggttatgtaaaattgaaatttttgttacgataattggactgttattggttgtttgatcaaagcga

SEQ ID NO: 127996 - DNA, 2473 bp, Cannabis sativa
  modified_base (2439)..(2447): a, c, t, g, unknown or other
ttttttaataatggagtgtatttataattttatggggtgcaaatataactccccttaacaataattaataatattgtgtttaatcaattctcacctgagtatcatgttaatgcacatatgtaattaacttgaaaaaaatatgttttttaaaaatttaattttacataattttttttcaagcaattttacataatattttaatcattaattaagtgcatatttttttattttatttttaatgttaaattatacacgtaatattaatgtggtaactaattaagttattatatcattattttatttggcacgtgcagtgacagacccaaaatttttgatctgtgagggcttaattgttataaaaatatttatatttattttacattaaaattataattatttgtgggggctttttactattttgttgtataattatttaattgaatagaagattttttattttttttaaattaacttttttaattgggagctatagcccacacactaccattagtgtgttcgtgtctagccacatgtgataaaatttgatagaacgactaatttataatagtataaatagtttaagaactatttataacaggctaaaaaattcagtggtacaataatacatatatcataattcatggataaaaattctaaatagtcaaaaataaaatattgtgtattaatgtgtgttgtttctaatttgttaattttagaattgaactattatttgttctttcttggtgtttatggaaggtggccgagttagaaacttttggcatgtttataaataagtaatgagtattaattgtaaggtagtcatttatttatttatgattgtttacttactttattaaaattaggaatggagaattggatcaaataagggataaaaaaaaaatacttctcccactaatggaatgccttatggcgtgtttactaaactgtaacgataatcagaataaatagaaataaatcagtttaaaatagaaaataatattttattatgctatttactaaattgtagggaaaaaaaactagaatcatattattttgtttacgtaactagaaaaaataacgggaatgctttaatttgacaaaattatcatcattagaatatataattattttttgtttacagatttttaaaaggtatatttatctttttcatttcaattaataaaattaaaattaaaattaaataaattaagaaatagaaaggtattccctataaaaataaggagaacctttccttttattttttttccataatttgtatggatcctactacttcctccctttccaaaatttagtaaacatttgtatggaaatcaatatcataccattgattcacatattttattttattttttaatattaaatatataatgacaatttgttcttgaaaatatgtcttacaaaataactatcgtatactatagtttaagtcaaaatggaaatttagtcaatttaaacattctgattatgtttcatgataaagtaaacaagataagtcattattatttaattttcaaataattttaataaacaacatattacaaatattgattccgattattctttatttattttattacattttttattactttattccgattttgaatattgtgtagtaaacgtgccttagagttgaactttagagagacaaaaacaaaaattaaattaagggccaaggtataaattttaaaaataaataagaaaacatgcagggaaaaaagaatgattttttttttaatatttgtacgtggccaccatatatacaagagtggctctgttcttaaatctggttctatataataatataacattggtaagttagagacatggccagttttaggggtcgataggctcatgtttagggtcctcactttacgggagtcccaaaaataaaaattatttagtaaatatcattttgaactatgtgttttataaaaattactaattggatcataaactgattttttgttaaagtaaaacttaataataatccgatctagagatattatgacaaaattaactgaatttttcgtattaaaaattatcttcaagttggttatattaaaaaaaaagttatcaaaattgagtttaaggtcttattttgaaaaatatagagtctattttatcatttaacaaaataaagggtctaatcggtaactatcgtaaaatacagagtccaaaatagtatttatttaaaattatttttaaatagtaaatatatttttatccttttataaattaaaatattatatcagcgtaacgacgtatgttatgcacaagaccttgcttttcgtgttctattcttagttagtggtggctttttttcttaaaataaaattattcaatccgagaaaataaatatagtaaaacgagaatcagatttgggacctctattaatatttatatctttatatattnnnnnnnnntatctaacggcatttcttggtttaac

SEQ ID NO: 127997 - DNA, 729 bp, Cannabis sativa
aggtttgaagtttttgggaacatatggagaggaaaaatggttggtatattccagcgttacaagttttgaacgataaatttctgaatctcgatgggacatctttgcaggagagtgacaatctaaatcctggataaaactcaccaaaagccatgagtttatggaatatggctagactgagccaccattttatacttagttactagtaacggtaaggtcaaaggttgagaaatctaacggttgcgtatgaggtagaagatgaaaaggtgattcatgaatactaataatgaccctcgaaactatggagtcgttaaaattgagggcatgcgtggtcttgaagaaaggggttgtgatgaatataccctctgtaagaatttaaaaagtactttttattaaaaagaacttttgaaggggcgattgttatacctgaaatttggctactatttcattggaggacacgtgtcgaattaaggagaatatggatcaatgcgtgtaacggtaattatgattaatggaataactcattaaatgcggaggtgacagagtatattttcaacttgtagactataaagtcttatgcgagtaaagatatacaaactgttgcctcgtgtattaacgagaaaccatacggtattggatgcgtgaggcgagacctcaacctcgttacgtatgagtagacgtaagcgagatataatgactgtgaaaacacttagcgtataatatacaatatac

SEQ ID NO: 127998 - DNA, 2556 bp, Cannabis sativa
aatattatgcgtgcgtataccatacatacacatattcatatctatcataaataatcatcactatgctacttttcccagcatgctttataataggctaggtaggcaatctaatagcaaataatataaacacttactataccatgagtcgacctattttcccagcaaatgtacatattcgactagtcttcaagacctttaaaatgatggctgctctgataccaagttgaaatgccattcctatagggataccacgtgcatggttttataaactagtttagtactaataaaataattaattattaaaatctgtgataatattaaaaacttcactaaaataaagcactaaaaacaaacattataacgacactaaaactgtgtttcggggatccctattgtaaaagttttacaaaaaggataaagacggcaacaagccaaaatactaaatcaaaattcatcacagatacaacccaaaaacaactcctgacaactcaacacacaggccagtagggtcaatatgtacattgctgaagaagactgtcacctcatggttgatctagctttcctttgcctttacctgcaccacatagcacctgtgagtcacaaggactctacaagaaaagtaataacaacaattatataatttattattcgaatattattatttatacttatacaatcaaaatcaaacgatcacgcattactcataagatgaatcccaaatcaatactagcatctgtcacaaataaacatcagtataaagatatttggtaatacaaaactattataccaagaatagaaatcatatgcatttaataatataaattatatatatgttacctcataaagtaaccatcttcattacatcacatagcctaatcaggcaagtcgatactttaatctgataatcatgtattgcattgcctaatcaggcaagcctgcaccatagcccggcacccatatatcgcataatctcatcaccaaatcaggtgagctcgtgccataatttaacatcatacataatatcattgcatcacctaatcaggtgagcccgtgctacaacctggtactaatatgttgcatcacctaatcaggggagcccgtaccgtagcctcgtactcaaatgtcactaccgcctgtacctaataaggtacactgccaggaagaaacccaacaacagtttcagtctatgccataacttggaattcacatatcactagtcctcgtacctaataaggtattgccgaaagtatatcacatcacctgatcaagtgagcccatatatcacactcatggtatcttcacattattattgcctaatcaggcaatcttttcattacataacaataataaccatatcttaatcccaatatcaattaattctcaacaatattaattgtattgcaatataacatgttatgcagtacaatatacttttcttacctttgatccgaattcaagcatgtcgcccaacccaagtggagaaacatccccgatgatttttgccctatgtcacaataacaataaaacaataagtgtatatcccaaaacactgcttaacacttgcgtaagacgatctaggattttctaccaaaccccacagtacaaatacagtaaaataaaacttatactttggctctaaagcatacaccacattatagagctcatcacaagctttgaaatagtatatacaatgtccaaaacgaacaccgagtgaaaatttatgacaaaaatatgatttctaatctcccaagaattttcagaaacggtctggcccaaaaatcccaaattttgtactcaccgaaacaccctcgaaacctatccaaatcatttcaaacttcacaggacacatatataccatatatactacagtcccaatgtaaccgaaattaaaagttaacccttaaactgaaaacgccattaaagctcaaacttaagctttaaaaagttccaaactcgatttttaactcaaaattacctcaaattcaacaagtaaacatcaaaactagtcccacagctacccaagaacaattctataaagtcagaatctccataactactctaaatcataaagttattatataaaactaaacgttttcaacttaaaacaaaagcaaccattaccttaagattttcctcttcgatgatttactatcccgccactaccggagcttgaattacaaggttttagattgaaaattgagaaaataaattaatggagaagagggttttgttgcaccaaaggagagggtttcgtcattcttcattcttcaatttatgttttaaacatataatatacatataaactgataagaatacgttttattaataataatattattaattatataatataatattaataaaaactttattattaatatttaccttattatttcttagccactaagaaaattctaatattgaggtgtttgatcaactctgagtaccccaaaatacctcggtatctctaaaattaacttaatctcaataatcccatcaatatttctaactaaaactgttgtgacatttttgacctccaatcgagtctccagggtc

SEQ ID NO: 127999 - DNA, 875 bp, Cannabis sativa
ttaaactattatatatatatattgtacttttaattttttattgtataaaaaaaaatattttttattgtataaaaaaaatataacatcaatgttattctgtaacatcaatgcaaattttaaaaatagcattcttttatctatatagctgcaaaaataaatatagaaatttgacgagtatcaagatttattgactgattttggaaaagctgtaattaccttctttgttataaagaaaagcctgtttaccaatttctattgtagagtcatattgtaaaaaaattagtcaataggattttgtttagagcctttgattgtgagttagtgtaggaatagttatttatatatatttcaccctctaatatttctgcactgattgtaattaacttaaatggaagagttattaataattaaaaaaaaagatgcaacatgaaccgtctgatgtcatcaactactacaaatctctttgaccagtcaactttggcttcccattttttattattattgaggccagctagaacaaacaaatcaatatttaatattacaataaaggtattattgattattaaaaatagtaaaaaaccaacaaatgaaatataaaaacagaaaaagactacgtgagttattgtctatatttaagaaattaattaattaaatatctcacatatattaatttttttttttcattttaatctttctcatttctaacctactcaacttgcttttatatatcaaaaaagaaaaataaatacaaaaaacagaagatttttaccaagattgaaaaagactgaaaagtctagattacagggatgagcttacaacagcagaaatagaactagtcaactctacgacctttttctttcgaggtatacacataa

SEQ ID NO: 128000 - DNA, 1142 bp, Cannabis sativa
atgttgtactctttgtttaattatttattttaattttttattatttatatgttattttttgctgttattttaatgttatttagattttattttcctgtgttatgttaatgtaatttttttgtacttttcgtgttatttttatagaataccgtaaaaatacaaaatataaaaatttaacaaaaagatagtactttgtgtaattatttttttatacttttgtgagaaaataattaaaaatatgaaaaaagataaaaaatttatataacataaatttttatatatttgtaattataattaaatagattgtaacattatcattataatagaatcttaacaattcacaacagtttaaaatttataatttaccaaatactctgcttaatttttttgcgcaattttgctgcaactatttttccttagagcacaactataattattttttccacaacacaaccaaactgaccctatctttctcgctacaatttgagttttttcttttttttccaacaaaagtatatcttcgacatattttttttaaaaaaaaaaaaatacttaaaatatggtaaagatattttacattacatatatgtaagaaattataaattaatattttgttatgaggacgtacattatagttatactaagaattttatttattttttaataattctaaataatttatgatatcaaaaataagattcaaatattcagttaacttgtgtcttatattttaccttcgtgcaacaaatcctatttttaaattccattttcaaaattgtaaagtattctttgtgttaatttcatttttggcatctttaatgtgacaaaagtattttataatttattattgatttcggttgtggtgttaatattagtttccatattttgtgtatttaacttttatattaataaatttatttttggaaggaaagttgtttagctttcctatttataaaaaataaggtaaaagggtaagtttggctactcaattattttctatctatccagctttgatattctgatcatgtgtgagtttcctattctgtttgatcagatttcttgaggagaaaattggagcaaaactttccttttctataaaagaaaagtcacacttactgctcatgattttgtaggtacagaaa

SEQ ID NO: 128001 - DNA, 3195 bp, Cannabis sativa
  modified_base (30)..(71): a, c, t, g, unknown or other
  modified_base (2740)..(2753): a, c, t, g, unknown or other
atgctacataaaatgttatttctgatcttnnnnnnnnnnnnnnnnnnnnnnnnnnnnnnnnnnnnnnnnnnagggcacaaaacccaacactaaattctccaagatttttcaacttaaacctgtcattaagtttgatcttcaaagcttcaaggtctttgatgttattgctagctaaaataacatcatccacataaacaagtaacaaaatcaagcttgatccattctgcctgatgattaaagaatgatccgaggcagaatgtttgaatccttcttcaagaagggttgatgaaaatttctcgaaccatcactactacaaaaaccaccttgagcatattgtttggctcttagctcctcccttcaacttagcctcacaatttagttgaataagctccttctcctacttagaatattcctgagcatactgcttggctcctgtatcacccttcaacttagcctcacactttagttgaatgagttcctcttcttggtcggctccctcagcccggccagcagtggactttttcttcctccctttcactggctgaggtataaaatctactggataaagcctgtactccacaaagttggcctccgagggcaacagagtaatattccgagcagcaatgggtagttagacaattctctgagctctttccctaagagccagtgtaaggggtggatggtaatatattgggatctgttgaaatcgagtataagtggtgtccttgccttccacgaaataatactcatcaacaaaacccccgagcttgccaatgaccttgtccacaatgcctgtcaaccacttgaaatcttgctgagagtagtagaagtaccccgaccagctttgcttgggggtagacttcaggtcaaagaaccaactgacctcgtgtggagacggcacaccccatttctgaatggcgtagaggataaatagggcaaacaaatacttaattcccttgggagtaaactgggtcggacaaaggcgaaagtaatccgccaccttcttgaagtacgagtgcaagggaaacattgcccctttcatagtgtggggacccaaccaagcacacatccctttctgcgggttcgtggctcggtgatttggagaagggacgtaacactcaagcccacccagatatccagccttgtccaaggccctcatgcgtgcctcgctaatcttggatggaggactcaccaatctggcacctaaggcaccttgcctcctctgaggaactgctttagtgagctccttggtgacgtattctaccccttcaaccaagacttcaccctccgcagacactggctccccagcctcattataccctccaaagtttggaagtttggccacttcttccttcccgaccttggaagggtcgccaggacagatgtcgtcctgctcctcaatttcctggacctcaatgtccccctcgtgatctccctcctccatgacgggcagatcttgttcggcacttggtaatgtggcgagctaggccacatgaggatcagatgtgttgccctttcacatcgtctgctttgttcgggccatcatcctccttctagacggacactggtgtgactgtcgggcaactgcaacagcaagaatagcaattgggatgccaaagttacccgaacttggacgaccaataagaagagtgctagcaacttccgaccgaacaatatatgtccaattggacgggagataacacctccaacctttcttcaattcccaaatgaagtggtcgtacccctctctggcaatctgctcggaatagtaatggtgttgcactacgggttctggagtaggagaacgatcactactcatctcccaatcttcaaagcttgaattagaaagtccatcactcgaagaggttggactggcacgaagacaaggttgatcctcgtacagaagttgaagcaagtcctggttgatccggtgttcgcttccccaaaactcaccagggttcatctacaaaagataacacacaagatgagtgtttggctgggatatcgaacaataaacaggcaaatatgccaaccaggagtactcaatagataaaagggatgaaactgtacaaaaacaagtcaaaacccaaaagtttgaaatttttgggtttagggttaaatttcacgaagcttcaaatgagcaaggtgaaagacaaacaatgtgtgattaaaggcaaacgtcgtaaaccatgaagctgtacagactattacagagaaaatcacaaagttttgagcctacagtttccatctatcttctacaacaagtcgagaacgcatgtatgaaacttagattttaaacatgcaaagtaaaaagagaaagagattaaaaaaacttactcactgtttgatgcctaagttcagtccagacgaagctgctcggatgcctttggtgggaatctcacgacagacttgaagtaaaaatcttttttgctctaagtttgtttagtgaagaaatcaataaaagtaaagtttatttataggcaatgtggtgaaaaaggtaatcatttcaaaatgcctttagacgctttgattccctcccaaaagcaaatattgggaaatcaaatgtaatcaagtataactgtcaaaacgtgatgagaaaaattgagtttcgaggcactaattaagtcagagaaaactgaagagacacctcgttagcctcacatcgaatcacgaacagacgcgcctaacacgtgtcacccattcaaatgcaaaggcatagctcggatgaagtctacacgcnnnnnnnnnnnnnncgtacagacttggagggcaaatgttatcccaatttttgtactctgacatggcatcggacaatggtgacacgtgaaatcaacttcacatatctgttcgaaagggatatgctggacataataccacatatattcgcacggacgtagccttcttaaccgggcagtgggcagttcgaacagcacgccaacacttagcaatttcaacatttgtatcatgaatcacagaagcaatccctatgattttgggatcatatcacagagatatggcaagctatccaaatcccttgatcattgtattctgtatttaatgtgtaatcttgccaattatatctattgtaaatagaagcgaaacttttcccttaaagcttatagccctataaatagtgatctattctcactgggcaaagggtcgaaaaacttatctaagaatacatattcagagata

SEQ ID NO: 128002 - DNA, 877 bp, Cannabis sativa
ttgtaaatttatttatgtaaaattaataattttattttaaattattatacatgtatgaaattatatttactctaaaatattccctatttagttataatctcccaattagaatataatttacttggtccaagtgtattcttggatagaggttctactgtatatggtattttataataaatgtccgaatcgcaatctacgcaggaatccaaatcgcaacccaactcaattcgcaattcacattacaatccacacagcaatcaaaatcgcaactcaacttaatttacaatccacagcgcactccacgtagcaacccaaatcgtaacccaagttaaaaaaaacgtaagacaaaagtataacttaccgtagatagggtaatttccctgttattaacttattttatatttttaaaatattataaattcattgatttattatttctcatcaaataatggcggaacgtaagaccataaaagatataagagagtaaaagttaaaatattatatattagtactagttgttagaattttttcatcacttataaaatatacagtatcaagattaatttcatacataaaatattacatattattagaattagaagtgtagatctaaagcccttgatgattcaaagaggaaaaagaccatgaataggagaagcgtaccttaattcattgataaagataattaatttagtgatgtcagatcattgggtaatgatcttccaagaatacaaaacttaagattctctctagttttctctctttatgggggaagataagtgtttaccgagatttttagaaactaaatatttagaacttaagaaaacactacaacagatttcgttattaccgacggaagcatccgccggtaataagt

SEQ ID NO: 128003 - DNA, 1094 bp, Cannabis sativa
tcgttggaaatgatagataacgagttttgtaagagtttacaactcattaaccgacatactcatgagtatgttgaaagactaagggaaataagcaaaatgtgacttatctcaggattcctaaaagactagtccaagagttattataaaaggcaatagcaaggacaaacatcctgactagctagtgtctcgcagaatgcaaccagtcattttcaaacatctttgaagaatgcgagctatattttgaatatattatcttggcaacggaaactactcttggataaggacaaaaggcgattatcaacagttatttcatttatccacatgttgtaaatataaaatatggggattgtccacgtttcatgaacgattacctaaaaaagatcaaaagagaataattatcattcctaaaaccctattaattagggatagaacatatgggaaaaaggatcactcgtttttggaaggaaaacccttgtgagattgagtaaagatctagagaaattcttttgtaatcaagagacattgtaataaagaaatactcataaataatactaactcgtgaagtatgtaaattttaactacaaaatcacgtaaaagttcttggtgttttatctatatttatttattataaatagttagtttttatttataaggcttcatttttgttaacaaaaatatgtgttaactgtttggtactttcattgagagcctttgtaaaaaaaaaaaactcgaaccacatctccctctgtttaaccaaaccattttgtcatggagaatactcaacatgatgaaccagtcatggaagaagaaatagtacgttgatcgagaaaagagccccatggagcataaactcaaactagaccaaactaaggaagaggtcctactgagagaaacttcaagagaagtaaccttaaggaagaagttccagtgataagagagtcagatgcctatgaccccatgagatacgtccctattgtggagtaagaaaaccgacaactctgtcagagctataagtgctaaaaaatgttggaaaatttcttattacaagagagaatagggggattacaatcaaaatacaaataaaagtatttcat

SEQ ID NO: 128004 - DNA, 1406 bp, Cannabis sativa
ttttaatattatcacgatttttaataattaattaatctattagtattaaactagtttataaaatcacacacgtggcgtctctatagattagggcgttatagagctagaccgttgcagtagagaagttagtgacctaatgaggcggtccaatcaaagaactactagaaaaggccaggatctcattagagatccactccaagggagattagtcaatagattggggagggtctactgatatactttccaattaggttctttaagaaccaaggcagaccttcccctacccaaaggaggacaagccgtgccacgaaggcttgatggaaagaacagccagatcccagcaaccggcagtctggggggcgggcagggatcttaggctcaacaactcccccattggccaaccgttggttgaccagccccttggtgccccttggcagtgcacctatggccagctagggaggtgaactcccttcctgaggcatctgagagcgagcaagctggagtccaatcttcaactggctaggcttgggagcgggtgggagcactcaagataattaatttcaaagtgagttgacatctaaatccacttaactccaacaactagtgcgatctaccccctatcaagacactgactgtactaaccaactgggggatcacgggcggccaggccctagccagcatagggttgcccggccatgaacaactacccaacaaaggcttggccgaccaggaccaatctccctacctgggaatggccggccaaggctagcaatcaagcttagggatggctggcctccaccatacactctcctagagtatggccagccagaccttggcacattcaggtctacagcttgtccaaggaggaccagtcaaccaagtccctatagcaacaaatccttctatgcaagcacggttggaccaaataagggatatgatcaagggcctagcaggtccaaaaccttcagatctagaacttgataggtcaaggggatcaccattctcagcatacataaatgccttgcccttgcctaagtttaagaagctagtatggaagatgtataccgggcgagaattcttactagcacacatcaaatatttcaagatgcaacttaatttctaaaaatactggtgatgtgcgttgttgcatattctcggcaagtttatcggaagcagctcaacaatggtactttaagcaagccccaagaagattcaattcctggaatgagttttctcgagaattctacacatagttctcctcctcaaggcttattataatgccctaaataattaggcacgctacctaagtcacttaataagccctaatcccctaaacgggattcctaataaaaatggcgtggaatttaaactttaataacaataagaatgaaaataaacttgtaata

SEQ ID NO: 128005 - DNA, 509 bp, Cannabis sativa
  modified_base (27)..(40): a, c, t, g, unknown or other
  modified_base (426)..(430): a, c, t, g, unknown or other
acaacacaggcatactatataataatnnnnnnnnnnnnnncacgtaattaaattaatttcatcactttacctttctcgggtcatacactacaacaataaggggcatcactaatgcccatattactaacgcctaaatgtcgttagtaaaaatacaattatcaataacgacactgcaatgtcgttggtatatgtatataattttttttttcagaaacaccatcaataatgacatattggtttccaacgacattgtcgttgggaattttttgaaaaatatccgctaaaagaggtgccaattttccctccttatgcaacccccaacgacaatttcgttagtggttgtcgttggtacaccacacttatctgccccctgaaatcactttccccatttccaataaacccatctttcttttttttttttttttnnnnnaaatttcaatgttattataactggcaatcgtttacaataacagagaaaataggatttgggatttcacccatccaacaga

SEQ ID NO: 128006 - DNA, 1765 bp, Cannabis sativa
tcaactgatgatagcccgatcaaagatcaatcttagagaagactatcttcccttgaagttgatgaacaagttgtcgatcctaggtaaggaatacttattcttcatagtcaattgtttggttcccgataataaattcacatgcgtagggatctgtctttcttctcaacaaacaatactagagctcctcagagagacacactggatgagaaaaccctaagtcaagcatcccctgtagttgaatcttcaactctttaagttctgcaggagctattctataaggtgctttagaaaatggctccgctccaagtgctaagtcaatcacaaaatctattttcctgttgtggggtggtaataaacctggaagttcatcaagaaatacatccagaaattcttgaactactttgtattttcaggccaaacatattcaagttgggtggtatccaacaccactgctaaaaaccctagacaaccctcttgtaatagatctttagccttcattacctagatcactagaatttgggatctctgaactgatcccacaaacacaaatggttcctcgccctcggattggaagatcacaatctttcgcttacagtgaatattagcagcatacttggataattggcaggtatgatatcaaaatctgctaaacccaattccactaaatcaacactcaactctttaccctcaattctaattggcataaacctaacccaccttttagagataactaattccccaccaggtagtagggttccaaaactttatcatatttatcacatggcctacccaatttattaattattctggccaccacatatgaatgagtggcccagagtcaaacaaaatagggaaataagagttgttggacaagagctggcctgtaacgaccgacgggctagcttttgcatcagcctgagtaagagcaaatacccttgttggagcaggctttgctttcgtcctctgttcttctttcttttattgcgggcagtctctttcataatgtccagtcatacaacactagaaaaatccccaccctctacactcgcctagatgatgtttcttacagttgggacattctggataagtgtatcaggtttaagaaccacactgacaattgccgcaaccttggtgccctcggaacctcttattcttgttgaccaatagtcaatcactcacttattttgatgataaataaatatttgattatgttaccaatctttacttgatcattttgcaagcaagttcacaaagtatcaatacttgcttggtaatgtcaaacctagtcaaagaagtagattcaacaagtatatcaactacttcatacttcataagagcaaaagattcatcaagagatcaagaattcaagaccctatccaaaagaggacttcaacacctcaaagtcaaaattctacccaatagtcaaagttaaagtcaaagtcaactctcagagaaaagtcaactttgaatcaaaacatgcaaatcaagctaggaagctcatctaaatcaagactatacacaatcaagtagtataagtttactttagtcttgttaagtaatttgcatagtacactagggtttataagtttaaaagtttggctcactaacttgtacgacaagttatttcacaaaaatgatattaaaattttctaaattaattttgaaaatcacatatcatttaactaagataatgcaactggaatattttgaaattggataaacaagtaaaaagctatgcatgttttagttcaaaaaaatgaacctt

SEQ ID NO: 128007 - DNA, 882 bp, Cannabis sativa
tacgtgcctcgcacgtagcttttcactagtatatatatatgtgataaataattatttaaattttactttttatattataaaatatttaaatttttaaaaaaaaattacatgatcctaataactaaaacacaaattctcctgcagaccaaaataagttaggatctaccaaaacatcttttggaatatggtatactacaaatttgtctagaagatatattttttaaaaatttataaaaaaaatagatgtgtgtttattaaaagacaagtatacgtggccttttaataaaagctgtcacaactcaccaactcaactgaacaaattaaatattgtttcaggttctgcctttttgtgctccatttaggctttggttgtcttatttgctctgtttttattcaaacggttgcctttgtttgttattgttcttacttctttgtatatatctcatcaaacaataataccaaattcacaacaattaataattacaatatttcctttcaaaaaaataattacaatattttaatttttgactcaaaatataaaataaaaatatcatatataacatgtaccttacacttaccattagtgttgttttaaatatgtagttggagtttgacacaaaatcgatacaaattcagtagatacaaacatgatcaggtataaaaaattataggtttaagcacaacacgacatgagatgcacaaaaaacacgacatgtaagcatgaatagactaactcgaaaagtacgacacacgacaaattcgaaaagcacgacacaatacattaaaaaactttataatttattaataaaaataataaaatataaattgaaaaaccgtgtttttgcaaatgtcagttgtatataagaaaatataaaaactgta

SEQ ID NO: 128008 - DNA, 683 bp, Cannabis sativa
taataataataataatagtgaaagaatcaaatacatccaactctatcataactaagcaaattacaaccaccaaatgaaaattcaatggctaagaatatgccatcatatataggagcaaaaataatacccctaataccctatatattataacctggaaaatttatgcataggtgcaaatatatgggtggcgatgaaagttagtggaagtagtcaacattgaaaattgtttcgttgtttatagtatatcccctttgtacttatttgtctaactagtcagtactttgtaagaaagaaagaaaaaaactttatttaaagatgcttgcaaaaggagataccattaatgatgccacaatttcgtaaataattacaatatatttccaatttaactgttcatgaaaattgacaatgcatgcatacgtcccatcttcaaaaaaaaaaaaaaaaagatttgctttcgatcagtgcatccatggaatctttataatatatgtatctagctactgaattaatttaatttatgtaataattaataaattaaaatatttgaaattaaatatgatcagttcaaaactgggaaatatataggcctgtgtctattttaaacatgaactaactgtagcatccactactacaaaaacaccctttagaggcggtttttaagccctttaggcatcggttttcgc

SEQ ID NO: 128009 - DNA, 608 bp, Cannabis sativa
tgatttgagtgcttcttagtatagtttgaaattttgaagattggggactttgtgttcataaggaatgtagtacatattaaaatttagatatttgagtataattaattgaaatttagatatttgagcataagtcactgtaaagtgaagaactttattataagcatccattagtaaatattgaaatttagatctttgagtgtatataattgtaaagtgaagaacttgattataagcatcgattatcattctttccattgttttctctgcaatttggaactgttattttaagaacatttattgatgagtacgagttaaatgtgttcactgctgtttcaaacttatataaatcctccaattatacatgatgtgggatatttctgctgatctacactaagattttcaagtcagttgttgatagggatataaatgagaactgaaatttgtatggctgacagatttttgggttatttaagttgcaaactctttaaatttcttgctcttttggaacaccttgaactcctaagatggctaattttattctttattttggtgaaggcttcacctgacattggttgtcactgcaatagtatgctgttggatgatgtaag

SEQ ID NO: 128010 - DNA, 752 bp, Cannabis sativa
cactaaatagaaatggcgatgctaatcactatgatgccttatatatatttaagagaatttattttgatttactctaatttatatatattttttaaatgaattaatttgctttcacatagtctaattattatatcattaattaatcactatacaattaggttatcctattaaatgacatttataatgttttattgagtgtacgaattctaagtatattgacagttgtaatttgttagtttgattaattattagtgattaatatatagtgctgttatatcattatggtgattgttatgtatatatatattatatttgtttgtggctttaattttctcttaaaatatcagttatttcatttcttcttaatttctctacatacaagatcatatatctatatatatatagactatatataaaagatggccaatccagataaacaatatggtaattgctcttctctccaatcctaaaccaaacatatatatcatcttgtaagtcttatatatacaataatatatatacaataatattatatatattcccatatatataatgaataatatataataaattattataatggctagacaaacgccacctaattaggtgtccactgtcaattatgttctaaaatccatcttagcacaaaaatttaaacccatctttatatatatagcactgtcatattataggcaaccaatcaaatttaatagcttagattatatatatatgagattgtacaaattaaagta

SEQ ID NO: 128011 - DNA, 1877 bp, Cannabis sativa
  modified_base (1851)..(1852): a, c, t, g, unknown or other
taaatttttacaaaccgcccaacttaaataaatcataattcaaactaaactgattcaattgacaaaaaatacaatttgaataatctcaattaaaaactaaactcttcaataattactgggataagctaagaaatattcttttctatctattgatcaaaaatactcttatattatatttcatttaaaagtacccaattttatgagtagcttatccaatatacgtaccataacctttcacttaagttgaacacataatttatattagggatattatctataaaagtaggtatatcttaaagaatataaaaataaaggtaaaaaaaataaaacagtatatatagagaaaaaaaaattattcaatttcatttaatttagtttgaatatttttttgagcaaataaaatataggaaagtatatataaaatttttaaaataaaattatttcatatatataatatttattaatttataaataattactttttaaaaggtaaataataaattttatattattatgtattagataaaaaattaaaaaacttataaattgtatattaaatgaaaatgaaaaacttatagagtaagacattaataatttataaataactacttttcaagaggtaaataacaaattatataatatataaaaataaaaaacttataaattgtatattagatgaaaaataaaaaactttaaaagtaagacattaataataaaaaatttataggataagaaattaatcaaccacctataaaaaaaatatttttagataaattaatatggcataataagagtaatatttataacatatatggaaaatacttaaataatttataaacaaagtgggatatttaattttaatgtatttgaagaattgtatacatagttatttttcaaataaaatagaaaatctcaaaaaaatttaaaatagaatgaaaaaaattctaagatggcacatagatttattgtatgctttcttttatattatatacagattttaattttataaagtttttttgatatttaaaatttatagttatttatgttgattgtatttaattattgaggatgatcttaagaatttagaatagtagattaatattttatttttattttttaaagatgtgttgtttaataattaatattgcatgttctcatttttaagtttgtagcaataatttagacaataatatttttaaacttcaagtacacatataatattttattaatattaaatttaattattttggacactacaaactaataaaaaaaaagttatgacgatgtaggtggattaaccctccgaataaactgtcaaaattattggatgggttaaatttttctaattcttaattgggtaggttaattagatttttacaacctaaaatttatagtaggttgattaaaatgtgttataacccgaccaaaaagatcgatgttcacccttaatttattatattgagtttggataaatcatgagcattgttattagaccatcagtagtgttagatactattatgaggtgacgtcttaatatagttagcgataatttataaaaattattatattaaattacatgaaatctgattcttatttgaaccaattattatttaacaatttggatagattaggcattttagtatttcatataagagaagtgctaaaagacacatggtgtttagtctatgcacacgggatagggaattatcgaggagtgctccatccgtccccatcccgcctatctctcgcatattccctaatgggatgggacgagaaatatcctaatataaaaataaaaggtataataaaaatttaaatgtataaaaatattaaattatataaaaattaaannattacacattatttattatttaata

SEQ ID NO: 128012 - DNA, 1868 bp, Cannabis sativa
  modified_base (1144)..(1149): a, c, t, g, unknown or other
aaaaaactgttttgaagtgttaaaataaaaaagcccctatatattatacagtactaaaacatattatatataaatatgcataatctttaataataaatcaatttaatagtatcacatatatatatatatatatatcaaaagactcgtacagtagaagcctttaaattgtaagggacgaatcaatccaaggattgggctttaatactaggggttttttcaataatatatctgaaattgattttatctgcaaaaacactttcaacaaatttattttgcacaaatatcgatataccacatcagcataaataccaaaattcaaaattattaccgcaaatggaaaaaacttaaaaattcttgcttccagaaatttcagtgttttgcaagttttaatgaaaaaaataagtaatcttttggttgcttttgatgtaaataatatatcaattagttactttttattaaaaaaaatatattttaagataatttttctcatacacatttagttgcttgttttgatcaaataatggaaaaaacttaaaaattctcgcttccagaaatttcagtgttttgcaagttttaataaaaaaaaggtaatcttttggttgcttttgatgtaaataagatatcaattagttactttttattaaaaaaaatgtatattttaagataatttttctcatacatatttagttgcttattttgatcaaataactttaaaactatgatgtttttttttttttttaatttttaggctatattatatgttattttattatttaagatactttgaggttacctgtttttttttagcaattttaaaccatattttgagttgttagaaacacatattttttttcgatataaaaaaagatgaacaagataaaagcaacctttccttttcttttataaattattaacaaagacgtaactaaatattatatatatttgaataaaataagtataccatctaattatgggttactacaataaataatataataatttatatttaagagtttgttagtatctaaataaatttactttaaataagtaataccaacacatcctatctaccagagaagagatcatgtttaaaaatttagtttcttataagttattttagaaattagttgatatttaaaaattnnnnnntctagtaaagaaactaaaaggttacttctgattttaattatttttttcaacaacagtaataaaatatatgtttccatatgttaaaacgatctcttttgaaaagtagatcgtggtgatataatttttgagctcaaataattacaggtgtaaccaaaaaaattgtttaaactttttttttttaaaaaaaaaagaaacaaaaaaaaagaattatttttaatattaaagaaaattatgaacatagtgtaagaaaattatgaatatattacacaaatgtgaggtatatatatttttttatgcctacttcctcctctcacgtgactactcttttagtgaaatgaaaatagccaataaaataaggaaaatttcattttttgaccctaataaaataccccatatcaaaatttatacccctttattttttgtacaaattgattccactaattcaaaaagattcctaaaatacccctaaaataaacttttcactctctctctctgactttcccactctctcgctctctctcacttttccctctctctcgctctcttcacgaactcacaaacccacacgaaccaggcgacccaggcgaacccacacgaatcaggcgaaccaacaaacccaagccgacgaactcgccatcgacgacgaaaccaaaaaacccacaaaccaaacccacaaaccaggcttcaccgaaactgtttgtcgatctttgacccaaacc

SEQ ID NO: 128013 - DNA, 539 bp, Cannabis sativa
  modified_base (462)..(464): a, c, t, g, unknown or other
tccaagttttattggctataagtgtaacggtttctgtatccatagcttttacccatacgggaaatttagaagcttgagaataagaagttggtttagaaactaaataagcacttaaaatggcagcatgaaacttaggagaaaatttgtgataagagataaaatttgaaatgggatgtgaggtagaatactcacaaatgtagtcttagagatggggtggacgaacgatcgtccgactagatattgtggtgacgttggagtcatttgtaggggctagaatagccgctggtggtggcagtaattcagtaggaataatggcgggagtggctacatgttcgggtagcagtggagggtgtataggcctgaggaccataacttttaaaggagcctgtgaaagaccaataggtgaaccattagtgctagaaaaaagtgcatcaatattatcattagaacatgtatttttannnggaaaaatatgttcataaaaaatgacatctctagagtgaaatatttgatgtgtttcaagatcaagtagagtataa

SEQ ID NO: 128014 - DNA, 1506 bp, Cannabis sativa
ccgtgaagatgatgttgctaatgttataaactgacccccactaacggacgtttaggcaaacattgtgagggatggtgaagcatcagagatggccagtcgtccacctcgaaaaggccaacaactaaaaaaacctgttaattaaactctcctcgaagaggaaaatagggaaggccctgatgagaatgagaaggagagttatgacaaagattatgacaaaaatcacatgtaagagtactatgagaaagaccctgaggtggtgaggttaaggtaattagtagcataccaacaaagacaaatggcagagcagcaagaagctacatgtcaaatacaaggtaccctcttatagcttcaaaacatggtagcaaaggggaacctcaacgttaaaaacccacaagtgggaaagtttaaccatctcagggctagactaatccaacaaacgacaaggggaaggccaaaatggttgagccccaaggaggaattatccttcaaggccaatgaacaatgctccacggaataactaaaatatgatcgacccactcctgcaaaataataggaccatttgagccttaaggctacaccgcctagtcaatttgtagagcaaagttgactaaaacaaaaggccctatactcaagtattggagcgtgtcatttggggaaggaaaaatagcccagtaattatgttaactagagcgttgaaatagagttcgtagatcctaaagacaatatgtcaacaatagaccccagggaccagttgaatactaaaagggaaaaagtaagatgtgagaaggcaaactctcgtggtggagacctcaaaaataatataaatgactgaatctgtggttgtaaagacaacaccagaaggttgaggatcaaattgttgccttaaataaaatcacatatccactagttcgtaagcaaagtggcaatgtgtctgatttttacgatgaagaccctgaagccatgcatcaagaggattttagaagccttgctaccagaacactcttgcatgcccctgattagaactatacgaaggttggacaaaccctggaggtcatctattcggtataatagattgatgatagtggctcaagtcattgatgattgaaaatgtctatgtttccctcagggtatgtgccaatgcaaactactttctttgggttaagagcagcacaaactggatggagtgttgctcccaaaaggcacaagcaagtcaacaaaactgaagctttagttggaaataagtcagccatagagcaaaaaggagcaacaaaactcaaagctggagtgagcctccgaaaaaaggaaggtcgtggcatgaaccccagtacacagaatatactgacttgaaagatacctgtgataacatttatcaagcgacttgcaacatagttcacaattgaaagccacctccaatgtacaaaggaggtaaaaataagagagacccaaacaagaaatgtgagtatcatggtgacatcaagcataacatcaatgagtgtgattacttaa

SEQ ID NO: 128015 - DNA, 1659 bp, Cannabis sativa
ttaaatactattttaatctggatattacaatgggtgtccgattggagtacgtccaatgggggccccaaaattggtttttatttaatttgtgggatcgggcccgatgtttttcgatgggggtccgattggggtgtctgattatagttcgaaaaatagtgctggggattttgtaggcccgattggatgggtgttcaattggtgtccgatgggggtccaattggtgtccgattgtgcccaattattttcatatttattacatttttaagattttggataacttttctctgagatttttgttctaaattttaattgtatttttaaatgcatgtgacaggttcaactgtcaatgcattttttttttatgtataatggtgtttgggagcttgagggaagagattgggtttataaccgggccaaaaatttgatatttgacattgatccgaacgtaatctactcaagtttggttaatattttgtatgaagaactggatgttgacaaagtggactatgacttgaaattgaaagtaaattacaagtacatgaaaggcttaatgtattgtcctgaagttattggaaatgataagcgtgcaaggtactttttgtttacacttgcgaagaagccagatgaatttactcccttgtttgtgactttgttaaagaagaatgtttgtgtcgatcctagtcccacaccaaattctattaaggacaatcttagcgaggttgggaattttgtttcaaaaataaatccagaggtgttgttgtcgatgtattacctgaattaaacactataatgcgggtgttgatattgtagcacaaatccccttcattgatggtttttctgatggtccagaccctaaatgttatgttgagggcaatgatgacgtaagagacgaccaaggtacagaggtccctgctggtgtagctttgaacttaactccactatcgtaccaaataccacccaggccaccgacacggaaaagaatgccccgtagagaaaattgccaaacacgtggcactagtagtagtcgtccaagcgaaaacagtaatgctagaagaaccactgattgtacaggtcctaataatgctagagagaccaatgatgctagtggtcctagtgatgctcgagggaccaatgtgactggatttagtgatccattttcttcttcaataagttacgataaattcaaggagaaaatgtatacaagtgaagacatcgatgatcatagtcattatatatgtatgggtggcacaccaggcggggagtttcatgtaggaaagtttcttagagacaaagagcatttaaagatggttgttggcttgtatgcaatgaagaaagggtttgactactctgttaggaattctggtactgctatttggtatgtcacatgtaaggatacagattgtgggtgaagattaagagcgaagaagaacgtactttctaacatgttttgagtacatttcatcatgaacatacatgttcccttgatcttcgaggaaaagataaccatcaagcatcacctttgatagttgcccatctaattaaggataagtttgcaactgacggctcatatcgtttggcctctgatataaggaaaagtatgcacaaggattacaggatccaaataagttatgaaaaggcatggaggtgcagagagaaggc

SEQ ID NO: 128016 - DNA, 1262 bp, Cannabis sativa
agtcaaataatttaaactcttgcattgttcaatgcatttaaaaactatatactcttcttcatagttcacatgtatataatatcttaatatgaacacaaatgactttgtggggtcttagtcttaccaattggccaatattttctatatatattgacatatatacatatacaaataatagataaattcttatgaagctaataatggcaatgatttctttacaaagagtgatgagtttgatactaatcataacactttattataatacttttgttgttagttctgtactatcaactcaaacacttttggaaactgaatttgaagccttaaaagccttcaaaaactcaatcaaaagtgacccaattggagctttatcagattggaaagatgtgattcaccattgcaactggtctggcattgtctgtgatcccatttcgaatagtgttgtttcgatttctctagttgataaacagctcaaaggtcagttaacacccttcattggcaacctttcaagtcttcaggttcttgacttaactcaaaactcattcactggctttataccatctgagttaggactttgttctcaactttctcagctaattctttacacaaatgctttttcgggtcatatcccaacacagctaggaaacttggtaaatctgcagattgttgatttaggtgcaaattttcttagtgggaaaatccctgagagtatttgtaactgtatttctttgttagcttttggtgttagttccaataatctcacaggctcaatcccttcaaatataggaaagttaatcaatcttcagttgtttgtagctgattcgaatagtttagtaggctcgattcctcgttctataggcgaattaggagctttacaagctcttggtttgaacacaaacaagttatctggtgtgatcccattagagattggtaagttgtcaaatttagagtacttagagctttatgagaattctttctatggagaaataccacccgaaataggcctttgtaagaagcttatttttcttgaactaaacactaataacttaagtggatccattccttcaaagcttggtgagttagttcatctacagaaattgcagctgtatgaaaatagattgaattcaaccataccactctcattgtttcgattaaaatcgctgtctaagttaggattatcgcagaatgagttgagtggaagtattccatttgagttagaacaactaagatctttacaagtattgacattacaccacaacaag

SEQ ID NO: 128017 - DNA, 612 bp, Cannabis sativa
tgtaatttttggtgttgtggttggagtggtaatactttttgacactaaatttagtgatagtgtaacaccaaatttagtgtgctcctcggagatactctaactagctatatagtacaacatcttggctaatttggagtgacggctatgacttgttcatgtgtacatatttaatatcatcatatcacatcacagttattattaatatagagttattcattttcattaaataaattaaaaataataaagagtacttattcatgaaaatgaacttcctccacagctgtttttgttaatagtgctcatcaaccaagccaaacacatcaatgaattatatgtacacgtatatatatatatatatatatatatatatgctaaaatgttaaaatgaccttgagtttggggcttttttgggcaaatcatttgagttttcttatttttacagttaaggttgattctacaattgggtaaataatctaaactctaatattgtttttcaacaaattattaatgatataattttattgttagtatgtaacagataatctttcatgcacaatttgttagataaattaacaattaacccaagatctatttgtatataacatagaacac

SEQ ID NO: 128018 - DNA, 1051 bp, Cannabis sativa
aaataatatttaataaaaataaaaatggtttttcttttttccaataaatttaatcacattaaatattaagtgtcatatttatttatttatttatttttctttaaaaaagaaaattgaaacttagagtctcatttttagagaaatattaaaaagtaccattagtgcttaatatttttttcgatattataccactattgtctaatagtgtaattaagtatcgagtttcatataataccctaagggacatccattttagaaagatgtatcaaataatttcccttttttttttaatattttttttgtccttaaatgacccttttatgagctgatttgttaggtttatttttcctaaccataatatatacttttggataaaaataaaggaatttctttgtatatattaaagtttgatttttttttctatttatgtaaagtatatacacttttcaatgtatagagagagagagataaacaatttatacaaaataatgtggggacccttttctcattatgatatttctatatcattatttaaagatcttttgtgatatatataataaaaaatatattaagtacaataaaattcaaattcattatatctttttcccaccacacaattatatatatttcagagtctagtaaaggcctttataaattgttcccctacctaataatttctttaaagtttcaatactttctcgaagaaaaagaaaaaaaaaaaatgtgaaatttcttttgccaataataattgactttgtgaatagttcttaatttgtgtgttgtaatataaaaggtatttcttttatttttttttttattttttatttaatagatttagatttggttgtgattttttagttttataagtcaactataaatatttattccacactcattttattattattattattcatcctattatttgaggagtagaaataagaaatttttacactaaaaatacaaaaggctaactttattacatatatactacaacacggtaaaagcaacttttatacactttaagtttattttattacacttttacaac

SEQ ID NO: 128019 - DNA, 1553 bp, Cannabis sativa
  modified_base (1461)..(1461): a, c, t, g, unknown or other
cttccgatctttaatgaaacatacttgttagtaaatctagatcttggtaaagtatttccaacattaaaaacttggaacaatggaataaagctactatatgcaagtatgtttgggccattgctaacaaacaaaagaacctatggatctgatgggttcatagtgtataaatcaagaagaaagactagtggaattactctgcctcaattcactcaagctggtattggaagaagatggttgcgcttaaagatcagattaagagcttgactaatcataatgggtttcaaaggcaatcctatactattgcagccggttataagctatttctgcctcctcaaagaaaactgaactggagcaatgaagtgtgggctaggttcaatacacctaaacatagtgtcatcttatggttggctgtcctcaatagattgaagaccaaagataagctcctcaaatacggaatgcaggtacaaccgggctgctccttgtgtgattcaaatcctgaaaatggacaataccttttctttgaatgcagggtctctaaccattgtttaatagagattaaacagtggctgaattggaatgcacgcaccaacagtttgacatagctgattaggtggatcgggaaggctaaaatgtcgagttttagaagaaaagtgttggctgctgctattgcagccctcgtgtacagtatatggaaggctagaaatgctgtcatatggcagcaagcataggtggatatagatagaataattgaagacataaagtggactcttaagcatcggattgccatgttcttacttaggaaaattaaggcaattgataaagattggtttgttgctttgtaatggaagtgtaaagataataagttgattgtgtatagattgttaggcccttgatagggtgctattagtttgtaaatattgtttgtgcaatacaattcattgatttatcaaaaaaaaaaagtaatatactcgaatatgaatatactataatatactttgtctttcgttcttcatataccaccccacataagaaaaatataccactttattaaagtaatatacttgagtatctttatctttcgttcttcatgtaccaccctacataaaaataatataccaaactattaaagtaatatattgaaatatgaatatgctgtaatataaaaatcctttggagattaagatcccttcagtacaacttaaaaaagatgaaaaacaaaacataatgtaaccattaaagtttaatttactcaacctgataatttatatcttatttgattaaaaaaaataaataaataagagacatatactaattataggtggcgagatgcacaggagagaatgagaagatggtaaaaagctaggattaattatctaaggttataattgtaattttatcattaaatttttatccaaatggctatccaaagctaggtggtatatgggtgcactcttaatgggnattacccatgaatgggtaaaattagaaaattttgagtttttatgcttaatgtttctatctaattaaaaaagtctctcatttttatatcatat

SEQ ID NO: 128020 - DNA, 681 bp, Cannabis sativa
aaactgaaaatgaagaaaagaaaatacctttggcagccttctgcttctccaaattcttctcacgggccatcttagccttctgcccattgcctccgcccatgggtgatcgatgggtttaggaagaaaaggagttgtggtttggtgtggtgtggtgtggtgtggtttttgagtgttaaagctatattatcaatggtaacagaaagaaactactagaaggtggcagttgacaaaactaagtaaaaatgaaataaaataaaataaaataaaataaaatttaaaagggtattgtagtgtgtattgtctagtatctctatatgtgattttatgattgactattatattttttttttaaagatgtaatattaaattatgtgtgactcgatactttgttagaacagtagtaatatttacgtataagagtgttaggctttttaatttaaaaaatataaaaaaaaattgaatttttttttcttaatttttaatcttgggagcatgtttattttaatatttttaaaatttatatttattttcctaaaatttttaaaactttaaatattatttattttaaaaaaataagcagtttttctttaatttataaaatttttaaaaatatacataataaaaataaaaactaaaaatataattaaatatacgtataaatgcacgtaataataacctaat

SEQ ID NO: 128021 - DNA, 985 bp, Cannabis sativa
ttgttgtagcagaattactttctgcttctgcaaacgcttccagtttttatattttcttatatacaactgacatttgcaaaaacatggtttttcaaattcaaataaacctctttttatgagtattgtacccaaattatcctcccacactcatgtacataatttcaaacataatagaatatttgtgttttttgtagatggatgtataagtttgtgagaaagttaagataaaattttgattaaagaaaaattaaaactatcatgaaatgataggggtaaaattggtagaataattgaaaaaagatgtaattataatagattttgaaatagagggtaaaaattaaaaagatcaagttaaaagagatatataatgtaatttcttcatataaagatgtcaaaaaatataatttttattgatcatcatttaatattttattgaaatatacaaacaacattattgtttattttttattgcttaaataatagtaatatagtatataaagaaaataaagttatataaaattcaataaattataacaattagtgaaactatcgtaaataaaaaagatagaatttattgtaggctgaatttggcacaatgctatatcttatgctaaatttggcataagattatttgacacaatgctatatcttatgctaaattttagcatgtaccaaatttgttatactttttagaacaccattagagtagtatttttcttaagtatgctaaaatataacaatatagcactccattgaaaatgctcttcgctacaaaaactatcagaacttcaagtatcaacatttctcacaagacctggctctaactacccatttctcataaatgttagctcttaatatttaggacaaagctttgactaatttattaaagggattatcaaaattacatatactctctatctcaatctctctacccaaaccccaatataccatttgcttcttcctcactctcaccacataacaaact

SEQ ID NO: 128022 - DNA, 738 bp, Cannabis sativa
caagcggcggccttcgtcgtttgggctccatcgtcgacgatccgtctgggttttttaagggatttagtgtcgattgtgaaccgacgcaaattttgtgtcagttcataaccgacgcaaaaacccttcaactgacgctaaatgttgcgtctgagcaaaactgacgcaaattcgagcccacatttttttttttaaaaaaatgtcatctttagcgtaagtttttgctttagtgtcacagtattaaccgacgcaaattagttattattggcgtcagttaacagccgaagcaaaaaagtgagggttaacttttgcgtcaatcaacaaatttgattaaagagttgaccgacgcaaaatccatacccaaaataatatcaaaatcttccaatttaactctatcagattaactgacagctcccttccttccataaatattggaagggatcgaacccacctactatagataaccaactctctagtgggcagtaaagttccgaagcctcttgaaagtacatcactaggcctattcaaactctcaattatcctacttgaaacataagagtgtgttgcaccagagtcaatcaatacagtcaataaagtaccaacaatagagagctcacttatcacggtggaagggccgacatcagccttggcctgagtgtaacgcccgtacttttataaaaatattaattttgtttacaagcgttaaacgcggaaaatcataatgtcgcatttttatttaat

SEQ ID NO: 128023 - DNA, 1058 bp, Cannabis sativa
  modified_base (43)..(48): a, c, t, g, unknown or other
  modified_base (987)..(1013): a, c, t, g, unknown or other
aaagttcatatttagggtgtgtaaacaacatacttgtgagtannnnnnagatcctggtaaaatattttccaatagtctctgtgaaagaaatctccccaattgatgaacaggccaagggtatccgtgaactaaagtcttacaccattacgggaaggaggccatttggtcccgcgaggaatgtggatattctcaactacgccaaagcacttcaaggatacactagtactgggtatgcctttggcccgcggaggctcaacccacgtgtgttaggctacgaactcagtgaccaagcttttccatgtacgatctcataagttgtctcccacgaaatgctatcaaacggagcatgcgtgtccttttgtattgagctaaatgatcgaacaactaagaataggggaaattcaaataggaatggccctacggtgacacgcgttcgaggcccagccggtacaatctgacacccttagaatgccacatgagaaatatcctacctaccaatctaacggtgggatttcatccctttggtggtccatccaagacagcccatgcaatagaattaaggatagttaatgccagaaccacgtaaaaatatctggtttgttatttccttatttacgccattattactttcttaagctctaaacatttttggcaaccgaatattattagatcttaagaaagtaatacggccataaataacaaaataacaaacaaattttttttacatggttcaggcattaactatccttagtccacgagttcatttaattagattcaatggtcggtgactgtttatacaaagacaaatacaatggacttttactcctttccaccgtgttcctgttgaggaagaggaagcttagtaggaatatttcggagttaatagtagtgttacaaaaatgtattttggatgatcaagaatgagtcttctttcccaatgcccagagatccccctcttatgctatttctgttgggttttatgccctnnnnnnnnnnnnnnnnnnnnnnnnnnnatttacttattaatatagatcgaaaataacatttaatgttgcatg

SEQ ID NO: 128024 - DNA, 1764 bp, Cannabis sativa
ctcatctcgcgtgttgtcttttgtggataaaccctggtgagttttgggaaagcgaacaccgaatccaccaggatttgcttcaactattatttgaggataaccctcatctctgttctagtatgccctcttcaagtgatggacattccaactcaatcttcccgtccagccataggatgatggctcgaacaaaacagacaatgcgtagggtcaacgcatccgacactcacgtggcccagcacgccactttacccagcgccgaataggatccgcccatccaggaggagggggatcatgaaggggacgcccaagtccaggagatagaggaatagggcgatgttcgtcctggcagtcctttcgaggcgaaggaagaggaggaggctgcacctccaaattttggagggtacaacttagctggggagctggtagatgcggacggcgatgtcttggtcgaaggagtggactacgtcactgaggagcttactgctgtagttcctcacaagaggcaaggtgccttgggtgccaggtgggtgagccctccatccaaggtcactgagacacgtctaagggatctagaccagtccgaccacttgggcaagctggaatgttatgttcctgccttaaacaaccgagccacaaacttgaagaaggggatgtgtgcctggttgggtgctcattctaaataaggggcactagtgcctttgcacccgtactttaggaaggtggcagactttttccgtctctgtctgacccaatttagtcccaagagcatcaaatatctattttccctgttcgttctctacaccacccagaagtggggtatgccatccccgcacgaagttagctggttttttgacttgaagtctactcccaaacaaggcaggtcgggatagttctatttttctcagccagatttcaaatggttgacgggcaccggggacaaggccgtgagcaaaaccaggaattttgttgacgagtattacatggtggattgcatgggcacaacctatacttggttccagcagatccctatatattgctgcctacccttcatgctagctcttagggatagagctcaaagaatcactcagctgccggatgatgcctggagtatcactttgttgacctcggaggacatttttgtgcagtacgggctatacccaaaggatttcattccccagcctgtgaaggagaagaagaggaaatccagtgccggtcgggctgagggagctcatcaggagcatgcactcattcaactcaagcatgatgctaagttgaagagaggtgtgggagccaagcactatgctccagagcgtcttgagcaggaagatgaggttgaggaagagccagagactcaacttaaaaggaagaagaaacttccgacccagcacaggcctatcgaacatatgattcagattagggagcccagtttacctactcgcccgtccactcttttggtaggaaaggggacacgggcttatctgctccggccaagaagtccaggggcagtcagacaattccgtccagagagaaggcatcggtcgaggtagttattgatctcttcaaggagccaaccgttgtagatccttctgccccaaaaatgactaagtctaaagactcccaaggagggagctcggacaagcccgaacagtcgaagggcggatctgagctggtcaaaagcagatttgagcagatcatggcccctgacccacctccggtgctgcatccagagactaagagaggcaaagatatgctcacccactacat

SEQ ID NO: 128025 - DNA, 543 bp, Cannabis sativa
ctgatgaaaaagcaacagtgacttaaggtaaaaaaatgggtctcgctaatggaatagaagataatgattgaggttcaggcgagactacatctcgcaaatagcgacatctacccttagttatcacttgtaaaaatttcctatagcgactggaaactttatcttgattggttttaatccaatggtctctaattttggcatcattgaactcaagtttggattgggatatttggattttggatttaaatggaagggctaattccttaggaaattctaattctagaaaatctggagttgaaatttcaaaaccacattaggacatttctacaaaagaataatcccaatttttggaagaaatttgtttaaagcagaaacctatgaatacgataaaactaaatttttctctctgtcaaaccctaggaattccccaaaaaatagattgaaattatttaaaccaaacaaaatgaacaatgatgcaattagttataaaaataagaatattaactcaggaaaaagaaatacccagaaagaaaggaatgaatcact

SEQ ID NO: 128026 - DNA, 1005 bp, Cannabis sativa
actcaaaaatctgaaactcgactaaggcatgtctctcatgtatccctggaaaatggctaagtagatcgcccatagaaagttgctaggaacaaaaactgatgcgagacgatgcacaagatgtcgacctaggcactcaactctagtacagcatttaggatgagtcctaggatctccacatgacatcctcagcttcattgttcatcattttaggatcagtgagatctgttttcttgaactttgttgaatgatagcacccataatcaacttcgctagatcttggtgcctacctgggttctccctgatgtcaactagggcactgacacattgtccaatgcccaagttgaccactctagtcttgagaggtaggatctcatggttgtttccttcttgccatgtgttaaaagtggtgtctatattattgggtcaaatttttgagtaaacataaccattattttgcaatctctaactaaacttttcatttcaaaattaaacaagataataaattaagattacaaactaaaaatttaatatacactcaatatatattataattttttcaaagaaaacttgtcatacattctaaccattaatttaaatatcctatacaaaattctttaaattttataaaaaaataataattaacatatatacacattacaactaaaatatatctaaattatctcatgatcatcaatatatgcatgtttgaacaactaaagatttaagccacacaactttatcataattaaataattcatatacacaatttttcttatttatacatattctaaaattaaaattatcatttcaaattacattaaaataacacatttaacatactaaataattaataagctaggaagtaattgatataaaaattctaaaacaaaatttttaatcaacataataagcaatatctatatatctattctatataaagtgtacctgtataactgaattcttggtttatgagaaattcagaagtgactttttatttttatttaa

SEQ ID NO: 128027 - DNA, 1126 bp, Cannabis sativa
ggattggattggatccaaaaaataaaattcgcacttagtgcggatcggatgcactatgagaaaaataatgcgaattggattggatgaatacccctactaaaaattaatatatacaattgttggacatagctttttttactaaaatacgacacgcatatacgcatatgaagtaccacgtggcaaaaggatccacctgctcatgtgattactaattactgctatacaaattctttgaccaagtttgcaaagtatgagacacgttcgtgaggagtcgtgcactcttagaagagtagtcaaggcgttatggactttaaccatcgaggaggctacaccctcctagatcgtataccatccgggattcaattatgtgaataacacagaatttattatattattttatataatataataattagattaaataataaagttacaactaattaagtgtaataaattattaattttgtccaatagtaacatacaatagcaagttacatagtttgaacataaatcataaaaaagagttggaaattcttgaaagataataaagacaaactttgtaactcctctccatattatccctcttaataaattagtaaaaaatgttactaattgtgtttggatgtgaatgaatgaccactattgaaaatataattgttggagacttgatttattcatttgtaaggtgtataaatcgttcaaaatcaagtgggagtagtttggaatactttggagaagcattgatcaaagctgaaataatggtaactaattatacaatggcatacatttttgaacgtttgggagcttttctaattgctcaaaacacctcaaaatcacccaattaaaatcataaacactcactctatgactagtaacatctaagggctttatggtggtcattcatgttcatatgggagtgataactctacaaatagtcaccatttgttcacttctgatatatgttgttgaatacactttgttgtggttgaaccttgtgaggatatgctcattcttagacactaggctaagcatgagggcttgaaaatccttaagagtatttctagagtttccctaagtgtccatgtgagggaagaaatgacttttaggacaaaggtccttaagcctt

SEQ ID NO: 128028 - DNA, 813 bp, Cannabis sativa
  modified_base (734)..(734): a, c, t, g, unknown or other
aattatcttaaattttaatattttaatatttttgatgtaatttttgttattagtatgagtaattattttacaattttttttacttaaaaataaactaatatcgtcaaacgttataacggagaaagattattagagattaaaaaatacaaaataaagaccaaaaaaaaaactatcgataaatctatacaaaatttatcatatgatttcaaacagttgtcatcaccgtacctcacctgtatatattcaccaccacattcaaaaatgtgattatcattgtatcctatttgtagtcattactatccttattaataagtttcacttgtatataagacaaatcagtcaattagctaactactcacttttaacacatgactgaattattttgttataaatttatcacttgtatactcctaagtactttggcgtaatgaattattcaataaatcccaattctcaaataaatttataagcatagttatatacaattaaaataaataaataaacgtcaaaaagaaaaataaataaattatttttttaagttatcattaaatactaaatcacagtaaatatattaaatttttaaaatatactaaattattgaaatcatgtttataatgtagaagattaaatgatggtttatggttataaaattttaagtaaatatttttgtttttttaaataaaatttaaatttaaatatcgttggttgaagtctgttgcccctgattttgcccnatatacgtggaccaaccagacaaggacacgtggatcaagcaacttataatccaaactatttgctaagtctttatgcaat

SEQ ID NO: 128029 - DNA, 2208 bp, Cannabis sativa
  modified_base (2151)..(2176): a, c, t, g, unknown or other
gagcagatgaagattgtacatgtcagggcggttaggcctgaagcgtacgatcctcgggacatcagggcttttgtagttaggcgctgggcaacaaatattttgtattgaatagcaaaccttttgtaaagtgttttgtaaatgggatcccaaagtattttgtatgctatatcgcaagtatttaattaaataagcaaaatttttacttaatcacgtttttcgttaacctcgttgattagcaatgagttgcacaatacgttaaaaatcacgtaacacgcctatgctagttagggtgttacaatataaaactgaacaggaaccatctttccaccatttctgctttttaaaaattttcaagctttctcttgcaaaaaaccattctgatttctcgaagctttgcatgccctcattgtcattgacatacttcttgggcatccattccgatatactgtttgacctcaagaattcaaaaaggttgtcatgccattcatcccgtcctcagtttcgaagcttttcgtcgtacaaaaactcaatttcgaacagtaagtgacccattttctttcctctgatctttttcattttttgggttatgatccttatgctgttaattgcatctttgtcactccatttggttttagcgattttgatttaattttctgggtaatttttagggtttaggcagagtaaaaatttaggtttatcatatctataagtctctggtttaataaatttcatccaggaatcgggattgctctttttgtagaaatgtcccaatctcgttatgaagtttattctccagagtccttagaaatagaatatcctaaggaattagccctcccatacaaacccaaaattttcaaacctcggtccaaattagagataaacgattagagaccatttaataaaaaaccaatcaggatgaagtttctagtcgctataggcatttcctacaagaaataactgagggtaaacgtcgctacttgcgagatgaagcctggcctgaacctttgtcattatcttctattcctttggctaaacccttgtttttacctagagtcacaattactttttcaccaggtgacctagattttgaaattatgtcttccaagtctcgtaagtcaaagattccctatgatcccaatgtcacttttgaggttgagcttatcgagtcaaggataagagctataggagactacgttggtggtgtttttaggacttgtggcatcgattaaaggcgagggagggtgtcgtgttagatctgttgcacttggtgaatttagttattatccaccagaacgacttatccgtgaggaatgcagggggccagtggtaaaaccagtggtgaggccagtactagtagcttggctgggataggcgcttggagcctcgagcatatcacggctggagcaattttccctctaagagagcaatttaaagagttcatcaaccatcttggaatcgctcctttccaatcggttctaatttcctacagaatccttgcaagtcgaaaggttttgtataagattttaggatgggagtgtcccactccccaggaaattgtttatctttatttcgttaaggcagttcctgtgaggaaacgttgtgcagaaggtttttactatcttgggactcacacaaatgatcgtaggatcattgtaggattaccaaataataccgcttttaagaaagatttcttctggacaagtgacctttccccaatcaacacaaccacgtttcgcataatacgtaagtaaagttttatttcaaacttggttttcaattactccatgtttataatcttagcctcgctgacttatcttatttattttgttgatagtggtctcaaaaggaccaactccaactcttgagatgaccgagcggtgtaaacttttgatgggtcttctgttcagacttcgatcggctgattttcttctaaacgaagccaatttgaggtctgttggccttctcgctacaaacacttgtgattacaagtttcacaagtatacatcgtgggagaaggttcaagttccagctgacgaggagagtcaagattatgtggctcgggtgcattatctccaaaatgtagcccctcgagaagctgaagaagatgcattctgagttaatcaatgtggggttttgtgccctaaataaaannnnnnnnnnnnnnnnnnnnnnnnnnaattaataaaagatcaaaaatcgcttttatgt

SEQ ID NO: 128030 - DNA, 946 bp, Cannabis sativa
ggaaccctaattccaggcataggtcgtctagcctaggggtacaacccccttggccagccaaatcccatgaaaccctcccatggccggatatgcctcaaacaaggcctccttggccgaccaagatctgcttggatcagaacaatgtttttttaacaactcaaacatgttctttgtgttcttcatgactcaaagagccaagaatcataacaaaggtcagattcagatctttttcgtcttgaaatcacacatttgtatcctaaggctatcatgcaaataaaaatactgaaatgataacaatctaacataagaatcaaagcatgttcaaagcaaggaatattgttcatgcatccatggaaaaatcaaccaaataatgcaaaatagcgggaatagaaagcttacccactacgagatgtcattgaagaagaatgtgggtagctcagatcgtcgaaatgacataaaaatctcgagaagatgatgcttgtgggttcggccctttaaaaagaaaaaagagctttttctaaattaagtttccagtgagagaaagtgaaaagcaaaaagtgagaagtgaaaaaatgttttccccccaaaagtcacttatgtaatgcatgtgggccctttttcttcacacctacacatcataaaggcagctaaagaagctatttatctacagtaatgagatcagacagtcaagacaaagtgcttcaaaaggctaaaaaaatgcatcaacttttattcagcaaaggctacaacagtctcaaccgcaccaacatagctggtaaagttcctatctgtacagacgcccacacagggacttggggagcaaatgttatcccattttttcctcctgacttggcatgcttatgtggacaaaattagtgccacatggcagtacaactcaccaataagaaggccaagtcagcatctaagaaaacggagaccccgacac

SEQ ID NO: 128031 - DNA, 1866 bp, Cannabis sativa
tcgcacttggacacgattgcatcgaggcttaggaatgcgaagccactgccgtggaagaagatgaagacggggagggatttagggcctgaggcggaagctgagctggggacgaagatacgtgaggagaggacggagtcggagctgcggctgagatcggtgttggctgtgggtggagctgggaatggggagttggtgacgatgatggggctataatagatagatttattcgctgttcgattgttttgttgcttattgtttttcctaaccgggttttgtcccgtgaaatgttctagttttctaggtaattttcagttcgactctctctgcgaaggaatcctgtattaagggatcgtttgtttgctgctgttttggctagggtttttgagatggggacgatgatggggagtggctagggtttctaagatgaagaagttagagagagaagaagaaggaggcgtgaggatagaagaaaaagaagaaagaaaagagaaagaaaagaaaaagaaatttttttattttttatttttaaaataattaattttttattttaattttaaatatttattacgtagactaattaaactgtgccacgtttacactgtgtacacgtagacattccaacttggcactcaacatctaaaaatggatggaaagggctaagtgctaacagaacttggatttaggaggttttaccaccaaaattttagaattggaatttagttgcaaaaacttgaccacttaagaaagttatgccgcaaattactctttatattaaaatgcaataataagactgtattgtggtactacgctttaaattatttttttaagtaaattgtctagaggttcaaaattagataatttataagaaaattgttaatattttatttggtattatattactattaatataattaaatatcatatcatatataacttaaaaaaaataatttttaaaaaatatttgtcacttataaaacgtattcaacaccacttacgcccaatatagaatgttcaatttataattgtgaacgttaaagatgtatgatgaagcatgcaaatcaatgacatgtgttgaggggtccatggaccatgattagtggaacgatttgacccttttttatttatttatttattattgagtccaaactaatcaaaagatttcattactatcaacacgctgtatcattgacatgacattaaatttgcaaaaataaaatataaaaaaaatcattgaaatgaaatgccataattgatgagtctctctctcccaattaattttcatattcatccaaataatttgaaaattaactaactaggatgaatgccccttttttctttggaatatatattcaactcatcattaaaaagtatatattggagaatgcgttgttttgagtaacattctattctctattctattcccccaaaaaagagaaggtctttgtcagcaaacacatttcactttgaccaatttggtcatgtcattaggtaatagattttatttaaaaaaaataaaatttacataaactaaaaattacaaaaatatattaataccatttttttttatatttaagctttaaaaattttatttataaaaatatatctttaataaaataataatttttttgttgttttataatttatttattttataattatttttggttattttatagtttatttataaatttatagttgtcgtaaggttaatttcttgttgtttttagttattttttaaatttttattaagtaaaatgtatttttataatttcaaatttttataagtgtattttgtaaatataaactttaaactgtaaaattgtaaaaaaaaaaaattagtatttttgaaatttccttttttttttt

SEQ ID NO: 128032 - DNA, 849 bp, Cannabis sativa
aaaatattttgtcaactaacttgccaaaaaaagactttacaccatacatgtgctaaaatatcgtaagtgcactagtaaccctttaaaacaagttcaatcctaacatgggttaggtagcctaattttttatttatcattgactatttaactataggttaatcatgtaatctataatatattaatcaaccaagttgctgggatgaggatacgatatacataattggcaaatcatgtcaaacaaaccttactatgttcatcgttactataccttctacaccccacttgacagatatgatgtcattctttcttccaacactatctagcctagaaatgacacctctcttgaccaaaattaacccttttggtatagtggtgagattttttttttcttaattgcttctgatcgcttgaacatactcttactattgtccataaatcaaatcataagtggattgtagtatcatttgcgtactatgtgccttttatattgcttgaacatttcataatcccaacatttctcaaatactcgtatggtccttgtcgttccatgaaattcttctagacgggtcactttagtcctagttgtgtctcacttgtctcttgcctttgagtgagactttcctaatctcttttccttgagctatgatatgcaccgttgttgtatcaattggtatttggaatctagggatgtcacccttgaatataaatttcccctattcctcaagccttgaatttggaatctagtcgtgcctgaaccttctttgtttatcttctttgaaaatatcattgttaaaactatgcacattttactctattgtctttcccaccaagtagatgaccttgagttta

SEQ ID NO: 128033 - DNA, 1004 bp, Cannabis sativa
cgctaatagggtgatatgttgtagcgtcctgttctaactgctttagcatctgtctctgcagaactctctggtgtttgagcttcccttgatgccttgactgatcgagtgatgacacttgaaaaactccaacgctcagttctggatgttgtcaaagccttgtctaaggccccaaaagtttaatttttcttgtcttttattttttgtttccattcctaagaacatttgtactttctttagtcttaggtttggcatatttatttcttctatgtttttggttctttggctgctttgaaagacacaaaaggggagagtagatactcaaaaacatgttttcttttattatgtgtaactctggacctttttattttgagggggagttaagtttaagtttccttttcatgtttgatatgagttaggcatgcttgcaaggagagttcttctctttacttttttccaacatgtgtgttgtgggtttttgttttacttttgtctatcaaattgccaaaggggaagattgtaaaatcctttattggcatatttgataaaatagacaaaaataatgttgcggtattttcaaaattggctttacttgtttattctttatttttgaaaatattgtttccttttcttgtgtgaaaaggctttctaaaatcagattctattcttttttgactttgtgtgaattaaatatgagtttttcttatttagattatttaattttatctttgttttttaagaaaattcttaatcatatttatttcctatttatacgatttattgaccaagaaaccgtgtgcagctgtgtgtgttaatgtagttaaagttgccttatttgtttatgaaaactttgctgaaaaactgttcaggttcactgtacctgtgtgaacggactgactgtctatttaaacagattttgacttttctatttggaaagattttcatttattgacctagttgtttcttggttgtttaaccacgacctagagggtttctaaagtgtataa

SEQ ID NO: 128034 - DNA, 761 bp, Cannabis sativa
  modified_base (36)..(54): a, c, t, g, unknown or other
aagttcatatttaaggtgttaatcaacatacttgtnnnnnnnnnnnnnnnnnnngtaaaataatttccaacagtcctcgtctcttctatcagttctctggttgaaccacttgattagatcgttggcctctttgttgcggtgacctgacactgcttggtgagttcaaagaatacactcttggtcttccatctatcataagaattcttgtctctgctgagtgtttataccgtagtcagcagcgtgtggttcttcaaggtattcacgtctctgctaagcgaatatataacaatcagtagtacttggttcttcaagaaatttgcatctctactgagcaaatatattgcggtcaacagtgcgtggttctcaattaggcctacttgacctacaacctccctaagtctggccaacccaatatcttctcccaagcctaggtgaggccttccaaatcttggtctcgtctctctttcatagtactgggggtgaaacccagttgcttatcttggggggtgccccccaaggattcttcctttagttggaggggccaatggtgggcctactgtttgaggcatggcgtaccacttggatccacaaggatgcctgcattaatcttgccaatatagagtcctgccagacaatcttggccgcccatagaccaacagcagaggttgttagcccaagatatgtttccaagaggggggtgaattggaaatttgaactaatttcgttaaattaaaacttttaacacaaaatcaagcaattag

SEQ ID NO: 128035 - DNA, 822 bp, Cannabis sativa
  modified_base (36)..(39): a, c, t, g, unknown or other
  modified_base (765)..(775): a, c, t, g, unknown or other
ttttgttgtgcctaaaagtcacatttagtcacaaannnnttatattgtgactaaaaaattgttactaaaagtagcaattttttgtagtgggataaaatactaatagtgaataaaatgataatttgcacctgtttcattctaaatcatttatatagaggattgaatgtcagtactagttggataacttatttatacttggtgtaattaaaacgttttataaattaaaaaaatctaattttaactttataatagagttacaaggaattaataggctaataaaattatttgtttgaaaattaaatcatgataattggagcttgagtttatggattcatagtccttgtatcatcttttatcaaaatgaatctagtgatctcttgaataattaatttaattattagttatgaaaatattatagaaataaattattctttggatatttcattaagaaaagaataagaattttttttatttgaggacttaattattacgaagtctaaaagaaagagtagtaatatcaaaattaggtcaattttgttaatattaataaattgttattgatattaattaaaaaaatacattaaataaagatttaaactataatttattagttttgacagatatttaattaattattaaataaataaataaatatttgatttcagatagttttagaaataaaatttttggaattcaatatggatgtttcttagtgcacattcatgaaggggaatgagactttaaaggcgtttggttgggaggaannnnnnnnnnngaataggaatgagaatgggaataagaataggaatggaatggaataaa

SEQ ID NO: 128036 - DNA, 1875 bp, Cannabis sativa
  modified_base (801)..(801): a, c, t, g, unknown or other
  modified_base (1689)..(1693): a, c, t, g, unknown or other
taaagatgattggatcattgattctggctgtacatttcatatgactaacaataagtcttatttgtttaattacagagaatctagaggaggtaaagtcattcttgagaatgatcaaacatgcaacattgaaggttcaggttcattaattttaaaatgtttgatggcattattagaaccttaactaatgttagatatgttcctgatttatttagaaacgtaaaatctattagtttacttgatgatctgggtatttttagcaaaattgaggctggagcaatcaaattggctaagggttctatgacaatcatcaaaggacagaaaaatggtggcctatactacttgcaaggaagccttgtcgcttgttggcacaacactaaagagcatgtcacgaaagacactaaggttgttctatggcataggagattgggacacattagtgaaaggggattacaactaatgagtgaacaaaagctacttggtaaggacaatgtaactaaagtggatttttgtgaattttgtgtgttaggaaaacaccatagacttaaatttcaaactggcacacacaaatcacaaggcatcttagattatgtttactcagattagtggggtcctgagaaaatcctaacttttgggggtagtgcctatttcttatctattgttgatgactattctaggaaagtatgggtttacttgttaaagcataaaaatgaatcttttcaaaaaatttgtacactaaaaattacttgttgagaatttaactaacagaaaactaaaaaccctaaggacagataatggcctagnattttgtaatgatgagtttacaggttattgccaagataatgggattcagaggcatagaacagtgaggaaaacccctcagcaaaattgtgttgctgagagaatgaacagaaccatattgaacaaagcaagatgcatgcttttcaatgcagggctctctaatgggttttggggagaagtagttgtaactgctacatacttaattaatagaagcccttctagtgcaattgaaggtaaaccccctaaagaaatgtggactggtaaactaccagacttgtcaaatttgaaagtctttggatgtgcagcttatgcacatcaaagtgtagggaaattagagcctagggctctaaaatgtgtgtttctaggatatccagagggtgtaaaaggctacagattatgggtataaaggaaaggaggtttgaaaacactaattagtagggatgtaatttttcaagaaaatgattttccttataaaaatactaatgagcttgatgcaggttccacagaaactaaccctacaggtacctctattggaatcactcagaatggcacaactgaactggaaccagatccagatcaggtggaaccaatccaaatagaacctcaagaaacaccagatcaagtggaacatgaagttcaagatgaagaagataaaaaccaagaagacttaacagaatatcagcttacaagagatagggctagaagaattcctaaacctaatcagaagtacagctacaatgtgtgggatgagagtattgcttatgcctacatgtgtaaactagaagtagaaatctatgagccacagtcttatgaagaagcactaaaacacagaaactataaggcttggttgaaagccatgaaagaggaaatgtactctctcataaagaatannnnntggagagttgtacttagaccagatggcaagagtgttgtatcttgaaaatggcttttccaggttaaggaaggaaggactaaggatgaacctataaggtttaaagccaaattagtggcaaaggggtttacacagaaagaaggtgtagattttacagaaatattctcaccagtggtgaaatataa

SEQ ID NO: 128037 - DNA, 787 bp, Cannabis sativa
aaatttttgcatcagtcaaaaattataaatattcaaattgatttgagtcttcttctcaggtgacgttgctagaattagtggtagttcttcgactgtcaaggttgattcattgttgtcgtccttgtttgtttgcacgaaggccttcgagtctctcaagcatcaatcgtgcagcttgagtgtaaaagatatttgtataattttttttatttgagttgtataaatattttcttaaccaacccactataaatttgtattatttttttatcttttttatatataaccaaaaaacatataaaataataaaaatactaaaacatactttaaattagactctaaaaatgcataaaaataaacttaacaatatctatactctacataaccatattccaaacaaataaataatcttaattttctccatgtcaaaaacagaaacgtccattcatgcctataccatgcaattttctataaaaatactaattttaattaagccaatgcgagttacatgaattctatattacatgaagtctactttgatcttcaaacacagttagagaattaatttttaaaattatttcttttcttttctttttgaagaagatgaaaataattgaagagaaaaccatagttggagttggctctccaagttgtaaaaaaggtcaccaaatataaaacactcttttaaaaaggctacttcatagatacattaatagctgtacaaagatgaactagttagctatcaatctagcttttacaaaattagataaactataagaagtgcctaaatact

SEQ ID NO: 128038 - DNA, 889 bp, Cannabis sativa
  modified_base (831)..(832): a, c, t, g, unknown or other
tatttatttattatgttacagaagtggttatattttaattataaccgatttgagttattagtttttatttataaaaccgattatatttttagttatatctgagatatttacttctggtaatttttcaagtgacttttccgacgaatttttcggcgacggtgacttttccggtgacactaactttttcggtgaattttctagcgatgacgacttttccagcgacttttctggcaaaacttattgttgttttataaatatgggatttctacttatttttacaaaaatatagcataaaaacactcatataaatgtagaaaaaaaattcataaccctatagtgttatttatttatatcataaaaaataaattataacctcaattcccatatttatgaaaattttccacatttgggttatgaattttttattttctttacatttttatgggcttccctatatcatattttgtaaaaaaaaatcaaataccatattttaacttttcccaaagcccagagcctctactactcaaaatcttctcattttctttctctctctctttcccattatctctctctcggttctacctatgcagtactaaagtctagattgggagcatcgtgcttcgaccatgcccaccccccaacgaactccaggtctgttccttctaagccaaataatcccaatccccctcttctccctctcttgatatcactttctctctattttcccttgtgtagcgacggcacactccagaattagcctttgcctgtgtcaatggttcagacggaccacaaaaatgttgtgttttaagccctaaataaaactctatttcnntgtaatctctatcatttaaatatcaataaagaaacagaagtattttcatctcttatt

SEQ ID NO: 128039 - DNA, 699 bp, Cannabis sativa
atctttattaataagtaaacatgattatatgaaatgagttttaattagggcataaaacccaacagatcaagggtctaaaagcatgacatgtaaaaagccaacacttacaaggttgctcgacaaagactactacaagcaagacaaaagctggaaagtccttatccgaccagatgtttaaacagggacttaggaggcaaatgttatcccaaaatttgtccacctgacgtggcatgtccatgtaagccaagatagagtacatgtagaatacaatcttacaaaaagtagaacaaagcctccttacaaggtatggcaaaaccgtcaagcaacaaacaaaaagagataagagaaccatcaagcaattgtaccaacatgtctggctggccaaggggagtttataagccagccaggatgagcttgtatggccagccagagtttgagcataagctggctggccaaaatagactttcagaccaagggagcctgacctctgtaaggaaaaagtgtccaaaggctggcctctatctccaaagtctagcctccacctgctagatcctgacacgaacatgacctgccagatcctagtaggaacttgacctgccagatcctgacaggaacataacctgctagatcctggcaagagcatggctagccagacctcaatctacagaccttgtatggccggccagcctgcatcctgca

SEQ ID NO: 128040 - DNA, 885 bp, Cannabis sativa
ttcggctaccatttcaatggaggacacgtgtcaagttaatgagaatatggatcgatgcgtgtaacgataatcacatttaatagaagagatatttgcggtttaaatacctatgtttatcttttagttgcagattaatacctaagtaatttttttgacggtaaaaataccttccgtcaatattttgttacaaataagatacctcacgttaacttctcagttaaatgccaactagataaatatttgacaacttctaattggtccaagtcattttattttttttctaaaaaaaacatttttaaatttaataatataaaaaaatatatgatttattacaaaaatactaaactacagaattaacataattgaagaaaaacttaaatctaaatttcaatatttccccatcttcatatctcaaaattaaaaaattttctactcaaaaccaaattatttttttcagaatatttccccccactctcaaacccaaaaaataaccttaagaaaatttcctcaactaatatcaatacaatttccatgtccatatagatacagttgcattaatattgcacatacaaaatttctaaaaaattatttcacgatggacaaagaaaactgataaaattattcatctagtaaaaactaagtattctaaaaataaaaatggcaaatattaattaaatattctgtaaatggcaaaaatattaaagataaaaaaacataataagaatattgaagatgaactaatataatttagatctatatctgtatgtaacaaacaaagttcctctaaaaaatgatagatctaaatataccccagatttaaatgcatcaaccctttttcttcgataaatagaaaaaaaaaatccaaacccactctctctctctctc

SEQ ID NO: 128041 - DNA, 1324 bp, Cannabis sativa
caaaaagtctctgcagagtttatcaacttccttgactattttcttttgaagcataaatatactcatccaataacaacgaatgtctagtaacaccgattgaatcaattgcactctacctacgagagatgcctgcttggccagctgtgaagtttcaattgaatcttcttaagaaaatgattacaatccactgctttccattttgtttgcctcattatcacaccgagatactttagagggaattgaccctcataataaagaaccgaatctcgaatagccagtttacttgcttcatcgaccctgccaaaataaataccatacttgttcgagttaattaaattttataattatatatattctctcaaaaaattggtcggtgataaaataaatttttcttagaaaaaaaaattaaataatgtcacatgatcattgcttattttagacaatgatattcataaagttcacttgaaatgttgatcaaaatatgcatgtaccaaagaccactccataggcaaccctggagatgctctaaaaaatgttggatgtagagctttacagtagcaagaaaaccagtacaaaccagcaaatacaagaaagcatgaagaataaagagagagagatagagagagaataccaaagaagcttaactaaattaagctagctaagtactatcttatttatagtaaaacaaagtacaatacaagttgctaaagacaaaactaacataaataacaaacagtacttactaactgtcactctattaaccaattaactaactaatttgttaattggtttatattagataacatggatatatttttggtatcttttaattgatgcttactattagtgaaaaaaaatacaaaaaaaaaagtcatacaataacattatttatattttctctttttttttttaaattttttattatcattttatcttaaataagaaaatttaattatttaatatatattatttaatcatataatattatttttaatatttaaaacaaaaagtaccaaaaataataaaaaagagtgataaaataaaatagaaaaattctacaatgaaacgatacacttttatttgttttgttatccgaaatacgtttttagttaattttttttatagttacgtacgttataattatttaagatattctgtaaaatttaaaaaaatttaacatccaaaaataatatccaaatagtttgctacaagtgtgattaatttatttaaaaaaaaacaaaagagaatgctctaagctagtaagcccaacaaaatttttctccaaagtttttttttttattcacataagttaaaaagagcgtac

SEQ ID NO: 128042 - DNA, 597 bp, Cannabis sativa
  modified_base (330)..(334): a, c, t, g, unknown or other
atacttagttggaccaatagcaattctgacacataggagggtactaggcaccactggtgccttttagcatttctctttgtccttatcatccctacaatagctagcacatgttcccactctccactagaagtgacgtatggcaccacttccatcagctttttgtgccatttattccactaaatagcacacgaaaacactaattttgagagtaatattttcacactaaataggacccaaatctaaagtaaataacatcagattatagagtatagaaatatactttttcatcttgtttctcttttattattattgtaattattattattattnnnnntattattattattatatttttacttattttagtgagaaaaataagtaaattagagtaatattattagttaagttagagtgtagtttttgtatttcttatttatgcttcatctatacatctcatttattaaattattctttatcttctaatttttcttataaattaatagtatcttttatataagttcagtcatgcttttcttatgtaagttaggctattaatattttgatatatttattatattgtatgtcgtttactgcatt

SEQ ID NO: 128043 - DNA, 928 bp, Cannabis sativa
aaatctaacttcaaaggtaacctttgtgaaatttatcacattccattatataataaataaaataaaatatcaattaggaccattcctcagtttctgttttttataataactagttggaacaacatgtgtgtagcacgtgtaatctttttagaaataaatatataatttttattaatttgttaaatcagctaaaagataagattctacctcaacgaaaacatcgcttttgttgaacacttggtttagaaaagaacaagatgcttcaacaagactatgaacaactattgtttaataaaaaacaagaaaacattatttacagatggaagaaatttacgataatcttctataataacctcaaaagaagaaaacataggtaatgaatttcgaatagcttgtactgctattaagcaatatgactccaactccactttctttcatggttgagttttaattcagtatagcatgtgtcatgtaatgtatttaatagtaaaacaaacttcacttaacatattcaaaataaaatataattatcatatggttattagcgtggcactcacatgataatgatgatacatcatccattaaagagttgcataagtgtatctctaatggcgatgcatcaaatagattatgtgtataatttatcttgaaaaaaacgtgctccaacactattttaaaagttgtgccaaaattgatacattacaaaaattatacgaaatttgaaatacaatatagcataatctaaaatttatatcactatacatacactattttttaatattttattaatatgtatagatagaccataacgttatattaattttaaactatttacattcttttttattgttttagataattataagataataatagaattagtgataatttttttttttttttgattttaatagaagtattaattgaa

SEQ ID NO: 128044 - DNA, 1256 bp, Cannabis sativa
tgcatgtacatgttcgggccacactagaccaagcaggttggggtctaccagtgatgcattttgtactctgttttgccgcttaggcaggccagtgaaaacagacttgtaatagtgttttgtaaaataattttgggatcccgaaacatgtaacttttagtttataaagtttaaaaatttacaagtttattttccttccatttgtaattaaagtttaatttctgcgctaattttttattagtaatcccgtttaggggattagggtttcgtaagtatcttgggtagcgtgcctaatagttagggtgttacacatttgatgcccctttgagtgtcggggtccccatttgttgaggtactgacttggccttcttgttggtgagatgtactaccacatgcaactaattttgtctacataagtactgccatgtcaggtgtgcaaaattgggataacatttccccctaagtccttgtgcagacatttgtacggatagggacttactagttagttggtacggttgggactgctgtagcctttactgaatagaagttattgtgtttttagccttttgaaatactttgtcttaactgttcaatcctatttgctgtagtaaacttatgctttaattgtctctttggtgtgtaggtgaagtaagtgaagaaagggtcccacatgcactataggtgcttttgggggaaaaagcccttttcacttttcactctttacattttacttctctcaatagaaatttacatttgaagaagctcctccttctctctagagggctaaacccatcaagcaccattctcccaagatttttacatcgtttcaacaatctaagcttcccacattcttccttagtagtttcttgtagtgggtaagctttctattcccgctattttactaaatttgattgatttttgccatgaatgcatgaatattattccttgctttgaacatccattaatttttaaattatattgttgtcctttcaatattttgatatgcatgatagccttaggatatgtaatgtgtgatttctagacgaaaaagatctgaatctaacattcattgtgattcatagctcttcgagtcatgaagaacacatttgagctcttgaaaaaacacatgtttagatccgtacaagtcttggccggctaaggagtgttgggttttgtgctcgaaataaaacccattccaatataatcagatttactaattaataaagatcagaaatcaattttatgttgcatggttcaca

SEQ ID NO: 128045 - DNA, 567 bp, Cannabis sativa
agtgacatttcttgtagtgacatttgcaattctcgttgaaaaccagcttgatgactcccgaattgcaagcagctcagccacaagcagggttacctctttttgtcatatcatggttgttgcaaaagcaacctccccattactcccctaactacatagctaatagtaacacacctctccttgactctcatccagcatcaacattgattttatgatgcacaactactagctgaattcaacacccagtctcacggtctttagaaactttctccttcccccattagcgtccttatattaatgcagaaacttaccataccattctaccatatctcccactctaggacaagtaccaccatgatggatactattctgaacattccacaagttcaaggccacaacaatgaagaaatctgaagtatcgatagaccatacattagccattctactcaagaaagtgattaaatctctggtgcagtgtgtaatacctagggatgcacattttctccatggggatggggccccgcggggacccgcccctaatggggcggggattccccgtctaaatgggga

SEQ ID NO: 128046 - DNA, 637 bp, Cannabis sativa
  modified_base (552)..(559): a, c, t, g, unknown or other
gtaaaataaattccaacagatcttgagattggtagtgacttaatggaatagtaacaattctatcaatgtcaatctgtgtgaaatgctcttatagaagaggtatattccattccctagtatcacatataaaggtggacataggaaggtttggttgccctgtgtagctaatccgcttaaaatctgtatgtcctgggatccaagggtccaaatcacttctaacataaaacccattaccaatattgtatcttagaccttttagaagtaattctcttccttaatggattccttgccaagttaaagagggtgaatgtccaaggtgagcttctaaaaacgaatttcttgaaaaatacttatgcttcaaaagtcgactttacaaggagttcaccatctcaaatattctccatgcttgttttgctagcattgcttggttgaaatcaacaaaagaatgaaagcccacccctccttcaaatttcgacttgcataatcatttccaccttttccaatagattttggacccatctttgttggtgctgttggaatatattttaccannnnnnnnatttactaacaagcatgtttttaacatcctaaacatgaacttttaaaaagatattaaataaacacataaaaggtatga

SEQ ID NO: 128047 - DNA, 784 bp, Cannabis sativa
ctaaaattttgttgacgagttttcaccatcaacatatgtatattgtgaatgtatggttaaacgatgatcattgtgtaggaattatttttatttttcttagaaaatttttaaaccattttatggggcataagattttgtgtatttttattttttctcaaaaattattttacgtaaaatattatgttgtaacgctcacgagcatgaaactcaagtttgattgaaccccagtcgtgtaccacttggaccgtcagccaccaccgcttgagcatttcaggtgtcgttcccagctacctcactcatccaagttgtcaacagtccaaggcaagtcttcctaggatttcaacccaggactcgtcgacctatttccatcttgtctggttctctttctagcaaaccaccatgcatggccgtcatggccaatcgatgtcctctggactttttcgtccaagcagcttcgttcgactaaggaccaattggtcctattggtctcgacccattcaaatgagagccatgggcttagttatttttcttagcgagttgcatgtttttggatgcacatggactcgcgtccattgtcaccataactggaggacccatgtaattgagagccctttgttcagcagtggccactattgccatggtggctcctcctagagtcgtcggccacatcaatggtttttggtagtcgagcattagatatatctattctatataaaatgtggctatatagaattcttggtttatgagaaattattgggtgactttttttaaataaaaaaaataa

SEQ ID NO: 128048 - DNA, 514 bp, Cannabis sativa
  modified_base (463)..(479): a, c, t, g, unknown or other
accttcctcaccacatttacgagtcttatacatggaaaaataaattaaatttttaatgcaaaataatcctttgtaattgttagtaagtttgttcttttgttcgtttttttaataaaataaaacaataataactgacttggcgtgggcaaagaagaggagagggtctaaactgcttttattgcgttaagaaaagactactttgcttaaacaaatctgactaattaattatgagtttttttacggttaaataattttaattatcgttttacttgcatttaattctaagcttaaattttaacaataaaactctctacattactaaagtagtagtaaatataaagtgtcattcggttaactattactatgagttgtttatgtatacactcttatacacatgtcacgtttatattggtacaattaagattattatttaaaaaatatttttaaaattaaataaaattannnnnnnnnnnnnnnnntatttaaaaaataaaaaatataaattttgaaataa

SEQ ID NO: 128049 - DNA, 736 bp, Cannabis sativa
  modified_base (706)..(706): a, c, t, g, unknown or other
ttaattatattattcaatcgcttattatttgactcactgtcattggctaaaagcgaggtcaacattattaattatttattttttacttagtttgataattttggttatgtaaaggatattttcataattttagttagattaatcaagaaaaccaaaaaattagaaacacactctctctccaagcttgaccctagataaaatcaaggaaaatgcaacaattttcagaccatttcaactaatttttagtagggatttaactaggaattaagggaaattggaaccaaattcaagtgaaagccctaagtctcttttttcctttgatattgtggatgaaaactatggtttctatgtaaattggaagatttagtttctgtagtttgtgaatgattttagaactgtttaattgcttgttttaagttaagaattttgtttgaattgagggtatattacaactgtagttggttgaagccaagcttgagttttgaaacttaaaacttggttatcaatggtggtttttgaattttggggtagttgttgatctgagctatgtattatatttagaatactttatggagcttgtctggaggttttgggctagttttgataggtgttgttggatagatgtattcattggaccacatttaatgttgttaggcctatctagatccgatccaattatatgttggatgttagattttaccatccnatccgatccaattaatttcaatcatctaat

SEQ ID NO: 128050 - DNA, 1040 bp, Cannabis sativa
tgtggtggcgatgataatggagaacaagaagaagaagaagaagaagaaggagaggaagattgcttagggtggagaagtgatggctgttgtgattttcataatttttaaattatttttttataatattttaataattaatattacgcggactactaaaaatttatcacgtatatacttgtgtacacgtaggcagtctactatagcacgtaggcagtctacttgttctttggattctgtccctatttataggagtctatgatgacaattattccattgagatttaataatttgtaattgttcatgaaacatgaacatttcccacattccatatttatgcacatgagataattatatataattgcataactgttctttgtcatagacagttatatatgctgactgtgtttcattgttctcgcaattcaaccaatactttttttaaacatctccatgaaataacatttaagtgtattgttgcagtacatctcccattcttccattaatgttgatggaggtacatggagacgcttattacagcgtgacaaaggcgaaatgaattatattgaagttattgtttttattcttttgacatactcacaggtatgtgggttgatgagctgcaaaacccattatatactcgttctaaacaattttataatgtattatcccgagatgaacttgttcatcttactggtctcatcagtactcagtagttataactcgtctctcgcattgcctaaatgatgagtttaagtatttctatcaattgtatttgaagagaagagtcatctgaatgcatttattcacacataatttgaattgattcgtaggggtgtgcagaaagtcatctgatccaatcccaaccgaccgatccaatctcaaccgatcctatagaatcggatatccaatcataattggataggatcagatgcaaatttttaaaaatccaattggatcagatcgaatgatggatgagacatccgatccaatagataaccgaactgatccaatccaatatcatccaatgtccatccaatcat

SEQ ID NO: 128051 - DNA, 700 bp, Cannabis sativa
tggaggcttgaagcggggacgttacaattagtccctttcaaattgtgcttgccccatatttatagtgttttgcccaagtgaggatgccttgaactaatataattatatgataaataattctacagttctgcacatcattatttgttgaggtataaactcagtttcacattgaaaaaataagtaagagttgtcttaaatatagtgtttttaggaaggtgcccaaaaataaaaccgtaagggctaggcctaaaattgacaatatcatactaatgtgggaatcaaggtgagatagcagcccgataaagtaagaaaaggaccccaacactaattgagtgatctcaatctgaattttccgcacggattgggttttaatggacctttttttcacattagaaaactttgatggggcctaaatattttgggattaacacttaacaattattattaaaacactcacaatagctattgtaaaattatactttaaaatagctaagagaataatgaatgatgatcataccgcagttgttgtaaacgagtttaatatacatcaacttcaaattctttaaaaaatttataaatgtagcgaagcatttacatctactttatgtatattttaatatatatatatatatataggtgcacttttaatgggtattacccatgaatggataaaattagaaaaaattgagtttttatgctt

SEQ ID NO: 128052 - DNA, 864 bp, Cannabis sativa
cgtgttttactttaatcgcatattttatagaaaaattttccagtcaagcacacttaatttaagaattcttacgtgatatataggctactgaaaaaaaaaattgtattttgttgtcatatctaatactcatcaatttatttaaagcttttttaatggtgtagtttcatatctatgccctctaaaaatcatcatactacaacttttgcagataatgtggaattgcacaactaatctattttttctttatgaatcacaggattttaagtgtgttttgtgtccaaagacattatttttattcattattttttgctcattattccatctttttaagttattaaaacgtagttaaattaagttcgtagtggggttttcggcaataatgatcaaagcaacaaaagggtaaaagtgaataagttacgctatctacctttcttggccgtattccaaattcgaaaaagcaaaaaaaaaaaaaataaagttgttagagtggaagtaaaacaaatatggtagattgctatgtgtgtttatcacgttatgcacgtgcactaaattactgttttccttgtgttttttttcttatatataacgtgatatatgttatacgtaggaattgaagacatatatgtagtaataataagacatcctaaagggtgcacatgcattaggatatctagctcacccgccgtgttgtgttttttgttgttattattcatagtttaataaggggttctaaatactttaataagtaatattatatattaatcataattttcataattagataaatattaagagaattatctcatataatttttcttaattttttttttcaaatttacgatttggatttctaaagtggttgca

SEQ ID NO: 128053 - DNA, 817 bp, Cannabis sativa
actttttatgccatatttatcataaccttaataattttttccatatttttaaaaatagccctttttagaactcttttattgctgtggcttttttttcgctttttttttaattatatgcatttctcattttttattttctctcaactttaaactgttaattgtttgtactaaaaaaatatactattgcaagctatttttaagacaataattttgagatgttagaattatatactttatttataagtataagtacaataaagtatatgtacttaacatttaatttattagtaaaattggtaaatgtaatagtttttataatataattaattttgtagtgtataagatactttatggttactttataagtttttataaaaatttattgaaaaagctatatatataaattagtcttgtttattcatttgataacttttaaatataaaataacaaaaaattagagtaatctatgaattatgatgttagttcttaaattaaattttaagataccatgtattactattgagatcatttgataatctattttggaagtttttcaaaattattctataaaataagcttatgtagaatacaatctattacattttaaatataaaataataaaatactttttagtaacttatgaagctggtttacatattgaaatttaaaatttaaaaattaattatttgttggtttattaaatagaaaagaaaccaaaaggttactttattggtttacattttattttggtcatttttttcggtttttggcaaaaaaatatatgttttccacatatcaaaatgagagagagagagag

SEQ ID NO: 128054 - DNA, 1021 bp, Cannabis sativa
aactcaaataatcgtaaataaatttgaaaaaaaaaatgttaaaaaaatagtatatgggataattctcctatattaaaatacttttcattttttaaaaatattatatacttttttgatgttttaaaaaataataataaaaagatatttttgacaccacactaataatttcttatgcccgcttggagactacatatcatgcactttgggattgtagcaagcttgcctcgactcagaagctacgtgcttttaaacttgatgatccaaatatgattgttaatgatattcatgattttatttgtaattatcttctccaactttcttgtagagaaaccaaatcggttcttgttatttggtggtgtatttggttttgtcgcaatagagttcatgaaaattcttctattctgccagaattcataggcccttgggcggctgagttttgggctcttaccacagtgcaaacaagaggcacgatcagtcctatccacgatgtagctacatatctgcctcactgaaaccctcctctagggtcgttcaaagccaatacagacgcgatattgagatctaacttaacttcgtgtggtcttgctatggtggtcagagatcaagatgacaatgttttcgctatagcagcttagaaagctcacagaagccctcctccagagtgggcaaaagctctcgcaatttgttacacactctcccaatgcaccttttttggcatccaaaatctccaggttgaatctgattgtcaaagtttgatccataagctcaatccttcaatgatttggatttttctttggggttacttattattggtgatattagatatttatggtcttaaatttttccattgtgatttttaattattcccttaaaattatcaacgtagtagttgatactcttgttgtatttgctttgcaagctacttctagcaaagtttggtggcctggtcattctttatgtgtttagaatatcattttggttgatgcgagttatcaatgaatcatttagtcatcaactcctt

SEQ ID NO: 128055 - DNA, 587 bp, Cannabis sativa
ggcgagaaaaaatgaattcctataatctattctcagaggacatcaattgtactcctgattagagaagacaagtgggtgattgttgtatgcttggagttccaaattatgaaaaaacgaaggaatagttgacaattcattcacatataatcatatgattctctacctttcaagcacaaatgtattctcatcaagaattgatatgtcaatgtaatgtttttttatattgcaacttttaactttaaagacttgatttgtaaacaaaaaaatattgtaactgatttggatctttacatttatataaaagcatatatataagagtaataattccacgagctattttttgtattgataatgagtagctataataaatttttgttgcgactagagaagcattagtaataaatttttgttgtaactgaagaaaaattagttataaatttttgttctgactgaagaaatattgttgtcgctaaatatatattagtgacaacaaaaaaataaataaataagttgttgctaaaggattgttgtgactaattgtaataacatcataacaagtattagtcaagcatcttttaatcacaaaa

SEQ ID NO: 128056 - DNA, 541 bp, Cannabis sativa
atttttatttgaaaatttggatttacacaaaattctaccaaaatttgaattttatttcaatgacaaatgatttttgaatcaaaagatatcacaaaaataagattgcataggggagtatgcacccgcgcgtgcataaggaggcattgggcgtgaaaagaggctactggtagccttcttggccgagctagctcggtcaggtggggcttaggacagcttttgtccgagtaaactcggtcatgggctgtttgacgccataagcatgccgagtgaggcccttcgtccgcgcgcgtgtgcaattctttgagatatttttattcaaagttcaaaaaatcataacaattcataaaaaatccaattaagttctttaaaagcctaaatttattaatttttcttctactttttcaggaaaaatcttttcagaatgaaataaaaaaatttatcatcgtcaattaattttcacacaatcatcaaatatgcacataaaccaacatgaacacatccaaatcaacacaaacatcgtttaaattcatatttcatgaaa

SEQ ID NO: 128057 - DNA, 1274 bp, Cannabis sativa
  modified_base (1130)..(1138): a, c, t, g, unknown or other
caatccgcacaagtgcggatattcgcattttgcggatttgattggattggatcgtgcagattagattggatcaaatacttagtgaacaccccaaaaattgaggcaacaagaaatccaactaagcattgtgggagtttctattttcctttagaatttctcatttttgtctaaaaaaaacttgaagaacaccaaaattgcaaaaaaatgaagatctctcaatatttttcctgaaaaataaaaataaacaaaaaccaagcataaatctgcataataaaataataaaaagactaaaatacacagtaaatttggaatctaaaaatgcataaaaataaacctaatattttctcatatttatacgcatcttaatttttatttgagaaaattttaaaagactagaataaacataaggtttggggtttatttgcttaagtacattgccaaataatgtacattgttatgcaatgtatcgtaatacatagaagataatactcgtcatataatgagaacataccgctataattcatatgtttattatgtaatgtgaaatattgggtttaagttgtaaatctaaatactaaccaagtgggacaatattaaaatatttctacatttattattagaatatttctaatattggtacgaaattattttaagagattttgctttatctcgctgactatttgttgacagtatataatcacaaatcaaaaggttataagaatgaatattttaagtatggccaccttaccatgtactaattaatctatttcttgatttgattttttaaattaattgttaaaatattttgattattaatgtagcacagatactgataaaatatctcacctataaatataggatctcagttctccagctactcactcatttatatacaaacaactaattccatttaaagagagtagagagaacttgaaaatacgattacccaatccaaaagtacaataaaaaatgaagctcaaagatcaatacgtgaaggtattacaatctctttcgtaatttgcatataatatattcaatatatttatattattttgcttttcatataggattatatatacttgtattattttcatataatattatctaggctaattagtaatttttctccnnnnnnnnngacatgtaccaaatcatgttccctgagctgttaagagggcatgatttagtacatatcaaagtttaaggggcataatttagtagatatcaaagtctagggagcataatttagtacataaacaatcactgaaacagta

SEQ ID NO: 128058 - DNA, 886 bp, Cannabis sativa
aaattagagaaaagtccttaaatccaacaatctcaatatttcagggggcattttcaatgaccttaaaagttcaggagacatgatttggtacatataaagttcagggccaaaaatcataattagccttattattaatatatgtacacgtaattgccttatgttaattagagcatcaccatggagagctacacgtgttttgctaaaatttaaacttttaatttaagcgtttatatattacaatcatgttttactgggactcgaacccaggacctccaacactcacactaaaatttaaaatataaaatatgtgttaaatttagggtaagttaaacattatattaaatttgacacaaaaaaaatattaagccaaattttaacttacaataaaataaacacgttttttttttaattacttctttgtcactcattaataatatttattatttaaaaatatttttatatttataaaatattaaaaaaataaataaataaaattaattattttatatattttcaatgaacaatggttgcttgtttctttaagttattatttgaaacttttgttgttatccaggcataaattgtagctttaatagttacataacttgcgttggattaatctcttactcttggattacctattagttcctttgaattcgacagcttagtattgattttagttttttcaaagagatcttctttttgtaatgagctaggttctttacttgatgatattgttagtttttttgtttaatttttttgagacatctctattttatattcgtcgtacgactaataaagatgcacatgaattagtagtttgtgcattcaagattaggggtgggcatcatccaatccaatccaattgaaccgaaccgatccaatc

SEQ ID NO: 128059 - DNA, 763 bp, Cannabis sativa
acagtaaaaaaagtaaaaaaataaaaaatataaaaaatactatctcacagtcagtatttttatttttataaaaaaataacaaaagttaatataccatataaattttcctaaattaaacccatacaccaaaattctcgtatcgttttcttagtttacatggcatggtagtagacactagttacctgaatttgcatttaagtataggtaatagattacctaaatatccaacacatatgtcaagtttctttaatagtatactatcctcattcatgataacccaaataagctacactgttatgttaccaggttatcctgccctaatagtttatatggttatcctactatgttggtcctagctaggttacctatcctaatagtcaatagtgttagagattatattacaatagacgaaaattaaaatatataaaaataatacaaagactaaaaacagagattgattaataaatatatgttacaatacacatatataccctatatatatcgcatatatatatgaaatgtagaagaaaaagaatatgacacgtgtaatataataatatacgtatatacactcatcataaccttaaaaagtaaattagtggggatcaccatgacttgaacaaggtatcacacttttgtccaaaaacttatttttccatggaactctctctaagaaatagttttgagaattatcgagaaaaaaagataaaaaatattgggaaaaaaaataagaaatagagagagaagagaaaaaaaaaaaaaa

SEQ ID NO: 128060 - DNA, 1506 bp, Cannabis sativa
atccacataattattaatatttataacaaatataaatataacaaaattttttacataaaaaatataatttgatattttatttacaaaaatatttttataaagtgttggtaatatttttacttttaatgagcttttatttactaaaatattacttacacaaactccatgcatgtcatctcaaattgcatcatgtttttcctctttttatttcttattattttctttttattttgagtgttagttttcagtttctctttctttttcattttcagtttttcgttcaaattaaaacccattattctccacgatcaaaacccacgatcatacccatttcgagcaataaccatcttcaacttcttcatacagctgtctacattctcattaactttttttttatattatatctttcatttcgtgtgtataatggctattactcgttcctctgcttctccatctccattgtcaaaaaaagcttccaaaataggtcttaattagttgctaacaagtctaaagggaaacgctcagtgatccatgatgatgactctgctttggtccccccgttgctaaaggtgatcatcgaccagtgaaggagaagtcgaaggtttctttgcctgaaaaaaattccaactttgacgatcagattgaaaagaaagaactagatgtccttcctatggtttgtttgtagtttcattttagttttacccctagccctgaaatttcacttatttttgttttaggttggctttattgctctaatttgattttagggtttagtttttgttgttatttttatgtttatttttatttttattttatattttttcaattatgtaaacatctcaatacatgtaattagtttgtgttttgggtagtttgtgttctgcttttaggtttattgttttatgcatatcaattcacatttttttttttaattttttttctttttgtttattgttgtttttgaatttttatgttcattgttggtattaggcataattcctagcagatatttatagtttgattcttagtagtttgtttgtagtttcgtaatagttgtattatcattgatgcttggatatatttttctcattctactttttcattaccttttttttttttttgctttcaagaatgagaatgcaaattccttgtttctgatcattacaagttgaaagttgtgtctacttgtaattatgaagtgattaggaagctcaatgagagcctttttttagaatgtgaatgccttgtttcggtctacacagtttggtaaacttttagacattccatcttttaaattttaccctcaaattgttcatagaattttgttgagagaggtccaacagtcgaatgccaaggaattttgggtaaatatttgtggtcgttgggtgcgatttagtgttgaggggtaaaataataaatttgtcccttctcggtgtaaatcatctatagatgatcttttattattgtgattagaacgatggttaaattttcatagcacatctatat

SEQ ID NO: 128061 - DNA, 673 bp, Cannabis sativa
gattactctaattaactttcacacaacagtacaccaacactaccactttgatattgcctatgttttaatctaatttcgatattattactagttatttcaacatcaaatttatatattttagtttaataaatcataatgaaattgaatctctagtgtctcttttttctaagggaatgtttttgaaatttgaataacaaacttgcaacattaataaaagaggcgctgagttggataaaagcaaataattagcaaaatgtacaagtggaatcggattgtcttaatgtcgttcatgcaatcaacagcaaagtccatatgttctctccatatggaagcattattaacgactccataacactgctttctgctcttattaatatttttattatttttgttaaattaataatctgcgtataatatggcttatttctttacaagggactcttattctaaaactgattgtacttttagtgggatttctattcctgctaatttatcgtccttattattgaaataacttaattaacaaagattaaaaaaaaaaaaaaaacttgcaacattaattaacaatgatgttgttggacattattatatggctaattaggatttttgccctctgaactttgacatgtaccaaattatgccctctgaacttttaaggccattgaaaatgctc

SEQ ID NO: 128062 - DNA, 808 bp, Cannabis sativa
  modified_base (26)..(50): a, c, t, g, unknown or other
ctctttctctcttcatcttcttcttnnnnnnnnnnnnnnnnnnnnnnnnnttttatattattttataacacaatttaaattgttccttaagtattaacattatgcttgcaatttgaacttattagaaatacaaaagaatataataatagcaagtgtggcttgataaaattatataatactgaaggtaagaacaataattgatgggacatttcctctataagataataagattagtcttcttatagtattagttacatttcaatttcttcaaagtattttgtttatttttttaggatgtctaaaactttatggagacaagatttttataaatagagagtttgaaatagttttgtaaaatttaaataaattaattttaaataatttaaaagtaaatttttatctagatagactttaaagaaatttaaataattttgtgatatatttaaaacaaatttatgattagctttagcttggtaggttgttaattttaaactattttattccattaaaatgttatcaataatgggtcatgtaaagagtcaaaccaaaaaggttttcttttggtaatcgactcttttacaatttttttataatgatttttagggttgaaaattaaaagtacttattagttttaaaatattttgttgcaagttttttttagcagtagtgctactggtaggtttgtgttgggttcaagatgtgggacttctagtagaaaacgtgttttgagacactacaacagttttccttaataccggcggaggcatccgccggtattaataggccagaccgccggtaataattaata

SEQ ID NO: 128063 - DNA, 2337 bp, Cannabis sativa
ggcggaggagtaccctgttcctcctagtattgtcctgacccccattcctgccgatgaggaaagacagaaactctggattgccaagcacaactatgctatggaagagtacacaaaggggaacgcagagggtaggccttgaaaaaggtcctaagggaggcccaggacaattcctcacgcagtgagtacttcaggaacgcctgggatttaaacatggaccccccgacagactggttcaatcgcttcatcgggcctacccttgctccttttgcctcagagttgacaagccacttcgtctccaatctgacccaactcccggccaagagatatgcagcatgtgcttccacgaactcaatctactagattcaggacatcagtgcggccatgaccgcggtaagtctatctattagtattctcgggccttattttttttttggcacctggcctcccatacttacacaatttgcttattttgcatatttctgcagagattggtcgcctctcaaagactctaattgaccatgggtacatcatgtccgagtttggagggatggatgaggccatgaagagtctaagggacttggcagcacagaggaaagctatccgggaggaggctcagcagagggaggctcagatggagcggagtcaccagtaggcgctaaaggccaaggctgaggagctaaaggcaaaggacgatgctctgaagactagggatgaggttgttaccaaggcgaggcgtgatcttagggaagccaaggaggcgatgcaagaactgattgccaagctaaaatctctagaggagatgcaccaggctgacttgaaaacgacagccaacctcaccgttcaggtgaaggagcttcgtgattttagggagcaggcttagaaggaggcggccaaggcgaaaagagatgctcatctggccccagttacctgccagcactgcactaagcgttttgatgacggcatcttcatggcctggcagaccaatggctagaatcttaagcttgacttctatcccaaacctgaagaggtcctcgtccacttctgggagaagaagaaaagacttgatgcactattggaggagcgtaggggccctcgtcttccacccctcattgactaagccggttgttcaccaccactatcattatcaatattttctttattttcttttttttattacatatttaatccttctcccttctcgtagacaattcacttaaattttcttaaggggagacacttaaggcccatccccaggcccctatctttttgaagcttttctttggtatccaaacactttacatttacgtttgaatacatacttagcttttaactttgttaaatttggtctgttttacatttgtccgtgtgacatgctttactacccccttgagtgacatgaaaattaattttaggtcactcagttttacaaactttaaattagaggttacatatacttgtccactacaaatttactttacagaacataaactttatttttcacaactattggtaatactttcggagatgatcgacattccaggccctaggccccatggttccgtccattctttttagcttgtaggtcctgaagccaatttcgtcctcaatttcgtatggtccttcccaattcggcccaagtacccccactccaggttcctgagtagctggaatgacccttcttaggactagatcgccaatagtgacttttctatttttgactttcgagttgaagtgtttagacaccttcttttgataagctgccattcgtatttgagactcatcctggagttcttcaatttgatccagtgcttattgtaataaagccttgtttgttgctggatcgtaagtcgtcctcctatgggatgggaacaacgtttccactgggaccatggcctcacaaccatatgccattaagaaggcgagtggccggttgtggttcttggggtggtccggtaggcccataacactcttggcaattcttcaggccaattacttttgcaggctagcagcttcttttttagggtgacctttaggattttattgatggtttctgcttgtccatttgtttgtggccttgccactacggagaagcttttgatgactccgtgttggttgcagaagtcggtaaattcttcgcagtcaaactgcttcccgttgtctgagactatcttatgaggcaaaccatatccacacactatgtttttgataacaaagtctagtgcctttttagcagttccagtcttcattggctcgacctctgtccattttgtgaagtagtctactgctactatagcatactttacccctccctttcctgttggtagcgacccaataaga

SEQ ID NO: 128064 - DNA, 1200 bp, Cannabis sativa
  modified_base (1154)..(1159): a, c, t, g, unknown or other
ttcttttatgcattttaaattttattccatttcattctattcttattctcattcctattcttaatcctatattttcattcctcccaaccaaatgtcactgttctcatcgtaaattataaatgtatacaatttgcttatcgtcacggtgactatataattacatggtgttaaatcttttatataaagaattatatttattttagaccctaatttgaattttttttttttcaaaaataaataaataatcttaaccctaaaaaaattatatttaaattttaaactaatattttgattaatcttatgttcaaccaaataatttaatttaatatatgataatttaaataaatattcgtatatacacatgtacaactaaatataattataaattttcatataattatattattcgttttatttatttattattttcttaggaaaacttttcattaaagcctcaaatattattctgttcaatattctaattaattaaattattttgaatttttataccaaatgcctagtagaaatattgttataagaagctaatgatacgtttactatacaacaaaaacgaatgttcactataccttattgaagtcatgaccctaatatatatatgtatatatatatatttttatatataatgattatctaattatttttattggtttaacaaaaatatactttaaaaataaaaaaatattctgttaaatttaacaaatattgttaatactacttattttataaatatataaatattaatattattttatataagttttttttcaatttatctttacgatatgaattatataaaactaatattttaattcgatttcattatacataaccaaatagatatagtttggagttcttaccttgctctttaataaatttattatttattattaattaattcaaataataatttttgtttcaaatttagttaaaacaaatatttcttttatattagttgatattattaaagcaaatatagttaaaagttagagattttttaggtggattagtttgtgatgacccaaataataataggtataaagtgatgttagtattttatcatatatagtagccttaatatacttcgtcatgtatattgtgttgttattggatttttattttaccaggatcttagnnnnnntcacaagtatgttgtttaaacaccttaaatatgaactttct

SEQ ID NO: 128065 - DNA, 1653 bp, Cannabis sativa
  modified_base (556)..(561): a, c, t, g, unknown or other
aggagtttgctaagttcttggaaattttcagaagaatcaacatcaacattcattttattgatgcattagagtagatccccaattatgttaagtttatgaaggaggtgttgacaaagaagaagagatttggggattatgaaactgtgagcttaactgaggaatgtagtgccataattaagaaaaagttgcctcaaaagcttaaagatccagatagctttttaattccttgtgagattagtaatttaaaatttgagaagtcttcatgtgaccttggggctagtataaatttaatgccactttcgatattttaaaagctggatattggtgaagcaaagcccatgtaataccctacaattatgagatttgattagcaaaaccctaattagataattatgaaatatggaggaattatattattatataatataatatatgagaatttatatgatttatactatgttaagaccccgttggtcagctaggggcattttagtaattttgacctgataaggataaaacaatgaaattaatttattaacgtgcttatgggactatnnnnnnatatagtatgcctgtgttatctttttcaagtgtgttctgacaggttggcgcggtatagtcacaactgggtatttcgggctgaattgggttcgggcccgaaatgcaatattggattgaaatattggcattatagttatgtgtgagaaatctaaaaatttatgtttatttatgtgtgaattgacattaatgcccttgtatgagtttggaggtgttatttggccctaggggcaaaatggacttttggacccttattttacaattgataaaagatgagttttcagaacataaaatagaattttctggctttagttcccctcatacccgacccctctctctctcttaaactttcttgcttttcaattttgattgttgggtgaaattgcttggatttggccaaaattgaagcttgttgtgggtggatctttgagcttgcttttggtgtaattttgaggtagttttacagctttgattttaagttattgttgctgaattttattgattaaaagcgtgaaataaatggagttgattttaggatgcatgttagagatcatttgttgatttgagcatgatattacttgagtctttggaatttatgtatgattgagccttggatgaattctagggtattcttctagtgaaattcttggctgtaaatatagtttgtttgttaaaaattgatgatttgagctagcttgtaagttctagctcaagagcttgaaattggggtttaagtaattaatatgcaatctgaaattgaggtttgatattgaaatttaatgcatgaaatgtttctcttagctacctgtatggttattataaagtctatggggtgatttgatggtttggttgtgaaatgggatgttttaattgagctttgggggctgaaattcgtgttcttgttgctggttttctcggtttgaaacccaggttccgcagcatggttttatcatgtcgcggcccacccctttttgtggaacctgggaattggttccaggtgtcgcaacatggattttgcatgtcgcggcccgccctctattggaaatattttaccaagatctatatttactaccatgtatgtttcattaacatcct

SEQ ID NO: 128066 - DNA, 943 bp, Cannabis sativa
  modified_base (890)..(918): a, c, t, g, unknown or other
gaagtggaacaattgaaacggtatggtggaacggtataaaaccctattaattaaaacaacgtcaaattcttaattaaaatgaaaacaacggttcctgatgcaaaaaattctattttaattcaattaataatttaattattttttaaccactcgtaatatgtaatactcaaagttaatatatatttccattaaaaaaagtttatatactgaaaaattaaatttatccaaaaactaatttgaatgattctaagtttaaaacttaagtattaaaattgaatgtaaatcaagaacacaaaaagtttacaagtttacccttatattggaaacaaattctaactaagtattgattggggtcccttaaatcaaataaagtaaccttcactatgacatcaattggaatacaatctccaatcctaattacaaatcaaactaagaaaattgaagaaaattcatacaaaacttatagatatttacaatcaagtacaaagatctaagtcttcttagatcgatgaaggcaacacccctttgcttcaattcagttgaaatccctttggcagtttcatctgaactccctttagcagttttatctacactctcttcagacaatacagataaatatttattcttcagttcatgacactactagaaatgtcacttttggtagcacatttttgtgctggcaaaagtttggtattacgctggtaaaatacaatttacttttgatgtgttggcaaacggggttggcaaatcaatattagtattagaacttttgccagcacaaaatgaaaagtgctggcaaaaatgacttttcccagcgcataaatgccctggtaaaagttagactttagccattgcaaatgtgcgtcggtaatgttggaaattattttacnnnnnnnnnnnnnnnnnnnnnnnnnnnnnttattaacatcctaaataagaactt

SEQ ID NO: 128067 - DNA, 722 bp, Cannabis sativa
ggtgaccatcgagtgagtgttgttgtttcgggcaggtggggagttgttggtaacactctgagatgactcagacctgttagcaggaagagggtagggaagagaagagtctgttgagaggctgtgactcgagctatattgatcagtatgagggctgtttgagggagagatagcttgtggtggtgactgagatgcagatgttgtgttgtttgaagcctgtatagatggagattgatttgtggggggagtgggaggagtgatagactgaatgttgtgagagttgggtacagtaaagcagtctgtgttgataaaaacaggtgtagtttgaggagaggttgacacagaaaatagctcattatagggaaattcagcttcattaaaattgacactcctggcaacatagacacggccacttggatgcaagcatcagtatcctttttgtgtattattgtaactcaaaaatagacatttgcttgatctaaaagcaaccttgtgtgtgttgtaaggtgttaacaaaggaaaacaaccacaaccgaaaactttgagaagagagtagtctggttttttattgtacagtttttcaaaagaggaaacattgttgagcatgggggtagggagtctattgataagataggcggcagaggtataagctgttggattttgtgccctaaataaaagccatttcaatataatcagatttacttgttaataaagatcagaaataa

SEQ ID NO: 128068 - DNA, 787 bp, Cannabis sativa
ttgagaccaattaaaattctattgagaaaaaatgtaatctttttaaaaacagagaaaaaaaaaatgatagtgaagagtgacaaagtaaacaaaaaaaagtgatgagaaaaatttaggtatagtatatgtagtatctatttatatatacgtattgtttaaaaaatcaaaattttaattttaatttttgaaatacataattttgttaaataaatatttttttaccccagctttgtgcgctatctgttataaaatttaaatttaaattccaaaattttaaattgtatgtttatcattattaatcttttagtatattttaagttaatgttggttattatacgttttttatttactttggataaattagattcaatattcataaatttactgttattctatgactaaaatgttctaaatttatcgttttagttatttttaggtataattcaatttaaaatagattaacacatataataggccagttagattttttttttaaaaaaaaaagatttttagagatatttgtataggcatatttttcttttgagtaaaagagatatttgtatattcgagaccttcagggcgagatgaatgctactgctactcaccatcgcacaggcctcttttcagttgttctagctgaagggttggccattcagttggggctgcaattggcttaccaacttcaacttcactcgtgcattcttcaattcgactaccaatgagtgactctctacttacagcagaagctccgactgtatgaccaatccatagttctaagggtgtctta

SEQ ID NO: 128069 - DNA, 592 bp, Cannabis sativa
  modified_base (517)..(538): a, c, t, g, unknown or other
ttgatatttaagtttaaatattaaaaaaaatattttatttttgaaattagggtttgaaaattgaaaaatccgaaattgggtgaaaaatcactcaaaaattatatttgggtgaaaaatcacccatgtgtgcaccaagaggttgtatgcagccatttacgcatgcgtacaaggggttcagtgggctgatccgcgagcggaagaccctgctagcagggtgatgtgcgtgcgtgtcccctgttcgagatgccgagctgaccgagttcaaataagatttttctgaagcatccgcgcgcgcagtctcgtcttgtccgggtgcctgcgcgtgtgatgctcgacccttgacactcaatagacctcaatttttaaaacatcataacttcctcaatttttaacgaaatcgagttccgtaaaaacgaaagttgcttaaattttcacaagaaatccaaatataatatttttcaaaacgaaaataaaattattttcgcgaaaaatttcataaatcacatacattcatcannnnnnnnnnnnnnnnnnnnnnacacatccaaatcaacacaaaaacaatattcatcgttttgaatccatatttcat

SEQ ID NO: 128070 - DNA, 1846 bp, Cannabis sativa
ccacaacatgcgccaccacttgaccagcacttggccaacttgtgggtatcacttatcttgtaacgtgccatcttggcatgcacgttacatctggcaatgccaaaaagcggcatacagtttttagaagtagcactgaagttatgttcataattcttgcccaagttgaatctacatggctaaactctctgcttattgagcttcaccttactctctctgctgctctaattttctagtgtgacaatcttaatacagttacactcacaacgaatcctgtccttcatgcctgcatcaaacacattgaactcgtcctatattttatttgtgagaaaattcttcagtgtcttgttcaagtcaagcgcatcccatattttgatcaaatacactactaaaaaaactagtattcccgacggtcctaaagaaatttttttggggggaccgtcattaaaaaaattaagtgagtgtttaaaaccgtcaggaaaaattaggtattcctgacggttttaaacactcatgatgtattcctgacagtttttaagcgtgccttaaaaattgtaattaaaaggaaattgttgacaattaaagatcgtagcctatactataggcgacgattttaaaccgtgacttatagtataggctacggtttaaaaccgttgcctatagtattattctcaatagtttttaaatgtgacttaaaaattgcaaattttttttaaaggaaaattattaacagttaaaaatcgtgacctataattgcgaattaccaaagcgatctcgagtcaacaatttttagaagcaaacttacaattggtcccaactccaattgaaagtttaagagggcgtattaggagaaatcattttgttaatgctgatatgagagttgattagtgctagttggtgagctgtcactttttattcttgattagttagtttcttcaacgtctaatccatgtatatgaactctctctactttttctttctctcttgatcttctctctttcttcaagttatggctaagggattcagtaactgcaatatgctaagttacaatgataagagtatctccaatgaagatacaaataaataatgtaaatataaaatattgttcattttattaaaaatcttcttcaatggtatgctaaattatgattcaaaaatcacacataattaaaagtaatccaaatttacatcacaatctagtataatgcaaaatttgcatcacaataaaagttatacttttataattgctattatgtcttttttaatattttattattaatttttaactaacatactcctttacattaaatgacttgtattattattattaaattaaatgggataattgtggcaaaagtccccaaaaacttagagttgctgcagattagtccccaacctcaaaaattggcggtaatagttcccaaggtcgcattttctgtaagtccgttggtcccttttctaacagatctgttaaactcaaataaaataccacgtgtcaattttttattgatccaaattatatttttaattttttttgaaacaattatatttttaatttaaaataattaaaaaaaactaaacaatttttttttttttctttttttcttttatcttcttcttcttgtaaatgcccagaaaatcaccctaacaagccaacccaaaacccagcaccaactctgaccctcgccgagctcaaaacccagtgcaccgtccacccctttagttcatcttctccattcacgacacaagctaacaaaaattaaaagaattatacaaaccaaccttagtagcagatctggtagctaacaaaaatcacaataccatagagtttatggtattgttggacctg

SEQ ID NO: 128071 - DNA, 563 bp, Cannabis sativa
  modified_base (26)..(38): a, c, t, g, unknown or other
ataaaatgatttctgatctttattannnnnnnnnnnnnattatattgaaattggttttatttagggcacaaaacccaacagttttgacggttacacttgattatactttattcccgatatctatttttgggggaaccgaggtgtctgaagcgtttgacatgattaccctttttcatttttctgcttataaatagggttgtacatccttcacaaattaacttttaccaacttctctatttagtaagctcaaagcaaagaaggtagttttcgctttaagtctgtcgtgagatttccaccctaagtatccgagcagcttcgttgaaccaaactcagatgtcaaatcaaccagttagttttcaattctttcctcttatattttgcatgcttaatttctgggttccttacatgcgttcttgactttcttgtagaggataagaagaaaatctaggtttaaaactttacgactttctttgtaatgatctgtgaagcttcgtgattgatgacgtttagccttttatcgcacattgtctgcctttcaccttgcttattcaaagcttcgtgaa

SEQ ID NO: 128072 - DNA, 2424 bp, Cannabis sativa
  modified_base (400)..(414): a, c, t, g, unknown or other
  modified_base (688)..(689): a, c, t, g, unknown or other
  modified_base (1806)..(1806): a, c, t, g, unknown or other
acaatatagaaaataatgttcaaagagtctatttaacatgcgtataaaataaaatagtcacgcgtgcaacatactgtttgaacgcaattttcgccgtgttaaactttttctaaatttttaaaatttttgcatggtactttaaataactgtaatttacatgatcattagaaaaaaatttaactaaaaattatttcggatactaaagtggatagagatacatcagtgcatcccttttaagggggtacgttatagaatttcctaaatcattttatttttaatctcaaatttttctaaaactccccatttaaaactaaaataacacattttaaatgagactttttcaagaaaccatgtagaaataataattaaaaaatccactgtataataataataataatannnnnnnnnnnnnnnataataataataataataactattttatcttttacaatatatatatattataattaaatttttatacaaatcttcaatttcataaaatcatattttaattttatccatattaaagttcctcattcataattttttttttaaagagaattcgaaatattacaaaaatgagaatctaataataaataaaaaaatacattaattagttaaataataacattaactaaatgttatatatcattagtattataataacaatttttttttcaaaaaaaannataataataataataacaattttaaaatatcataattactctataatttataatattttaaatatgtcaataaatattattttacatgacatttactaaaaaaatgtcattaattatattcaataattcttgttaacgacattttgaaaagtatgtcatcttaattaatattcaataacataagaatgcgaatgtcataaataatttgtcgtgaaaagtactttctgttgtacctaccgaaggctagtcaacaagatgttcaaagactaaaatgaacgtaatatgaaagtatatgcggataacatgctcgtcaaattcagaaaggctagggggcacatagaagatctaggcaaatacttcaaaatcgtcacaaaatactacatcaaagacaatcccttaaagtgttcctttgggtcagctcgggtaagtttgttggtttcgttgttaatgctcgaggagtagaagcaaatttagaaaaattcaagtctttctggatatgaagtcgccaacaaaggtaaaataagttcaaagtcttactggtcagatagccacactaagcagattgtgtgaaagttgaaagaaaagtgtgttcctttcttcaacatccttcgaggtagcaagaaatttaagtggatagaggaatgcggaaatgcattccaatagctaaagaagtaactcacacaacctcctattttatcaaaacctctagagggagaagagctaggaatctaccaagcagtaactgaacatgtactaatacaaaagtcaaaatttacgacgctgctaaaaatgctttttttggggcaccgtcgacgctaaaaaaattaagtaactgtttaaaactatttggaaaaattgctattcttgacggtttataacaataattacaggaataggcaactgtttcaattggaattcgtaaaatttatttggcccttataggtgacggtttaaaatcgtctcctatagtataggcgacagtttaaaatcgttgcctatagtataggcaaaggttttaaaccgtcgggtataagaccccaataaaaaatcgttacctacttctcgccacatttcccacgtgcccacctatttcttttctatttcccacatgcccacntatttcttctccatttcccacaccctaaaatgaaaatcttaactatccaaaaccccacccacgcatctacaccatcgccctcctctcatgttctccctttcttcttgtctctctttcttctcatctctctcatccatcgatctctacccacccctcctcccatcggtcttcctctcctccccgttgcatacgttatacaaccaccacctcccatcggtgtccctctcatctccgtcccatacgtcggaccaccaccacctcctgttcgtgtctctctctctctctctttctctctctccgagcttggtataaatacatttattcatttatatactttttttatttattatatatctttattttgttattttgtaaatttcatgtgttttaaaattagttgttattgtaataaaattaattagttattttatttttgtttaggtaaaattataaaactaaagcaggaaaaaaatgggggaaaatacatgtattttattatctttttcttacatccacgacggtttaaaactgtaacgccctaaataattcggcacgcttcccaataaacttatgaaaccctaatcccctaatttgggattactagaaaaataaccgcag

SEQ ID NO: 128073 - DNA, 1382 bp, Cannabis sativa
  modified_base (41)..(52): a, c, t, g, unknown or other
gttcatatttagggtgttaataacatacttgtgagtagatnnnnnnnnnnnntaaaataatttccaacagttctaccctaaggccattactcccaaccatggaagggtgactaaggttgcagagcttcttctagacagcggggattgggacattcctaaacttcgaaccctctttgattcgaaaactatttgtaacatcattaaaggggggagacctagttgccttggtaaagataagtgggtttggacaaaagagtcaaatggtcaatttactacaaagtttgcttacctaatccaggctttagagagatccccagattgtgttgttgcccctgcactgtggaacaaactctggaactcaaaaattttggagaggcataaagtactatgggggcgcattctttctgatgcactgcctattcgtacacttctagctcagagaatgagtattgaggagatctcttgccctctttgtggggcaggtgaggaatcgatggagcatcttttcctatattgtaacttcgcgtaccatctttggagatcttccccttggggagtttatccggtgtttgattctggtgcctgtatttgggattgggttacttttatctggaacatgaagtctaaaggagtgaatactgacaagttattcttgtatgcttcgattgtagtggatacgatttggatgacccgcaatgaaaaggtacataataattcctcgggtaacataaagcatgttattgattctatctccttttgttgcatagattacgagtcttgcttgtttgaactagcagtggttgtggtgtctcatgtttggtcccctcctctagtgggctggataaagatcaactgtgatgttaaggtcagcgcaattccacgtgtgtgacggctttggcaagggatcatacaaggatagttttatgggtaacagctaattttctagacttcgtggatcctttgattggtgaagcggcggtgtgtcggttggctttggaatcgatagtgttgaagaagcacctttttgttctgattgcgagtgattcgaaaaatgttattaatgctctgagggaaaaatattccatttggaattcaaataattatatttttatttgtaatcaactctctaatcaatttttaagctgtaatttttcctttatttctagatgttgtaattttgcggcacatattgtgactagattgaccttttctcagaacatttcaggtatggttgtgatctcctccatccctgactatctctttttatgagttagatttctccttctaattaaccctaagaaaaaaaaatcatttttggtcggtttattacaaaaaaaaaaaacgactgtttaatggcggttttaactgttagcggttttttc

SEQ ID NO: 128074 - DNA, 2250 bp, Cannabis sativa
acgtaaaaatccttctctcactttcttacagctcaatattataatcatattttagtagttgccgaaaatctcggtcaacaatattaataaggagttttttttttatttattattattattatttttgtatttttacggaattctacacagaaatccctattgcaactagcgctgcaacctaaatcgcaacaaaaaacgtatagcaacccacatagaaatcactttagaaacccaaaccataaatttttttaaaaaaaaaattaaaaaaatagtaaataggataattcccctattaataactaatgatttacttaattaatttataataaaataatttgcttatatgtaaaagtgaatacttatcaattattgtttgatttattttatgtacatggcaaatttactgaaaagaatattaatgataactacaaataaaatatggtaatgatattaattttaaaatatgtttaaaaattggatttttgtgataaaaagaaaaagtaaaaaatgaaaaataataaagttttattatttatgtggaatttcctaaaaatgtaaaaaaaaaaaaaattaattcaaatgtaaaaataaaaaaattcctttatattattaaaataatttaatattaacttatataaaaaaatataattaaagcaataacaataaaaataattttttattttaattatttaactaaaaaaaatagaaattattatagaaataaaagtgaaaagaaaatcaaagagagaaagcctaaatcctatcccttcggcaatttccattggcttctctctctcccacaattttaagcaaagcttcgacctgagaactgagtagttggaatcttatctatccaccctttctcattctacactaagaaatttcttattcatctctgattttatcacttcatcatcctattcttttttgttctttttttaatcgaaatgttatatgtggtgattaggatgccacgtgtcatgaccccaaacattaggataactcaaactcatcaccactaaccaaaccaaaactgaaaaaagaaattatggaactaacatccttgcttccaagcccaaaatcattattcatgaaccaaacttggtgtagaaaagaaagccttgaaccacccattactacaccaccaaccatttcagaaatcctagagacctcacgagctcaaaaattggaccttaggctgcaaactgttggacccttttttagagtcacagccaagagcttagaaactaataatgagttgggtaaggctgaaggaattataagggtgtggtttggagggagaattcttcatttggattctattagacttaataaagagactcttgggatggagaagtctatatttggaattggtttgtttattggagctgttgctattcgatatgggtatgattgtggttgtaagaaggctgagttgctagctatcaatgattccgagctttaccataaaaaggtatgctttcctttgctttgctttgctcttcttcattaataatgtgtatctatgttattttatacgtattgggataattgctaaagaggagactttgttattattgtggatatttaccgtgaaacttcattaaaatttgtaaaaagtggtgtcataaaattaagattttgttggagttgtacttttactaatttataaaaattattaattggaccatctgttttgttaaatgataaaatggatcttatattttctaaaatggtaaaaataggatcttaaaatcaattttttaataattttattttttttaatataactaactttaagataatttttaacaggaattgatacaaaaaatgtaaccagatgtgtcataacatctctaaatcatattattattacgttttattttgacaaaaaatcaattcagatttctatttatacaattttagaaaatacaagatccattttttcatttagtaaaacagagagtctaattagtaacttttgcaaaacacagggtctaaaatagtgtatttaccctatttttttttttttttgttgttaagtgctagtttagaaatacttggcgacatatttctttagcttatttaatacatggtccaataacatgtcgtcatgcgtttttgagttgacacttaatagttaaaaaaggatacaactgcaacaaaatcataaaataaaatacttttgccgttatttttttttattaagatcatatgtgtaacaattattgttgtggacattgtcccaca

SEQ ID NO: 128075 - DNA, 772 bp, Cannabis sativa
gggagttagagtctaaaatgaggattcaatatccagagttattcaggttagatttcggggataaaatccttttaacagtgggataattgtaatgaccattaaacttagacatgggattagtgggacacttagcactaattaatctgactatgtgattatttatgcattttatgctttatagaccctattttcatgaaaatatgtgttatgattattatttctgaatcttagagatttaattgaattataggagtgatatgcatgctatatgtgaatttttatatttttacatttttatgcccgataacagtgaaaatgggtcagatgataattttagtcacatgatataaatttgtatcaagtattttatgggacaatatcattagatattttagaataccgagatttaacaaaataatggaattggataattttatcctagggttacgagataacttagcaaggaagtaaaagtattttagtctttttgccataggtgattagtcactcttttggaagagataggtgtctatggctcatccttttgaggatgactagctgcttaggaagcaaacaaaaaggaaaaacaaagttaaaaggaaccaaaaacaaaaaccaatgtcgaaagcaaaaggaaagtaaaaaaaaataccaaatcagcttctccttctctctctccattgtggcttctgaaccagggctaaaaaaaaaacgattctaccattttcaagcatatttcttcctgaatttgatcaaggagttcaacccctag

SEQ ID NO: 128076 - DNA, 2331 bp, Cannabis sativa
  modified_base (155)..(162): a, c, t, g, unknown or other
  modified_base (2277)..(2287): a, c, t, g, unknown or other
gagtatcgaaagagaagagtatgtttagtgtatactagataaaatttcactgacaaataatattaggttcgtaggggtttaggtattggattatgtatatatatatataattttatatttgaaactatttgatatatttaaaatttaaaatttannnnnnnnagatatatatttttaaataaatatcattgtataaatatcaaaatatcaaaatattaacttttctgaatttaaaatatagattttttttacgtaataaaatatatctttttaatttatatatctgttttaaaacttttaaaagaagttcagaatcagattattattatttttttaatcaaaattaaaataatttataattttaatatattgattaaatataaaaatgaatttaattaattagttatttaaaaaaaaaaatattaaaacttatgatgtatatatttataaggttctccttaattaggtgagagcattacttttgctctcacctatgatagtatttttattttatccttttgaaaaaattgttatttagttatattaatattattttaattttagtctgtacgatattatttaatttttaatgattttggtcattgcttgtaaaaaaaacatattattttaatttttttttttaaaaaataaattgactatcatacacgtatgaagtggcattgtataagagaaaaaaaacaaagacaaacaagttagtcatcattattggaaataatttaaatagggagtcaagttaaaataatttttgttggaaatatttttttttttttttgaaatattttgtaggaaataatatgaaaagggagtcaggtagaatattaatttaaataatttttatgaagatttttaggaaataatgaaataaaaaaaaataactacgttcttatatattaaagtgctaaaaacgtgtgtatcattaaaattggttatagtaataaaaaaaaaaacaaagtatatcattttttagaaagaaaaaaaaataatattatgcctagaatataggagaattaaaaataaataataaaaattctatatataataccttataataatcaaataaactacaataaattattactatcacattaattaaatcaaaggtttaaattatgggtgagagcaaaagtgatgatgctctcacctaagaattttcctatatttatatatatatactcttatgctatcatatagttagttttttctccaactcacactacaaaaaatctcaattttagtcataataaaatttatgattaaaaataaaaatattgtgactaattataaataattatttttatgttgtgactaaaaaattcggggctaaaaataatagtcataaaaattacaatttattgtgactaagtgtatttttagtcacagtacttattgtgaccaaaattaaattagtgacaatttgtatataaatactatattttagtcacaagtaactttttgttgtgattaaaaatcacatttaatcacaaaaaatttatgttatgactaaaaagttatcactaaaaataactgtatttgtagtatcaaacttgcatggaaaaaaatattataattaattatgtaaagtaggggtgtgaagctagtaatgattgcttaactaataaggatcaaaacatgattgaattggaatgcaaaacagtttctcttcagcaactaatgcgatggatctctagagcaaaattgtgcaaattttagaaattttatttctcggctggtttagcttccttaatatactatatttagaaggcaagaaatgaaatgttttggtgccaaaagtaataaaggtagatacaatggtgaagatgataatagatagtgtcaaaatgaggatgttatgtgtaaggcttaaaaaagattgtaagaaagatatgaaataatttgaggcattatagttttatttgggtacacattcaaatacaaatgtatagatgtttttgttcaagtttcttcaaaaaaggagacaatgtagagttgtaaaggttgtttggatggaatacaattttttgattcctccgaaaaagtagagagtgtgaatgtttgatacattggcctagctagtattataaccagaattagtatcttatgtggtgattgttaaagtttatcctagatatgataaagaagatgacagaaaagaatagagagaaagatcaaaatctgaaagatatgattcattacgatattgagctcaatgagcatcgtctatatacattgcaatgagagagagagagagtgagagannnnnnnnnnnagagaaagaaagagagagagagatagttacagtaacaaactaac

SEQ ID NO: 128077 - DNA, 1154 bp, Cannabis sativa
tagatgtccattaataaaattgaatggacgtctaaaattcaacaatcttaatagttccgaggatattttaacggcctgaaaagttttagaaacacggtgggtgaaggaaaatcctaattagcctttaaaaaatgggcaaaaggaaaaaccatatataatcataaaaagtgaaagctgagacatttagaacaagcttgaatgaatacacacagaaaagtgtctttgtttaagatagggcctattgtcatcactatgccacccaatgcttgctcctctgctccaactgaaagcacatagttttttattaccatcatcacatcacatcacatagcaaacagtccaaacaatagaaaaagaaaaagaaacctgatcaaaccggtgaactcaacaaagagttcatattcacagccgaagaactcctctactttttcctttagcctctcttcactcatcatcgtcatcataatggtatttgaagttgttaaacataaaaaacaatgaaaaaggagaagtgggtagtgatgaatagttattcatacctctaatgggaatgaagggtgtgagaaaatggggagagttggtggcgatgagatgagaaagagtggtggagaagacgttgggtctgtaacccactgtgctgcaactcttgtgaatgaattcaagttcattgcattgattgggggaaaggaaattgttgaggatcagtcgagattgctgggcctcctccgcctcggggtctttcccttcgtcgaccaccatagccaataggatactacgcaaaataaagattcaatttttttctttgtactgatccaaagattctttttttattcattgcaatacttgtatcatgttttgtactgatcaaaagttttacaaaaattatcaaaatcaaaattttatttttattatttaaaaaatcaaaatcaagttaaaaataaatttttgattttgataatttttcttttagaaaaaaaaaagtaattagacaataatttttattttaacaaaaaaatcaatttaaaatcttattagtatcattttaaaaaatacaaaaattattgggaaaaaaacaggaatattcttaaaagggaaaaatattacaacaatactgtgggccggcccaatgaacatttgtacagcccaacagtaaa

SEQ ID NO: 128078 - DNA, 1464 bp, Cannabis sativa
tgttttctaaactaatagattacgagaaataactttgtaaaagcacacacgtggcgtccctgagggtcagggcgttacactcttggtaaagaccttagcagtgccatcttggatgttttcaataatcactctaacttttcccaaatcaatgataccattttgaccttaatccccaagaacaaaaacgcctccacaatctgtgactataggcctattagccttcgttcaacactttataagatcctatccaagctctggctaataggatgaaaaccatccttcactctatcttttccccaaactagtgtgctttcctctctgactgacttatttttgataatatcttcattgccaatgagcttatcaatgcaatccactataggaaagctggaaaacaaggcagggttgctatcaaacttaacatggagaaggcctttgacaaagtttaatggagttttgtaaaagttattcttaaccatgttggtttcccaccctcttttacctcgctggttatgcaatgcctctcaactactgtgtaccgtatatctattaatggcactctattcacaagtatttctcctactagaggtataagacaaggtgatcctctatcaccttaccttttcatacttgttgatgagggtctcactgccactattcgggctaaggagcaaatcaaacactagactggcattaaaatttgtagagatgcccccattatctctcacctcctgtttgctgatgacaatattctcttcactcttgttacccgtgattccaatacttccataaaagatatattgctttcttaccacaaagccactggccaaactatcaatcttgctaaatcttcaatcatgttctcccctaacacctcccatgaatcccaatatttttttagaacctcccttggtttaggcagtgaaggtttcataagcaaatatcttggagttctccattgtactggcagaatttccaactctcatatccattacttggttcaaaaagtggcctcaaaattaaacatttggaatggaaaaattttctctagagctggcaaagaaactctcatcaaagctgtaattcatgctataccctcatacgctatgtcctgtttcaaactacccacttctacctgccttactattcaaaaagccatatctgaattctggtggggttcttgcactaataagagtaaaattcattggaaaaaatggccctccttatgcacatcaaaattccacggtggactaggttttaggtctcttcacaatcccaatcaagcacttattgccaagcaagcttggagaatctggtctaacccctcatcactcctatacactctccttaaagctaggtatttcaaaaatagcgacttcctcactgccccaaaaggccattgcccctcaaatacctagaaaagcccctcaaatacacaaccatggagctgccaaagtgccacct

SEQ ID NO: 128079 - DNA, 1095 bp, Cannabis sativa
  modified_base (266)..(269): a, c, t, g, unknown or other
ttcctcgcaggatgttaaagaacggaacacactcgtctgttgactttgaaacaaatctactgagtgcggcgatccgaccagttaaactttgaacttccttattttttgtaggcgatttcatacacaggtgggcttgaattttctctggattggcttcaattcctcaggcattaactataaagcctagaaacttacccgagcttactccataggagcactttaggggattgagtttcatgttgtatttcttgaggactttgaagcannnntccaggtcatctatatgcccccagccttcttggatttgacgagcatgtcatacacgtatacttccatatttcgttcgatctggtctttgaacattttatttaccaatctttggcatgtagctccagtattcttgagaccaaatggcatactttataacagtatagacccatatctgttcggaaagttttatgttcttggtccgatggctgcatcttgatttgattgtaccccgaataggcatccacgaagtttaatatctcgtgtcatgttgttccatccacgagttgatctagtcttcaaaatggaaagcagtcctttgggcatgccttactgagattggtgaagtcgatacatactcaccattttttgttcggcttgggcactagtacgggattaccaacccaggtcatgtagaaagcttcaattatgaagttgttgttacacagcttttttacctcttcttttaaggctagggcccgttctttatctaacagtcttcttttttgttgaacgggccagaaattaggatcaatattcaaggtgtgtgaaattatagaaggatcgattccaaccatgtcctcatgtgaccatgcaaaaatgtccagatttgctcttagaaattttatcaaatgctgattttacttcgaggagaaaaccttttctagttttgagtttcctggtcagaacgtttgggtcgattccaatctcctctagttcttccactgacctaacctttatatttggttccccaagttggggatccacatcttcgtcccacccttgggcggttccctatttggcaatgtcttttcccttgttcgaact

SEQ ID NO: 128080 - DNA, 2112 bp, Cannabis sativa
  modified_base (1797)..(1798): a, c, t, g, unknown or other
ttcttttggacaactggcctctcctcaatcagcacaaccaccttctgcaaaatttgtaagtgattgttttcattaggctcggttagattaatccttgtcttttcattctaagtttttttactaagcttttattttctatagccctctcgaaaagacccgtcactagtcctgagatggtcaaccgacacaagctcctgctgactcttccccacagccttaggtcgtgtgacttccttctaaacgaggccaatctgagatctgtgggcctccttactgacatggagtttacttgtgattataaatttcccaagtattcttcttggtagcaggttcccattccagagggggataaggcgtaggatcgcgtggctcaggcacaataccttcaaaacactgtccctcgggaagccagtgaaggagcaactcgaggtaatcaatgtggttggtcacctacaatacttagggctgagtgtaacacattagttactttccgagatagacaccttaatttttatatttggaattcccttctcgtaaaccgaattgctcataggtttgacagttggtaccctagattctacgtttagataaactgtaatgagtcgtattatggtatagccgagcaatatggcaccatgacagatagggcaagtcatgtagacatgagctgggatttaaaaccaatcaagccatttgatatattcaagattacaggctgtagggattttaacggatattacgattcttctacccccctctagagatatctcaccttctagtagttttggtaaatttcttaggtggaaaattacactctacactcccctttcatttgtctttaaataattgtaatactttattttgcctcgcagacatgcgttatgaggatgttatggaccagaaagggaagaaaagtggaaccaactcagggtttcttacagataccgaggtggagccttctaaaaggcgaaagaaaaccactgcccacaaaaagaagaaagtgtaaagaccgcttgtgattaatattttggaatattaaataattagggtttatgcatgagatttaattatcatttataaaaggcatattgtggaaatatatttaagtatatatatgtttagtatgctattttatgtaaatttcttaatgtttgtgattgtgctcggaagcggtggaaggtgatgttgggcctttagagagtcacattttatttattttagaacattagtattagcgggctatcgttgttaggttctggaataccgggtttagacgggatttgctaatgaccaaactatccttggtattgttttaacctatagctttattagaagggtaattaagtcttttcctatttaagactcttttggcttgtagtgaactttaaaagctgtcattttcttagcttagtaatttaggaaaatataataataatagtatagttaagttaaggaaagaaaaggaagaaggtgggaatagagaacctagaagcttcattctctctctctttttcgtgcaactcaaagaacaagcaaggaaagggatttttgttgctagaattttagtattttaacaagaataagaagattcaatctaaggtattcactcctagcttttcctctttgattttattaagcataagttaggttttgaagcttgattttgggaattttggtgttgtggttataattattgtttaaattgaagttttgaagcttaattatggttacttgagttgttttttgttatttttgtggattgtagtgaggttttggcaaggtttgagtttgagaacnnaaaccttgacctctaatggtgtttttgaatttggtgtgaatggttgagttctgttgcttgatttgggattgttagagtgtttacaggtatactggagagtattagaaggtttgggattgatttgagatataaggtttgatttttgggttcccagcacaaagccggttgaccggttctgggagatcattagaaccggtcgaccgtacccaaaaactgcgatttcggttgggaaccggtctgccggttggggctttttctgaaaccctagtttttcccatttttacgtaatttagggtgttagcatcctatttatc

SEQ ID NO: 128081 - DNA, 577 bp, Cannabis sativa
ataacatcttgcaaaattttgagatatttaaaatgatttatagtagcaaaatcaaacaatttgttggatgtgtatggtgtgtgaaataaattgtttttaaactctttttttttttttgtaaattatttaaaaaatttcaaataaaaaattgcaataaaaacttagaattataactatttagacacaaaagaaaagaatgcatttacacaccccttttcgaggttgcactcaactaataaaatatttttattagagtgcctttaaccatactaaacacactaaaaaaatgagctctaacatagaatagctctctcaaatagatggatagagagcccccatttttttccaaaacatttttaatactatttataaaaaaggaatattactttttttgtttttatcatttcattaaatcaatctatatttaataaatttaaatttttaaaatattattaaactaatcaattctaactaaagtaaggagcctgagattaaaaaaagtcaattatcaaaaaacaagtgaattttcacattttatggtttttatacaatttgtgtaaaaatatggatttttttt

SEQ ID NO: 128082 - DNA, 541 bp, Cannabis sativa
  modified_base (511)..(515): a, c, t, g, unknown or other
tttataaaaatacagtatttttgtaaagatttccgtgtgatagtatttttgtaaaaattaacccaaatttcaatatttttgtaagtttcctgtatatattggtcatttcttcaaagaaaataagtttattttattttaaagtaaatgggccaactttaacaatagctcagttcatcctacctttacctttgaatcgggccttactagaacgacatttggacatagtttaatttgtgtataaatttttaaagaaaattttaaaacgagcccaccttagtgagggctcagctcatcctaccattgagtcaggtctcactagaacaacacttggacatagttttaatttgcgtgtaattttttaaaaaagtttaaaaatgggctcaccttagcgatggcccaactcatctaacccttgagtcgggctctcactagaacgtcacttggacatagtttaatttgggggtaagttgaaaaatgcctcttttattcatcaattaatcaaatttacctnnnnntttatatttatttgaaacatacctct

SEQ ID NO: 128083 - DNA, 1851 bp, Cannabis sativa
  modified_base (1690)..(1693): a, c, t, g, unknown or other
ttttttttattttgccaaatacttttaagcaataactttctcaaaaagtacttttaacttttaaaaaagccactttaaagacttagcattttatattatttacatttataatctaaaatacctaatttattaaataattagtaagaattatatcaattcaaaactattagtaagaattaaaaaatcttaagataatttaataaaatataatatttcttaaattaattaaaaactacattttctttaaaaaaaaaaaaaaaaacttattaaagttctataatgatgatcctattgtattataagcgactatttttaaataagcaaaaaataattatgtaaaaaatagttctccaacaaagaatataaatatttttaaaatacttaaagtctataaagtcaatattttcatattattcgtggttaagattcttcacaaatgatcaatttgactttaaattaatattttaattaataaattttttttaggtctaataacatacgtctagtatatagaaaactccaccatattctactttgtaataataagtatatttagtagaagacatttatacttgtccatttttaatcaattaaacactttattctctttctgtaatttccactatatttatatagttcaaagtgtatgtcacctataaaatcatagattcattattattgtcacagtttatttcattcatcagaggtcgtttatttatgttttgaaagcttgaaaacatctatctataaaaacctcattttttgtgcttaaattgttttctcatatggtttaattatgaaatagaaaaacttccccatcattttgagtttttttttttttcatttttgattgatgtaattgctcttaaacatctatttgattgatgcaattgtttaccaacactattaaggtgtttgtttaaaaaattgtattttgaaaaattataagattgcttctcttaacgtataaaatgttagttatgttagttagttaattatgatataacaaactcattaatcaatgacctcattattctcattttcattaagaccaatgttaataaaaacagaataaaaaataaaatactttatatattaaaccaaatattgaacagtatgctacatacataataaattaatttcaaaacaacctacttttattaattaattaagatgagttcttaatgttttgacagtttctattgagtggtctgccaagtgacttgcgaatagttcttctttgacatctggcccaatctttattcttatcacaacgacgtctcgccaacttttcatattcttgttccaattctcttaatataaaaggcgacataccaagagggttcttcctcatcgcatccacaatatcatcaactccaagctcgctgtacaactttttaatacatctaagattttgaggtgtcaagtaatcttcaatacggatcatttctgcgatgtcgatgttgtcgttgatcttctccatgagttgtgccacattcttgattgttgctttcacaaactccaccaacatgtcaaattcaaacatctcatcttcacatttaaacataagtttttcgtatttatttttctcagcatgcttgaaatagtactggtcactttttcctgaagtgactaaagcacaacggtcatttaatacttcagagcataatctttcggtatcagttaaagnnnnaggcgtgattgcatcaaatgaattttttggtagaaaacgatagcttggcatccctataagaatctttattttgaatctagggcgtttttgatcatgagttgaactattattgttattattattattattattactactattagtggtaagaattgtgg

SEQ ID NO: 128084 - DNA, 1280 bp, Cannabis sativa
  modified_base (28)..(40): a, c, t, g, unknown or other
  modified_base (431)..(441): a, c, t, g, unknown or other
aaaagaggtatgtttcaattaaatatannnnnnnnnnnnnatttgattaattgattaataaaattggtatttttcgacttacccctcttttttataaccatgaatcaaaaatactctcatattatatttcattaaaatatacttacttttttgagtagattggccaatttacctttatttttcacttaagtctagtacatattttatattaacctaagagatataatgggaatattatttataaaagtaggtatatcttaaagaatatgaaaataaaggtaaaacttaaaataaacaaagtaaatggatatacaatacaatttcctcttaaggatatcctttcgtgtaagaatttaggggagtaagttgaaaaatgtctcttttattaatcaaataactaaatttacctttaatttttatttaattgaaannnnnnnnnnnttatatgtattgtatccaaaatatcctgatataagggagtcacatggagagtatcttgaagtgatagggacaaaattagtacattatttttttttaaaaaaaggtaaaaataataaactttaaaaaagagggtaaaaatgaaagaggacaatataaaaaaagtatagagtctaatttcttcaatttagggggtgcatgtctggttttcgggttcatgtgtatagaattagtaatccaaactcatatgtttgtatgaccaggtttttgggtgcgggtgggttgggtttgggttgaaccggatttgagtgagttttgaccggattcgggttgggctagttttttttggaaaaatatcattttttatacatttttttatataaaaaaaaatagaaataattaaacttaaaaagataaaagaataggaataaagtaaaaatgatatatcattgtttaatttttttattttttgagtttatgtgtttcgaaaaatgtataaaaaaattaaaatatatatatttaggttttgggtgagttcgggtataacccagtttcttcgagtttcatattaatgaaactcaaacccaacccagtgattaatcggatgcaacctgaacttagcatcaaatttttaaaacctatttttttttaagtttttcaagtttcaggccgagtgaattttctgagtgggtgagttttcgggtgtagatgtttagtcctagctaagatcataaggataattacaagagtaatttgtatacttaagtttaactctcatttgcaaataaatagctaagtttaatttttggcggtaataatgcctaagttatatttttagaact

SEQ ID NO: 128085 - DNA, 1314 bp, Cannabis sativa
  modified_base (261)..(265): a, c, t, g, unknown or other
attttaaatgatacaattatatagtgttgtaagttcaagagacaaaatattaattatttcttaaaatagttatacttaaatagttttaggagccactcacgtacgaagtacgtgctatctcactagtatttaatataaagcatataaatttataaatttttttatattaaatggaactattgccaaatatggtagtttacaatttattagtttgtaaataaatttgaagcttactaatgtaacttaataagtaatttgtannnnnagatatttacaattttaaagtaaacaaaaggtacctcacacagtataatataaaagtaaaaataatgtaaagtaaccaattagttaagaaaaaaaaaggataacaaaatgtgtatttttaatatgttgaattactacatagtaattttttgatagcatgataatttgttcattagttctgaaaggttactaaaatgtactttaaataatataagatacataataatataatttaaatgtaactaattttcaaaataaatttagaaataactaaaatgtatatcagataacataaacataaaataaatttttataattgatcaaaaattagtgactgtgtatactatataatttttttttataaataaattatgtatgataactttgtgaattatataagtatctttgttattataaattgtaatttattagtttctaagtttgaaaataatacaaaaaagcaaacaattaataaatataagtaattaattaaataaagttgcttgtatagatgtaattatattattttattgatataataagtaattaattggtttattttaattttgaaaacaatgacaaaatacatactttctatattttaaaatgatcagaagcagatcatgaaagtatcattttttaactcaaataataagtaatgtggtcagaatttatttttaaagttttaagaagtgagaaagaaagaaagaaaaaaaaaaaaatctaagatagcttgtttaagataacaaacaaacagtaaactcaaggatataattaatttcatttaacgtgttagtgtaattgtgtaatattaattttgtatgtcataatcgtaattgatttaattattacatattgatataaaaattttccattaatattaagtgtatgggagattatatttgtaccccaaatattataactatacctcattactaaattgaccccaattaaatattattttttataattccaccccaccctatctaccaaaagggtattattttatacacctcaaaacttctcattttaagtttttattttatttta

SEQ ID NO: 128086 - DNA, 1817 bp, Cannabis sativa
  modified_base (567)..(571): a, c, t, g, unknown or other
atgaagctattgtactgaaaaccatgaatgattatctgggtttggatttggtaaagatgttttggaaaattacatgactgtaagagtgaaatgaatttctcctctaacagcctttgtggtataatttgtaaaatcatggcaatttctttaacaactaaaatgctagcaaaatggtttcagggtctgaaaggattgtcatcttaagaggttaagaatggtcaataatggagattgctcctcaaattctcctctgccattgttgaagaacctcaaagcttcaaactttttctttagttcataaaatgagctgcatttttcacatgagctatagattatatcaatttttttaaaaatttattttcctttctttcaatctcaagcttttttcttcttttttttttttatctatttttcttattattatttgaagttttttcttattttatactttaaaaaaatctatatttttacggagcaatctaaatcgtaactaaaattcacataccaacacacatagaaattattgaagcaactcaaaccgtaaatttaaaaatagtatataaaatnnnnnttttttaaaaaaaataataaatatttaaataaagtaaataaaaatatataaaaaaaaatcagtattatgctatataaaaatatgatgtaaaataataaaaaaaaaagttgaattttaatagaaaaatttaaattataaattaaaacaactaatatgagttcttttaagtttggtttaatttttatttatttttaattttttaaatattttaaatgaactttaaactataaattaaaaaacccattatgtttactagtagtgttttgtaaaaataatttttataaattttttattagcaaaataattttataaaaaaaattagtaaaaaatttgtatggtcacaaaaacgaccatgaattatactgtgcgaccataaacaactattataattgtaaaacgaccataaatttatactgtgcaactataatggttgcgtaaagtaaattaagtaatattattttgtaaattttagtatttcaaattattaatttgataaatttgatgtttaccaccttacaaaaagcacaccgacaaattggggttaatccccttacaacatgacttgtataatctttgtaattgtttttacttaatgaatttgattttttaatgaatttgattttttttttttttttaaaaaaaaggaatattacttatgaaaatcgaaaaaaaaaatgttattagaaatttttgtaaaaagtgttatggtatgcctttttatttgtttcggcatttagaagttttttagtctaatttttttttaatgatcgtgtacgttgtagcgatttaaaattacttgtatttcagaaaactctaaatagatagttcgcagtgccgaaaataaaatttaaacagttacttatcacgcgtataatgaaaaacagtcgtatgtgcaataaaatatttaaacctaattttttgacatagcaaattattcagaattttctaaaagtttacttatcatgattatgtatgttgtagttattaacatgccaaaaacaagattcaaacaaccagttgcacatgtaattcttttattgtataggcgtgtaaaatacaatgtttgaacactgctttctatattgtaaattagtttgaattttttaaaattttacaggatatcttaaatacttatagcgtacactactataaaaatacagactaaaaaattctcataaataccaaaaaaataaaggttcatagaagcacccttttttttatatataatttcatattaaatttgttt

SEQ ID NO: 128087 - DNA, 1063 bp, Cannabis sativa
ttacatatagcataaaagaaccaatgcctcaaatagaaatacatattagctcataatcatcccagaccaacaatattttttcatttgataatagagtgacattacacaacaagttagctagtactcgtattggaaagttcttgcttcatttcatggctctagaccaaatggtaaaagtaattacagcaatttggcaggtcattatttcaacataattcaccaaattttagactagtgaaaccagcttcataattatataaaatacatatatgtgactgtatacgaagatatatataaattacctgatccatcccaccagattgtgttccaatgtgtcgttcacattcacaagtaagctgtgcaatttctttctgttgagcaatgaaattatgttaggtaaaaaagattatcaattagatatgtttactataaaaaaaagaaagattagtgggaaaagaaaagaccatacctttggaaagttcacatcaaaagcagccataatagcaatagtggaagagcaaacaaatgctgcagaacttgataacccagaacctatatatatatatataacataaactaataatcgtaagaatttatctttaaaaacataattattccataaattaatgaaattcaactacaatcaacaccacctgtaggaacagttccatcaacaagaacatcaagtccaactgtctcatcaacttttacaccctttgatttagagtattcataatatcctttgtacccacaaatgaaatagtggccccatttatgatttttcaagtcaatttcctgcacaacaaacatttcttttttgatttttcaatactctaataattattattacatatactcatacatattaggcctataataaaatcattacctgattcggatcagcaggataagtacaaagttggtacttattatcattgacattggcgattcttaaaagcttctcagtctcatcatcatcatcatcgcgccttcgaattgcgatgatagtgtcttgccttatcgccattggcaacacagagtacccttcgtaatctatatgttc

SEQ ID NO: 128088 - DNA, 1235 bp, Cannabis sativa
  modified_base (205)..(220): a, c, t, g, unknown or other
ttttttttttttttgaataatctctaaaatcacttttttttttgtacattttttctacattttttaaacacaaatatcacataattttaaaaaaataataactataaaatcacgatcctgaccgtaaatagacctttatgagcctttaaaatatcttttatgccatgaccaatgtcgcaattggtcctatacatgtgacccgctnnnnnnnnnnnnnnnncaatagctaaatgatggtgtgcaatatgaacgagaaacataacaaattagaaatcactaacagaatgagaggataaataattagggaatcatttggcatttttggggatagagagacttgaaccctcgtgatttttaaagtcaacggattttcctcttataataaatttcatgtctacgaaaacggcattccctacttttgaatatttatatcggattcggattaaatcattttttatacgatttcagatctttcaacaagaaacccttatccgatagatttattcgacatttatagagctccgctcttgcaattggatcattgtgattacgagttggatgtcgaattgtccaggtgataatgatagtatcttgtacctgaaccgatgcctctttatgagtgtccggtaaccatgtatgtaagggtgtaatcggtaatttgacagcaaaagcaataaaaatctaatatagaatagcatttcgagtgctacaggatacgattgattagttgatgtttcaaaatttaatgttggttcattagaaccatataaacaaacacctagaattcccattaataaaaaagcagatgtaatactagtggggattgtgggacaaaaaataaatccatttgatttcagacttggtgcaacccaatgtcatcgttctctttggtttgcacaaaaaattattctaaggatctacaagaagatcaaaaaatacgaaattgtatcaagaattatgtaggactaaacattttgagcgggttcgacccggacctgggcaacctgcccggacctggcccggtcaacccgcaattttcttttaaaaaaaaaatattcgggcgggtcaagttcaacccgatgccttcggacgggttcacgggttaacttttaggaccaccgagtttcaggctgaaccccaacccgcatatttcatatattatatatatattttttttattttcttattacatattatatattaattaaaaaacaaaaataattaaaaataaaaaa

SEQ ID NO: 128089 - DNA, 728 bp, Cannabis sativa
tttatagccatgggaaaaagtaagtattatattacacataatccaataacaaaaaaccatttgattggatgctacagtattaattgtcttggaagaatgtgaacattgtgattagattaacttctaatcatatttcctttttaagaataaaatgctttattaaattttttattttttattttttaaaaaaatgtttataataattccctattgctttaacgatatttaatataaactagtaattaaaatagttaataaagtccaataatgatgatcctactaggattatttaattggctatacaactttagatagatagatagtgtatgcctaatggagaaccagataagtctaatccaactggtttattataattttttttaaaaaataaaaaggtaaattaagtattaacaaatcaataatgagtgtgacttattcaaattaatcttaattattcaatagacactaatagcaaattaatataatataatctactagggtttttcgttcttaaattcttacccaccggaggttgtattttttctctgactaggctcgtcggcccctcttggacttaggcgtggtttgctcgggatttgtggtttcggtaatacgatttcgtttctgctattacgattagtcttatctttgtgacataattttaaggctaattatgatttttgccccctaaactttaacatgtatcaaatcatgctccctgaactttt

SEQ ID NO: 128090 - DNA, 826 bp, Cannabis sativa
  modified_base (113)..(114): a, c, t, g, unknown or other
catacattatatgtatataatcatcaaataaatcatgtgaaccatgcaacataaaaaaatgttatttctgatctttattattaagtaaatcggattatattgaaatgagtttnntttagggcacaaaacccagcagattgttccaagaatgattgtggtttgtcctattagtgacaggtggtgagcctgtaggtccacgttcctgattctaggtcttttctaataggatttatgcctttaaaatcctgtaaagacatttcagtttataaatatcatttaaatattttatatagggttaaatattaaattattaatatttaataacttatatataaatatcgaaaaatttattattcatacatgaggctatgacttgtattatacagagtattaagatcactaagccatgaatgaaatagtcgccaacatatttaagttttggaatctttaatcaacagttaatagcgcagttaactaatgtctattattcggagtaagcgatatcgattcagattactgatgtagtatgaaatttaagtgaaaggtattgtatataatagagtgttgcgatttattttactagaatctatatttactaacatgcatgtttcatgaacactctaaataggaattctttaatacgatgaaattaaacacataagagtttagaaaatcttacattgattacagcgcaataataatgactcattcttctcagatctctaacccttgttcatttctgtcacacagtagatctgagcctgaatctctttctctccttcatgttggttaccaccgtctttcgcactatgattgagtacttgac

SEQ ID NO: 128091 - DNA, 1362 bp, Cannabis sativa
  modified_base (33)..(46): a, c, t, g, unknown or other
  modified_base (819)..(823): a, c, t, g, unknown or other
tgaaccatgaaacataaaatgttatttctgatnnnnnnnnnnnnnnaaatctgattatattgaaatgggtgttatttagggcacaaaacccaacaattacacccttcatcatcatcctcacttccctttgtctcagccgttcaccactcactaagcaaacacaagccctagccttcataaccagcacccatcactcatacaagccatcactaagtagacacttctctcattcgactcaactaagttcaccaccgtgaccaccaacctagcaacccgtaacctccattcgaccaccacgacttgaaaccgcaccatctcgagccatcccacctgaaccagcagcaacaattgcaactgtcctccatcttcacgcaccagcaccagaacccatctcaacaaccttcgccccactcgactgagcctcacccaaccacgaaccgagctcaaaccagtaacctccgtgcgaaccattgcccaacaaccacacctcccagctgctaactcgaacccagcgagttagaacacacttcagagcatcacttcacccctgcacaacaatgaaccagccattcgacccatcaccaacaacaatctattcgacctagcagcaggctcacgagcactcagtttgcccaaatcgagcaccctcagcgatctccaaaagccagctgactacattcatcactccgcactccctggtttgtcaaggttgatgcttttaagttttaattttatatttgaacaatttcttggcttccgcatagtgagtgattattagtggatgtttgttttggataaaattgaatttggatttgttgnnnnngttcaattggtggtgtagtgctttgatttggagttgatattttggaatggtgtagttcataattggtggagtggctttgaaacttttctagagtgacaatcatatttggtgtgaccttgaaccaggagctttttgttgtgattatttgggtgaattggaatttgtggtagtgttagaagtattgaaagtttgaacagattagtggtgttggataaattggatattgagtgatttacacaggggaagttatcatggccgagtgctacatggagtgtgtgtgtaatgtgtaaaaatctgacttagtgtggtttggtcagagaggggtgagtttttgaacaaaattgaattgcggacattgaagggcgttgtaagacttattactgtgttgaggggcaatggtgaataagagagcagagaagaaaattgttgtgtggggtagggtgcaactcaaaagaagagaaaatgctgaaagttaagaggactgccaacaagaaaaaaaaaaatcactgcatgaaattcctaagtttcattgcaaggca

SEQ ID NO: 128092 - DNA, 658 bp, Cannabis sativa
aaatgtagtaataggcgtgtgagggtaattatgtaataaagtgtgtaaaaaggatttttcatgtaaaaatttctttaaattatctaaataataatttaaaatagtgtttaatttgctataacgtgattaaaaaaaataaaaaagattttttcactttgaaatttaaaggcttaatttattaatgaattttaatttaaccagataattattccctcaaaataaatatatagattaaataaagaatctcaaaaaattaaataaaaattacccgaaaaaaaggtcagatttctcttttattacaccactatatgagaaaattcaaatcaaataaacataaaataaacacaaatcaaaacctaataaaaaaccataaaatttattttataaatttaaatagctagcatatattcattactcacattctaaaggattgaaccttttatttaaaatcggtggtcttctgctgcctatcgaaggactccatagccaactcttgcaatctaacaagtgagagtcattattgtgagagagacaaaaatgaaaactaaaaagtgtagagatttttgggcttaccgacggcttggagagtgtgctccgacgacggcttggacggcgccgatggttagatttggccaaaaaaaaaaactgttttggctct

SEQ ID NO: 128093 - DNA, 793 bp, Cannabis sativa
aaaaactgtgtaaatttccctactattaattacttacttatatattaacgtgttgatatatagtaatttaccattgtatctatctgtattgaaggtattctagcatataattagacttaattagaaacaaaagttaataagatctaatttgaaaaacaagcactttcttctccaagactaccacaaatatacatatattaattgctaaaagagcaagcttaagtagcttgacaaacacatatgtcttttttgttgtttttgtattaattataacaacaccatcaagtaggaagaagaccactaatttaagtgcaatatattgaagaaaagaacatggggtccactccatccactctacatcataattttaccttcttctcctttctgatcttcccatttcaattgcctttgttgtccccaaacttattggttaactccaaaagctttataagcaccagaagacaagcctttccattgtctcaagtcctcatcaaccacacctcaaaacaaaactcaattaaactatattaattgtcttcagtgtctgtactttgttgtagtattagttagtagccatggcttttgtggtgagggttttggctgttttggtccttgtcttgaagctttctatggctgcagtttacaaggttggagactcttctggctggaccaccattggtaatgtcgattacaaactatggtctgctactaagaacttccaagttggtgatattataagtgagtttctctctctctctctctctctttatatatatatatcttgtgatatgaa

SEQ ID NO: 128094 - DNA, 1502 bp, Cannabis sativa
  modified_base (1454)..(1473): a, c, t, g, unknown or other
tgtcttggcttcggtcctctatgtttgaaggaattcttggatcggtggttacttactctacctccttcgaagtatggtgtgcccttgagcaaaaattcgcaggacaatcaaaggcccgactgcttcaattaaagagccagcttgcgaatattcaaaaaggtaacctgtcaatcttggattatgtggataaaatcaaattgatatgtgacagtcttgctatcaccggttgcaccattagctattaagatttggagttgcaattgctaaatggcttagggccagaatacgactcagtagtatcaggtataacttcaagtcttgaatccaagagtcttgaagaaattcaagcattgttaatggcgcatgaatgtagattagagagacatcattctgctgctgaaatctcgaacagaatggctgctaatctcactattgggggaccaagatttggatttaatccaaattcaaagactccacatacacctgcaagaagtaatttcaatgatggttggcgcaattacaacataaattctttcaaatattcatcccttactacatcaaaacccatctgccaagtctatttcaaaattggccatacaacagccatatgccattacaggttcgataaagcctttgttccacctacaaagaacccatctggaaatgggaatggatatcttggaaatggtgttccacctaaagccttctttgctaaacaagactcaccagatcacatggatcttcaagtgtactcttccaatacagtacctaattttggagaagattcatattggtatgctaacacgggagcaaacaatcatgtggcattcggcatggaacacttggacaatgtaaccccctatactggtaaagaaacacttgctgtaggagatggtaagagattacttatttctcatataggcaattcaactatcccatctaatcaaattacccccattcatctaaaatctattttaaatgttccttcaattaccaaaaatcttattagtgtttctaaactaacccatgataatgatgtatttcttgaatttcacaaacatttttgttttgttaaggacaaggaatcgggaaaagtattactcaaagggacagttaagaatgacctctatgttcttggcgaatcttcttcctcctcctccacccttcaatgtcatctagccactatttccaagtctgccgatactcaacaatgcagctgcactaatgattccactcaaaagtgttgttgcattcatgatttcaattctagcactagcatatatcaatgtaataaaagcactaagatgcaaaaaagtcctacttgtaattccactatcagtaataaagatgatttgtcttttacttttactcctcaagccttttattctactactgacactgacatcaatctctggcatataaaacttggacatccatctgttgggttttatgcnnnnnnnnnnnnnnnnnnnnatataatcagatttatttattaatataga

SEQ ID NO: 128095 - DNA, 990 bp, Cannabis sativa
tgccacattatgctgaaaattcctgaaaaacacagtgtacattaggagattttttattgaaataacttacagatatagcacaaaacttatagaaaagaacacaaaacttacagattttttattgaataataatctagagactagagttatttaatataatcactagatatacactaccttctcattattgttattttttatagtatattattgttcataagctcacctgttaatctgccttgatcttgtgaccagtttggggtgggagcaaaaaaaaacttaataaatttttaacaacaaataatatgataataattaaatacaacgaaagccaccatcctattcatgcaacatggccttaataatttattattatgattcttgctgtacatccattaacagaacaaagccataatgcccaagcaacaaagttgtgacaaaaaataattctgctgaaaaatgatggaaagaagtgatttctattacatgcaacacatgcaacacatgcaacacatagaggatttctattacatcacattgctagatgtactataatgtggcaccaaaaaaacttgcataatggggccgagaaagacttgcatagattactaagaaaatctaacaattcagcccaatcaacaatagtagttttgagtacattatgagcttcatctttttctttctttcttatcagaatgtaaaatcgaattacttagcagcaagattaactgcttctgatgaaggtagccaaatcagtgaatgaggttagcatctcatagtcatatatatatatatatgaaactctatagtctatactctatagtccatacatacacatttttcttttaattattcctcgagtgttacaccattaacaggcatcaaacttttcaaggttcaagtaagaccttcagtaatttcactacactgtaaatttgtagtacagccataatttttaccaactgtaaatttgggtacagtttttttttt

SEQ ID NO: 128096 - DNA, 676 bp, Cannabis sativa
aaaaaaaaaaataaaatgtaattttttttaagaaaaaaattaattatctatttaaataattgagattattatttagtcacacctaaggcccaagccgtaacaattactctagtaatgcactcaaatcaaaactcacaggttataaaaatttcaagtactttttcaagtcttagaactaaaaaggttaaacaaaagtagctatatattttgaatgttatatgattatttattactattaaggaatccaaagtgcatatgtattagttgaaaaagtagattttcaaaagctttgctttctttataaaagaaaaaagatttgctttcttaaaacgtgatgaaatatatgaacctctcggttgtcttataattaaaattacataagtggtcaccaccgaatggtgatgatgattcacgtttcacagattcataaccttggtgtggaccatatatatgtttttttttttttaatgtattatatataaggagggtttatattggtgcacactcttcttcggtgcaatacagtataaatcaattatcgtatgtcacatttatagaaaatacaaatataatctgtgtttaggggttctagctaaacatttaattataaattatatgataaataaataagtcaaagcttataatataatgcgtaataaataattataaacttaat

SEQ ID NO: 128097 - DNA, 986 bp, Cannabis sativa
  modified_base (930)..(942): a, c, t, g, unknown or other
attgtattatataaaaatatgatatataacccaattcaatataatacaatacaatacgatctaatatgacgttccaaacgagccatgaatgtgttagttaaaaaacaagtaataatagttctgtgattcgtaatgtctcataaaatgtagtcaatttgaacatcacataatctttaccttagattttgtctccccaatatattatataaatatttatatatatagatttttataataattatcacaacgtgatattcgtgtgtacgtaggccataaaagtaaattaagatattttagtacgtgtctaaaatgtacgtacaagtaaaagtaatccaaattcaaattattaaataaattaaaatatatatatgcttgttaaaactagaatctttacatattttactctaaaaaacacaagaggataattattacaatataaagtaaaaacaaatttggttgtgttattaaataattataaaaaatatatatatttttttatgaaattagttgtaaagtcatgaaagaaaagaagaaataaattaatgtactggagaatattaagagtttggcaaataatgacaatgttgatttcttttgcattttctctagtgggatctctttttcagtattttagaaaagtaaaaaagaatatatatatataaattaaaagttgagtgaaccccaaaaacttgtcatgtctctaatggttaaaaaaaaaaacttatcctatgcaaaagttttcagtagggtaaaaaactaaagtaactttttttagtgagatcatattttcagttgaaaaaataagataagagacaattcatataatagagagagagggagagagtattatagtacgtagtgttagagaaatttaattgtggtaggtaggggtgttcattggatcacatccaatggattttgacccatccnnnnnnnnnnnnntatttattggatattggattttgccatccgatccaatccaattg

SEQ ID NO: 128098 - DNA, 1055 bp, Cannabis sativa
tacatctaaaattagatctttaaaactagaaatggcattgaagggactatttaaagcttgagagaccattaaatattatttaattcactaaacaatttgatccatgctatcatcaaatacagatgaacaatgatagtttcctttaattgaaaacagagaagctattaatttttcaaaatgttgattcttatggttaaagatcgtttttctcttcattaattgtctaatttcaatagttgccaaaattatttctatgaaggaatatggtagctgaggtgggaaagctctcaagacatgaggcatatgtctaaaaatggcagctaaaatggtcaacattggccattacattctttatattttgactattaaacaaagagaattgttaaaaggcaccgttggtgcccagcactctcttcggtatcatattgctataagtgtaattaaatattgagtcctatataatttaaaaagataacttttagacaatatcgctaactaattatggggcaccacttatgaaaaatgctgagcatgcattactggtgtccaatagcaattctcttaaacaaattcgtttttggtggaacattattaaacaaatacattgcatatcatctagctgaggtacatctttatgataatgcttgtttagcattgtaatctgttaaatatatagggttattcttgtatcaatatattacccaagtttgatcaaattaagaacagcaagacagcagattaggattattgttggacaacagattgaagtgttaggtttcccaacaccaacttgatctgcacaaaacacaaacagaatgttagaaacagagctaaaatgatgtcaaaaatttaagcaaaatagaattaagggtcacaataacataataataagttgttcttacaattatatttgctaaaattatccttgttaaaattatatttgttaatataattaatattttttttatgtagtattactatcaagaatccatatgttaaaaaaaatttaaaatgtgtcgacaccgaatatgctaatagatacaaataaaaaaaaa

SEQ ID NO: 128099 - DNA, 800 bp, Cannabis sativa
  modified_base (27)..(73): a, c, t, g, unknown or other
atcatgttttccataaacctcgttgannnnnnnnnnnnnnnnnnnnnnnnnnnnnnnnnnnnnnnnnnnnnnntgctagttagggtgttacaccaaagctcttaatgaagaagttgaaagactacgggagaacaacttaattagggtagttgtctacccactttaggtatccaaccctgttctagtgcctaaacctaatggaaagttgtggacctgcgtcgtatacaccgacctcaacaaagcatgccctaaagattgtttccctctatcaagaattgatcaactagtggacgcgactgccggccatgaactcctcacattcaaggatgcctattctagttacaaccagatcagtatgcacacactagatgaagaacacaagagtttccagattgacatggggctctattgttacaaagtaatgcccttcgaactcaagaatgcaggtgcagcttatcagagaatagtcaaccatatgttccacaaccaaatcaggaacaatatggaagtctacattcatgatatcctagttaagtggaaaagatctgaagaccacattaaatatctagaggaatactttaacatcctatgggaatatcgaattaagctcgaccctttaaaatgtgcatttagcatccaattaggaaattttcttggattcattgtcaaatcaagaggttttgaagctaatccagaaaagagcaaggccttgcaagacacactactacaaaaacccccctttagaggcggtttttaagccttttcagcgtcggttttggcaaaattcgctaccgacgctg

SEQ ID NO: 128100 - DNA, 1300 bp, Cannabis sativa
agtggaatataatcatgagtatatgttcaaaagtttaaaccccaacaaaataattgggatggcatgggtcctggtttctatcaaaaacattgggatgttgttggtccgaatattgtcaacatggttacttatatctttgcttctggtgtaatccctatcggtctgaatatcacaaaccttgttttgatcccaaagaagaagaactttgtttccatgagtgatatgcggccgattgccctgtgtaataaactgtataaagtgctctctaaagttcttgcaaaccgtatgggaggtattattgatcagattatttctgtgaatcagagtgctttcattcctggtagacttatttctgataatgtgatgatagcttttgaagtgatgcactatttgaaacggaaaacaaaaggcaagaagggtttcgtggctctaaaacttgatatgagtaaagcatacgaccttgttgaatggaactatcttcatgctgtcatgtctcatatgggatttcattcaaagtggattgatcttgttatgtcttgtattacttcggtcagttataatgtcatccacggtgggcatgttgttggccctattattccttcccgcggtattcggcaaggtgatccgctcttgacatatctattcattatgtgtgctgaaggccttacgacgctcattaataagtttgaagcaagtcgagccattcaaggttgtaaggtggctcgtggtaccccctccatcactcatttgctctttgtagatgacagttatctcttttgtcaggccacatcggaagctgatatgagttgtcaatactcttctccatactttccaacaagcttctggacagcaagtaaatttttccaaatcatctatcttttttagtcctaacactactgctcattctcgttctggtatttgttctgtgcttgggatgcttgaagcgacaaatgacagcctttatcttggtttgcctaacattattggccgaaacaaaccctctattattggcttcttaaataataaggtaatggctcggatcaacaattgggatggcaaatatttatctcgagctggcaaggaaagtcttcttaaaacagtgattcaatccttgcccacttacgctatgagtgtcttcttaattctctaggcgtttgtgaggatattgagaagcttatggcaagctttttgtggaaaactacttcaagtaagggtcgtggcattacatagatgtcttgagaaagaatggcaaagcccaagctggaaggtggtatggggttcctgttgggttttgtgccct

SEQ ID NO: 128101 - DNA, 1076 bp, Cannabis sativa
  modified_base (489)..(492): a, c, t, g, unknown or other
tcctggtaaaataattccaacacggccaacctaagtggaacaatttctcgacgaattgcaggcccctaaattacattattcctaaaactggtgagttacacgctaaatcacattctgggcacttaaacttgaaactaaaagttaccttatcgataataaacatggcaatgctctaaatatcgtaaaaattggaaaaactagggttcctaaaactaccctaactggtagacagattccctaaccgaaattttggttcagtgaggtttcttggggaccaaccgaaatttcagttcctacaagtcccactgaaccagtcgaccggttcagtgcaggaaagttttaaaatttcataactcactcaattcaaccccaaattctagcaaaccttccaaacctgttatttataccctaaagaacatattcaaggcaataaatgaccacaacatggacagaaacaaaatccaccatgtgagagcaaagtttgagctnnnnagctcaaaccttgaacaaatctcataaacaaccatcaaaacactacaatctaacttagataacctcaaattcatttcaaaagacaaacccaagcatcaagaactaaaaacagcaccctaacacacaattcatgcaaaaacccattacttaaaactcaagaaatcaaaaggaggagtgctaagaacttaccttgagcttgaatacacctaaagcttgctggaaatcactagatttgatgaagaaacatcataactctagctggttctattgggttcgaagaagagagagagcttggagagagagagtgtgtgttttcttttatttgatttttaaatgaaatgaaggaataaaggttaattttatctaactaaaatcaatttaatatcagcataatactcccaatcaaagtccactacaggacaagaaatcacttaggcaaaaaatgaccatttttccctccacttagccaaaaagtcataaaattacttgggggtaatttggtcaacactaaaatctcaactaatcccgataattccaatgtctaactatattgccccgccatactaaaatactaagatgtgatt

SEQ ID NO: 128102 - DNA, 877 bp, Cannabis sativa
caaaaatagagaaaaattacagttgtacaaacattgggtacttatgccactaaaaaaaatcattgggtttatgccgcttacaaactcaaaactttaagtacttatgccactatttagccttgttttatttattttgtacaggcattagctagttaagcaagtaattattgcttaagaaaaaaaaaaccatttgtcatataaccccaaataacattatcaaggtgaacaataattttatactattatcttaatatttttcgaagtacagcttcatattcttattaaaagctcacattaattcttgtacatgaagtacatacatgactaaatgttgaattattttacaaagagaagaagaagaagccaagggaggcagggtccagtccagaagtggtgaagtgatgcagtgcaggtggtcattaattgataaagagaagtcagccttatctgctctattattgccattcttctgtgtaccctgcactcacctaaccttattcattattctattactcctcttacctagttttcttctttacctttaccccttaattgggcttctggacaatctactctatttattttggcctaatttttcataggggagactattgagtcatgacacactaattttattttgaataattaacatttttatcaatttaattttttacattattaaattgtgtccttataatatatggctcgttaataatactattcgaaatataatttttacaataatgttgttcttctaacatattttattcagttttatcataaaacgagtgacgcgatagatgtagttgatttttttttttttttgaatggaaaataattttattaaccaacgaaatcagttaccaaacaaggtaac

SEQ ID NO: 128103 - DNA, 544 bp, Cannabis sativa
aaaaaaaaaaaaaaacttcaacaacaaattactcacttgtgtctaattttatgataaaaagttgtgtctattataacgaatgtaagggataaaaataatttgaaggctatataagtaatttcaccatgataagagcatgaaaactaataaagtaatatggcaagagaaatatgaacgagacatttcacttaaaatgaagagaagggcaccagagtagagttgagctcgagaaagcttggagaacaaagctcaataagcagaaagggagataaagcgcacgaggaaaaaggagaacggatccacatggactaatctaagcagaagaaaaagattgtgcgacacccatttctgcctataaataaaagaccccaacattcaaaaaaaggacagattcttgaccacactagcccggtcgaagctctggcaaattatatctctgaaaacacacttaatcttaaaactaccaaagagagagagagagagagagagtacactttattgataatttgatattattggcagttcagagataacttttccagtt

SEQ ID NO: 128104 - DNA, 1550 bp, Cannabis sativa
aggatgactcttttactagtttgattggataactcacaaagagagctagatagggtaatacgataggacaaaaggggtaagaatataacacaaaccctagcaaggtttaaaaggaaaaccttttctagacatgaggcaccgtgtcctcaccgtacagtagagtaagccgtccaaaacgtacatgagaaggggacgtgcaccaccaccatcgatgtcagtaattacaaacattccactacatttttcagcatgtatcgagaaaatattgttacacaatttacattctcaaggaatgacaactttaaaagtgtcccactatgatcccacatcacattaaattaatgatttttttaggtgatatataaattttttctaaaaaaaattaaaaatagaacaaaaaaaatggtatgtggccattgtctatattgggcaacacttcacattgcatatatggcaaaattactcaaatggacaatcaccattggactaatttatacaaaaaaatactagtattctccatagatacccaaaataccctcctcatttaattttccctccctctctttctttctcactctctcccttcaacacttgacccaaaaagcgagaccttcctcattggaagcttagaaaaaacttccctctctatctatctctttctcactcttgctctctctccaacactcgatccaaacaccagtagagctttccgtgactcaagaatgcaagtgtacataccagagactagtcaaccatatgtttcatgacttgatcgaaaataatatggaagtctacgtcgaagacatgctggttatgtcaaaaaaatctgaagaccacatcaaagacatagatgagtgcttcatcatcatgcatgaatatcgaatgaagtgcaacctctaaaatgtgcctttgacgtccaataaatattttgatgacgcctaagttgtagctcgttcctatcctcactacatgaaaaataagaaaaatgttagataaagtcgtcactaaagagaacgaaattgaatatgaaaaaagtatcttacgtgatatacttctccactttattacaattgttgagaatgtatcactctgccttcattttatcttgcattagtctcaatctcttccatctcagggaggatatccgcttccaattgggcattttctggagagataggtcgcatttgaatttcaagcaaaaagttattaagcaacttctctttttccttgcgaaatccaaaataatttttattccaaaacgccaactacttcctggtgtgagccagacgagacatgaacagaaaacttctagccctagagacaataagcttccaagtataacgaacaacttccatacaacctaaatctcgcatccagacattcaaaaaacaaaaaggtttatggtagtgaccttgctcatataacaaatcaagcaatagaggggcgttgtcagaatcttgtattgttaaagagttaacacccgctttcgggtaagccatcaaccattcaagatcaccaatcactcgatgaagacattctttgatcagatc

SEQ ID NO: 128105 - DNA, 854 bp, Cannabis sativa
  modified_base (39)..(40): a, c, t, g, unknown or other
  modified_base (814)..(824): a, c, t, g, unknown or other
aactcttatgtgtttattttcattattttagaattcatnntaggatgttaatcaaacatacttggtagtaaatatagatcctggtaaaataatttctaacattgacctcgtcaagacttgctaagaataatatttatttgcttactcgatccgatggctcgactgtcactgataaataattctaaccatcatcaaacaatgcttcacgtaactcttcactagttagaatccaagctgtgagcatatggataacattctgtctgggatctctaaaaagattactgctgcgcaatctctgtttttggaagcttcattcaaatatgaggaggttcgaaaagtggcattccaattggctagccataaggccccagaacagatggcttcaatgacaccttttttttagaaaaattagactctaataaggattaatgccatccaagccgctcttagtttcttgaacaaaaaagcggatattacacctattaaaaatccaatcattgctcttatccctaaaatgaataacctttaatttttcatagactattgccttattagtctctattctacattttattaaatcatctcgtgtaccttggttaactgccttaagtcgattctctgttgtctttattctccatcccaaaattctttcttacctaaccgcttaatttcttacaacatcatcattgggctagaagtcacacactccttaactcatcgtaggcactgtaaagtgggtttgatggatcttaaacttgatacgactaaggcctttgatcgagtggagtggggtttgttggaaatattttaccannnnnnnnnnntactaccatgtatgttttattaacatccta

SEQ ID NO: 128106 - DNA, 1398 bp, Cannabis sativa
  modified_base (1337)..(1338): a, c, t, g, unknown or other
gcataatcagtcggccaccctctatatcccatccaattaaacaccatatcaagaaccttgctcgacaacacacaagagaagaaaagatgctcatgggattccaactcaacttcacacatcgggcacaaggtagaacttagctcgatctaaaatcgaactaacttgtcccttgtgagaagatgatagttaaccacttgccaaaggataaatctgtgttttggcacaatagttgaactccagatagctttgtgataattgacttggtttcggactagactgttattgtataaccaattagtcttgaatcggtccttagctcctgctttaaggatatctgctctcttgaatttctccctcaaatgacataacttgcgccaataccaactagtatcagatttgatctcataatcccaaaacctccccgattttagatagacattatctatccatttaacacatagaagatcttgtttcgtagatatcgcccagacatacttggccagaattgattgattccacttgacaccatttttaaaacctacgccaccataagcctttggtaggcaaactttctcccaggaagcaacatgaatcttgtttctattaccattcattccccaaataaagccccgacaaagtttttcaacctcctttgtaacactatgaggaagaacaaagatactcatccaataattcctaaggccaagtaaaatagaatggattagttgagccttaccagcgaaagagagatgtctgctcgaccaagtatgtaatctctgtttgattttatccacaatgatcccacagtcctcagctttccattttgttggtctcaagggaacacctagatatttgagagggaaggtgccctctgttaagtgaaacccatctatgatagcttgcttctcctcagttttcacacctcctaagtaaatcttggatttactcgagttaatgtggaggccagatatcgagctgaactcctcaagaacctgcttaagcaccattatcgagtttttggaacctttgctgaacaggattaaatcatcagcaaaacagagatttataatcttaaggcccttacataatggatgatacctgaagtttgattgggaggttgtcagatggagacttctcgtgagatactccattatgagaacaaaaagaagaggagagattggatctccctgtctcaacccctttcccctttaaagccaccttgcactcttccattcataactaaggaataagaggtagctcgaagacatcccattatccacttaacaaaccctagaggtatgttaaaatttaaattaatttttgaaacaacttaaatnnaataattttctaaatatttattggaaattatttctaagatggaaatgattcattttattt

SEQ ID NO: 128107 - DNA, 929 bp, Cannabis sativa
taaagcaaattcattcagaagcaaaaaaagttattttaatcaattgtttggaaaaaaagctaaattttaattgattactaaaaacgttctatcaatatttcaaaactagaaagggtcaatatttctagatgtagattttattttggataaaccaaaactagaagtagttgaacagctgaaaaaattattactattattattattattattattattatataggtaatcaactttattaattctcaatttttgctaccaaacaaaatagcaaatgcatgagttattgaatttgttgaatgtttgataaaatgaacataaatatattttaaattatgattttttggagttttgtttgaattttttttgttttgaaagttctttttaaagtataaaaattgctgtaaatattcatttttagtttgctattttttaaaaataatttattaatataacactaatataatattaatctaatatagtgtaagagtaaacaaaaaaaataaatacataaataaaagtttaataatgaattgaataacttaaatttgtacttcaattatatttatgaactataaaagtatttgactttgaccttatagtagggctgagcatcgatcggtttggtcaattttttctatataaaaattcaaaattcgattttcggtttggatttgtgcaatccaaaaaccaaccgactaatccaaacctatcttaaaaccgaccgttttgaacctcggtttgggcggttcaaatcgaactttttttaaaaaaaaaatatgatccaatttttttctataaataaatattttacattttacaactacaaacaaataattcaattgttcaaaaactaattatcttatttttttttaacttaaatattaataaaaaaataatatattatttttatatattattagtaactataa

SEQ ID NO: 128108 - DNA, 1001 bp, Cannabis sativa
  modified_base (175)..(176): a, c, t, g, unknown or other
  modified_base (919)..(940): a, c, t, g, unknown or other
gaatccaaacaactgaaggggtgtagggctcagatcttgattatactttgtgacagaaaggaacaagagttagagatttgagcagaaggagtcatttaataatgtaaggtttctcataattaatgtgtgtttaagtttcatcattttagagattcatatttaggatgttaaaaanntacttgttagtaaatctaagtcttggtaaaatataatccaacagtttggacgtctctaaattcttggtctcttgtttaaaacatagcttgtgcaatgagttcttgtacaaatttcttctattttcatttcaatatacatgaaaatttacattaagagagaatttaaaaagaaatacacacaactgtagagtaatgttagacttggatacccttagcctattggtaataacgacggaaatggtctccattctaggcacgagggattttttagtcatccattctcttgagttggaaagttccatttcccaccttatattgtatttcatcaggtccttaccagttaggccctaagacccccactcccagtccttacaaaactgggaagactcttctcaagacgagatctctaacgtaaaatgtacgacttttgactttataattaaagtgtccagcgatctatccatggtaaatttttagttggacttgtgactgttcctggagctctttaattaaatctaatgattcctggaccaaagagtggttttgggttgggttgtaagtgtcttgtctttgagagaggactgtgatttctactgggatgaccgcttcacacccataagtcattgaatatggtgtatgccttattgaagttatgggtgcgcacacactcaatcactaaggctcgaattttaatgtgaagaacactatagaattttttaaattagaagagagaaaagaagaannnnnnnnnnnnnnnnnnnnnnttgtctgacaagatgtaaactaggtctagagtcattagttggattatgagaccattttttt

SEQ ID NO: 128109 - DNA, 1068 bp, Cannabis sativa
tttattcatttgcttaaatctagatcaagacagtcaacatcacaatcaaatttcaaaagccataatagagttatagtaaaaacacacaacacgccagaccagagttcatagtacaattaacaacaacaacaaaaatgttacaaatttaagaaacaaaagatgagaaattccacaaagaaatagtgatgagagaccttatgattctttgaacaatcatcttgccaattcccaaacctcgtaatggaggagcgacctgagaaccaagcactgagttcatttaaaggattaaacaaaaactcttcatttacatatatgttatatgtcataccataacatcataaattgaagcagtcaaccccatatcagaaacggcgcgtccaaacccaatcatctcgccattctgaggagtaacaggctccattaccgtctgcaaaaaatcccccacacccatagaagtagaagaagactccgaagcagaaaaagaaactatatcttgtgatttgcagaagacggatacgacaaaagagctgtgagagagagccaccctgagcttctcaacgtcgatcatttggacggggtcggagctagattcttcagcataggttggaaatctatgggtggagagtttgcaagcgccgaagagtcgctggagttcatctgggtttacgtgggtgggtttagtggatatgaatacgggaagtgaagtttgtggtagtgaaagtgattttggtttctgggttttgggtgtggtgacaacccatttcaactccatggttttacaggagaagctctctagaactattttcatggtggccagtccacacccactgtcttgctaaattcaattaggctattggctattcagataccatataaagggcattgttattccgcaactagctttaggactatagtcgtctagcttattatatttaggctaattattaattttcatctcaactttaacatgtagtaaatcgtgtcttctaaactctttttgccgttaaaaattccctccgaactattaaaattgttaaatttaaagacttttgtctaactttagtaaaa

SEQ ID NO: 128110 - DNA, 1934 bp, Cannabis sativa
  modified_base (1862)..(1862): a, c, t, g, unknown or other
gtagtctcattggcaagcttcttttcctcacaatcactcgacctgatatatcatattccgttaatagcctaagtcagtacataagtgatcctcgataatctcacctgaaggctgcttaccgcattgttaagtacctcaaggacacccttggaaaaggacttctactccattttaatgtttcatctcaacttcctgcaaattgcattttccacatccaagcttttgttgatgcagattgggctacatgtccagacacaagactatctattattggattctatatttttcatggtcagtccctcatttcatggaaatcaaagaaacaatcaactattttgaaatcgtctacagaagctgaatatcgctccttagctaatacaacttgtgaaatactttggctacacaatattctctcagactttggcatctcacaatcccaaccaaccaccctctacaatgacaacaaagttgtaatacacttattcgagaatattatgtttcacaagcgtactaagtgtgttgacatcgattgtcatattgttcgagaacaagtcaccaaaaatcgaatcaagttgttctaccctcttggcacaatattacaaatgtcatgaccaagactctcttctctcctcttcttagttcaagaatttatcgtctaagatgagtgttactaatctctacacctcatcttgagagggagtcttagagatattaatatagagtttgttgtaagtctattatatacaattagttatagtaattattcctaactaagttgtcaccagctggagtttgttgtatttctcagctgtataaataccccttcgatcattaataaagaattcaattcactattcacaaaagtcccatctcaccactaagtttcgtcaaagataaaaagtggagaagaaagaggagagagagtgagatagaaagaaaaaaatattttgtttttattttaattttattatttgctgttatttatatgtttaattaagtgtaattaagattttaaatccaattttaaacttctttatttccttaagtttatattggtttttattattaattaatttaaaaaatgtatttttaaaattaaattcaaaaaaatacatttaaactacaatttaaaactaacaaaaacatatagaaacaaaacaagtaagataaatatggaaatattaaatttttaaatgctcagatggtactaaagtagttagtttttacaaataaaaagtactaattgaacattattcaaaataaatagtactaaatatttaattaaataaaatacaaggtattaaatggatatttaaaataaaaaaataagagatatatgtagtgagtttaaatttaaataataatgtctaaaaaaaataatattttttgttatatactcatacttaatataacattagatatatacattgttgtaaaaataaagacaaaaactcacataaaacataaatacttcctagtaatgtgaaagatgttgtaatcttattcaaaaaaaaaatggaaaacaatgttcccaataataggatctctgatgtttaaaaaataaggatgtcataataataagtgcttatcccatcaggtgtggtggcatttcaagagttggcaccatgtcaaaatatttttatattaattttttttaattggttgttatggtggacccattttggctctgttatagtgctactatgtttttgtatgaaaaaaaaatagattattattattattattattattattagaataatttgcggtataaatatttaaatttaactttcagttgtaaataaatacttcagtttaagtttttggcgataataacacttaagttatatttttggaactcntaggtacctaaccgttaaaatattatgtcgttattcacgtgtcattttcttattggtatattttaattaatt

SEQ ID NO: 128111 - DNA, 754 bp, Cannabis sativa
caggtcggatcatagctagatcagatccgacctgacccattgacactcatactctaaaatagttaaaccaagcacacggttattagaaatttttttcacaagtaagcaatgtaatatagataaaaacaatgacttatcatcttatgaaaaaaaaataaacactaatacaaacaataaaacaacacaaaaaaaaaaactaactaaaagttataagtccctcccccaaactaaagattctccaatgtgataataaaatacaaagaaaatgacttacctcaagccacatcatatggcggtggacggtatgacggtaagacctttgaatatgttgaaccttcaaagtagtgtcgctgctctactttaatgtctttagctagacactaactcctttttacagctcaacttgggcaattccaccatgcacatccttaagaggcataatgtcataagaaagcgctcatcttgtaccattagaaactttaaaattatcctcaatgtcatcaaagccttcaagttttctatagaaaaatgaccttcatacaacatcgaacagaatgagatcatttcttggtcttcttttttctccttcataagctgaacataatatttataagatagctcaaacattgtacaggctggccttccgagcatcgtgttctatggagtacatctaccactatgaacgtggccatgatggtggtcttccttggggtagtgtcgattgtgaatggtagtttgtgttggaaattatttt

SEQ ID NO: 128112 - DNA, 549 bp, Cannabis sativa
actttgatatctaccaaatcataaatcatgtcccctgaattttcatctatgttagaattttttactaaaattgaacaaaaatccttcaatctaataaaattcaacagacatttttaatgaataatataacaacattaattccaaacaatataataacaaaaaaattgataccaataaagtgtggttaaaaatattaagttgtgtatatgtaggacatgtaagtacaatatttagcatcactcatatataaaattatttttttaatatatatacgtatatgttttttcttgtttgaaagtacaaaaataatatagttattaatattatgtagaaaaaaaaatattaaaatataaatatatgagatatgatcaacaagtcgtttttggacgtgggactacttgatcaacaggtgccactgaatctggaccagaaagggtaataatctaatgtctatttatcaacactagtcatatacatatatattatatctatcttaaatcatgatatctttatatattaaaagtgcctatctaacggcaattcttggtt

SEQ ID NO: 128113 - DNA, 1295 bp, Cannabis sativa
  modified_base (1245)..(1248): a, c, t, g, unknown or other
cgaaaacctcggtcaacaacaatttttgtcttttccatatttgattaattttaaaaattatttatttattacaaaataaataattactattttcccaattcaagatagatttttcgaacaacattatgcaactctttatccctacctttgacagtatttcaaggtgccattcgggaatcatagacctataattctaagctccaataaagtagattatttattgagtcttatcaacaaaataatattatttattaatttcatgattatttcactataaatatagaattgaaatcttagtaattatataattatatttactgagttttgctacagtgtccattgatataattaatttcagtgattagccctcttgtgtcgcttcgtaattagttttggtcaaattactgttttacctttctaattacttctatatcatttagtaccattaattcattagtgaaagtataatttagatcccatctgaatttgcgtacacttttcagttttaagattaacacataaagggaaccaacatatgattcgttaggaaagtcaagatttcaaaattgtagatcatgttgccagccatccatattattagattcccaaaatagaattatgtataagatatttctaagaaaactttaacgagtgaattaagaaaactaataacatgaacatgagttcatgattactcaaaatttacactgatctactacatcattgttataatatgaattaggtcgttatagtaagttgtaagtttgataaagataactttattcatattggtccttattatatataatctctgttatatacaacaccttcacttaataccatactacattaataattcgaacagagattacttgcaccgaaaaatagatatcagtgaaccgtactagcatctattaattaaatattctgtaacttgaatatattattgactattttatttatagctaagtgatcttagttctttgtacaacaacaattaagtcacaatttcatatatgaataagaaattttctaatgtttatctataaattattcaatgtattaaatattaataaattaacattcatgcatatatcataatgttcaactttttatcaataatcggaaatgtctttataagtttttcatagcataaactctaacataactaggtgagtattacacaaattcataatatctataatatataatataggctaattagtaattttttcccccgaactnnnncatgtaccaaatcatgccccctgagcttttttggccgttaaaaattc

SEQ ID NO: 128114 - DNA, 781 bp, Cannabis sativa
tttttggcaagcaagattttattgtccaagaatgatttttcatattatttattaaattaaaatatacaagagccaatattaaattagatcaataacaatataatatataggtatgtacctacttacaataatcattcttgaatttctcatattatatttattataaatatctagttatacatttatatgttgtaataaaaactaaaacaaaggacaaaagagtgtgacaaattcacatgtttgaaatttggttttaagagagtttagttggagaagatgatggtgatagtcaagtataacaatgtcataatttttctttaatttcttgaccctttatttatttatttattttgttttgagtattagtttaccatatccacgttctcttatttttatttgcttatgaccttagactttgtttttaaatttaaattaattcatgccctccaattatgcatcacctcaaaaaacaaaagtcaatcaattgctcatttttctatcaatttaatatcttcaaatgcttttattctacatatttaaacacataatggcatgtaatagaaacattacaaatttagaaatgagaagccaaaacagatgaaagcacaagttgttttttttttaaataaaaaataatataaacttattataatttaagaatatacttatttgatactttgtgtttttttaaaatattaactttggtactttatgttttcataaatgcttatatgatatcttatattttgaaaatgtatattataagatatatatatatata

SEQ ID NO: 128115 - DNA, 1993 bp, Cannabis sativa
aattgaaaaacagattttataaaaaagtttaaaaaatcaaacataaataaaaatgtaaaaaaagtaccaaatttgacatatagtgtaaaaatccctaaattaaggatagggaatatcttcctttgaaaataaaaattggggaagcatttagatttaaagaaagaaacaaaaacgtcaaatcaagcaccttttttcctttcgtataatgttttccctttttgagagagagagtgagacgaggagagacgggaagccactaaacctgacccctcgaatgccatttggttgtggtgcgttggattaatctttatcatacaaaaagatgggatattatcaggtgtactgcaactcccgtatgctcatacacgtgtcacttttattatggtccatattcataattagtcaaatagttggaagtggtcctactccccaatagccaaaatgcccacttaatcactttgtccaactgtcaagtgggttcttttgagaattgactttttgggcgttactcctttcttataataatatcttccttaatgctaaaaatatcaatttcatctaagctacttcctcttatgttatatcgttaattatataattaaatattaaattttatataactaattaaaaaacatttaaatagtattattaaatgatactaataataatgttttaatatctctttccaaaggtgatagttggtattggtagaaagagaacaatggttttttcactgttaaaagtgcctacagtttgcaacagcaacttttttctaggtctggttttgcttcttcatttgatttttggaggaagctgtggaagcttaaacttcccccgaaggtgtagaatttgttatggcgtgtgtgtgtcaatagccttccaacaaggttccaattagccactaaacatgagcctgttgtgacatgccgcccgatctgttctgctgcaccagaaaacagcactttatgtgcttgttagatgcacctttgctgatgcttgctggaggaaaacaaagatgcctgttgtagcacctgctgctatgttattcacaagctggtttgaggaaaggttaaatatttggagtgaagccgagagtgtggaagccgccatggttctatggtccatttggaatactaaaaatgatgtggtatggaatgataaacttcctatggtggatgaggcaattcagaatgtaaaaatcaattatgtggactgatttaatgctcaaaaagccgataaggactctcccatggaccatcatgaggctcaatctgataaatagaagctccctgagtttccaatcatcaaagtaaatgtagatggagcaatcttttcacttgagaatcaatttggagtgggattggtggctcggtctgcatctggtgtggttgtccaggccaaaatcgagtgcaaaattggtgcacttcagccacatgaagttgaggcaatgggaatgaaagaagccttgagttggattaaagctaatgattggcatgatgtgatcattgagtcagattgtcttcaagtaatttcagatttacaaaataataaaattatggcttctccttatgaccatattatttctgattgtaaggcgctgattgtcgatattgataatgttttgttaagcgatctgctaatagggtggtgcattgtttggcgcgatcctctcttgttgaggctgatcatatttttagtagtcactctttacctactgtaaatacatccttagttcgggatgatttaatttaacgaagtttcatttttattcaaaaaaaaaaatatctctttcgaaaaaaaaaataacaatgttttaatatcttttatgttgatttgtagcatttgtttttgggaattcagccaaaaaaaattattattggaagtggaaaaaaataaaaaaaataagaaagggctatttacaaaaatatagaaaaaatgaagataagttttgatatatatgtatatggaacacttcttaatgagtattactcat

SEQ ID NO: 128116 - DNA, 586 bp, Cannabis sativa
aacaaatcaagttaattctaaagtcaaatcatcatcatcatcatatatattgttaggatctatctccatattactaacaaaataaatttataatagaccataagaaaaaaattattttaggtccttattttttaaaaaattagtaaaaaaaaatataaatttaagagggatttttttttttttttttgattcctagagctggcctgtaataatatggtatgatatttctcgctttaaaacctaactccttacagatttttgtggtttttttttggtaccttcacaaaaaagagacttttacacccaacaatcctctcctcaattacacatctaaatcttattttcaactcccttagaaaattataaatcctttgatcaacgaatttatttttgggcactttcccataaagtatcaaaaaatacctcgttacaataaaaatagtgttcatccttacataattattttatttttaagctgtaagactttaattgtacaccaaatatttatatatatatatttatataatgagcattgctattaggcaccagtggtacctagcacttttgcgacatgtcgcgttgcgat

SEQ ID NO: 128117 - DNA, 578 bp, Cannabis sativa
aattttatcagatgaatgaataaatagagaccctaaaatagcaaaggggtctcaaagtcaatagaaaaaaaaaagaacgataaacaaacgtaaacgacatagaatcaataaattaccatggccagaaagatttgataaagcttaagctccttggcatccatatactgacaaatatcgtggtaatcgacccgtccatccctattggcattgcagaccttcaaaagatccttggcgtacttgtactccaagggaatgtggagggaggagaggccagacttgatatgtgcatagtccaaaaccccaacattagcaacgtcgaagaaattatataggctacgaattctaaggtccctttcttctttggtttaaggcttctgatggtggtaatggtaaaagaagaagaagaattggatgggtggttttgggctttcgagaagaaagagaaagaaaaaggaaaggaaacgaagaaaaaaatggaaaaaataggaaaaaaagtttttttttatgattttttttataagttttaaattatttttattaaatttataattaaaattacgtggactactaaaatttta

SEQ ID NO: 128118 - DNA, 3067 bp, Cannabis sativa
taggagtattatttgaattatatgtgaattatgcaatttttataatttttacttggtgacaacgaaaaatacgatggatggctagtttgatcaaatgtgtaggtctagaaccttattactttgtgggatgtatgctggagcaattagagtaccggggttgagcagagttatggattttgactattttacccctgatcttgaaaatgttaaagttataaaacaaagggcatttttagtaatttgtctaatggttgatttggtggctgcctcggggagtgacacctatttattttattttcagccagggtgtatttttttaaaccttatttcattttgagaaaaatcaagaaaaagccaaaactcaagaacaattatctttcccttctctttctctttgaaccagccaaaaacaagggggtttgctgctgatctttggagttttcaacaaggaattgaagaagaattcaagttgaggtaatccctaggtcaattgttcttagtttttcaggttttggttttggtttgaatttgtgattttgagttataggggctattagggtatgattaggttatggttcagtttttatgttcattttaagttgattttgggttctagttgttgatttgagagtattgtgtggaaatttcccaagtttgagctttgaaactcaagcttaggtctttaacgacatgttttgattcagtgactttttcttggttttattggttggaatatgttgtttttaccctgtttaagtactcttgaaagtttggtggcaattggttgatttttcagcaagttcgaggttgtttggggaaacctggtgcaagccggttaatcggtttgctaggtccagtaaaaccgatttacatggttttggcagattccctgaacacctcattttctcaattgttacccatttcagtgccttagttgagtgtttttctgtttcctaggctagtctagtccccagtgataataacagaaccttgagttgtaggttatagtttcctggattagggttttagacatgtgatttacccagttttaatatgtgattagggcatccatccaacacgagacttttcgttcaagtcggccaactcacttgaatctggaaagaaggtaagaactgtgtataatgtgtaatatgaatatatgaatgtgtgtatatgttaagtatatatgcatgtttatatgtttcttacactaccaacacttaaacggttatggtacagagtgcattgggatagtgtatattgttaaagagtacattacagtgataccagcacaagtacgggaaagtatagggtgtgtgtggtatatcactcagtggtactcagggtatgaatcaaaccctaccaacactgatacaataaggtaggaagtgtatgtggtatagtggttgtaccctagtagggaacgttcttactcatctgttaagccttgtaaataggtgtatgggcacctagatacaagtcggtattatatgatatgttatatacttttcttactgggtctgtcgactcatagttttacttccttgtgtaagtaaaggaaaggcaaaagctgaacagaagtgagcctgagctgagatgaggttgtacatgtcatggcggcgcgacctggagtgtttggtctcatgacatctgaggttgttaatttatagtggatatgcgacctgacatctgtattttggattatgttgtaaaaggcttaaaaacgagatcccgaatttgtatatatttatgtaaagttataaagtttaatatttaatataatagttttaatttgacacgatttttagagaatgttctttgactagcaaatagcactgtaattgaaaaatcattatagcatgccttcgcactagggcattacaattttggtatcaaaactgtcagggttgtctactgaagcttgccaaaacatgtacaatcttcattagagaaagctcggctgacggttcagtaagctcgtatttgtttagtattgtatgtgattatcaatgcatgttaggaagcatattagtttatagttgtttattttaatgcgttgccttaaaatccctaatagcggtattaagtttttatgatcgctgtcgaacctgcctggcttaaggattcgcaggctaagtcttattaaatggacgccgagtgaaatacaagaagtcagtgtaatagggttgagaccggaggcggtcagggaaatcaaattccctagaatccccgtggtcgcggccaaggccgtggcaggatacagggtggtcctgtgaatgcaccacaagctcctccagatttggtagtagagatttgcgaaaatgtaagatcgtatctgtcagcaagatgaagaacttttgagattaaggcagcagggtcttcctatcgtgcctccacaacaagctcaggctgtcgtagttccagcggtgccagcagaataacatgttattggcaaccgtatggagtcgttatacgagaggttttgtaagcaagcacctccagtgttcttgggaggtcctgatgtgatgaaggttgagcaatggctcactataatagagtgaattttggaatttcatggggggtagttggaaatgattgggtgacctgtgctactttttcagttccaagaagacgccctagtgttgtgggaatcgatgtccctcagccgagatgtcactgttatgacctgggaagaattttgagagttattcaatgccaagtattcactgagttggtgcaaagtgagggtatgtcatttactgagtatacaacaaagtttgactgtctggccaagctcgccttggttattgtgcctatagactttagcaagaaagaaaaatatctagccgaattgaatttgaaaattagacatgatctggtgattactaccaatgaggcaacatcatatgcggagatggttgagaaggctctacgagcagaggggacggttaaatttcttcaagagccccatgttactcctagtgttggtgggaaccccactcttcctactcctgtttatggtagcgatggtggtgattccaccactgatctgaaaagaaagttacct

SEQ ID NO: 128119 - DNA, 623 bp, Cannabis sativa
agatcgtcttagtgaaaagtgaccaaaacttacaattagacattgacttgacacaccacgaacatacttgaggcatcgaaattatattcggagcaagttgatttttgagcactcgaggacccgaggtgtaatatcctaaggtttaataactagattaccagccctagctaagtttataatgtattaatgagaagttattatagtttattgcattttaagaacctgttggtgtgttaagggtattttcgtaattttgacctgagaagggtaaaatcgtaatttttttttgatatattgtgattattgagtataatattatatagtatgtttattttgtctatctgcaggtattttctgacaagtcgacgtggtatagtcacaatcgagtattttgggctgaacttggttcggggcccaaaatacatttttctggatttatttatagtatttatatgataaatgagaaaatttgaattattaagatatatgtatgtgagtggttttgaccaatttacccttgttatgtttatgtctatatatatgccataggagcattttggtcttttgaccaattatatatatatatatatatttcaataaaatctaatttttagcaaatacac

SEQ ID NO: 128120 - DNA, 2167 bp, Cannabis sativa
tggtcttatcttttgcctccttctcagcaggtgcaagcttggcctcgaggttcttcttcaccttctcggcatcctttgttaggcgagtgttctctgacttggcatcgtgccattgtttggtcaaagtctcacgctgacctatcaagttctgaacctcaccttccaagtatttcagtttttccattccacgtcgttggggaacgaaggaggggaaagtttgctgaagataaataaagaatgcgtaagtaagtctgaaaatgattagaaggaaaggtaaaaggataaagaaaaaagattttaccgagaggccatatgcaacactcctctcaagcatattctccaagtccccgttattgatcaaatcccattcatgggggaggaaagccttgaagtgacgccagcaatctgcgccaaattctccagtgtacttcgagccaaaactgttagcatcgataggaagagtctcgaaggctcggctcgaagaggcagaagcttggtttgcattgggaaggggctcttcggtacttagggagaccggaggaggaatcagatcttgggtttcagactcagggaccacgagattaacggactgagaagctcgctttttgttagctgtggtcttcctcaaccttttgaggggctgcacctcaacgtcagaaggagcctccaaggtggtcagtgtattctttcctttcttgtggatgaggccctcgaagttcatttctgcaagacaagatacattgttagcatttattgaaagacaagtgaaaaggagagatcgggacgtaatttcctgcctaaggaatttaccataatcactagaagacgaggaaggatgactacatccctacaacccgtgatcttgaatatatcgtagggattaattggttctaaattccagctcgcgtctaaatgactcgccctatcgatcatagtctcgtactgctcgactatcccgtagtacgactcagtacagctaatttggacatggaatctgggataccaactatcatacttatgtgtaatacgatctatgaggaggggatgccaagtataaaagttataacggctatctcgaaatgtaactagagtgttacgctcagccataagcagtgtgggtgacaaaccacattgattacctcgggatgctccttcactagcttcccaaggggcagtattttgaaggtactgtgcccgagccatgcgatcttcagctttctcctcattagggacaggaacttgctgccaagaagaaaacctgggatatttgtaatcacaagtaaactccttgtcagttagaagaaagtcataggacctaagaccgtaagggagagttagcaacagcctgcgtcgctcgaccatctcaagagtaggagcatgtcttttcaagacagctgtcaaaaataaagcaaaattacaattagctaaactcgaataaaaggcatggattaataaacgaagtcttgtgcaaataatcacttacgaattgtacggaaagtggttgtgccaattggggagagtccggtcttccaaaagaaatcatacttaaaggaagttttgttgggcaaatccacaataatcttacgatcactattgtgaatcccaagatagtagaaacccattgctgcattcttcctcgctggaacagccttgatggtgtagagatactctatttccacggagtggacactccctattcaagattttgtacagaaccctcaaacttgcaaggattctatttgaaatgggattcaattggaacagggcaagcccgaggtggtttaggaagtccttgaaataatctcgtagagggattattgctctaggcttaatgtgttcaaagctccagctgctaatcccagtcgagtcacttgtactggtcttgccattggtcccctcagaggtttcgagtgtaagtcgcactagtgggtaacaactaaactttcctgctactaccgatctaacccaataatctcgcttatactcaataccacaagtcttcaatgtatgacctacataacatgcgatggctcgcaccttcgactctattaactctgccttgaaagagacgttagggtcctagggagtccttgatttacgtggcttggaagacatgatttcaaaatccaagtcacttggttcaaaagcaattgtgaccttaggtaaa

SEQ ID NO: 128121 - DNA, 602 bp, Cannabis sativa
gccacaacaaaaactatgcatgatgcgagcaggaataaggaggaataaggaggacaatattagtgtacgaatttggaacagtagtgcatttattattatcaatcaatattttttaagaaattcaaaataaatttatgtggtaagaatatgatttaatttaaaatttgattgcacgtttatcttttttattttatatgctcgtaaaataagttgtttggacaatactttttgtgttataaattattctaatttttgaaattttttacagatattttaattaaatacaatatacaccagcatatataaaaaaactaaattataattattatttgaatttgaaatataaaaaatagacatcaatagatgtacacggtagaaacacccatgcatacatatgccttagaaaaagtgttaggttggaaaaatctaaattcccctactaatatgtttttggaagaaatatgaattattcttattgttttatataaagaagatatatattataattatttaaaatatctttaaataatttaacgtattttttttgaataaatcaggagatttattaattaataaactcgtttaaaataatagaacgcact

SEQ ID NO: 128122 - DNA, 590 bp, Cannabis sativa
tttaatcttttatttaaaataaaataaaattaataatgtagataaaatagtaaaggaaaattttacaatgcaccattttaaaagggatgtactgatgcatccctatctatttaggcgtgcggaaaaaaaatttagtccaatttttttcatagtcgtgtacgttgtagttatctaagatatctcgcaaaattttgaaacctttggagaaatttaaaacgccaaaaataaaatttaaacaatcggttacacgtgttacttttattttatacgcatgtgttatataaattattagaatactactttttatagtgtaaattatttttgatttctaacatacataactatgaaaaaatagactaaaaaaattctttcaaatatcgaaacagataaaaagtgcatatataagcacccaataatatattttttctttcttttcattttaatttcctccaaatttttttcctactatattttttatctctctaacagagagaagaagactccttttattattgttgtaatgctttacacggctatatgccaaaagaataaaatgtttacaacaacttaagtatatatagaataaagga

SEQ ID NO: 128123 - DNA, 847 bp, Cannabis sativa
tccacatatgattcttggactctctctctctaaactgaatatatctaaagtatgatcttggagattagagatcagaatttagaactcagaagctcctttgtgaataaaggaacccctatatatagttgttggtgggtcccctttaagttggaattaaagctaactgttataactaacagcaactttctctagattcatttgataacatatagatagacgtactgacttgacaagttaagtgagtttaatcccgacaaaggtctatctctatctcattgtagtaggtctaagaataccattgctcattcttgcaaagaggacatttgggttagatggttcctatgttcggtagttggggcttcctttagattttgttacttaatcttctatgcctcttttgcattttgagatcttttaggctttatgccagatttggctagctccctatccattcattgactttgtgcaatactctctaaagagaaaaggacattagaaaaataagtgttcatgacttttcaaattcatttcacaaactgggcatatagcactttcaacatacacattcttgctatgatcaaattatcttaagtaagaaaatttgtacgaattatctgccacaagataaatcaaagtttaggcaccatgagaacacaccaaacaactttaatactaaaaatgttctaaaattatatgttggctaaatctctggtcctaaggatggatattaataataatatgaatattattatatttaataattacatgtccttttttctttggaactatttctggatttgttggaaaaccatatactagaactaggggtgtgcataaatcatccaat

SEQ ID NO: 128124 - DNA, 1186 bp, Cannabis sativa
tcattaacctcgttgattagcaaggagctgcacaatacgtttaaaatcacttcaacacgcctatgctagttagggtgttacactagccccatggtgctatctagaggctagctaggggtggccgaccatcttctatgaggaagcttgtctgtcatttgatgcttgtttgagtgttggggtccttgtttgagtgttggggtccttgtttgcttaggtccttattggtgagttttactaccacgtggcactaattttatccacgtatgcactgccacgtcaggaggacaaaaatcgggataacatttgccccccaagtctctgtctggatgttttacgaataaggacttaccagctatgttggtgcgatcgggactactatagcctttgctgaataaaagttgttgcatttttatcggtttaatatactttgtcttggctgtctgatcttatttgctatagaaaaataactactttcattgtccctttgttgtgtaggtgaagtaagtagaaagggtctcacatgtactatataagtgctttcggagggaaaaactttttccacttttcactttttacattttactttctctcactacaattttgtatttgaaaaagctcctccttctctctagacggtcaaacccatcaagcaccattctcttgggattttcatattgttttgatgatccaagcttcccacattcttcctcaacggtttcttgtagtgggtaagctttctatttctgctatttcacttgattaggttgattttgccatgaatgcatgaacattatttcttaatttgaacattctttgattcctgcgttagattgttgtctttttggtatttttaaccgcatgatagccttaggatacataatgtgtgatttctagacaaaaaagatctcaatctgaccttcgttgtgattcttggctctttgagtcacgaagaacatgtttgagttcttgaaaaaacacatgttttgatccgtgcaggtcctggccggccaaggagatcttatttaagacctggctgactaagggagactgtcaaggggtcaagccggccaaggggatgtacccatagttgttgggaatattttaccaatatctatatttactaagaagtatgttgaattaacatcctaaatatgaatgtctccaaaacaatgaaattaaacacata

SEQ ID NO: 128125 - DNA, 666 bp, Cannabis sativa
aatttaattatagaaaatttaaataatacacttaaaaataatcttttttttcttatttacaattgtatggttttgtgtttatttcaatgttatttttatttgtagcaaagttatattatattttcataacataaaaacaataatttttttttaaaacatgtaaataataagaaaaaaaattcgtaataaagtaaaaaaaaactcaaattttataaaaatataaatatttagttgttattgagtatttttaaaataatcccttaatttatttgtagaattgtgataattaagaaaaatgcattaattttttttagaaatttggacataattaaccaatgagtggttgtcatatcatcatttagaattttggtttgttttaggttattaattagtcaattattataatcatattattgttgtaattaatatattagatccttataacctaagaatccggcaatttaaagaaaattataaccaaaaagttactaaatatttggcttttcttgagtgctagtcaatttttatttttgtttcagaaaatatatatattttcttctattttatataaatatcaatgtatatttgtaaaatatatacatatataacaagtactcacatttatatatatatactagcaaaaattacgtgcgaggcacgtatact

SEQ ID NO: 128126 - DNA, 842 bp, Cannabis sativa
  modified_base (798)..(799): a, c, t, g, unknown or other
ttttactattttagaaaatataaggtctattttgtcatttaacaaaacagaaggtccaattagtaatttttacaaaacacaatgtccaaaatggtatttatatttattaattattaaataattattttcattagtatctataactttagttaagaattattatatgggtaattacataaaacactatttttttgtaaaatttttacatttttaggttcaaagttttttttttaatatttttacggtattctataaaaacataagaaaactacataaaattaacaagaaaacatcaaaacaacaacaaaataaaaacaaaacaacatgaaaaataatatacaaataataaaaaatcaacaacaaaatatcaagaatacaatataaaaataaatcaaaagaacgtattttatgtaaacaaaatttaaaatatcgtgaaaatattaaaaattccataaaaactgtatttttataatttagatgtgtgtcgtatgtatcaaatttactattatttttatttcaatacttttaattattttagtataaaaataattacggactaatcccacaaggactatttataaaataatttaatagttaatgatagtaattagaaaggggattttgagttgcaatagcataaaaagaaaataaataacgaatgacaattaaaattttaaaaataattaagaattattctctacctccaacaatcaatcaagaataatattatattttatattataattagactattaatcctgtagataatcgtttatgtaacgttcccgcttcaagccnncattgggcccttacacccacggaaataatggctcttatacacg

SEQ ID NO: 128127 - DNA, 761 bp, Cannabis sativa
tatgaagccgaattgatctaaatcaatattatgactaatatgaatcttcaagcaatcaaatgaaaagcttccatagatatagtttcacctatctaaaatgattatgccacaaacaaatctacttctcaaataagaaaaaattcaaatgcaaagttctgaaagacagaaaaattgaataagttctttctgttaaaacccaaaaaaaaccatctcatactaatcaggaaactaaagaaaaaaaaaatggttcaagtaaaagaagcatccaagcttatgacaacaaattcatgcaactttataaagccaaattattctaaaacgatattattactaatataaatgttcaaccaatcaaatgataaacttccatagatatagtttcacctatttaaaatgattatgccactaaataaatttcaacaaaaaggaccagttattataactcctagatttcttctacattaatcatccacaaacaaatcttcttctgaaataagaaaagggcaatctaaaattaattcaactagacttaaaatgggagcaaaaaagaaacactacattcaaacatacaatgcaaaagttcactttttagaaccaattatcttataaagagaaaggttacaacttccttaccatagatgattactgccacaatacaatcattcagtttacaatctcaactagaataaaacataagagaaaacccaaataaaggtggaaagggaaccccataacccctttacataaaaaaaaaaaaaaaa

SEQ ID NO: 128128 - DNA, 930 bp, Cannabis sativa
tattatgacttcaattttttttttatactatcttacttatatcccaatataattttctagtacgcattggatgttagaggttgttgcgctaaagaaaattatccatttagacatgttatatgaaaatttcggtgagcacatcagaggaaggcatgtgttgagctgggaagaacaaagggctcaaacacgcaatcgtaagtacacttggcatggaacaactcgttagtaacataatttgcagagtatgtttataactcggctggctgaatggccttctgtgagacagaaacatacgaactgctaacttgtgaatcgatgagaaaccatgtgagtgcaagtgagcatgacgaggcttcaacctcactgcacaaaggagaaaagataacgataaaaacacttagtgtgtattacgtggtatacaagctaagcataaacaatatggtgaatcaagatgacagatggtgaggcatctatctcgctgtaagatggcatgcatgcgaggaagattatctcgacaccaaaaaatatagttattagagttaaaacagtgttaatcttaggaagtttgatgacaagctactgctcgccatcaaagttaactcgactcctttcctagcgaggcatccccacgagataaggcttaccgtatatccttaaatgggcattaatctcaaccccataaaagcgggatacttacaactgtgtgaattataaataaaagcctcatttactgagcgtgatttgtaatcaaatccagggatttgagggaataattgctataacgattatagtcaaattttgtaatttattgcccactatgtaattataaattgtggtaggaaagatgaagaaggggacgaaaaaatctcatacaagagaggccctaaagagaaaatacaatcagaattctgaataagattgactcgtgga

SEQ ID NO: 128129 - DNA, 666 bp, Cannabis sativa
  modified_base (593)..(613): a, c, t, g, unknown or other
tgtgtaatacgtggtaaacatcagattaatacgaccccactgtcggttgaccactttttgaggtcaatagtttggtgtttttattgagagtgagttgatatcatatttgatcaaacgctatggttaacacgagaagacctccagttgcaccatctgcatcttcgggtcttcctcaagaccctcagactatagatcctgatgtaaatgttccagccacgactaaaactcccatgaacagtgcagatgttgtcaatcctgccatctcgacaggcaccacgaatctggccactatagctggccaggatggcacacatatcacgatggatctaagcaatcgacccttgcctctaagggaggaccctctacaatcgcctcccactgaaggaaggatccttggggaacatctccaagggacacagccgaaccacatccttaatattatgcaggagagacaggaccaggaattggcaagccccatatagacttgggagaagatctcaagttagccagatttagagaggccatatgctaagccgacctaactgaagaaccacgcgttgttgatgttagaattattttaccacgatctagannnnnnnnnnnnnnnnnnnnnaacatcctaaatatgaacttttaaaacgatatgagataaacacatataaagta

SEQ ID NO: 128130 - DNA, 1550 bp, Cannabis sativa
ttgactgaatttgacttttgatacaccgggaacctgaaacaaggaaaataaagcgtaaaaccgctccaaaagacaccaataaccgagaaagaaaatgcttacttattatacctaaaacataggctaaatataacctaatagagctgtcggaagtgtcattaagaagacaacagtcaaatagtcagagtaacaatggtggaaactcgtaacaacacacgtcagccccgtcctccccaggatgcttaaaatccagaaggcaaagaagtggcctcacgagtaaatgtgggctctgaggaacgagacgaggcgaacgatgaggaatatgaagaaaacttcgaagggtacgacacctacgacgaatgtagctatactgaactgctggtcctgaggcaaaaggtggctgatcatgaagccgaacttgccgcctaaaaagagcagaataagaggatgcaagaggtaatggtcgccatgtaaaaagtcatggaaacaacggggatacatatacaccccaaggccatcccagcgggaccagagaaaacaccagaagaatcctcaccaagtactaagaagcccaagaccagggtaccaaaccctatacggtacccttccggggaaaaccttgagaaaaatcccacttcaatcctagggagaaaaaagaagatgcaggatccgcgaaaggtccgctcagatttcccgaaagggaaaggtctgcagaggggcaagctccctcgagcgagtcttggccctcaggatcgagaggaccaaaagagcgtatccgtgtaccaagagcccggggagagagggaggaaaaatcaaaggtaccctccaactgacctaagatagaaaattaatgaaacggttaaaacgttcgagcacctctctaacaccagcattaaacgcgcaggtctatcaatagatcgttgcctgcaaaaggaaataaatatcaatgatgacgatcagaaatgtaagccacgcacctagggcacgtggcactgtatttataaagaggccggaggccgcttgcaagcatcatcttccatttactaaatgagacttgggggtaaatgttgcctcgaattttttccaaaatacgtggccgcggctgcgtgtggtaggtgaaattcaaggacacctcacccataaaaattagctaagtcataaatagataggaaggtacatttcagggagtgagcccccagagaggagcatagtgcatgcctttactctccgggaattagaaatacaacaatgcatctccagagaaggagaacctatttgaacattcatttcacatttaatgtggcatggaggaaacgtattaaaacacccataaaaggatttgacagatggcgtaagcctcttttacggcgattatacgataatcaacgagtctagtgacggctctattatgaagaatcacatcaatcaaggaatgataaagattactctcacctaacctcaatgatacctacgacataggtcatgtatgtcctattttatatctgctaggaacttgtgcaccgaaaggactgacacttaaagacaagtga

SEQ ID NO: 128131 - DNA, 788 bp, Cannabis sativa
ttaaatataaataaaaagtcacccatgaatttctcataaaccaagaaattcagttatataggcacactttatatagaatagataacaaatgtgtcattaaaataaataaataaaatttacaaaaaaaaatagatcaaactcatttaaataaatttttaaggtatgcacaactactttatgaataaagatgatataaactagaataaagatagagatgacatgaaatgagatgtagtatttggtgacaccttaatccaagtttttggactaataaataaataaattttaatatttatgacttatgagtcaaatttattagtatatgtgaaagattgtttcggtaatttttttgtttattatttttttttttttatcatagtctaaattataattatttttttaataggaataagcaaattatattattaaatatccttatcaattacatcatgcaaactcaaagcaataggaatagaatgagatgctctaaccaaataataagcaacttaattaataaatcgtttaacaaaacataaaataacattaagtaaaacagacaataactcccaacaatcaaaaacacaaaactcaaaagcaaaagtcatacgcatcgagctaggaatagattgaattgtgtaaccaagctatttgtttcaacaaccacattaaccatgttgttttctttcaaccaacttaaaacttctttcacaccaatagcttctgcaagcatcgagctaaccgagccgaatttttttaccaagcttagccaccacaagtcagcattcatc

SEQ ID NO: 128132 - DNA, 1253 bp, Cannabis sativa
gttgattttgtttttagctaacgacaaagagttttaattaaagtgattgataaataaataaataacataaagtaaattgcatagagtaaagaaaacactagatttatagaggttcagtcccttatagttggtaatggcctactcttctttaattgtattaacttgtgagcaagaatgaactattttctctccaaagttcttaccatgatctttgagcaatttaatcttagatcaagatttcactcttgagtggttttcaatttgaataatttcgtgtccctgaatagtgagatgagatcactatttataggaattaattacatcacattagttttcttaaatcaacaagaaaaaataagaaactagtttatttctataattacaatgaagaaaatggagaattaggttggttgtttttattctctgaagatacgaatttatctcacaaatgtatggatttttatgtgactgccaagcatatatctgataaattgataattcgcacctcctgattagtgcatgcgagtaacctactttagtagagctggtcagatgtctattcatgaactgctcggacattctactatctatgtatgacgttgaacatcatagttgtctgcacgacctattaggagtagaatcatctatccagactataaaatatgttacacgtgtcacttagacagatgccacgtatagtgtagaaattaagaaaatataaaagtgagttttgatgagttattttaaaaaataaacaagaagggagtattttttagcaaaattagaaatgaggatgatggataatatatatttatatataatgtataacctatgtacttttcttaactgggttccttttattcatttttatttatgcctcatttacattccattatcagatgatgtgaattggtacatacatagattagtgttggcagaatgacttgtttgataaggaaaatttgaaaaaaaatatacataaaataccctaatattttatgcctaaactaatgcttttcaacattgaaaacatatgaccacttgttcaaaacccgaaaaatacctttctcaaaaacctaaaccctttctctctccttccctcaaactctctctgcctcttccccttcgcccaaacccacatcgcacgaccccgcacacaacccactccgactgaacactccgattgagacccacacccaccattccgaccctcatcaccgcccttcgcttgaacccacatcgcacaacccccc

SEQ ID NO: 128133 - DNA, 869 bp, Cannabis sativa
tctttggaagttttagtgccatttcgatttccctcgatgcggtcgctggtgtggaggtatcggacgataggctggaggctctgtgtcttgtatgtgtttgtgtttattcctctgagaaagaggaaaatagcgtttttggaggacctaagcatcttcgttttctttagcaaaaaatataaaatgaaaaaaacatcttcggttttgccaggtgccacgattgtttttttagtagctcacttatatatattcgtgagtaatttgtaagtaaataataagttaactcttttacacataaatatttggattttattaagataaatacttcaatttaatttttaattgtaataagagttaaatttaattattacgtcctaaattattctatattcttagtcaactttccttttttagtttttcttttcaacaaaaataatatgttttcttgagaattttatttaattttattcttaaaaaaattattgggaacatttgaaaactaaaaattgccttttaatagtaaattaattttggcacccataaatttatgtagtgatttgaatattgctacagtgtgtctaacaccagcattatttaaaagatggtggtgttgaatactatggagaaataattataagtgtgacagaaaacgtgagatgataatttttttcgttctcttttgcatgttaacataatgtgtgtagttttcatatttcatttgcaaatttttattgttttgccatactttattccgtcaaagtaataatcattgatgtcattgacggagggaggatttatatgtttgggggcaaattgtgaaaaaaactaatttgtgggggaggattattaattactatagataattatttttt

SEQ ID NO: 128134 - DNA, 739 bp, Cannabis sativa
cctaaaatatctattatagaaaaagcccaagaaaaatagaggagagaatgctttggtgtggctaggattgaaggaggaagaagatgcagactgttcagtccgtatttttgaaaaaaaaaactctaaatttccttttttgtttaattttttttttcaaaataaaaatataaaatttgggcctaaaatatctattatagaaaaaaacccttaatcttacatatgaatattctttatattttttctttatcatttaaataatatatttataatagaataattagtatatttgtattttaaattttttgaactattaagttctgtcctttaagatatactgcttgtaaataatactcctcaaaatataatttttacattaacgtggtccttttatcacaccctatccaattttttcataaaataagtgacaacataaatattaattaataaatagatacaaattatatacttttcaccatttttacttaatgaataatagaataatatatatatattttcacaattcatattttatttttagtttttttattcgtaaaaatggtaaaaaaagtatataatttgcatctatttattaactacaattcactgcatcacttatttcataaaaaattgaatagagtgtgatggatgaaccatgttattacaaaaaaaaaaaaaaaatatatttggaggggtattatttgtaaggggaattatcccatatattatttttttatttttt

SEQ ID NO: 128135 - DNA, 682 bp, Cannabis sativa
aaaaaacaaaaaatgtgaaatgaacaaacacaactactcatgattattaacacatttaggactcctttagtactttgtattagtttgtatagtattatattattatattaaatttttttatattattttttatgtaataatgtgttaagttttaattagtttatattaaaacattctatatttatatacattatataatattatataaaaatttaatataaatcacaatgtaatatacactatacaataccaaacagacccccaatgactaatattagtccacacaatataaaatcattttattattaattattaacatggaacatattattaatatacatgaaattaattaggtttgatggagtttatgcctactgtttttcctaacaaattatctaggcctcaattttttttatatgatattttctttagtaaaatcttaaattttgaaagatctttttaaattcaaactcataaatatcaaatatatatatttgcttatatatatttgttttggaaaatttaatgataaggacatcacttattatttcctacccatagggagtgtagacatccttagagaaaactaaattttttatatatgactattgataattacattaattgtagttataatattgaaaataaaatttaaacattcagctatatgtacaattttatt

SEQ ID NO: 128136 - DNA, 1253 bp, Cannabis sativa
aaacaatttatttatatggttaccggttacaagagcctatttaacaattttaaattatttaaaatttaatttattaatattaaatatataaatattagctctaagaatgtacatacatatttttctaattcatcattaaactattgaactatgaactatgttagataacgtgacattagtgttatataaataacatgttaaaaaaaaatgagcaatatgcaactataggagatatttacaacaatttttatagttcaaggaaaattttcagagtagaaaaatttttagagggtacacaaggatcatagtttgggggataaattatatttattcataaataaaacagtaccaattgactttgtcttctttggtttgttattctattgaaacactagtatttccaacaatcaaaagtttacccttcctacatttcttcaatggaaggggagactatcaaaatgataaatcaagacctagtgaggttggataggtttgatggatccaactttactaggtggcaagacaaggtaaaatttctcttgactacactaaagatagtctatatacttaagtctaccttggagcctctacctgctccaactgagaaggacacttctgagatggtggggaagagaaggaagagaaggaagaaagatgatgacaatctcttatgtagaggtcacattctcaatactttgtccgataggctatatgatttctacactaataccaaatctacgaaggagatttggaatgcattaaaagcaaaatacaaggcagagaaggaaattacaagaaaaaaaaaataatttctcaatattttgaatcttctttcagtgatgctaaagatattcacaaattcatgagttataaatcattgtgaacaagttaaaggttttcaaaattgagctttctgaagtatttcaatttggtgcaattgcgacaaagttgccaccaacttgaaagggctttaggaaaagaatcacataaaaatgaggattattctttggaagagatcccaaatcatatctaaatcgaagatgaatcgagactgagagataagagaaatgtgaaggagcctggagaggaggtttcttaggtcaatgcagtctcaaacaagcattccaaaagaaacaatcataataaaggcggtgtaaaatatttgggtctaagaaaatataatagccaattcaaagaagtgagaggctattgttttgtgtgtggaaaatctgggcactacgcaagagattgta

SEQ ID NO: 128137 - DNA, 1988 bp, Cannabis sativa
  modified_base (301)..(324): a, c, t, g, unknown or other
  modified_base (512)..(550): a, c, t, g, unknown or other
taagccataagatatgatgatcatgagagatcgatgtataagacccggcccaaagaataaggcaagctagtcatcgctcaaggccccaacttttactctgatcaaataataagtttttgggataatttcacaaatacacaaaattaataaaaaatacaatttcacgaaattttaaatatttttacgaatgttttaattttatttacagaaaatacggtcttttatgttgtattcatgttaatttgtagttgattttttgttatttatatgttatttcttattgttgttttgatgttatttnnnnnnnnnnnnnnnnnnnnnnnnatgtaattttcttgttgttttcatgttgtttttacgagaaaacgtaaaaatgtaaaaaaaaaattcattaaacgtaaaaatataatttttttacaaaaaatagtgtcttatgtaattatcccttaatttttttaaaaaaaaaattatattttaaattcttatcactttttataataataataataatnnnnnnnnnnnnnnnnnnnnnnnnnnnnnnnnnnnnnnnaataataataataaataatgttattttcttaataaaatatcaaatttattctctaaaatattttgtttttaaaaaactactatttataaaagtaacatattttagatttttaacacataccaaaaagaaatgacattttttggcccaaagcccaaagttgtttgggcttgttttgttttgggaccttatttataggggcttttataaaaagtcaaaaatttacaattttactactatataaatttttttacaaaattactgtcttttataaaacaacaaaacatatcaattaaaaacattaatagaataactaaaaaataaccgtggaataacagtaaaaaacttaacacagtacacaatatttttgaagaaaaaaaattctaccccatagtgaaaaagaaaaaaaattaataattttaatatatagtgtaaaatcctttatttatatgggtgtacaaatcatattgttcaattaccaaacttcaagataacaagaactatcccctctcaaaaataagataaaagaactaagtcgagtaatattagggtttatttattattaattcagccatggcaaagcaaaaaacaatttaaaaactccatatcccatactcttacaaaattaaatatttaaataaatttatataataatagtcaatcaatatatatatatataaaggaaagtttcaaaccttccatgtggcagatttttttttaatatcttttttcctattttttctcatttttcttagtttttgtgatttattatgtattttaaatagcatatgtcattaatgacattaatgaatatattaacgtatactgactatgtatttcaatttatactattaattagatgacttctttaatctatttttgtataattatttaaacgtatatatccaattaattcccaacgttaaataatttttgtcttttcaatttctgatctttcaaatttttctaattaacatctcaaattaactcatgtaaaaaaatttctataaatatgatctcatctctatttcatctcctcataacctctttctctctctactttttaagctcatctgttttctttttaaaacaatgacagaaaaattaaatgcaatagttgtgaagtagaaattataatcatcttcatctcaacaagaataaggaaaattaacattatcatcagccattgatcaagaacaaagagttagtatataaatatatataatatttaaaaatacagagttagtatttagtgtatatattcaagcttttgactttaatgtacatcaagatctacttttattatatatattttttttttgaagaaaatttttattatatctttactactatattttctcatttttattcatgtgtatgttccattgctacggaggaattaacgctttgtagaaggatggtgtgttgggttttatgccct

SEQ ID NO: 128138 - DNA, 2000 bp, Cannabis sativa
  modified_base (100)..(104): a, c, t, g, unknown or other
aacaatatctttgaatatgaattcttagacaaaatctttcgaccctttgcccagtgaatatgagtcactatatatagggctataagcttggagaggaagnnnnncccttctcgttacaattgatataaccggaaagatttcatagtaaatacagaatacactaaccgtgggatttgcacagcttgccatatctctgtaatctgatcccaaagttataggaattttcttgatgactaacgatgcgaaagctgaatttgctaagtgttggcattctgcgcggattgctcactgctcggtctaagggacttcgtccgagcgaatgatgaggtgtcctgttcggcctgtgtcttgcgagcagatacccggagtcgattcctcgtgtcaccatcgagtgatgccacgtgagagtgcaaaaattaagataacacctaccgtagtggcacgtggttggtttttcttttgcctgacagtatccacacgctgaacagcttcttcgagcttaatgaacccatctgcccgatctaggaactcggtcttggatctaacagttagcctattcatatccttccacaactctgggaggctcaatgcccccgagtattgcaaccagtcttccttcttcagtcaaccccgtaatgtttttagcctcggtcataaacttgctaatataagctcggagggattcccttggcatttgcttttactcgaccaggtcttcaaggtgcgagggatgttgatgagaggaggaaaactgtgcatggaactctgatgagaaggcattccatgagttaaacctgtctagaggcagtttgaagtaccattgctgggcgacctcttcaactgtagcaaggaaaattctgcaccgtacatcacgtcttaccccctgcaagtccattagcatctcaaaatacttcatgtgtgataaaggatcttcttttcatatatacattttccaagtaggcattttgaactaaggggtaactcaagaacttcaattttaggggaaaaaagagatctatgtgcccggtcgagttcaagatcagtgagttttgggccggtgaagccttgtactatatttttaagttgatcgatttgtgcttggacaagtggatgaacttgttcgtccagttaaccggcatgtgtcacattgggatctctttaaacttgatcttgggtgcagatacctggctggacagtcagtggaacatattgttcgtccaggccctttctgcgatttaagtcggtcttgaggtcatgtgcggaagccaacctatcaaacactgaggtaccaggtcttggtttctaacttgttggccgataggttggcctgaaactttagtagtggtgaagttgtttgtatgtataactcctcccaaaggacaatctggccggatctggttgtctaccgtttcgcccacagttttgacatgtggcgttggattgagcggcggaccattgtgggtttgtgctgtatgccactctgcatacacttctaatctgcacaaggggatactagttgtagtagctggttgttgagtggtgacttggtaggcccttcttattagaacggtgacctacgtagtacaatcatcaatggctgcctactaagacctcataatttccatctctcgatccctccattctatgaactgatgcctttactcgtcaaatccaaggttgatagctgcccagaggtcctcctggtcatgatgcaaagtgttgtgatgaccttgcatgagcccaagtgcagctcgcagattttggagttcagtatcatttccaactggcctctgagtattagtagtcgacgggactccagtacaaggagtggtttgattggctgctaaactagtgtttccagtttcttgtatgcctggtgtaatcctagccagaggagaagccatttcaaggcctacagtaggaggctgtgtattaacctgctcggggtttgtccctagtggtcctgtcgtgtttccaggagtttgcacgttgggatctgt

SEQ ID NO: 128139 - DNA, 587 bp, Cannabis sativa
ccattcataagtaatacctattaaaggtgctatatatatatatatatatttttacacaaaagtataaaaactcataaaatttataacctccacttaattaattatatggagaaaataatatatgtatacatataatcttacctattatataaatttctagcattttctattgtgtttcaacatatatttatattgttgttttttttttttttaaaaaaaaagcgttagctttaaaagaaatataatgttttacattctttttatacaaaaaaaaaaaagacaatcacaataaagatacaactaattcatatacaagcattctcttgaaaatatgcaattattcacaattaattgagatgcatctatccattcacacacaaaatacaaaataattatatgaaccaaaagcaaattttgatagttttcaagaatttatatatcaattctatctaaaatgtgcctatgtaacagatttttttgtttaatgtatttttttttattttctgcattaattttaacagaatatctcaattatttagtagaatattctttattaattttatataaaaaaaaattaatttaattat

SEQ ID NO: 128140 - DNA, 991 bp, Cannabis sativa
ttctacaatacattctcaaactcctccaataataaaaaattcacctcaaattcccaaaaaatcacaagaaaagtcaagagccaagaattacatacccttggagataaatttgagagtcaaaaccttaactttttacttgcttgaagaatattgaaaatccaatggtaataggatgaggttttcgaatttggagatataattagggatttgagaatgaaaaacttgaatttagaggtggaaatgtgaagaaaatgatgggttgtgtaatttaggtggaaggatgataaatgttaaggtgagaaatcggagaagaagaagaagaatggtgggtttttgtgtttagatgcgaacctttttaaactgaaaattcaagggaaagcggcgaccttcaggggaagtcgcgactcttttataacttttgcaagggttgcgacctttggaggaagatgactttcactctttttttcatttttttaaatttttacgctttcaacgatttttttacaaagaaattaaatacaaaaatacaacaaataagaaaagacatgaaaataaaataaaaatatataaatgacaaaataaaaaaacatcaaaaaataaaaataaaagtaaaataaaacaaaagtagggtgcctccctagaagcgctgtttttaatatcttgtagtcggacactaaacttcttctcaagtgttctttaagtaaattactaacttggcgtgatcaatttcaccaaagtaaggctttgatctctgaccattaaccttgaaagaaacacacgaattttctcaaacttccacaaaaccatatagaaaaacttaaacaatagtgaatggtcataaccatcttgacttcaatttgttaggaaacagtctcaaccttgaattaaaaagaagtacctgttgtccaagttgaaattctttcctgaccaagttcttgtcgtgccaagcttttgtcccctctttataaatcttagtgtaacaccctaacta

SEQ ID NO: 128141 - DNA, 981 bp, Cannabis sativa
tgggaaggtcgatcaagaacgacatgagaaaagccgtgattagcagtaaacaaagagttatcattaaaaggcacatggccttgaggtccaaggttaggaatattaccaccaagaaaagaatggttcgggatcggttggccaaaggtggtgaaggggatcggttggccgaaggtggtggcggggatagtggtggtgccgaaaaaaatgggagtcgtctgttgaaccgtcggggtcacggtcgtggttgataatggcggaagcagaatgtaaggtggtgaagccgtgaagaacgacgtcggcgccaagctggaaccgatcggagctgtggaagattgttcgatcagtccacaagtggggagttcggcaacgtgaccgaagccgagcacaccaaaagtgggaggattggacattgaaagatgagctccgatcgtgtccgacaacgagggagcagtttcaggcggaagcgaagggggcggaacgacgacgtcggtggcagcggcgttgacggaggagaagtctggagtagaggtggcggcgggaggcggtgacggctcgttaatggaggcggcgacaatggagttccttgtccttggagccatggaagaaggttgaagaagatggaggctagggtttctttattctactgataccatgatagaagagagaataactcttttattaatgttttgcttctgctagtaacagcagaaatgccaagtagtgtaaactaggttattacaaaggaggtatatatatagggcaacaaagagagatagcccaataaacaagtggaccgaatatgtgggccaatgaacttaagtatgggccagctaatcctattatttagcctttagtttatattttgtttatttttaatttgtaacattaactaaagtttaagtgttataattgttaataaaaaataagagaagtttttaaatgttaatttttgattttttttaattaagtacttaaattaag

SEQ ID NO: 128142 - DNA, 1244 bp, Cannabis sativa
acgtaaaaatccttctctcactttcttacagctcagcaattttataatattttattggttgccgaaaatctcggtcaacactcatgtaacatgcatagctctcgtatactatgtcttatttccttcgagtgatcaaagaaatgccttccttggtcacttgccataccaaatcatattgggcttgcttgatcatgggtgtccgggagttattacatatgcgagcactcatcaacttatccggagattcatgagttggtagtgtttaactcactaaagaaataattgtagttacctcaagaccaactctacaagctttgctcagtgcttgggagtgttgtcaggtccgtgagctgtaattgattaataacaatgaagtacttataagctttactcaatgctttgattaattagatattaaattcaattacatcactgtgacctaagttgaaagaaagagaagtagtggttgccaaacttttttttcatcaaaagcttagctaaagtgatccccactacacaaataacatgttcgaataatagagtaggggccataccttacagatggacctcttgaagatgactttgtctcatcgtgttggattaggaggcgattaattcacttgcataaagtgaagtgaatatcactgtgaagcaaactttctagggaatagttgctttgttatcatctcagatgctccctgttccaataccttcgtactagcagtggattcaagtgacagacatagaaaaatccaacctgttcgtctcaggttcaaacgcttctatgacaatataaggtccctccctcttttattgggagtctttagtgtcactttctttggaagactcataagacacatattcattactgctctcctgttcttgataattgttggaaacagagggagaatcttcgccacttccccctctcctaagttgtcttggggagtagggggactcttcatcactactttctttctcgagatcttctggataaatagcaggggactcgtcgttgctatctccctgctcaatttcatctttggaaacagaagaggagtctattgcagtgcagacattagctgttgatctttcttcaccttcctggtcaatgtctgttcgagactcaagaaatagataagcaatgtaatcagttgctcctggctgagcaactcctctgaccttcttgatggcttcttcaggcttaatgaaaccgccagctctatctagaagctcttgaatgg

SEQ ID NO: 128143 - DNA, 1199 bp, Cannabis sativa
  modified_base (46)..(51): a, c, t, g, unknown or other
  modified_base (101)..(118): a, c, t, g, unknown or other
atagaatttatacattaaatgtaatcattaaataaatcatgtgaannnnnnaacataaaatgttatttctgatctctattaactagtaaatctgattatannnnnnnnnnnnnnnnnnagggcacaaaacccaacagctactgtaatagtgttggtaggatttgcaccgtacctcgagtaccactaagtgttgtaccacatacactatgtactttgtactagtgttggtaacaccgtattgtactaattaaatatcatacactctactaatacactcaataatgttgtcttactagtattttgtagcatatgaatcacattattagcgtgcatatataacacatatgcatattcatatattaatatattctatgcttgtcttaccttatttctaaatttagctgtggtggtcgacctaaacggaaaatcatgtgatgaatgggtgtcctatgtcacaattacataatgggtaaataatttgctaaaaccattttcggggaactaaaattaaaaccaaaagttttcctattaataactagcatggaaatacccttattatcgagagacagcagaactaaggctctaaaaactcccctataggctaaaccaaatatcctaaacggataaccagcttctggggtcctgcccagtgaaacggttaaccgattctacatcaccaacaaaatcaattaaccagttcatagcgaaaatccccaaaaactttgaatcccactcaaataaaacacaaactccaccaaactttccagaatacctataatgtctcccaacaacagaattcaagaaacaacaacaacaacaaacaatcgcagaaatgaaattcacaattgttgagtcatgtttgagttttttgaactcaaacttgctcaaccaaagaatcaggcaccaaaccacaagaatataagaatccaacgatatcccgataggtgagagtcaaagttattcttattttataaatctctttattgtttcatattgtaaacactagtctaagtggtcatctttggatatacaactaaatgttgcatttacaaatacttatctgtcgatatctaacactattatgtttgtctaacagatgacaattgggatttgtcctattaaaaacaacaagctaagttagactaacaatgaagactcaaaatttataactacaattaatgacagaaaataacatggtt

SEQ ID NO: 128144 - DNA, 3000 bp, Cannabis sativa
  modified_base (2961)..(2963): a, c, t, g, unknown or other
tttagggcacaaaacccaaccgttttttgtatgggaccataaactgagttgttgcataaatcgtctctaggtagtcagttagtacagagaaggcagtgaacttggaggcattctttctaggggtgtgtacagcattgcctgtgaagtttccctttttcccgttgctttgcctgccattgttattggacctttttccgctcggagttgagctgctagggtattgtgggctctaagcaggtgctcctgccgaggagacatgtggttggccttgcttaggttcgacgacatctacttgttgaatagcctcttcgagcttgataaacccatctgctcggtctagaaactctgccatagaccccacggggccacatcttttaatgtccttccacagttctccgagtggctcgatgcccccagtacggcggccagccttctctattcagttaatcttgcgactttggtagcctctgccattaacctgcttatttaggctctgaagggctctcctggtttttgttttacttcgaccaagtcttttagatgtaatgggagttgacgagaggaggagaactacacatgaaattctgaggaaaaaaccttccatgaattaaatctccctggtggtagcttgaagtaccactgttgggcggcttctgtaagtgtggcagggaataccctacatcgcacatcaccacgtactccttgcagatccatttgcatctcaaaatatttaagatgtgacaagggatcttctttctctgtgtacaacttccaggtcggcattttgaactttaggggtagctcaaggacgtcgatcacaggggtgaagggtgatccgcgtgctcggtcaagctcgagatcagtgagttttaggccaatcaggccttgaaccatatttttcagttgatctaactatgcttgcacagatggatgaaccggttcagcctcttgaccgacctgtgtcaagtcaggatctcttagagctgggtcctggatgcggatacctggttgagcggctagttgaacgtattgttcgtccagacctcttcttttgttcaaatcactcctgagatcatgggctgcacccaatatattgaatactgaagcactaggtggtctcagtgtttgaatggtttggtcggtgggttggccaaaaccgtcagtttggatgaagttattaggtataactccacctaaagaatggtcagagagggtctggccgtctgccatttggcccacaagtgggacctgtggctagggattggatggctgagcattatgagtctgggcggtatgcccagcagtaattttttctgtaccgcccagtgggatactagacgtggcagctggttgctgattagcaacttgataggctccctgtattagtacggtagcctaccttgttcgatcatcgatggttgcatgctaagcctttaatgttttcatctccctgtccctccactcaatgaactggcgtcgctggtcattgaacgcggtttattataacacggagatcctcctgatcatgatgtaaggcgttagtatgatcttgcatgagtccaagggcatcgcggaggtttttaatcttagtgtcatcccccatcgtcctctgagcattggttgtggatgggattcaagtgttgggagtgctttgatcagctacagaactggcattcccagtctcttgcacacctggtgtgatcccagccaaaggggaagtcacaccttggcccatagtaggtggttgtgtgttaggctgctcgggattggttcccggtgggacccttgtattcctaggggtttgcgcagcagggtttgtcaccattgggtcactttgatcaactaagcctctgcgagtttgcaccaccattctgtatgcatgttgagactttacacaaagaacaaacttggatttttgctctcaatgaaagcacctaaatattgacctcgctttaagtcaacgacaatgagtcaattatgaagagattagaaatggaataaaaatagagcaaaaactaataagcaataaagaacaccaggttttgaagaggtttgacccctttagtttggtaatagcctactccctttagattgtactaacttgagaacaaagaacatagtgtttcctctctcaaagctctcacaataaaatctctgagtatttctcttagatctctctctggagcaattctttcgatcccttttacaatgaagctagttcactatttataggggcttaatgcacgaggaaaggtttcccttttgtttacaatatctataatttgaaagaacatttattacataattagaatacatgaaatgggggattgagacagcctgccatatccctctaattcaatcccatgactgtagggattgccttcgtacttggacttcacgataccattatgaagtagtcaaatcttggtacacagctcggaataccaaactcattctctgcccgaataatctgccctttaccctgctcggataagcaaatgttgtgagtgtagatatgttacctgaagcccgtttataatatctttccgctcaagtgcaaggaatgttggacacgtgtcactcgtacatgctaccacgtaatagtgcaaaaatgggataagacatatctagaagaacctcaggaggttcatattattattattatgcgatgatcttataagaaactcgcaaggttcaaaattaacaaatgcaagctcgttctactttaagttctccagcacaggataaaatttactgaagaactaggagcatgtgttattcggataaattttccactcttgtgaggactacactaaaggaaactcatggaatggaaagggacctcataatatttaggtaaaatagatatctcgtggtattaagaaaggcatctcgcaaatgaagtataacttgcggtatcaacaaataaaggtgcaaacacatgttggaaattattttacnnngatctatttactatcatgtatgttggattaacaacct

SEQ ID NO: 128145 - DNA, 823 bp, Cannabis sativa
gaactaattgaaactctaatttgggtctttcgtattcaaatttaattgaagaaacttcagccagaataatacgaagaagaagatctctaactttgaattcattccattcatggggaagagaatttagattttggggaagaagaagacatggaatttctcattctacacacccaactttttatctctagaatcacaatctcataaatccaaggaaggacgctcttccatcaataaagtatttacttgtgaatacttctcaatttatttatttatgaatctttcttaacatgtctttgtactacaaatttcagattgaagaatatggatttgaagtttggccactattatgaagtgattcaggatgtgaacatctaccgatactctcaaatcaaccatgaaaaaaaattgtgtaaacactgtcattgctcaatagcagagaagaaaagaagagaaataagattttgatcgcatagctcgtatttctcctaccgtaattaccaccgtcaccatcccctgctaattcatcaattcattctcatcatcatcatattgaaggtacctatatagtatataatatctcatcatcatcatatatatatatatattaatcatcgtgatgatgctatatattataattggcactaattcctaccttactcacattattttttacatcttatatcatgacttaatttgtattaatagggaaaatatataagtttccttttaattaagaatgtagcaaattgtgactatgaaacacttctattaaatctatatttctttctattttaattgaagtgttatgtttgaataataataa

SEQ ID NO: 128146 - DNA, 755 bp, Cannabis sativa
taatattccaccaaaataccatgtgcctcaatattataaccaatcactatttaagattttaggggtgcatgaatatgactaattttagggtgtctattgtagaaatacccaaataaatatacatataaatgatcataaaataaatatgaaactgaggttggcatgaccttagtgacttgtgagtgaagcaaactgtgacttataattatctcttttcaaatagcaaagagaagcaaaacaagataaataagatgatgttatgttaatgataaatgtataatcttaattataattttgaattattattaattaggatttagtgatttacatttataaactcgactaagtacaattttattagtatatttttacattctaattacaataagtttcttctcttgtttcttttttatgtgttcaatatcgttttttgtttataatttttccaatttttttcttctttagtatatgaaattactagtctcactctaaacttgattcccatcatgtcatgaaagaaaaaagaaaaaaaagtgaagatattagacccaaacaaattgatcagcacaccattttcatgtgtagttctaagcaattccattttgatttctgaagaaccaaacacataataatcactttgtttgtgtaataaattttagggtgattctataatggaccccttaaaagggatgtattgatgcacccttaacttgtttcggcatccagaaaaaatttttagtctaattttttttcat

SEQ ID NO: 128147 - DNA, 709 bp, Cannabis sativa
  modified_base (667)..(679): a, c, t, g, unknown or other
aaaataaaataaaataaaaaatggtgggactggtaaccaggatttttttttttttttttcttctcactgttataatcgcctaaggtgagacagcagatgacaccataggaaacggtgtcgtattgtctgagagagagaaacctgtaaagaatttgatgacaaatgacaactgctgcctcttcatatttttatcgcacacgtgtgcgactcacatcattttaatataatttcttctacttctaaaattgatttgatgtttagttattattcttaaaaatctaaattatgaatcgactcatctgataccaatagcataatattattcatcaaaaacgaaaaaataatattgtgattttgtgattgggttcaccaccacccaataagtttctttatcttcatcattataaaattttggagaagtgtcatcattccaattaaatattagtacactttttatgtatgacacattataataagttagcataatttttaaatttatttttttttaagttatataagacacaatatttaattacactaataataatataataacaaagagagtgttagacactaataatacattttactatttcttttttttcttaatctatagtagtttgacatatccttagtatagacaatttttttgggttaatttcacaannnnnnnnnnnnnacaaaaaaacaacaaaaatacagttttacg

SEQ ID NO: 128148 - DNA, 995 bp, Cannabis sativa
  modified_base (137)..(138): a, c, t, g, unknown or other
agagagagagagagagagaagcggattagggtttcagacttagagctttatggcttaaaatgagacataggattttagggttgagttaagactctttatataagagagcttaaaccctaattagcagataaaataanngacatttacatattaaattaataaatacaaatgaccaaattgtcccttgaaagtatatattttcgtagcatcttagtgggcggtcaaggcccaactcgcagcttggcttgctgtccacggatgaaggttgcacattaatgtcctgcaacggaaaagctggtcggccatgcacctacaagaagtaggttggctggtcatacaaggtctgcaagttgaggtctagcaggtcatgtttctactagctttgtctagagttggctaagtcttggcgatggttagcctctgtagatggaggccagcccttggaggttgaggccaatctttacaggttgagcacatcctttggaggtggaggcctttgtacacctcttccttgtaaaggtcaggctcccttggtcgaacgaaagttttcttgatctgaaagtcatcttttggtggccagcttatgctcgaaccttggccgaccatactagctcacctggctagcctatagactccctttggttggccagacatgttagtacaactacttaatggctcgcttaattcatttcgcttgctgcttgacagttttatcataccttgtaagaagactttgttctgatattgacaaggctatattccacgtgtattctatcttaatttatatggacatgccaatttgagataacaaggcataattttatataactttttataattttaagaaatttttttaacaaattgtatattttagaaaaaagatcatatagtgtcgaaaatactaaggacaaaaatgctaattattataaaatgggtaaataccattttggaccctttgttttacaaaagttaccaattggaccctgtgttttgtt

SEQ ID NO: 128149 - DNA, 694 bp, Cannabis sativa
atggagtcatatatgggcaatttttataggtatagatttagggaaataattttagagatttttaaggatagtttttcaaatttccctttgtcaactacaattagttctattccgaacactttttcttataagtgggtggtgatcatctttgtctctgttttttttttgggtgatttaagatcaataaaattggtgttttaaggagtgcttagagtatgatatggggtggtgtttatttagaatagattttgaagtggtgttgtggtaggatttggggtggtgtttagagtagaattaggagtagaattccaattaggtcatgcaatgtactttacctaattgacttggaagttggtggtagaagaaatttttccattcctatacaaatagccaaaaaaatttgatcaccatatgagttaattaaacctgttaatttgcttacaaaagagtataagcaactcaagtacatcgatgtaattcttaattataataagaaataaaagatgtcacactaatcacaataacagaaaagttcaaattgtatttaaaatacaattatcagtaattgaaggtttaattaataattcaaatgatagaatttgttttatttttataaaagtagagacctttaatcattaaaccaagtatattcaattgttattgtaaagtccttttttggcaagttaggtgacaa

SEQ ID NO: 128150 - DNA, 915 bp, Cannabis sativa
gcagatgacgaaccaggaactccaatcactggagtaggcagcgcaggtggggagatcggagatgcagaagcagagccacgagagggcctcttggacggttgagaattttttgttttcgccatttttctttgaaaccctagaaaacaagcacactctcaaacttaaagagggttagacttttgaaaaaaaaattgagagaagtgttaatagtggtgatcgtgggtaagttggaagttgaacatatatatcatttctaattaattaccaaataatcagaaaagaatgaaaaaggaaagtaacttccttaccttagacactacgtgaggagagaaaaaaggaaaccaaaaagattttttaaaaaattggtctaggttaccttaaatggaaaaaggaaaccaaaaaaattttttaaaaaattggtcgaggttaccttaattggaaaaaggaaacaacatatacgcacaaaatctatgaattaaaaaacccaaccaaatccgaaattgccaccagaaaaggaaacaacaaaataattaattaattaaaaacaagtttcctaaaacaccacacaaaataagaccgaatctctaacaaaaataaaggaaacacaataaaaattgcaattaaaacatgtttccataaaagaaaaaataaaagaaaaaagatagccaaaaaattgaaaaaatatgcccccctttttctttaatttttttcaaaatatgcccccatattaatttacagagaacgaacaagacaacacataatgacacataaagcaccaatcaacacttaagagcaaaaatagtgcctaagaaaataatgaaacataacaagaaaataatatgaatttttaggaaagctcaattgacaaaatcggtcacaaaatttttatttagatttttttttattatttttttt

SEQ ID NO: 128151 - DNA, 2168 bp, Cannabis sativa
atttggtacatgtcaaagttcgggagataaaaatcctaattagccttcaaaataatgataaaaaatagaagatattctagaagcaccttctataagaagatctcaaggacaaaagaagtcaacaaggtatgatgataattttgttaaccttggagaagaagaatatgatattggtcattttctagatcctctcactaattgtgaagtacttaatagtctacattcttcaaaattgatatgaagctacggataatgagattgagtccatggagaaaaatgatatatgagagttagtttgattacttgatggttttaaaccaataggttggaagtagattttaagagctaaaaaggataataatggacaaactgaaaggtataaatcaagtttaatggcaaaattcttcactcaaagagaaggtattaattatgcgaacactttcttgactgtttctgctaaagaatcatttagaattattatggctttagttgtgcacattgatttagagttgcatcaaatggatgttaaaactacttttaagaatgaaaaattgtatgagcaagtctctatgtctcaacctgaaagctttaaggaaaatagaaatgacaaattggtttgtaaattgaaacgatccatttatagtctcaaacaaacatcttgccagtggtacttgaagtttgataaagttgtgacattatttggtatcatcaaacgaccctttatgtggacgatattttacttggcagcaataatttttccatactaaatgagaccaattttttttaccaactttgtagatgatttaaaatcaacttattctggctatattttcattttggttgatattgctttaccttgaaaaagtgttaaatagactttagtcacatcatctactatgtatgttgagtttgtcgcatgttatggggtatccttgcaagctttaaggttacataatttgattttagagatacaactacttgattttatttcatctcctatactaatctattgtgataataatactactgatgagattaacagtgtttccaaacatacaaaaataaagtatttcactgttagagacttggtaaaaaaaaggagacattctgatagaatattgcaagaccaaatcgatgttagcagatcttctaactaaaagattaaatgtcgtgttgcttaataaacaagttattgatatggatattttataatcttttgtttttttgggctagtgggagtttcttattctattatttgagattacatttatatgtaattttcttattgatgttatgaactacttgatttgttttgtgggccaataatttttgattattggatattcatactttcaattatgcatattttgttatattcgcaagaacgattgaattaaaagcatgtaattcatattttattgtgattattgtcttttaagtttaatggcttagcaacaataatattttgttggcgacggtgaccttttcagccacagtaattttttcgatgacactaacttttccggtgacttttctggcaccagcgactttttcgacgaaacttattattacaagttttattaaattcactattatttttttttctcatattttaaacttaaattactttttaagcccatatttttttgcattatttatttatgtcataaaaaagtaaactacatcctcaattctcatatttatgaaaattttcctatgtaagtctagttgaagtagaagtatgagtttttctagtcaactaaaatctttgatgagtccaatttaactaggattatgtagctaagttctctttctaactatatatacatattgtctcattacaattgtacacccgcttctgatttagagatttgggaggaagacttaattgatagggttacactattaaattattgtaattactataaattaatgagacaaatctaattattatttaattattattatattttatattatatgcaaattcattgagttttttatttttaatagcttggactttgatagtcattaatcaaacggtacgttccataggtaagtcttacaccttttttttttggtaaatattattttggaacctgctgtattttacaaaagttactaattaggccatctgttttgtcaaatgacaaaatagatcctgtatt

SEQ ID NO: 128152 - DNA, 1883 bp, Cannabis sativa
  modified_base (1847)..(1856): a, c, t, g, unknown or other
acgataaaatataaaactaaattaatatgtttaatgtatattatgtcactacaaatattttagctgctaaaaatacaatactagtgagctataaaggagcaaataatatataagctcagtaataagctaattaacaaacttatatatatgttcataaattgtttttctattgaaaagatcatactgagcattttgtttttgtaaaaatcaatttaaatttaaaataacataatgaattaatatataatattatttagatattttatcatattaataagtgataattgttattcttagatttttttatttttaaaatttattattttgacttgcctaataattagttatttctgttagctatttctgtgcatattttttttttcattactataaaattggcttttcccaacagttaataaggggtcaattatgaaaactgttagaaaaagtaaggggagattttttccaacagtttagaaccgaagcaaagaaactgttaggaaatattaatgccaacggtggagaatcgtggcaatactaaatggatatttaaaaaaagaaaacagtggattccaacagtttataacaatatataactgttggaaaatattctttttaatataaaaacaaagttttagatttagaaaaaattgtttcccaaaaaaaattgtatttaataaaagaaaatattaaaataaagtttcagatttaaaaaaaaaaaattatttttcttacttaataaaaaaaatttgtctttaataaaataaaataaaaaaaaatagatttaaaaaaataaaattatctaatgaatttataatttgagaatttataaaattgggaaatttgaaatttataatccttcatcgtataagaaaaaaccaaaatgcagaaaccctaatttcactctgccctcagctcgatcttcctctccgatcgtctctctctctccgatcgtctctcttcgaccgcagaacgcacctccatcccctggctgagctcacatctggcgtccctctctgtgatcttccctttgccttttgtaagttttatctttctagatctttttttataattttttttattgggctatctcagaaaggtgatatgtacagctttggtctcttgcttttggaagttcttaccggaagagctccttcgcagtacctttctctgcccagtacttggcctaatcgcgttgaggatgaagaacaggctttggacctcccgaaatgggttcgatcagttgtcaaggaagagtgtacaggtaatgaataatgctctgttttatttatttataaatatcattttttattgttttaaaattctggattattgaattgaatcaaggttgtttggatgccgagaaaacagagaaccattgagaataatgacctgttcaattagcttttgtttttattaattttatatatgaattataaagatgaagaatgagtcaaatctgtatgtgagtaatttttgtcaaaaaaagaaaacttggaattgtttcttattgttaatccattggttggtagctgagaaagtagaagaatctataactgagactatataattttgtctttacaattgttttttctgtctcttatgctaagtttgattatgattgataaaatttccatatgaattaactgatttattgaaaaatgctgataagatgatcgatcattgatttaactgctatatttcattgttatatgaagtaaaactgactaaattatagtttctcattagtattataaatgtcattttggaagtagattttttggtgcaacataaaaaggttatatttggctgtgaaaagaaatggaaaattaaacacatataaagtnnnnnnnnnnttacattgatgcagcggaattaatgtc

SEQ ID NO: 128153 - DNA, 1083 bp, Cannabis sativa
aaagattatgagagagtatacatagagatgatttgtaagtaggccggttgtggtctctttattttgcttggattgttggttgtaattatttgtgattaatgaagcaatttcttcttgataaaaaaattgaattgtaatgttttaaaaaaagaacaacattttttgttatatagccacatttaatataacatagatatattcttagcttttattttgcttaagtatatttttagtcgtataataattagctttttttattcaataaacaacatcattttttatcaaaagaatatttaatttcagtcctatttataagagaaaatataataatattcaaaatttattgttaattataattttaatttaactgtaatacttttaattttataatattttttttttattttttaaaaattatcatacactttttctatattttatttaaatataataatagaatgatattttattttgtaaagaaaatgctactgaaagatatttgttagatatatgtaataggtttgaatatgaattgcaatgttaaaaatattaaaaaaaaaaacacacacgcacacactttatgttattattaggttctagatttttttactcttaagtatattttcggagtgttttaattatttttagttttgttttgttctattttacactttagtttgttaatattttcaagttcagtaaaaaaaaaaagagaaaagtgaacagttgaagaaaaaaggtgtgaaaaattaagatttaatcgatgttttgtcactagtgtgccaaagaaacagttcttggaatactttaaaagattcagtgctattgagacccttaaaatcgaatatgtaaagatgttggaatagcaccctagcatgaaaatttaatgtcagggtgctcttgtaagaaaaacagataaaatggttgagaattaaagaaattaggcgggcctcgacattgcggaaccaaagttgaggcatggtgcgaagtgttgtcgagtgaatttcgcaacaccaaattatattgtttgtttaatatcaaggagaattttatgtgaaaagacaagtgcgagtattcaaccta

SEQ ID NO: 128154 - DNA, 565 bp, Cannabis sativa
atccttgcgaggattcgaggtctcagcctctattttcttttgggcacattcctcgaccaccatttccaccgaggggttcatcgtcagattctaccaaatctttaaatttactctgtagacgctccatcatcttcttcatttttcgcgatgagccttttcagttcagccaactgaacctgagatgtctctaagtctttggtcacttgcaacaggtttgggtcatagactggtcatagtgatatccgtctttgtaatacccatctctacatagtcatcatcttcaccttattcatctcctccttcgaggttttggccatcatcaaggtcgtcaaacacgttttcagtatcctccccttggttctcggtgcgagccataccttcttttctgacgccacctgtttggaggttagaggtgtgaaagtgggcctcctctgtgactgtgtccaacagagtttttttgttggtgttctttcgtgtattcaccatagttaaagtgaagcaacaactaactaactttcctcaactctcaatgaaagcgccaaaatatttaccgatatttttagaa

SEQ ID NO: 128155 - DNA, 729 bp, Cannabis sativa
tttgtttcttttttttttccttttgaattaaaagaaaagaaataagaaagcgtttgtgtgggggctattacggaacgtgcttgtcatgaagttgtagggtcagcccttaattaaagctttggccagcctcttcacccttaagctttttcttacaagtcttcttagctgccatggatgtcccctgtctcaattacgattatttttcccctcattaacaaaataaacatgtaaacttattaattattcaatgacaaaaaaataaaagaaagaattattaaaagttttgccgctgaatttttgataggtaccgcatatactatgtttgttaaaaattgttaaaatataatagttccatgagcatgcccttctgctagattatttgatatcctgtattttaaagtcatacatatttggtactttaaatataattttttttgataaaattttatcaaatacaatcactctctaaaatttgatgaattttgaattaaaatttaattatttgattacatataaccgtcaattgtttggttatattgataaaattttattgtttaaattttattttaatgtactaaatatgtacaatttgaaaatatgaggtacaaattaagtaatattgaaaagagagggtaacaaatatattttccataaaaatataaagtactaaatgagtatatttcctttattttaaggaattattttacaaatatacaaaaataacaaaaa

SEQ ID NO: 128156 - DNA, 1257 bp, Cannabis sativa
aaccccaaacatttctaaccctaacagccaccaaaacccaaaattgcatgctataaccaaatagaacttaaaggaaatcaagaagtaagagtttcaagggcataccttggtagaacttcctcaaatccttgaagaaaacacaaaaattagctgaaaacccttagtgtttcccctggttttgctttagctgaaatagagaaagagagagttcaagaaatatgttgtttttgttctaagtgttctttgtcttctaaccaactctaatagtgaaaagtcaattccttttacaaataatggttaaataataattctacagaatccattaaaggacaaacctcaccaaggtagcaaaacattttgcccttacttacaccttaagtaatctaaaggcttaggggtaaaatggtcaaaaccataactccgcacaaactcggtattttacttatttccaatattaatcccagtaataaaaaggttctaaacttacctatatgatttaaatagccattcatcgcattttccattgttgccaagcaaaaattataaaaatagcataattcatatataactcaaataatacacctatagtttaataaaatttctgaaatgtagaaattataactctaatgcccacttttaataatgggactcacaattaaataaattcacaaataactataataatatcaataattagtgctaattgcctttattaatccatattataaactgcggtcattacatacttcaagccctatttttcctcaaaaaagaaagagacccctggtattactcttgaaaacttcaagcctcattctcattatttttgttacaatgataatgctagagatatgaaattttatgagaataggtattttactgtggagaaaatttctaatgtcattgctcataagccgtttggggtatataacttgttgaaagaaatacaatgggtggatattttgattgggtttaatagctatgtggatcgaattgtcaaggaattttattctaatatcactgatgaatgcttgaatgaggactcttttttgtttggcaaagtctttgtcaggggacactggtattcccttactgtgaaggatgtggctgaagctctcaatcacctatgggaattgagccaactgaagttgaatttgattgtcaaaaggtgttcaggtatctcactggtgacaatgatgtggaactctcaaacacaatgcacatgtctcaacttacctatcatcatgctgctcttat

SEQ ID NO: 128157 - DNA, 1054 bp, Cannabis sativa
aagaaagttgccaatagaattagaagagtgtggcttcaagaaaccaattgtttctcccaccaaaggccacccaaaagaccctttagggacagagcatgtctgaaagaacaagggtgagaaatggttccagatggcacccaaaacacaactcaaaaggcctattaccacaacactaaaccaaaactcagttatacccatgaacaagataatggagagcaacagtgtatataatatgaatatatatatatatatatacacacacaccagtacaccaccaccccagacttgaaagagagaaagaaaaagaaggaaagcagaaaagctttcgttgaatggcgtagtttactttagtatgtgcattgtaattacaagtacaacatatttatacataaagacagaaggaaagattttatatagtacacagagtaaatacattaaataaataagagatgacattttattcctataaaaatattaaaggagaaagaggaaaaagaaaaacataaggtaaaaatagcaggcttttaagttttggtccagatatttactgtcggtgatatgattaattttatgtggagtagctcataggaaatggaaattcaactgttgtagctgccgagcagggactaggttaggttctatagaaattactagggatgcagaacacagacatagatagtactcatttcgtttattcacacaaatttattactgtactgtacgcttgaaccagcacatttctttactccattgttattggctataagtgtctactatgttttagatgtgtcttcaatgtgtagtaatttattttttgaaattattatattaagttatataagatttaatatttaattacattaataatagtaccacactacagagggtgatgtactttttaacatagagaagtgttaattacaacttattagtcaatcttcacgtctaaaattacatgtcagaatatttttcttcatagcggtatttgttataattacaatatcatacctataaatttttgaaaagttttaaatagtttgcaataccgaaaata

SEQ ID NO: 128158 - DNA, 816 bp, Cannabis sativa
ttattaatattgagtataagtagtattttttgtcaatatttatatggtcataaatattttgctctccgtgcgcagcacgtataactttcactagtagcaataagaggaagtataaattggtacaaaaacaaacaaattaatatttgagattgaaatacttaaaatcaaaatcaaagtgaattttggtaacattattaattcaatagtatacaaaattaattaattagtgtagtattttttatttttttttataaggaacagtgtatgatttttgtttctaaaaatatgatatatatgtattgttaagttatgtgaaaataatgccagtggtctattacaaaaaattaactacctcaaatggactactaaactttttagaaagtataacaatgtattattatagattagatgacaaaaattaagtaaataaaacaaataagcaccatttgtacactgtaataatttgattttgtaattattttaccaaaattcactttgattttttatttatacacatgtacgtttaggatggccctggcccctacccactagttttctacaaacatatatagttatatactgatcatgtttcaaaaaaaaaaaaaagaaaacaattgcacaatatagcatcctttcatataatattgaagcacctagaaactagtaagtattatgtattattttgagttataatagatatgtttttgtgagaatttctcgtttatattgatataagatatttgatttgatttaattgtgggataacgtttattgaacatgtctagttattatatctatgaaagtagttagagaaat

SEQ ID NO: 128159 - DNA, 856 bp, Cannabis sativa
  modified_base (804)..(811): a, c, t, g, unknown or other
aaaatcttaaatgtgaaaaaatgtcatagaagagtggcaaacctataaatgccatatttttctaactttgttatgaaatcccatatttcatgtaattttcacaagaatatatttgtttttttttcatttttggaccccattaatttctctttctaaaatttagtaactattctgttatattttaacattatatatactgattgatatatgtttaaaattttatatatactagatatcataaagatagtcaaacataaataaaaaaatcaaaaaatactattagacaattaaatactaagtaaaataaaattatattaatttttcatattaaagactaatattatatatattcaaataaaataataataaaaaataaaataaattataagattgttgttacttattattatagaagtaattattaaatacaattaaaaataatgtatattgataaatattgtatgttttataagtctttttataattactttgtatagtgtataattaatggtaagttgaaaaatattatttttattaattaattaattaaatttcttttaattttatatttatttgaaacatatctctttttatatgtattgtactcaaaaaaccttaacataagagagtcacatgagagtatcttgaagtgacaggggcaaaattagtacaatatttaaaaaaaaaataaaaataatagactttaaaaaagatggtaaaaataaaagaggaaaatataaaaaaaaaaaatatacgtataattatgtttagaggaaattacacttagtatgggattttaaaagnnnnnnnnataaatatggcacatttaagtttggccaatttatatggtattttt

SEQ ID NO: 128160 - DNA, 910 bp, Cannabis sativa
  modified_base (26)..(53): a, c, t, g, unknown or other
aagttcttatttaggatgttaataannnnnnnnnnnnnnnnnnnnnnnnnnnnggtaaaataatttccaacaccgtcacctatagtgcaaaattgttgccaataatatatgcgacttttaataaacagtcggctataatacttagtatttccgaaagttttgcacagtcggataaaaaattgtactaaaaaattggaagaaaaaaaaatatatatattttagttagttacaacatatatttgtacataaaagtgatattataattaacatactacaaaaaattattactttaagtgacaaccttttagtcacaacataaattttttgtgactaaatgtgacttctaatcacaataaaaaattacttgtgactaaaattacttgtgactaaaacatagtatttagttataagttgtcattaatttagttttgtttacaataaatattgtgactaaaaacacatttaatcacaacaaatcgtaatttttgtgactaatatctttagtcacgaattttttggtcacttaaaattttttataatttatacaattacaagttttgttataataattaaactactttcactactataaaattggattcttattgacttcgtagtttatgatgcaataaacataatacaagctttgttataatggtctcaaaaatcgtcccctattcatccatttagaaattgggtagaataaatgaccatccaaaaccgtggaaatttctgtttcctgactctgcaaaaaaagtcatttatatatattggacattaaaattgtgtcttatagatagatatatatatatatatatatatattagaaatatttgcaccaataactattattattaaattatttaagaatttacccttacctattttaatactcacaatttaggcattt

SEQ ID NO: 128161 - DNA, 1860 bp, Cannabis sativa
taacatttataacaaatgttattaaaatctagttatagttacatttttttaagtgttaccaaaacttatttttggtgacatttaaaaaatattattaaattctaagttttgaaattgtaatacatttagttacattttttttttttttttgctaaatgtcattaaaatattatttttgtaacattttttaacaaatgtcagcatatcaaatgtaacttatttgtaattttggtgtagtgaccatatttataacaaagaatgaaaataaattaaacgcagtaattttgtctaattttgtctaattttttttttttaaaaaatatatattaacttataaatgtgatacatgataacaaatatataattaatggtctaccaaaattagtaatgtagaaatattttattagaataacttaaagaattatgtataaaagtaattatgcttttaaattaattataagtagctatatggtacgcacagtataccaaattatatactctaattaattttttgaagagttaattgtggcataatttttaacactttttttttccttgtacttaacttccaaaactcaaattttagcggtaaaattctcaaaattagaaattttttagcaatttacaattttcatctattttaagtgttaagtgttactattcatgtgtagatttacgtggacacggtgtacacataacacaattttattggttcacgtaaaaaattatttaagaaattaaaaaattataaaaaaaataatttgaaattaaaaaaattgtaaataaagaaaatacatatgatttttgataattttaaattaaagagactacatgttatttttaattgaaatataattagagtgaaaaataaatggaatgaattttgaaagattattatttttgccaaaagtttattttgaatgagagaaattattttattattctaaattgaaattaagatatatttggggtcctaaaatgtgaatgaacattttatttttacatcaaattataatttaataaaataaaaaagaaaaaaatagtataaaataaaaagaaaatcctagtttgagagccctaactcatctctttctccctctcttctacctgcggcagccaaatccaaaaccagcccttgccggaattggtagtccaaacgtaccatgcctccattcttgcaaccctaaaaaaaccaaaaaccttaatcactacaagaataatagtttataggcaccacaaagtttgacaccaatataggtggtgcctaactttctaaaggttacaaacacagctcccagatcactcaaactttctctatttatatatatatttctctatttatatatatattatatatatatatattatatttattattgggtaaatactttattattgggtaaatactattttggactctgtgttttgcaaaatttaccaattggacattctattttgttaaatgacaaaatataccctgtattttctaaaattgtacgaataggtccctgaactaattttttgtcaaaataagacataataataatctaatctagagatgttatgaaaaaactagttacattttctatatatgttcgtgttaaaaaatatcttaaagttggttatattaaaaaataaaaattttgaaaattgagctcacggtcgtatttttactattttggaaaatatagggtccattttgtcatttaatgaaacagatggtccaattggtaactactccaaatagtatttattcaaaaaaaaatatattataatttttatttatatgtacctgataattaaaattatattatatttatatatttttattattactttttacatatataaatgtatcac

SEQ ID NO: 128162 - DNA, 794 bp, Cannabis sativa
ttcaaggtctctacattttttggtgcgtagtaggaaaataagaacaacatggcactttccaaactcaatcataaaaatttgactcattccaggagcttatactaactgctgagcgattctaacaagctcgagaataagaaaaacctatcaatgcatgaaaagtcgtttcttcataaaaattgcaccttggacatactctactaataattagtatatgtttatgctgaaattgagcacaagtgggaattaaacgttgttaataagtatatttttacttgttcaacgttattcctcgaagtaaatacaataatttaaaataattaaagatgttatttactactcaaatatttctagaagaaactagaaacaacaagaagatgaaatatgacacacaattaaagtgcaagaaatttatatatcatgtatggaattgaataatagcagtcacgtaggcctgtagaacgaacacgcttatagtcaaggtaaaattatatttaactattgaatagaatatgaattgtacacatattttaattgcaaatttattgtatatttagaatatttaaatatcattccccctgaagataatgaatagatataaaattcaatttcaaagaatataaattttacatatattagtaatgccaaaagttatttcattatttcttgaaatcattgatttcaaactattgttgttataagatatttatatatatatttcaagagaatactcattggtgtctaacatattcaatcaattgtgtcaatcttgcaaacttattcacaaagttatt

SEQ ID NO: 128163 - DNA, 509 bp, Cannabis sativa
  modified_base (470)..(481): a, c, t, g, unknown or other
aatattaatgggatttgttttattattattttgttatatataaataatattttattattttattaaataaaaataaaaagctacccataaatttatcgtaaactaagaatttcagttatataggcacacatataattttgttagtcttatatatattatatttattaaatattaattttaattttgttataattttgttatgatattaattattgtcgtatatatttaataatataatatattataatttaatagttgtaataacaaatttatataacttaattttgttattatatatgtattttttaaaaagataatatgtaataaatgaatttttattaattaattttttgtatttggggccatttccttaaaataatggttgagatgtaattttattggtctcttaagggaaattttatttacaccccaaaattttctaaaagcaccctattttaataatttttatnnnnnnnnnnnnttatatctttaattgtactaaatttttt

SEQ ID NO: 128164 - DNA, 1472 bp, Cannabis sativa
tctttcaaaaaaaaaaaaaacatattactattagtataattaaatatcgttaactaattatgagatgctatctactattattagtgccaatagtaatattcttttaaaaatactattattagagatgatttaatcactcaagaaaaaagttttcttctctttcggcaaggttccgatgtgtgtcgcaccaatttaattgttaccacgtgttaaatattgattgggttttaatataattggtgagaattgggtgtttgagtggtggaatttatttgttaccgtggggttgaatgcagtggattgtgaacctaggaaacttgttcgtgttttgaatgtttgataatttttggtggccgtggcgtttaagttgtgaattgctaacttagacttagtaattagaatttcaaattaggctgaactaagatactttcaaaaaataaaaataaaaaaaaaaattaggctgatggtcaaaatcgtaatttaagctgagtgaataattagagagagagtaaacactagacagttttgttctcatagtacaagcaaggccccactatttacggtacaaattgtttcggaatatagtggtacaatttttcttttttgataattttttttgtgataactattttatttattataaccaatataatggtataagattgagtatcaaatatttttattcttttcatctaattaataattgaatttaaaaaattatcaaatttaattaaattttaaaatccaatttaatctaattactgattagattaaattatattggattaattttttaattgacaatctaattacacacttcatttttaatattaacataaaaataaaaataagtaaaaattaaatatcacaatttatttaagattaatactctataaaaatattattattacaagtgtaatgcaactaaaagtttaaattaagtaaaacaacaatgttaccaagtaataaaataaaagaaaatattatgaaaataaatatacaaaataactaaatgttacaaaatcaacacaaaataaagtctaccaaaaatataattaaaatatatattttttattatacataaacaaatataaatattttttatatatataaatgaaatttgattggattgatttttaattaaatttcgagaatgacatctaataattgatccaatctaattagaatctaacttttaatatccaatcaaatcccattgtaattttgatacccatttttttataatttgattaaattaaattagttcggttcaattagattggattggatgttgctaactaatctaattcaacctcttaaaaatcatctgggaatgattatatgggccaaaactgactattatagtcttccttattcctaggaatgtcaatggggcgggtcggatctgatccgactctgatccaacctgatccagatcatgtacggatctgccccgccccgccccgctggat

SEQ ID NO: 128165 - DNA, 960 bp, Cannabis sativa
tcccagaaggtgacttccatctttggttgtggtagatccatgtgtccattctatgatggtggaaggacacgaccatcaaggagtcactttctagaaatggctatactttgacggctgttcatttttttttttttgcgcaaaaattgaaaaatgacatattcatcattgatttgtgcctcaattttaggggagcattaattgtgaagatgcacgtggatcattatactcccaactgtaaaatgaatcttgtgtttttggaggttggatcgtggaccatccatctgttttcatgtggattgctctttttaggtataaataccttttacaaattccagttaccacttttctttcgtttcaaaatttgtaactccttcaaagcttataactttccctacccttcaagaccaagaatcgaattcaaagctaaattttcttctttaccttggaacgtgctgttgatttctacattcaccttttgttgaggattcaagcatgggagtttccacattattaacccaagtgatcatgagttttacactaaaagaagatacgaacctagattttgacacagaagttgactcgttgatcgccctagcatcctgtctttgtgaaatgtgtgatcaacttccccagctaaacccagggatgattagcctaacatctccgcttttgacatcatgtatgtttcttcttttttctctggattacattttctgggtttgctattataagtcatgtttgcatgttttgttctagaatgtgattagggttttttgtttgtgtgattactattgtaataggtttaggcactacaaaccatactgttgaccgaggttctcgacaaccaattaaatgagataatgatatgagctttggaataattaatgcaagtgatttttgttggattttgtgccttaaataaaaccctttacaatctgattagtaatcaatataagaaat

SEQ ID NO: 128166 - DNA, 587 bp, Cannabis sativa
gggaactccctttggtgcatgcggggagtgatgggggaaaagaactccaactcccttggacgcgtgcggatggtggagcaatagcagggagctcaacccgaaccttgactcctcctgttggtttgcccatttacctggtcaacttccatttctttatctactttttaagtgtattttaaaatttatacttggtgaattttttagtgtaacactaataacttcgaaaattacacttaacaattattgggagtcaataacaagaacaactaaaaaataactgataatcagctcacaaaaactataaatcaactattaataaactataaaacaacaaaagataattaaaaaaaaaaataacatcatactaactataatatcaattataaataattaaattataaaataaaaaaaacaatttattgtatttacttaataagtatttttgtgaataaaaaagtacaaagagtaaaatagaaaagatttatatatgtgttgacgtatttttgtaatttttaaaaaaaattattctacaagaccttggactagaaattagcttcagtctggatcatttagttcaaacggcggtg

SEQ ID NO: 128167 - DNA, 2194 bp, Cannabis sativa
tcctctattttttccaccttcttcgaaccagacacctccggtgatggagacattgaaatcctagtacgcagcataaacggtttaaaatccaaaatcctaacagagagaaaccctaatactttgttgaaatgagagaaaatgagaaaatggaagtagaaacgaaaaagaaaaatggaagtgattgagtgagtgatggcttgacagagaaaattagaaagtggtatcgtgtttgacactcaaaccactctcaaaataataaccgtgtacacgtgtcaaaaaaaattcaaaaaaaatcgttacttttaccaaattaaaatatattcggtatatatagtattaaattacaaaaaaggtcccacagcataattttctcttttatttttttgggattattttaggaaaaaaatttataaaaatatagttgtaaaaaattttaaatatgtttacaatttttaatgtgacgtagacaaattgcttgtagaaatctcagatttgagatgtaattttgtgtcggttgagttttgttttgagtgtagaaatgctaactttctcgctcatagtgtaaataagttgactttggaatccaaagcctcgcctaggtggaatggggatgtttccttttttgctcgtcatcttgctgagattgacttgcctattcctttgtaatcgttagttttatttaatagatttctctttcaaaaaaaaaatatatttttattaacaaaattttttggctgtgttttcagttttcaattttaaaattgtattttaaaaaataaaaatagaaaacaattttttatcattttaaaaatttaatagtgtttggcacaaatttttaaaactatttttagaatttttcttactaaagaaaaataatattttaacacgagaccataacatgaactcatccaagtctgggttcgggtttggttctgggtctaggattcgagtatgtgagcaaaaatataaaatataatatgttagacaaaaaaaaaatatttttgaaaattgaaagcaatattttaatattttctattttctagttttctaaaactcaatttttaaaaaattttgccaaacaacccctattagtttttaaaaaatgttttcaattttaactgatgaagccaaacagcctcatagtcttttgatattttcatgttatttttatattgtactcttgttattttgtggttattttttattatttgtatattattttcatgttattttcttgttactttcatgttatttttgcgttatttttataaaacaaaaatataaatatatattagaacataaaagtataaaatttttaccgaatataacactttgtgtaaattttcctttttgttgttaagtagaaatgatgcagaaaaaattgaaggatttacttttttataccataattttttggagtttttacaaaaaataattaatttcttttaatgtttttacatttttactgtcatactctttgttaatatttttagaattttttttttttttaaatatgctagattaaagtttcaaaattatagaaatattttgtttcagtgaaactagaaaacaactatagaatacatatacaacgacaagaaaacttttagcccaagatatgttttcaagagatgggtgaattagaaatttaaactaattttgaaaatttaaaaaccccaaaaatagtttatacaaattttcaaattcaaggcaatcacatagataaatacaagtacaaataaataacaaacttgaaatgaaaagtgtttcgggatagaaattctaaactcttaatttttacaaggtttggtagaactaagccacctatgtctttggtcttcaaagctatgaacctagatttgagttcaactatcgagccaagttaacatgcttgactaacccttacaaccggggaattttttacgaaggtttttcccaacctctcacaatagttttcttccaaagactattaatctccccgaattgttgaagtgtcaatctcactaactgagttatttttccaccggtgtcaacttcacctcaaccaatagttttttaaaggactatcaatctctttgaatttttgaagtgacaatctcactcttagattgttgtagtggtaatctcactcttctcaggttgtttacaaagttagtgtcaacctcacctacaaccgagttatttttctaccggt

SEQ ID NO: 128168 - DNA, 510 bp, Cannabis sativa
aaaaaaaaaaaaaaaactaaacctacttaattaattaacttatagtataaaaattaaaaaacacaaaacacaaatcactgatatataaaaataaaattgtttttcatttttgttgcctagattataacgaaccttctaattattaaaggaaaaaaaaaagaataaaaatgagtgtaatatttttttttatttttaaaaggaacagggttcttttctggtactaacatccatgaattttttacagacaatgtacagaatttatttatttaaataataaaaaaaaaagaagttagaagattcgtttttggtgggacccaattgaagggtccatgactacatgtgatgttggcatattgtgggtaaccctctgttacaaagggctttaccatattgtcccattttataagctgtaatccactacattttcacacccttctttctcattattcttttttcttttttttttttttaattattttaaatcccaaaataataaaattatttttttta

SEQ ID NO: 128169 - DNA, 1725 bp, Cannabis sativa
aaaaaaaagcaaaaatagtccctttttattagtgtttaattttgaataatagagtaaacatagtccacgtgggatcgacccttacatgcttttatacttaaataattggaagtactgaagtcaaattaattagtaaatttgatacgacatacaacatgcatcagtgctcatctagtggagccggacccatgacgtgctgattgtttgatgacgtggaggtcacatctcattgatagttgtcaaaccatgtcctacttttgtggataatataaagacacattaatgcttgatcgttaattactatctttccatattgagaagatatgatccttgaacgggatctttggaattacttctactatcacgagatctagtaattaatgagtgtgataatgagttggatgtcgagatgctcactaagtacttctctggatgctctgactgaggtcttccggacacatgctatgctggagggttatctcacctggacgagtcatttgtccagcttccggaacacatgactttgctaaatgatctagtaaattatcttggttgggtctgctattgggtctgaagtaattgagttgtatcacttttgaaattatgtgtcctaatctgaaaacatggataacacaaattatattaattctattaaaacattatcataataaatatactaaattaattataacattataaatattaataatactaattaaatatttaataaatatatatatactgttcatataatataaacaaattttgtaaatatatttgtatatatattaattttgtattaaatttagtaagcatattattttaatgatatattaaaatataaatattgacttatatatttatatattttactttatttgtttcatttataaaaatattaatatatattaaaatattaaatatatatttattcattaatatttataaaattatataattatggttgtttttttttccatagtaaatttaattatctatagtgaaatttgaacttaaacacaaataaaaaaaataaaataaaataaaatatttcaccaaatacatctttaaactacaaaatatatagtgtttattctactaagtttattagtaggtagattcatgtttgcctaccataatatttcaggacttgagaagtcttgaataaacatttcataaatgtttctccgaggaggtagagattagttggctgagattttgaagctccaaaaataattaaaaagttagttggatttctaatacaatttaacttttaacattaaaccaactttagtgacttcttcagaaaaacttacaacctaaaacaaaagcccaaccaaacaggcgagaaacataaatggagaatattttacaaaagattaatttaaatttttgctcttaaattttaatatgtattaaattagaagtgcttcaatcaaataatttaaataatttatgaaaaagttttaaagacttaaaagttaatgggtgattctacaatgcacccctttaaaaagggatgtattgatgcacccttaacttatttcgacattcagaaaaaaaatttagtctaattttttttcatattcatgtacgttataactatttatgatatcctacaaatttttgggaaattcagaataatttacaatatagaatataatgttcaaacagtcgattttacacgagtataaaataaaatagtcacgcgtgcaatacaatgtt

SEQ ID NO: 128170 - DNA, 752 bp, Cannabis sativa
atttttcactagttcatctttggctttctttatgttttttatttctagaaaaaaaaatgtaaatattgcttggtgtcacacaagtgctcttcggcattaatagtagatgatatttgatagctaagattcaatacttaattacattccctttcaaaaaaaaaaaaatacttaattacattaataatgctataatatttgatagttgtaaggtattggacactaaccttttagcatcacattgtaaatctcttatggaacaaagcataataccttgttcttaaaaatttcatagtatcattttattccatgttatgaaatatcaaatttaatttattatttaataaatttcatagtatcattttataataccttttagctcatgatgcagccaagaaggctttgggaactaataaagaggtcttgtggaacaattgtgtttcacagttttaacagctctgtagctctcttttgttacagttcttgcttcttcaaaaaaaaaaaaattattatttaataaattagagagatggattagtgttgacagtaagaactcgtcaactaaactttagttataaaagtaaaaatacaaatgggtgaagataaaaaacttaagaggagctcagtacattaacagagaaaaattgtgttgtatgaatttctaaactcctttacatataattcttttctaaccccttcttcaatagaagagagatatgttagactatatatatagtgtatgtaatatagcatat

SEQ ID NO: 128171 - DNA, 535 bp, Cannabis sativa
  modified_base (485)..(488): a, c, t, g, unknown or other
aaaaatttagaacatttacaatacaaaaaaaaaattcaaacattcattgattttttttatatgggtgcaattgattattgtgaattttatttttgacattgtaatttactcaaaaacagtgaatttttgaaaaatttgccaaactaacaatgtaaaataataaaatttataaaataacctcacttaatttactttatgcgaccatgatggttgcccaatgtaaatctatggtcattttgcgaccacaatagtcatttatgatcgcaaagtgtaattcatggtagtttttacaaccaaataaggttattttactaataaaatcctttttattttactaataaaaaatttcacaaaaactattttcacaagacactcgaaaatttttgcatcttaatttatttataattttttgaaaatagatggaatgcctactataacatgataatttaaaagaagactaattaagatttttgccccttgaactnnnncatgtaccaaatcatgtcccctaaacttttaagtcgttaaaaatgtc

SEQ ID NO: 128172 - DNA, 2796 bp, Cannabis sativa
caccgccattgctggcacccattctaacgaatactattcttctaagctcatatctaacacacaatcctatgagaacaacataaaattgggttgaaccaagatgagataaacattttaagtgtattacctttttactagtatatatatatatacatgcctcgcacgtaactttttactagtatatatatatctaaaatgctatatatataaataaataaataatgaaatatagatgtgaccacacctatggttgccaacaaacattttgtaatgtgacattgtttttagtagtatacatcaatattacacatcatgaaaacatatggtatagtcatgtgattaaattttaaaatattattttagaaaaaaaaatgggaatttatagaaatgaatttttatgaattaaattgggtttcgtagctctatataggttgatgttaatttatgtggatggtgttcaaaggtggctaaaagggcctacctaactgtattttttttaaaaaaaaattaattaattaattaattcctgtattatttcatgtcatatttaattaacaacaacaaagaaacaaaccaatctttgtggaattggaaactatgtgaggacatcacgtggtactacttatttttttaataaataattaatagaatttttaaaataaaattaactaaaataataacctgtaatctactcagaacattttctcacgattagaattaaaattaaaaaatgaatcaataaatcagttacttaatgcttacatcctttgataaaaaaattaaaataaaatgagataaaaaagattgcaacattacaattaaccttaagaatatttaggtgatgcgtagttaagaggaataaaaatattagaataagaagaggaatgagaataaaaataagaatggaataaaatttaaaatgaaaaagacattgataaaaaattattaaattttttctcatcatacattggaataatttttctttttattttaaaatagaatagtcattctactaaattggtatcattctattaaaatgacattcgaatactttaatatgctaccaaacaaagaaatatgaagattgttttcttaccattccattcgattgcattatctttaaccaaataccatcttatattctgtttcatccatctctcagaagacacaacaatagaaattgttgcaatagattcatccaatctcgtagcttaagcactcaattattgtgtaaggtacgtaactgcactattaacaaagaacttgttattcctaaccactaataacaatatgatggtgagtcatcgaagaacaaagaataaccaacaacaaagtaaacaaaataaaaccatgtcacacagacaagactaaaacatatcataaagacaaggagcgatggatcaaaggtcgttgggtgttgaccttccaaggatacttggtgtcgatcactttgaaaggacctctaaagccttgactcaatctgagagaggagaaaactgctctcgatctaactcgtactctgttggctttggagtagtgatactcttaaccaaagcagtaagagtgtcaaattcgacaccacacacatcatgtgtggtgatgtgtgaatcacctggccgcttcctgttgatgttgttatcaatatcaagtctctcttgtattccaagtcgatcaaaggaattgattgacccgggacttatggttgtggccttgtcatgtggccttgctagcaactgtagggatttatcctgtatgaagacaaagtcgtctctcgagtgtttgcttcatgagcagctgctcgtagtactatactaattgttttcttcaatatagtcttccttagagtgacatgtgaggagggagttggaccaattgcgtaagttcaacacgtctccattaacccataggaagtattcataatgttggtcgtcaagatctcgggagaagtacctataccaagcaccttgttcatcatagaaatattttcgagtgtggagtagttcattgatcttcaacctctgaatctcgtactcttcccctttgtggtagagcttcggggttcttcccttatgtctgactgtaggtccctttccctttgtagggtcatggagtagtctagagtcattagaattgtgaatagaatctcacagagattagtttcccgcattgtttgaattgcttcgagatgaattacggttggtcctatcaactgtgtgtggtggacctgtaggtatgtgatctcgagtctgagtcctttcggaagcttggccatagctcgtttcccaaacaggcgaccgctccatatcaggcatagatcccatagatccatgttctcgagtctaagtcattttggacgctcgctcttagtttgcttccttatggggaatcttaatgcatgctgcttgttgactagtagcttggctactaggagtggtagtgttgctttgcgtgttcatggatgatttcttgttagaacttatgaattccttccaaaacaaagctttgagcaaagaaatcggattgtagtttgggagctcgagttttggctctcaatgaaagcaccaaaatattgatgctgaaaaatgatcaacaccagcttgctagattggcgagatggatgataagtttaagtaaataatttaaagagacacacaaagtttatagtagttcactccccatgtcacgatggtaatggagctacgtctacttcaagtttttatttcttacaagattatgagaaaattgactaagtgtgaaatctctaatttctagagagaaaaactagagagagatgct

SEQ ID NO: 128173 - DNA, 1465 bp, Cannabis sativa
ttttatcaaattgataaaaacagtcaataacaacatgcctaagtttttggcatagttgacattggatttgattgggagcagctgggaatcgaccacctcttcctcttcccatggtagtggcctgagtgttattagtggtttctcgagggcaatttcctctaaaatttcctctggaattaggaaaagatgaaaaattagagaaattgaatccattagagaaatactaacctcaagagtacgcacgagctctgtaatttcgattttcttgagcaaagaatgcttcaagagatggatcttgctcagtagtggccatgttaatacttggttcagcttcttgatcctccttctctattcgagattcagatgcaagaagtagaccctcaatctcaccaatagtgtaacctttaacgcgagtgttggtagagatgatgaaagtgtcgtactcactaggcatgcctttaaagattgcagcaatgtggtctcgatcagaaagaacttctccaacagatgctagtaaatccacatgttgttttactttgagaagatagtcattgagacttagtgtgcctttctttaatttttgaagcttagttttgaacttgagaatcttggaagaaaccttttgagtgaaatgttgctcaagagctttccagatctgacgagttgagttgcaaccaaccatacgagttagtaaactctctgtcatggaggaaaggagccaagatacaagaagctgatcatgaacttcccaattaacaaactcaggattgaacttgtgagcaactcaattggcattactaagaaattgaggaggtggaacatcttgaattaacttctgtaaacaattaccacggatggctgcaagaatctattgcttccacaggagaaaattgtgatcattaagtttgatcgagacagtatgattgaagtgaactagagcaacatcatcttgaattctggttcaatttctcggggctgcaaattgtgttccttgaggtgcaagttgataatttgagttgtcatgatcgattgaagccatgttcgtcgttaatggcagaaaaggctatgataccatgttataggtattcaacctcttggacactattggagaaagaaacatagaagaaagaaagtaaagagagagaaaagaaaagagaaaaaaaatctcttattgattaatccaagctttacaaagtatatatacacatgattaaagagttgaacctttaaccgaatgtaacaaacaagtaacagttaggaaggtaacagaattatctactatcctaagtaactaagctaactaaatgtcctagcaatacaaaattaaattaattaattttgtacaatattaaaaatattctaatgaccaattcaaggtgaaaaatggggttgctccctcagcaaaactgggataaagttgagccaaaagatcacgattcaagataaattcatgaggaagtggaat

SEQ ID NO: 128174 - DNA, 957 bp, Cannabis sativa
cacagtttagctaaacatgctctagggttggatgaagcttgatattggttggagtctgttcctctacctattaactctgttattataaatggacttttttattaatttataataacaaagtttttatccttaaaaaaaaagtttaacaacagttatatttattgaggtatattctttttattttttatggtatatgaaaaatgaaggaaaaaaaacatgtggaatattaaactaaattttggatttttttttacgtagtaaatatttggtatttttatttcctactatgatgctatattaatttttgaatgtgattacgtcaaaaaaaaaaaaaaaaaaaattaaatgtgatatgtctattttgaattgtgatatataagagtggtatatatttttatgtaaataaaaataaaaaattagtatatgtcttctatgaatattgagagaaagaataaagtataaacttattaattaaatggtatattaatttgattggtatatctattttacttgatttagtatatcatgaaggaaacaaaaaaattaattgaatcactaatattagttttgtggtatatttatattgttgtaaggtacgtatattacttttatgtgatatagtatatattgagtgtaataaaaaaaggtagaataataatttaaatttgaggtatatatacttttaattagggtatattatttccatatttaagattgtatatttatatacataattttttcattatgctagtatattaatttttttagaatggtattttaggttaagattgggcatatttttatacaatccaaattctattattttattttttaaatgttaaacagtagtacataaaatgtatatagcataatgtaaaaaatatatatatatatcacaagacacaaactgaaaattaatattccatcaatttttttttttatcttggtacaaacaat

SEQ ID NO: 128175 - DNA, 1648 bp, Cannabis sativa
gtactctcaattgggttatatattatactacaaaacgatgtcgcttcatacggtttttataacattttaaaatggtaatatttaaataatttttacagtcaattatacatatagtttgtaagatttattgtaatttcttcttcttcttattattattattattatttaaagtgattagtatgtgttattaaaaaataaattggtattatttccttgaaaaattatgcttctaaattattattgattttaaatattctcctaaattattcttgttattgagtaaagattcatttgtttagttgtttataacataattcagttaattttttattcttttttttaatatttaataataaatattaaataaaaaaatacaactcttattaaatagaatgtatgtcacctcttttttttttttttagtaaatcagtcaaatatatttgcttaccaaaataaattacaacaaattaattccctttacaaatattttcacaccaacttctatcacctctcttttttgtgtgtgagaattatatatgaatagattactaagttgtgatctttctttttttttttgttgtttataatatttttcagttattaataataaatataattaaaaattaattagaatttactttattattctctcttttaatattaataataaatattaacttaaaattataaaattaaaaaattacaactcttgatagatagaatgttggtagattggtttgattcggaattttatttatttttttgaactaaaccaataataatgattttctaaaaaaaaaattaaaaccaaactaaaccagactaattaagtgctcaactcaaaccaaattaaaccaaaccacttaaaaataaattgattttgttcgaaaacatggtttgtaatttgtaaattttctcttttgttttttttggaaagatttttcatttaatagctgattgtttcctgattcttattcaataacctaaaaggtttctagaggatataaagttattcttaggtcgctagttttcattagctctcttagtgtattttttttaaaatcattttcaagtttagagagtgtttttattgtgtgaggaactttagttcaacaagttctgcgttatttatgtattgtttctttatggaaattgtgtaggttgaacacacttgggcatcattcatcaagcttggagagaagacttgcttgtgagtcacttttcaggaggaagagtgtaagtgctaccatttgaagagaattcaagatttagtacttcagaaatttgtttgaaacttagattacaacagttgcgacaaatttaaaaagagagtctttatttgtataagtcaattcagttttgtaatcactttgttattcttctaataaattttattttatgggtgtgatcccatggactaatagcaatctaagaagattgctaatacaacgtataattttgtgtgatctatactttatgttcgtttttactttctgttagttatcagtttaaacatatcttatttctgttcaaacagtttttttttttttttttaaacatctctgtaaaagtacgctaattaatttgaataattaattcggtaatcataataacaaaattcattttgttttacgtgattatatgttta

SEQ ID NO: 128176 - DNA, 850 bp, Cannabis sativa
cggtaaaactaggctttcttgtagcgaaaaaaaataaatgcagctactttattacttgtgggtcctacgtgtattgagagaaagagtgcggttggccaagggagagaaagagagatcaatcacaagagatagatatagatatagacttaatattttggactgattaatattaatattattttattttatttttaaaatatatataattaaattttattgtaataatatataaatctttaattcaatacaataatttaatattaaataatattatcatatattgaacttcaaatataataatattaactattccttaaaaaaattacataatacaatatatattaatatagccatacattttttctgtgtgttaatgtatatattccactaaatttcatagttttactatatatttatatatataattaggtaggtatttaaatttaattatatatttatatataagtaggtatgtttataggtaattaggtgaaaattaaaaaaataataataaaaaatagttgattgggtcaatccaacctgaatctgccaactcgcgacacgtaatcaagcgagttcgagttcacttttttctatccaaaactcatgaacccgaagcccactaatctgaaactcagttaaatcgctcaatgatcagtcctagtatgtacacatgtaattttttttattaaaaaaaatagtagaaaagatggctactttatgtatgtcatgtgtgtaggtatttattaatgaccttatttttttggctttacgttaataggcaatgttattttaattttttttgttattaaaagaaacaaatatgtttttaaaaaatattttaattttt

SEQ ID NO: 128177 - DNA, 2397 bp, Cannabis sativa
cattttaactcaaggccgaccctagcttcaactaggtttttatgcaatgtgagaaattagaccaccaattagtattagcggtagtgtttagagaatatttagctacagtatgtgctatcacattaattacatggagcaataaaaaaaggaaaatttttaaaaataccttttttttttgttttatttacaattttaccatctaaagttctaaattatcaaaatatatttgtaaaattttaaaattacaaaaatacactttactcaacaaaaagtaaaaagaaaaagactaaaaaataataagaaatcaacatcactataactataaataaactatgaaacaacaaaaaacaatcaagaaaataatatcatgaaaagtataatatagctataaataaactataaaataataaaaaaaaaaaacgattattgttattattgaagatgtatttttgtaaataaaaaaaattcaaagagtaaaaatgataattttctatatatagacgtatttttataatatttttaaattttttggtctattatgtaattttttctaagaagctaacattaaaattattacaagatataataatatgagcattgcttatggcaccctaaggtgtccaacaccataccaatgtgtcacattctaagtagtcaaccatttttaatattatttattaaatcaaaatatgtgtgactcgatattgatttacatcaataacaatatgatacttcttatggtgcttgacaccttaaagtgtcccttaatatttttctattaatatatatccttaagaatcaaaaccaaagatgaatatgaatacatttatagtttttaaaagcaaataatacattgttatttgtgcttccagaagaagaacacgtgtaattctaagacgttatggcatgtttggtttgttgtaatggaatcgtaatggaatcaatttatccattacacaaacttagcattatagtcattggattagggatgcatatttctcccatggggatgggggcccccggggacctgcccctaatagggcggggattccctgtctaaatggggaacaagatggggacgaagattactttttatccccaaatgttaaatgagacgggaacgagaatcacactccccgtcccgacgaggacccgtttagtattttattttatatttttgggaatattttatattttatttttgtatttttttagtatattagtaatctttttatgaattttaagttgtgttttggataataattagtttattgaataataattaatgtataataatttaatttttatgtagtttaataattttatacatttaaatttttattatatattatatttatttattaggggattccccgccccatccctgcccccattaggggattctccgtcccatccccaatgaagaataagcggagatgtggattaaaatctttaacggggatggcaacgaggagagcactctccgccaattacccgcctgtgtgcatccctacatttgactgaataaattagtctcttttttaatatctaatagtttatatttgtccaatcaaaatcaggggtaaataaaaggcggatcatcactagggctggcaaaacgggttagacacgatgacacgtgtcgaaacttgcacgagagttagtgggtttgggtttgccttaaatggtttcaggtcgtgttcgggttgactcgtataacccgtttaataaacgggtcgtgtttgggttgacacggctaacacgatattaacccgttaacgacctattttaagttattttagtactctaacgtgtcataaatgggttataaatgtgttaaatacttcataaacatgttattggttgacatgtttaaacaaaatatacttattaataggttacacgggtcgtgtcgtgtcaacccgtctataaacaggtcgtgtttgggtttcattttttgacacaattattaaacgggtcgtgttcgggtcaagcatgtacctattatacatgggtctcgacacgacacgattcgcgaacatgaattgccacccctaatcatcataaccttggggttttgatgctggagaggttcgtattggggctgcttgtccggtgcagcagacaacaaagacgagagaacgagataagcttctatggaggcctcggggttttagaaattttgaggtggaaatacctcctgagtcctgtgcccaatcagaagttgggaggccagacaactaggcagagtagctccgcacacatagtttcaaagagagggagatggaggcggaatagtttaaaagagattgtgtttagggttacatcttgttaagagtgttagttagtttaatgtgttgggttttatgccctaaataaaactctgtttcaatgtaa

SEQ ID NO: 128178 - DNA, 1068 bp, Cannabis sativa
  modified_base (55)..(56): a, c, t, g, unknown or other
  modified_base (105)..(121): a, c, t, g, unknown or other
gaaaaagcatgctggaaacactcgtgttggtttgtagggtcagtcatcagtccannaagcagccaaagtgacgtactcgttaagagccattcattccgtgggtgnnnnnnnnnnnnnnnnncttgaagcgggaacgttacaaagagtgccaagagaaatcagatttctcttcagatcatgaatgtgtctaacatttctgagagttttgatagttccatcatagcttctgatggcaatggtgtcaatacctataacttggcacttgtgatcattccccatcatgacttttccaccatcaaccttggagtagtcaataaaccagtccttgtgttggactcatatggtaggtacaaccactatcaagaatccattcatcattgtccctgtgatctaaattggtacatgcatcttctgagtttgaagcttcaccttgttccttgattataacaaaaacatcaccatatgaactatagtgatcatcaactacagcatttgagtcatttcctttgtcctcttcatctttgtttttctttttcttatccttaagttcccaatagtttctgattaagtgacctatcttgccacagtgatggcatttccttgtttcctttggtcttgatttcgatcttgtgttccccctaggccttgaattgttcctgcacttagattgatccctgaatcttgaatttcgtcttcttgtttgtcttcctcgaatcatcaaggcttcatcatttctagtttctttttttgctacctttttccaaatgagttctgcatctcttgatctgagagtgctcattacatcttcaaaggtgagagtgcctctgttgtacattataacagttgtcatttctttgaactgatctgacaacgcattcaatatgatcacaacttgatcttcctccttgattgtttctcccatattggttagtgacagaacaatcctatttaaatcatccaagttctgctttaatggaacaacagctttcatcttgaatccatagaatttttccttcaagaaaatcttggtagctgttaactttgccatgtacagttgctctagtcttt

SEQ ID NO: 128179 - DNA, 882 bp, Cannabis sativa
  modified_base (546)..(547): a, c, t, g, unknown or other
  modified_base (802)..(814): a, c, t, g, unknown or other
gggattgcacagcttacccggtatttccccttacagatcatgggactactgactgtcgcacccgtgagccaagcccagcaaaacagtataactataacaaccacaattatcatttcacatatataataatgccatttagcatattgtctatttgacatagacctacgtgttacgctcacacgcctatttacgtctatgtggcatagacccacgtgttacgctcacacgtctatttacaataaggcctagaacagttcatctcagttctaatcaccgagtccaaccaaattatgctttgaatgcataattcttttaatcaatacattaagcatggcataacacttaaaaatcattgattagtagagttataaccctaggccatataaccactaactttagggtaataatcctaatcctggttctcaaataatcacaaccatagtataagacatgagcgccatagtgcttaactctacgtactaactactgtcttacatgatgtccagtatacgtggagattccaaatccccgggtgctgctgaccanntgtcggtaatcctagtcacaaatatataggattcacaaatagggttaatcccaaaattcatttccacataattacaaaattttcattcaaattcaaataatcatatagagctcgcagcgagctttccaacgatacctggaatacccaaatcggagtccgactcacactgttatgagcattcgaataacacgttcgaaactgcccagaaccacaaggcgggctgcggcactccccactgttggaaatattttaccnnnnnnnnnnnnnactaccaagtatgtttcattaacccccgaatatgaattgtaaaataataaaataaacacatataaagt

SEQ ID NO: 128180 - DNA, 657 bp, Cannabis sativa
tgaaaaaatagataaaattgtatccaattaaatttaaacttatgatttagatatttgttgtttatttattcaatttttattttttataatcatttaatcaaagaaataaaagtgttgaaaaagtgccactacaatcactattgaaacttcaatagcattgaaaagacttacttttgttcattgaggagatctctcatgtatttcaaaactgtataaggcactacaaaaaacaaatcttacttttaatcacaacaaaatttgtgattaaatgtgaaaaagttatgactaattataaatttttatgttgtgactaaaagatccgtgattaaaaatattatgttttttagtcacaatacttgtcgtgattaaaattaaattagtaataacttgtatccaggggcggagcaaggattaagttcttggggggaccaattattaaaagataagtatcgataaaaaaaattaatatttgtttcagcaataaaagttgatactttggataaaagatatattcacataaataagaaagactattgaaagcacaataatcaacacataatcaaaatttaaagggaagaactagaaaaattaaggtaaaaatttttattagggatattctacttaattactttcttaggatacttaattaattaatta

SEQ ID NO: 128181 - DNA, 2004 bp, Cannabis sativa
  modified_base (830)..(842): a, c, t, g, unknown or other
aaaatataatgaaatttaatgttaaatcatttatcaactttgtgaatcaagggtacaaaatagctaaacaagcatatggatgattcttgaagccttcatttcttttactattaactacacctttatttactctttttttaatatttattaccaaaacaaaaatcacaaaatcattggttactatcatcactatctattaaccttttgtttctatttttcaactaacgtttttgctcataatcacctctctgtggaatcgaccgcccgatctatactacaaccactgctagtggaagtcacattttaggcattacatatcacaaggccttatggtcaaagagcagttgttaagtttttttagtacactagtgcccatgccattgctggaaggcttgtgcataaaccaagttgttcatgtactaggcgagatgcctaagcgagatacctttggctgcgtactgagtataggctggattcgaagttagtcatactctatcgagaacgttcctgacctagttatcaaatcgtgattaggtgtatgggcgcctagttacggtctggatatatcaagacgattagacctagagcgtttaggtcttcaagacgatgttggctcactttgctagtcgctagacgaccacctttgaagtttaaatattttgtaacttttaaaatgggatctcgatttatgtaaattattatgtttaattattaaagtaaaattctttgataaagttttaattactcacaatttttaataaactcgttgattagcaacgagcgacacagtaaatataaaatcacaataacacgcctaaactagtagggtnnnnnnnnnnnnnatcagagccgccaggttgttttccgaagatcattaagatatgtacaatcatcatcagagataagcttgactcagggttcgataagtttttacgagttgtaatcgtttttacttgttatgcatgattagaaatatgatagaaagcatgttagtagattgttagctgaataggagcatattaagttcccatgtaagcggtagttagattttaattatgattgctgcctgacctagccgactcatgaatgtgcagggttgtcctatagaatggacgcctagcaaaaatatgtagttgggctaatgtggacgatactggtggtgaatggagagattaggatcccccttatactcaagattgtgaagagacttatggaggtggtcacaaaaatcaactccaagttccatcagatttggagcaaaggttcgttgaaatggaagctaggattcaacgacaagatgaggaaattaagagattaagataacaaaggtcccatgtcgtaccttcatctcaaattccaattgtttttattctggtgttcttagcagaacagagaacggctggtaaccgtatggaattctcttatgggaattgtatgatgcaaggaccttcagttattctgagaaacttagatgagatgaatacttctctagctgcatacactatagagtttgttcaagagccctgagggactcaggttgttggtggagccattactcctcctacctctggttatggtaggggtcgtagtgactcgaccactgaccagaagagaaagacaccatcgcacctggtgacttaaatcagaacaagaggttttaagggaactagggttgaggcaactatcagggtggttctgaaatctgttatacatacccaaaatgttccaattgtaagaagcaccatctggatgagtcgaggatgtttctagtgtcattttcctggacattataagagagattgttcacaattcaagaaagaagagtagaagacagcagcaaagcccgctccaggaagggagtttgctcttattcaggctgatgcaaaagccagatcctcaattgttacaggtcagctctcggtcaataactcttacttctctgtattatttgactctggggccactcattcttatgtggcggctagaatttttgataaattgggt

SEQ ID NO: 128182 - DNA, 617 bp, Cannabis sativa
  modified_base (38)..(80): a, c, t, g, unknown or other
tttatatgtgtttatttatattgttttagaaattcatnnnnnnnnnnnnnnnnnnnnnnnnnnnnnnnnnnnnnnnnnnntggtaaaatatattccaacaggtttcaaccacttgaaccatttatatgcggccccttttaatgtgaccacgaaatattgacattttttttcatctttattagctcattaaatgcgccaagatggtactttgggtttgtggtaccatcatattgtgtgatctgcggctccttgaagtttggttctagtggctcaatttgaaccttgctcgagagaggggattcttcatcaaactcctcatcatcggtcaagtctctccgcatggcaatggctatcctatggtgtaggtcttccaatttctgcctccaactccttcatcctctcgctcctcctccctcgggggttagtgagaggaacttgggtcttgtgtgtggtttgcattgggccttgctcttagggggagccacatgtgaggtgccccctagtatgagacctcttaggtgaagtctctttctttgtctcgaccgacctgttgggctcttgtcttgcaataggttccttccgtgctcatctcttggggtgctattagtggatgacat

SEQ ID NO: 128183 - DNA, 809 bp, Cannabis sativa
ttctaacataagggcccaaaattttttttttctctatggcccactttgtttcaggaccggccctgtatatatatatataatagatacaatatttaggccatgaatatatgtgttagagtttaatcattattacattatcttttgtataaatgtgtgttttgaaattaaaagtactatatagttgattaggttttgccaaaaatgaaaaagtataaaaacatgctatggttcaaaaacaatttttcattcatattcttttttttctatctatatatattttttttttgtattgcaatcaataacaatttcaataaaataattggtgttttttaatattttgttaaatatataactctatgataatatttaaaaatattatttataaattgtacttttttaagggattcaatttttaaaattagaatagggcctccacgaccctaattctgttacactttgttatagtttgaagatgatcgtaaaagtgtttactttttgaaccatagcatgtttttatactttttcattttggcaaaaactaatcaaccatatagtacttttacttttaaaatgttttcaatgcaaaacacacatttatacaaaagataatgtaataatgattaaactctaatacatatattcctgcaaatggcgtgaatattgtaactaatatatgtagcttagactctaaaccacaaagttacattgtctgtgtttctttaccaaaaatagaataaaaaattaaaaattaaaaattgaaagagataatttcgagtgtaagattgaaaggtatagagagagagagagag

SEQ ID NO: 128184 - DNA, 1611 bp, Cannabis sativa
agaagaaacaaataaacaaaaagttagtccagaatcagttagtccagaatcaatccagaatcaataatccaatcaataatccaattggataataattcactaaaacttttaaagtttatagaaagaaataccttgtttctttgcaagaggaggtatggtcacatggatacatggtcagcatccacccctccgtgatgacccatgccctcaacattgatccaaacatctgacttattcaacagaagaggaggtttctggataaagactatgcccaagtgctcaaagacgaagctgagaggctacgggcccatgacttcataatagaggcattctatccactttgggtatctaacccagtattgatactcaaacccaacaaaaagtggagagtgtgtattaacttcaccaacctaaacaaagcatgtccaaaggactgctttctgcttcccaaaattgaccagcttgtagacgccacagccggccatgaaatcttgagttttatggatgcgtattcaggttataaccaaataaagatgcatctataagatcaggagcacacaagcttcatgacagacttaggcctatactgctacaaagtcatgccctttgggctaaaaaatgcaagggccacatatcagaggcttgtgaacaaaatgtacaaagatcttatcagccacaacatggaggtgtatgtggacgacatgcttgtgaagtccaaaaaggctaggggaacgtggaggacttggaagaatgcttcaaaatcctccgcaactataacatgaagctcaaccccctcaaatgttctttcggagtaggctcaagcgaattccttggcttcatagtcaatgctaggggaatagatacaaacccaaacaagatccaagcccttttggacatgaagttgcccacaaccatcaaggaagtacaaaacctaataggacgcattgttgcactaagcagatttgtgtccatgtctatagacaaatgtgtacccttcttcaacattctgagaggcaacaaagaatttgagtggataaaggtcacttgaaacgcttagtttcatcaaagccttgcaataaaacaaagtcaaaatcagtgtcaaagcacaacattgaccggctagcctttaggcaaggttgctatggccagccagatccctcaaagacacactcttggccagccaaccccatgcaacatcactatggtcgaccaacctggaaaaatgccagaaaaatgagcaaaattagatgtgcaactcaccacaaacaaatcctaaaagccagcagagtggagcctgtctggctcattgtcactgagcccttgaagctcatcgtcattcgtagaaggaatatctctctctaggtgcctgcgagccacctcaaagcctctctaccttgcggccgagcctgcacctcgaccgagctttggggtcctcttgctcgaagttcgttccttcctaactggaggatcattaatcatgggctgcctctctggtacaggccctagaggaggagggagagatgatccagcaacatctctaccatggatgttcctgttggaaattattttaccaggatcttagatctacccacaagtatgtttattaacatc

SEQ ID NO: 128185 - DNA, 903 bp, Cannabis sativa
gtccatcttggattttctcagacaattcaaatctccaaaactttggagtcacacgttgtaccgccacactaaccgaaaccctagctgtattcttcttctccattggagaaaataaagaagctttgataatgtttttggttccgggagatgatgatattgatgatgatgaagcgactcgtcttttggttttaggttttactggaaatagccgagagttgataccgataatagccccgttgtagccatggatgaatggcttgttcaaaagtactagggttttctcacatttcaaattttgaactacttgatgaggaggcttcaacatatttcttaacttatatataataataaggaaatattttttgggggtaaaagttttgttttgagttttggggtctgtctagtttatttgtggtaagatatctatatatctatatctagctatctctatatatatataaattatatataggagaaaaagaaaaatgctatttagatgatagaattgtcatacctaacattttgaaagctactaataataataagtaatcaatcttatatatatggaagactttctcgtcaattaattgcatggtatatatacacgactccatattatctagaaatgaaggttttttcaattatgaatctataattattagttaggattatataccaattatttatcagtaagaagtcatatttttatgttacaattaattgtgactgctaattaatttagttaggcacctcctaggtcattcaaagtggttaatctagtactctatatatattaatatagaaaaattatttaggatttttacactctgaactttgttatgtaccgaattatatcatccaaactatatatttaggccattaaaaaattgggtaaataccatt

SEQ ID NO: 128186 - DNA, 1114 bp, Cannabis sativa
ttacttttgattctaattaattattgaatggtttctttattatcttttttaagcaataaaaggttgagcggtgggcttcattggagtcctgggcaagcaataaatttatgaaagaaagtacgaacaagataaagggactctttttcacatgacttatttggctcatacagataaaagctcattttctgtctctacttctttggcatctatatcacaacgcttaattatttatatatttatttatttaaaactaaatatcacttaaaatattttgaaaaatgttatactttatactttatttttttgggacttttatacaaataacctaatttttttctacatttttatggatattttattcttacagatttttgcttatatttattcaaaaaaataatgttgttttttgcgttaccttataacagtaatatgaaaacaacaaaaaataacggtctgtatatttacctcttgtcattttagtatttatgaaaatatcttaaattttcttagcagctaaaagtgtttctacaatacaccccatcaaaataggtatactaatacaatccctaactgttttggtatctataagaattttttagtctaaattttttcatagtcgtgtacgttatagttatttaatacatcctgcaaaattttgagaaatttggaataatttacaatatcgaaatcaatattttaaccttctatttcacacgcgtataaaataaaaaaactacgcgtgcaacaaactctttgaacactgtttttgacgtgttaaatattttcaaattttttaaaattttgtcagatgtcttaaataactatcatgtatacgaccataaaaaaaattggattaagtagttttttaaataccgaaatagataagggtgcatcaatacacccattttcaagagatatattgtagatttttcgtatcttatatattcatgatattatatttttatactttttagttgctaaaatacttaatatttttgaaatattgtatgtttatatcccgttttttctagggattatttcacaaatacataaaaacaacaaaaaattataaaaatacggttgtatggattaattttaaatatttttatgattt

SEQ ID NO: 128187 - DNA, 744 bp, Cannabis sativa
taaaaatatttaaaattccatgaaactgtatttttgttattattttttatttttgtgtatttgaaaaataatccctttttattttttctttttgatagaagtaagaagtgtgttaataagttattttgatgtcatttatccaaatttgttaggtttttggctaaaaaatatataaattcaaaaatttgcggcataaatacataaatctcactctaactagttgctcactaagatgccacaagtcaatctccctttaatcctactcattcttttaatcaatataatttttaaataataaaaattaattaatcggataacaaaaaaattatttcaaagaatgcataccatccacgtgcgttctagtctgcttgaccgaaggatgccgcacatccatagtgcacacaacatttccactcacggatgtgggtctttagacaagctcaaccgagcttcttcgaacaaaacatgtctgagtgcacgtgacactgagtgacacgggtgtgcgcgcactcaggggagtgatcccctccttcatttttttaaatttcaaaaattcataactaattccatttaaattgaaattcagttttgtaaaaaagtaaattgcttatttttttttccataatatccaaataaaataattccatattgtaaatttaattatattttgtaaaaattttgtaaacatcaatcaatcatcaaataaacacatatatcaacatgaatcacattcaaatcacacat

SEQ ID NO: 128188 - DNA, 1049 bp, Cannabis sativa
caagcactctccacaaccaagacactacgagggtccctggtccaccaggcctcaaaacagaaaggcctagcggtcttagcatcttggctaagagatgcttaattttggtgtaatctctctccatgtttcttctccttttctgtttctatcatttattattattattatataatcaaaatattaactatcagaaagtcttacaccctattttaataataataataaatcttatatctctaaaagaattaattcgataaatcttatatatattttggcatttgggagggtttttagagtttttttttttagttgtatacgcgtgtataaaaaataataattacatacgcaataaaatatttaaactttatttttcagctttataaattatttgaaagtttataaatttacatgttgtgctaaataactacaaaggacacgattgtaaaggaaaaaaaataaattaaaatactctttggatgccaaaataattagacgtgtaccaaaacaactattttaatacgtattttaagttatttttatcatttaaatttttacattttatatctaatgtaaatgataaaaataattcagggatataagagtaattttattcttataactacaaaacacattgttttattaaagagaaaagttgagtagcgggttagagcttaaagagcatcaaaacttggataacaagagaaacgaagcttaaagagcggaggaaaaagagaagaacacgaggaaatatgaagggcgagtttgcacgaattaattgtaacaaaggaagagagctccacatttgttccccctataaatatgtttaggtttatgccctgaaaagtttgtaaataattattaaataaagagttaaacatttgatatatgtgtgaatgttaaatcgttaatattaatttgttaaataatttatattaaataaaaaattcttgtagactaggagtgttaggttatatttagcatatgtttcgggtctgaaaagtaagcattttctcgtctattggtgtcttttggagcggttttacgcttga

SEQ ID NO: 128189 - DNA, 986 bp, Cannabis sativa
  modified_base (53)..(67): a, c, t, g, unknown or other
accccaatgaagtaagcagtatttgcaatagctcttcatacttgcattttgtnnnnnnnnnnnnnnnactagccacatagttgacataattatggtcttcattccattgtctattgcttttttatcagtactggtatacgttccattacctgccattgtttcaaatattacatttacgtgtctttttttcatattaaaacaacagtaaaacaacaatacaaaataatgtacactttttgtttattaatgtttttatttattattttactgatccatataattagcaatgattatgtgttaatatcgccaaaacaacattagaacaaccctaattttttgaaggaacaattgtagtcgtttcttaaggataatttacatgtaattttttttatcaattcgcatcataaattaaacaacatcagattatttgtttcgcgtttttttaacttcaaatctaaatctggtttgttttttttctagttttttaaaaattaaactaatatggattttgttgtgtttacctctgtttttagaaaaaatctactgtaaatgttgttgttcgttcttcgattgtccttagatttagcagggtttcctcatcgccgaatttaatggttttttcctggttatctccgattccggtccatccctaaccaggaaggaggtcccgtttttgtgtttttttactgtttacagtataaaagtaaagttattgggcctgggcagtataaaagaaataaaaacgggcttggataataaaaatgttaactttgccatgtcctagtatttttgaaaacatttggtaaaaaagtagtatttttgtaagtttccctttatatattaatatagtagatatatattatataaatctttctcctcttaataaaacctcaattggccataggataccagcaatagaaagggattttttgttttttttttttcacttttacacttcaaaatagttttttttttttttttgtatt

SEQ ID NO: 128190 - DNA, 579 bp, Cannabis sativa
tagtgcattcctctctctctccacattttcgtcctcaagcaagaactagagaaaaaccaaccaatttcatcttttttttttctgggaaattcatcaaggatttgtggtgattcaagtggaggtaaccctataaaaccttatcctttgtgttgttgaggttttgttatgtttaggcttgcaatttgggaattaagttctattttgctagagttttgtctgaggatattttctttagcttggtagtgatgtttgaaatctatttaaggtttttttgttggttgattcttgaggtgagcaagtttgagctcaagaactcaaacttggctcatcaatggtgaaatttgcatattgagtttatttttggttttgttgcttgaaaatggcttattatgttgtgtataggtattctggagcttcgtatggagtttggagttgttttgagtcgaatcagagactctttgtgtttctgcagtaaaaaatggtaggtcgtttctttttttgctggtgcagacccacaaaaacggctcgccctttttctagaaactgttgggttttgtgccctaaataaaaccctttaca

SEQ ID NO: 128191 - DNA, 852 bp, Cannabis sativa
ccggatccgggcatactcgtgacccactagagatactgtacaaactaggcccactgcaggattctggctcgtgaggagatggtgtccgtgtagatggggcccacgaggtctggacatgtgttgcacgcaagtactgctatagtaggcaaagatgtcagacatgtatcgttgtacaaagaggatgtatcccttttggtggtgtgctcactaccatgttttgacataggagacaaggtctgagttggtgggatcgagcgtcagagggcagccacgtcacccttcaaagggcttgtggaggtacctcttggaattcctctccgagcgtcccaatgttcactcagagggttttatctattccgtcttccaaaaggcggggcccttctagattcggataactttcgtccttggaggtgaggcttctaggcttcagatgggctcgggcccatcttccatctagaccgggcttgctcatttggaagggctttggcccaagcgattctcacttgatcattctcttgaaatatcacttatcattcttccaaaaacacaaataacatagtacaatcaaatttttgtgttatatatatcaaaacttttttgttttcatatttttgtaaatagctcttggttatttcagtttattttgttggacttctattcaatgagtgggctctttcattttgactcatttgacctaatactattttcttgaaataatcaagcccactttctaatatttattatattgatattaggctaattaggatttttaccccctaaattttaacatgtatcaaatcatgttccctgaacttttaaggtcgttaaaaataccccctgaactattgaaat

SEQ ID NO: 128192 - DNA, 1808 bp, Cannabis sativa
  modified_base (1755)..(1769): a, c, t, g, unknown or other
ggtagaagttctagaaggtttttttttgagatgtgggttgttcatcattgtcttcttttttaggtgacttaaattcaatagaagtggtagtatttggggtaggattttaggtagtgtttggggtagtgattagagtggtagtactagttgagggggtaggatttgaggtggtgtttagggtaggattttgggtagaaatcaaggtagaatatggatcatgcaatttacctaattgggagaaagttgatacaataaacttatccatcatggctgccaaaaaaaattatgcaaacaattaagcaacatatcaaaacaataacacaaaatcactagttaaaaaatcatacttcatttcatagataaaaaaataaaattatcactaaactaaacatagaaaataaatactcaatttatgcaaaatttaatttgggaaaactaatgtacaaaaaaaatctaaactaatttaatatatttgtttgccacactaatttaatatatttatttgccaatgtaataaataataatatactttaaatataactaatttatttgtgactttttttagacagaaatacataaattatttttctttttttatataaaaaataataaattcataaattatatgttctattatattggtaaatatatattataccaaatataatttttatcaatctaatttttatttataagtgatgcagctaaaaaaaattaactaacttaaactaacaatttacaaaaatttagtacaaaagtttataatagatattagataaggtttcataaaacatagattattgttaagtgatttatattgttatataacagtaagtaaatacacaatatatacattgagaaaactcttaatttccaaactttctcaaatcaaaattttcaattgattaacaaacattaccattcacaagataacaaccacaaagattaaaaaaataacaaatagatgaccacctttacttactctaagcagtgacaaatatattttgatttccgacagcgacacaacagacttccgacgatcaaataactccgtagttgacctgtaattatcataccgagcagttgcatttagacatccacaagactctctgttgcaatgcatatatatttttaggctactactataataatcaacaaatgtagctaccatgttagagtcacgttagcattagcatgagcagcaacaatattaatttaattctctattaacaaaactaactatgatataatgaaaacactagagggacttaaacaacaatacctctaatagcaaatttcaaagataagtttaatgaactgagaaattttgttgtcagaaactttatttagtaagtcaaacaaagtgtctcaaatacataatcttaacacatgaaaactaagatattaaaaactaaaggaaaaatcctcacagagcatattcaaacttcaactcaaatctaaacaaaataaacacaccatatgagtaacgccctaacaattaggcacgctaccccaaagtgattaaggaaccctaatcttctaaacaagattactaagaaaataagcgcgggaaattaaactttaaacgaaatcagaataaaaataaaacttgtaataactttaaccttacaaccaaaattacatgtttcgggatcccaaaaatattttacaaaatattacaagtctttcccaatagccgatctaagcgacaaaatagaattataaaaatttatcactggtagaccccaacccgcnnnnnnnnnnnnnnnccgaacatgtacatacatcgcccaactctcgcactcatg

SEQ ID NO: 128193 - DNA, 1120 bp, Cannabis sativa
cttgtctctgttcttgcaattgatagctttttcataagttggaagttcagcattctcaatttcattagctaggttaatgcattgcagcgtagtctgcaaaaccaaacctttctctggctagttgataggtatcaagagagctgtcttgagtgtgaactgtttcttttatagagtcttgttcaatattgtcacttggatttccttttgatcttacctctacttatacttgtgtagcctcaatgctaatctcacctttgttttctggtttcatggccattactttctcattgaagatcacatctctactcattatacatttcttgaaaccttcttctagtcaccatagcttgtatcctttaactccatcaagatacccctagaaacatggagttgattggtctaggctgcaacttgtcctatttgacatgcacatatcaaatgcatccaaacaccctcaaattttctagacttggagcttgaactgtccacatttcttgtggatttttaaatccaattgcaatagatggactctgttcaccaagtaccaagctattttaatagcttctccccagaaccttctttctaaaccagcactctttaatatacatctaacccttttaataagattctattcatcctctcagctaagccattttgctatggagtcctcggttctgatttgtgtcccctaatcccaacttctttgcaatagttttaaaattgtgtggagcgaaattccaaaccattgttgtccttgatttcttatctttctttccagtttggttttcaactagagttttccaatccttgaaagttttgaaagcttcatctttggttttgagcaagtgcacccatatctttcttgagtaaacatccacaatactcagaaagtaatttgatattcccaaacttgacacttttgagggaccctacagatttgaatgtatgtagccaagtgggtctatggtggtgtattttccaatgctgaatttctgtctacaacattttccataaacatattcttcattaaaatgaagcctacaatcaatttttcccttaaggattccctatttttctaactcaaacagacccctttggctcacatgaccaagccttaggt

SEQ ID NO: 128194 - DNA, 1873 bp, Cannabis sativa
acaaaaattatataaatattttatatagaaaaatttaaatttaaatttaaaatacttaaaatattataaatatttttaatcatatttttatgtacaatgttatcaaatataacaacaataataatagacatcaattattatcgagtaaatataattgaaacactaatattattaaatgtaacacactaaaatatttaaatatctggtatataaatatatatatttggcctatatttattattactttaaaggattgtttttatttttctttctcttatttttgaagttaatattataatactcagtgctagttttcctatagcctttgcaaaactcatcgtgatccttaatattattaacttgagcgtgtctttgaaatatttatatgaatataattttatatggtgtagaaagagatttttttttttttaattaagtagttaaattaagtatataaattcagattatcttttattattcattattatattacaatttgatggtttaatatttttaaaattaatatttatattagttaaatttatttagtaacaatcaatgtgtaatactcattaagaagtattccatatctatgtggcagactcgagagactaggagtggcatatgtctaccctagaattttaatattagtttttttttatttacaatttagtcatttttttatatgtttttatatttatactttaatttggaaatatttttatatttatactccctttctttgtattttttttttatatattatttttttaaaaaaaaaaataattttcattttgttttaatttttatgtttactcccccactaattacaaagaataagattattacaagaatccttcgtgctcgaattcttccattttatgcatgttttaattactctttaatcaaactcataatatttattcaattaccaaaactaaattatgggttggtagctatatatatttattccctttttgtttgaatgaataatatatattgtattttttcaaattaagagattgcatttaattggattttttgtcccacatcttttaaactaatatctatttactattgcaccttaaaaaaatctatttacaattgaaaaaaaaaaatctatatctacaatcaaattcgtgtatttccatttcagttcgcgtctcatgtacgtgttcttaattttttttttaattcattacctatgaattagatgctataaaaattcttacacgttttttattatcaatccaaataatatttattgttgtacaaaattgatataaaatacttgcatattttaataaagctaaataacaatataaatacttaatgttttaagtttgtaagtctcataaacctaatatgtatttttagcgacatatagatactcaatatttataaaattataatttttttcttgtttcgtacagattccgctttttaaatttattaaatgaacatttaaaagtaactcatgatatatatgtttctgtctaaaccacatgatctagaatttgagcctaatatatgccctgtttaagataataatactgatacaagtagaaaaaaattacagttttacaaatattaagtatttatgctgctaaaataaatattaaaattatgtaacttacaaatttgaaactttgagtacttataacgttatttattcttttaataattatttattattccaaataatatattacaattgttataccgctaatttgtcatatggtcgataaaatccattttggagattttgttgttcatatgttgaatataggaagcttggaattactcgtatactgtttttttaacttttttttttttcaaatttacggtttaggtttttaaagtggttgtagcg

SEQ ID NO: 128195 - DNA, 1870 bp, Cannabis sativa
tggcagctgattacgtaatgtaatgaagagcttgtcataaatcccacatgctcgaaatctctcaagagaagatactgcaagctcccggaccatggtatgccctaaagcttggggtaaatgttatccgcattttcataaacatgacacatgggttttaatcaaataaggctaagaagtcattagttgaccaacctcctcatttgatactctgggaagataaaggccataacttcgcgggaagagttgtcgtgatagggaattccctgactactagcaacacagagggtatccttgaaccaaagtctcccaccattccaggaaccaaagccattgactcctgagaagagaagggatttcccagaagggccaaggcattttgagacacgttaatccaggccacgcctttagcctgcgcaagctgagcctatacgtgtcagagtatggacttagtcaccaggattttttaggtatgacgtcagaggttgtctcccacgacacgttatcgtacaaagcatgcatgtccttgtgtacctgaccaaatgatctaatagctagagatcagggaaatttaaaaaggagatgccctgggatgacacgcatctgaggcctagcttgtacgacctgacgcccttaaatgccatatgggaaaaatgccacgtacgaatctaacattcacattttgccccaactatgatccatctaaggcaggacatgtaaagaagttggcctacagatatttctaaaaaagcacatggggagagacccttttttgggagagatagaagactcattcttcatcatcctaagaaaacatattttgtaaccttccaaccaactccaaaatattcctactaagcttccttttctttaagaggaacacaggaaaaggagttacaatccattgtatatctatttgtataaacagttatcggtgatgagcctaataaaatggacttgtggactaaggatagttaacgcctgaaccacataagaatctcgtatttgttattcttctatttgtattgtttattattttcatatcctctaaaaatatttagttaccaaaaactcggtaaacattataaaaaatgaatattttgatatatgcatgaatgttaaattattaatatttaatattaaataatttatataaatattaaaaataacttattcatatgatgttgtgacttgtagttgtacaaagaattaagattacttagtcatgaataaacagtcaacaacatattagagttaaggattctttaatcaatggttgctactgcggttcactaatgctcgttatttagtgtaagtaatcttaattcgagttattgatgtagcatgacacattagtgaaggttctgtatataatagagattatatatgacaaggatcgatttgaataaagatatatttttcaaacttactgtaaactataaacacctaattcatatcataatgatgatcaatagtagatcgacctaactcttaagtaaccataagttcatgttcatgttattagtttctttgattcactcattaaagtttcttaaagaagatcattcttacaacttctttaggaatctaataatgtggttgactagaacatgatctacaattatggaatcctgactttcctaacagattgaatgttggttccttttatgtattaattctggaattggaaagttacgcgcaaatttagatgagatttaaattatacttccactagtgaattaagataaaaaagtaattacaaggctaaaatggtaatttgaccaaaactaattacaaaccaatataaggagggctaatcacaagaattgattatatcaatggacactataattgtaggaaattattttaccag

SEQ ID NO: 128196 - DNA, 1155 bp, Cannabis sativa
tgtaagggcaaatacataatttcatttagtgcacatgttggatgaaggaacatggtaagtactaagtggtaacctttttctttttgccgactatcaacatcgaaagagaaatgtatgattaatttgcaaaattttgaaagccacatgcatcatcaacgtgagacatgttttaagaagaaaaaaaaatatctactaacgaaaaagaaatagattctttatcattaatttgtctcaaattcatgttttttttttaagattatagtaggtagttatttttgaaatacttacatattttttctttcaaatgaaacaattacaaattatgttgaacgtatatatcaaaactagatatttttatatttatttttagttaagtagttaaattaagtaaaaaaaattaatttcttcgtttattaggtccaattttttattgaggatatttatatttttttgttgatgttgccattaggaatgtttagattattgagatgattgtcattcgtgttcattgtggtactattggggagattgttatcactttgtagattcaagcagagaatgcgttacaagagggagcttttgtttttgcccatgctttgtctttagatttatcccgcaattgagtgaattttatttttctattttcgactgctttatattaggtggtatttggttggaaggagtgaaaatgtaggaatggaaatgagaatgtgaattagaataggaatgagaatatgaattggaataggaatataatttaaaatgcataaaaaaattaattaacaattattaaattttttcaaatcatgtattggaatggtctttcattctatttcaaaatggaatagtcattccaccaaaatgatagaaaggtcgttctatcggaatgtatttcaatggttttaaatgcaacaaaggaatggaatgaaaattgttttctttccattctattttattacctctaactaaatgatattttagtgtgtggtgttagattaaggagagttcctagctggaaagacaatgtttagttgttgtaagtttttagagattttacttcgttgttcaatattaaaatttgttgaatttctagagattttattataagctactaagttcatgatctcctcaagatggtgatcaagaacctaaagg

SEQ ID NO: 128197 - DNA, 1310 bp, Cannabis sativa
ttttttttttaatttttaaaaattaatcccggcggattaccaattccgccggtaataaccaattaatactggcggtttggctccgccggtattaattgttgtagtgtcttcttccactactacaaaacaacctttagaaagttttttttctttccacaagttttataaaagggtaagctaaagagtgtaaagatacacggctgtttaaaattaacatttagaagcgattattttataaaaaccgtaggtagactacacctacggagtcagttggggaatagaaatgatgaagggttatttattaaccctatcccattattagttattaaacaataactgacgacagagggtacacaaaataactgacacgtgagccttatgtcatcggttattttctaataactgacatgatagggttatataaataatccttttagcttcgtcttcccattctttgccttttcttcatcacgaaaccaccaacatcacaagcacacataacccacaatgaaaaccctcgccaacgaccaccaaaatttcacatatctccaccatttttacaccatttaacccatttttttccaaaaaaaaaaaaaaaattccattttctatacttaaacttatacacctgaaaaacttcaattttttccttgtttttagtgtaaactgatgtcaagaagtaatgaggggattataacttgggccaccgattttagtggagaaaacgttgaatctcaacgttcattaaggtataaatatgatttctatttatcaaattgctttttttgtttttgtaaatttttttgtggatttttctatattattaaaattatgttgttgtttatgtgcatgattggctgaatttttgtcagcattgatcgccaaattacagtaataaggtaaaaatttaattcttaatatctttatatataaaatgtggctatttaatgtcatttgttagattaacaatttttgtaatgattcttttttttattaatttaaaagtagacagaatgctaacgttaaatgttcaaaataaataaatattaggaatcctttatgattaatgaggtaccgaaacaccaaaactataagatttcaattgcagactttgggagtatcggtgatggactaatgcttaatacaaaatttgattgcaaactttgggggtaccgaaactataaaattttgtgaggcaaccactactagaaaagtgggttttagtgatacacattgagtgactctaaaattatttagtgacacttcaccgcgcgtcactaatgagggtgactggaaagacaatttttagt

SEQ ID NO: 128198 - DNA, 723 bp, Cannabis sativa
taacactacgtggcttggcacgtaacaatcacctagtataaatatatatatgcatagacgaattaactacccaatcaaatagtaacaccgttttatttataatacatgatcatatataattaataattacttagtaataattttagtatgttattttagtattaataactatttaaatattatatatataattatttttgttattttaacttttatctgttattttaataaaaaaatagtataagagctataacaatagcttatatatatagctaaactaaaaacgtaattattagttactaattcatattaatcaataccatttgacatgtcacactataataataattgatgaaatatatataatatggaattctacatattttaattaaaaataaataatatagaatttcaatcaagatataatacaaaaaaaggtagagaaaaaatatgggaaatatatatataagcattaaattatcaaagagaaaattctcaatatagtgttatattatattatacatatatgtgaagtaaaaacatgaaagtgttattataatttacaataagctcttctttcattctttcattaatttttttccctttcttttaatttgttattttagatcatatattcttttcaagccaatagtatatatgcatgcatgttatatatagacaataagaatttatactaagacaaattaattcatttctatcttg

SEQ ID NO: 128199 - DNA, 666 bp, Cannabis sativa
attattgttatagggtaccagtatctactaccttctagacgtgtcgctttataatagactagtaatactcactaaaagttattacaataaaatatatgagacccgatactcagttagaccaataacgatattgacacgtaggagggcgctaggtaccactagtgtcctataacaattctctgagcattattatggggcatcaaattatctagcacctctatttataattggttaacagttctctataacttttattaaatttaaataagtggaatctgatattaaattgcaccaagaaaaatattacacagagtgtctttcacattcctcataataattacattttatttttatctttttatttatatgaaccaagaaactcgagaaaagaaagaacaatgttctttctctttctcactcttaattactccatatattatttttttgaatttttttttcaaatttcctgtttggattgctctagtagtttttctagtgatttctatgtaagttgttatacggattttagttgcgattcaggttgctccgttaattgctataggaatttctatgtgtcaaattccgtaaaaatgcgaaaaaaaaaaactgttttgaagtgtaaaaataaaaaaattcttaaggggaattaccccttatactattttt

SEQ ID NO: 128200 - DNA, 604 bp, Cannabis sativa
ccctagtaattacactacatagtaattacacagttgtttccaaatagaccctaattaaaaaagtagtaacaattatctaaaaaaaaagtagtaacaaaaataccttgttttacaattttgttgcaactatacctttttatttgttaataccaatacaaaaacacgtagcgttatattattagacaacatattaaattattactattttatcttatttttaattaaaaatatacaaatttgaatagaaaaactaaattagttttttttttaatttaatacgtgattcagtaatatatcacttcatatttttgagttggtacttaatgaatttggctgacacttaatagttacaaaggtttgacggtaacaaaattgtaaaataaaatattttttgctaccactatttttttttattaaagtcacatgtgtaacaattataaatattgaaaaaatttcgttggacatgaaaaaataacttacataagttcgctatgtgaactgttttgcactcacaatttacatataacacatatatatgagattattttataaatacactaaaataataaaaaattacaaaaatacagttgtataaaattttaaa

SEQ ID NO: 128201 - DNA, 1131 bp, Cannabis sativa
tagggcataaaacctaacaggtctacccttcttggaaattcatattctataacccttggtacctaaggaataacctagaaaagttcccttatctaatctaggttctaatttgtcaatagattggtgtacatatgctgtacacccaaaggttcttaaatgcattaggtttggggttctgttgtaccatatttcataaggggttatcaagcatataactctatttggacttctatttataaggtaggttgcagtagctaaagcttcccccgaaaaggcttctctagttcggaactgtacagtaggcacctaactttatttaataggatttgattcatcgtttcagtaacaccattttgatcaggggtcttcactacgagtctaagccaagtgatcccatatattgacataacttgtcaaatttagagttaacaaactcaaacccattatttgtcctaaggttctaaactttaagacccgtttggtttttcatctgagttttctaaactttaagatgttctaggcattcattcttagttgctagcatataggtttaaacacacctactataatcatcaactatagaaagaaaatattgcttaccagagtgagtaggcactttgtatggctcccaaagatcaacatgcatacattcgagtattttctttgttgtatgccttgccaatgtaaatttcaacttattttgttttcctaaaacacaaacttcacaaaatggtaaggcataagaatttatattttaaattataccttatttgtgcagttccttgaggccttgttaggcatatcaaaaagatccatttagttggagcgggttggagctccgacctgacggatcacctctgatccgaaacattcagatacttattggatcttggatcagatccgcttcgccccgcctaatttttttggatcggatctgatccgaccagatttcaatttattttaaaaaaacttaattcaagactcggatcccttcagatctgaactcggacccagacctagactcggacctgaaacccaggacccagaaccaaactcggacccagacccggactgggacccggacccacgacccgagacccagacctagaccctaaccctgaccctgacccg

SEQ ID NO: 128202 - DNA, 1382 bp, Cannabis sativa
aacccgaacatggacccagaccgggaccaaggccctagacctggatggggaacctagacgtgggcctcagaacccacacccagattggaactcaggacgcggaccagaacctggacctagactcgaaccctgatctagacgcagactgagatcgaaacccgaacccgaactaggacgaagacttgaacactgaccggtgcttggacttggaccgagacctaggactcggacctagatgggggacctggacccaggacacgggcatcaaaactgggaccgagacccaggacctgacctcggacctataccctgacataggacccaaacggggacctgggaaccgaagtgaaactagactgagacccgagaccgtgatccaaatctagacccagggctcggacctgacccatagtcagtgtttggatttgggacccatacccagatacaaacttagacccagactcaaacctagacccggactcagacccaaaccctgacctagacaaatacctgtacccctgacttgggtccaagtctgagtttgggtttgagtctgggaactagtatctaactagaacccagacccagaccaagaccgggacgtggacccaaatcaaaagttggatcgagactcaggacacgaatctgaacaaaaacacggacccagacacaggacccagaccgggattggagactaagatctggacctaggacccaaacctagattggaaacccatactcaaaattagaaccagaatcgggaaacatgactaggacttggacctaggacccgaccccagtctcggtcttagacccagacccgaacacggacacgaatacggaccgagacccaagatctgaatcaaaacaagatagggacccaagatttggatctggatcttgacctacgacctggggcacaaacctaacccgtagttggtgtctagatcttgcaatcgtaccaagacccgaacttggaactttttccaaaccaggacccaaacactaactcagacccaaaacccaaaattagaataagaactgaaatcaggaccctagaataggaattagacttcaaccaaaaactggatgaagatgcagaaccgaacacggagccggaccctggctgggatcgatactgggaccccgaccggaagcaagacctagacttgcaccaggtgctgcaaccctgaacccgaacccaagacccgtgactcgagaactagaccagaatccaaacccagacccagaacaagaccaagacctatacccagacatcgcctgaaacatggacctagacccagacctagacctagactcagacacagacccagacacatactgatgaggacatcaaggaccaagtatcaagtccaattcca

SEQ ID NO: 128203 - DNA, 1246 bp, Cannabis sativa
  modified_base (47)..(63): a, c, t, g, unknown or other
atcgttttagaaagttcatatatagggtgttaataaacatacttgtnnnnnnnnnnnnnnnnntggtaaaataattccaacaacgagttataccctaccaatactagtacaacgagtgtatgtagtgcatgtggtacagcggtcgtaccctagttaagaacattcttaagtattcgataagctctgtaaatcgacgtatgaaagtctaattacaggttgtcaatatatattgtatattttatgcatatcttactaagtgttgactcaccagtgtgctatatgtgtaggtaaaggaaaaactaaagtggaggagcagtgagtttggagccccgtattgattgtacatatcgcggcagtacagcttggagggttccggcctgaaaatattttaagttaacttttgtagtctctatgtaacgtgtaaaaaaatatatttgtgatattatattacaataaaatattttgaaattgggatcctgacttttatcaatatacagacatatatataaataataaatatttaatttttatggagtaaatttatattcaaatatttttcatttttggagctttatatctaatatcatagcaaaattatttttctcttctctcctttattctctcattttttttaaaaaaaaaatttaattacatttataaatatttaaatatatacacttatatatataaaggagagatatgagacggtaacatgacactctaaaatctctttaattagtattttttgttctctccttaattctcttatttttttaattttttattagctttataaatattaattaattcatataaaatatataccaatatttattttttttcttaattttttatttttttaattatttttaaaaaataataactccaaatctatcaccattttttttaatttattagttatgtatgtgtcgtacattatttttttaagatttctttttaaaacacaaatatcacataatttaaaaaaaaatatctctaaaatcacttttttattttttttgaaaccaaacgattttttttctttatcatcatttttttttcaaatatgataactcacatttttctttcaagttttttttttaaaaaaaaaaaaagaaaaaaaaactcaaatatcgcatacacgcaaaggagccgtagacaggcaagtgaaatccaatccacgaaataatttgatctatggacagcatcgttgtggtaaaggtcgtaatgccagaggaatcattac

SEQ ID NO: 128204 - DNA, 919 bp, Cannabis sativa
agaaaatcaaacactaaaaggagaagatgccacatcattagacctaacaacaggattatatatatatatagatattgatactatcttacgtcacctccagtaggtcctaattaaaattccatatatttatgtcataaataacaatatatgaaagaaaaaaaaaaaacaataacaacccacgaaattgcgcatgaattgatgaatataaatatatttacaaacatctgtatataaattaaaaacgttagatgatttttactattattattaatatattattattatgagagagggtgggtgtataactatatatatatagttaatgatgaataaaagagaattctaaaatgtcatgtaaaaaaagagttgtacgtacctgccagtgcctgtaatttctttaattatgggtaggaaataaaataaattaaagaacgcgtatacatatagagttatttaaccgtagaataaataattcatcaaaaaaactaaagagtaaataattaatgtggcccttttcaacaaaaaataaaataaaataaaattattgttgaaattatctaacttgaatataaaaataaatgtatcaacacattgtgcttttaagacaattttaattttaatatttttacatgcatgatgggtatacaatatgtatattatttaagttcgataaaattagaataatttaacgtattaaaaataaaatttaaataatttattatactagtatttttttatttatatatgaatgaaatagactgttttaaactttaattttctgtattataaattattttaatttcttaaatcttgttagtaaaattaaaattatttgaaaattaaaaatatatataaaaataaaatgttaaatgcactcatttatagagagtacttcattgtagaatcgaagtatccattt

SEQ ID NO: 128205 - DNA, 857 bp, Cannabis sativa
taccttgtttatttttcacacgacactcgaacatggtgtcatttggcacactattcgagtttggctttcgtttcttcttttgttgtttggtccaagttttattgttgactacttgacttttataattttttgaaaatcaagtacaagttagaatctctgaatgagtggatcttacataaagactaaggtcgtcttagctcaacgttgaccttggctttaataaaatagaataaattgtctaatgataaaaaaatgttcttagcttattttttttagtacttcaaatttaagtaaaagttaaaaaaaaaaggagcaaagggggtattttaattatattttagttcttaacaatataattatctttgcgatagttttataaaataatgaggattgaaatatattatacaaagactattacagtgtaaacctattgcaaaactttaaaatttaaacaaaacaatataatagaaataatgatttttgtaagcataacttagggctttgtttttaattttgtttccttttttctcctgaaatcggagagggttagcttgatcacgaatgaatgctatctagacaaaattatgccttaatacattttttttttttttgccaatattaccacctaagtgagtctcttgcgcagggatagtgctatgtcgaagagtgggtaaaattatattttggcccttgttaattttttcttttgtattttggcctcccttagtttgagactctacccctatccctactctaaagtaggaatgtaaacggggcggggtgggtgcggggattgctcccccaccctcatacccgcttcttaaattcaccccatacccgccccaatacccgtttaa

SEQ ID NO: 128206 - DNA, 724 bp, Cannabis sativa
aaaaaagacaatataaaaagggtatagagtctaatttaattcctctataaaaaataataagaataatatatatgattttttttttttttaaaaaaaaagaaaaactaaaattataagtaattatcaaaaatccatattattattcttataataaaaaagaattaaaaaaagaatatatatgatatagtgcatgattatttcaatgctaaagattaaacaaacaccgaaaagatatataacgtagacatatagaagtcttgcatgcatgcactagctaacaaggtattttttttttcatgtatatactgttctagggatcttcaacacaattatttgaatgaatccataccggaaagcttagggaacataacaacaatatcgtaagtatttgccatttatattgtatatagctaatgcatatattatattgcttttattattaatcgatcaactatatttaataatatgctgtctaataatgatgtccaagtaagacaacacctaaaatggccgtgccttataagttaaggtggactaggtctctgtttagggcccactcaaactcaaggcctaaaatttctttagataaaatacatacttaaatttttgtaaaaatttcatcttactacatgttggaaaaattctcattacaagagagaataggaggattacaatcaaaatactcaaaatacaaataaaagtatttcatcaagattacaagaaa

SEQ ID NO: 128207 - DNA, 1063 bp, Cannabis sativa
gaatgttcatttattttattttatcgcttataaatcatttattttatttgtttaaatagcaaaatatactacgcttcgcgtacggttatattatatttaatggtaattaagttatacagccatattaaaataaatttacattgtcaatcaccagctcggtacttcattttaaacatcaaaataagtagatagattatttcaatgttgtattttgatccatgtatatttgtatttatatacattgacgcataaatctaggcacaaatatctggcaaaatttgctcgctagaattataggaatgtaagacagttaagtataagtaagagagacacaacaaatttataggagttcacttccgtgacacgacagtaataaagctacgtctgcttcgagtttttatttctcacaagaattacaaagaattggctaagtgtgaggcttgaaaatctacagagagatactgatactctgaccttatgaggacttaaaagaatgtgtaaaatgagctagataagctctcattttatacagaaggaattcctatttaaaaaataattaagaaatacaaaaatatgaagaaaaaaaatatattttgggatgatcttggccattgatgatgattcatgatgattcatgatgatccaatggtgaaattagactcttggtgaaaatcaccaattttcaaaacttgaatcttctccatcagatcatttttgggttgtctgcttgaaaaatcgcaactttgttgaggactaattttggatccgaaatcattagaattacaatgtgggtgtgagacatggcttattaaattttagaaataactttgaaactcagttgaatcgcgttaatcagatcaatattgagtgagtcatgatcgttttactgaaggttttatgcaccctacaaccaagtcaagttgacacccatcgcccaagttgacattctaccatcaacctagaagtctggtgagtgccaaaacatcatagacatgtatttgttgacgcctaagttatgtcttgacactagttagtcagattcaatgttttggtgaagttgttc

SEQ ID NO: 128208 - DNA, 1174 bp, Cannabis sativa
  modified_base (1146)..(1146): a, c, t, g, unknown or other
tcctatttttaaaattaccctaattattggttctcctaaccaattatcccttataaaatgcataaaaagtcaaatttcccttataggattaccttattttcgggaaaaaaacttacttaaagtatctaaaatcatacttttttaaaatttttacgaatttataaggaaaaacaagattattttcatgttaccgcaaatattatactatgttttcacgacatgccaacaatgtctttttatagaacaaccaaaaagcaatgtaaactttgttgtttttgggtatttttgaaatattcaccaaaaaatacaatcaactaagtaataaaagcccacacagtttaatgggatatgaaccctcaaggtgcataccgataatccaactaaaaaagaatgaagtataatgtctctatagctagtacgtggttcttgagattgtctgagctaccgaatgggtggagaagagatcagtgcagaggtgatcccctttatttttcagcaaaaaaaaaaaaaaaaactaaataaaaggatacttacatgaaacactatttgttgtaaaaaaattacatttttaagttcaattttttttatatacatttttacagtattctataaaaacaaatgaaagttacaaaaaacaacaacaaaataacaagaatacaacataaaaaatacactaaaattccgtattttatgtaaataaagttaaaaaaaaccgtaaggatattgaaaattccgtacaaaccgtatttttataattttttttgttgtttttgtattttgttagaaattttcccaaatataaaggattatttacaccacatactcaaattttcattttttttttactttttaactgtctggcaatttttttttcaaaaataatgtgtaagttttgttttaaggttattttttagttattctgttttgtgttctactgttgtttaataaaactatagtattttcttaaaaaaatccgtgtgatagtatttttgtaaaaattaaccaaaattccagtatttttataagttcccaaagataaggaaatttccatggtatactaacttatgtcatttttttacaaaaatactgtcagacggtgttttttattttttttttactgtgttttttataagtttcatactgcantatactgtgttaagtttttactggtgtt

SEQ ID NO: 128209 - DNA, 1137 bp, Cannabis sativa
  modified_base (44)..(53): a, c, t, g, unknown or other
cattttgtcattaaacaaaacacagggtccaattggtaactttnnnnnnnnnnagggtccaaaatagtatttaccctgacgaaaatgctatgatttctacttttgatgggtgtttatgattttggatcataaatttcaaatgaaatattattatacacaattgtgtctatgaattctttgaatattgttggtgtatttgtataatggttttagttcatgttcttgcctaaatattatagatatttttgcactaggttttttattaagtaaaagaagggaaagagactgtttttctatttttattttggtatttttggataatgtttttttatttggatttgtggtagtaggaatttcgtattttgtacgtttagagtatttaaaaaaatcatacataaacgatgaaaagtacaagagattccataaataaaatctgaaaagaatataatctagtatttttcatgtctacaaaaatcaaactcaagtaccccactaatggggtttttttagtggtcctataaaaaaaaaaaaaaaaaccctataaataaacaatatatattatattaatgcgattaaagctagtggtattcctttttaaaaatactattcaaatttattctaaatatttcacttatcttttatttttttatattacttgtgtcttttttaatatttaatttaaaatttaaactcattgcaaatatttaaaaaataatttttattatcaattttttatccaattcacatataaaacaaatattttattaattgttttttttttcaaacaataaaataaaaaaatatttatattttgttgtaacgtaatctcttgcagttagcaaaaaaatatcttcttactattattataaaaaaaaaacaaaataaaaatgtatgatatttctataaaaatgaaaagaattataaagttaaaaatattatgattaaattaaaattataattaataataaattttaatattattatgttttttgtatataaatattatttaaattaaacattattgttttaataaaaataaatagtactattatttattattgcacctaatataacttacaattaactatttatatatatactaggtgaatgtacgtgccgagccacgtattgctagtt

SEQ ID NO: 128210 - DNA, 584 bp, Cannabis sativa
aagaccacctcacacccaacaacggtaaatggcgcaagaccacctcttgcaactacagcctggagaagcaggacatccttcccttgacgcttgagaaccactagaggattcatcatgtaaatgggatccaatagagctcacctactccctttctcagattttaaagagactggaaattttttgtaactgaacacttattgaagcaacgcaaactttctctttgaagttttgagttttacttacaagttcttagcattcatctcatcttatttcattttatcttgagtttttcgatcactttttggttgacgagttctcaccataaacaatttggtgcagtctatgagaatgacaagtcatagctaggctgtttctaaagttattcatcactaacataaaatgccaaggcagtctcatcgcttctaagaggttgagatacattcggacaataaccagttggttgccttttagagagaactattagtgatcgtcatcggagaaggtaacgaagaagaccctcaaagatgtcatgacaacgagggaaactgagtacccccaatgatggtcagagacaaccatggtgg

SEQ ID NO: 128211 - DNA, 1062 bp, Cannabis sativa
  modified_base (354)..(359): a, c, t, g, unknown or other
gggcataaaacccaacacgggtgtgggtctaggtccgagtcatgttctgggtctaggttcgtgttttggtttaggtccgagtcttggtcccaaatccagacaccaaccacatgttgagtctagtttgacttctggtacgggttccagttctggtccgggtctgggtccgaatccaagtccaattcccaaatttagacaccgactgtgggtcgggtccaagcctcgggtcttgggtgctgggtctcgagtctaaatcaagatctttgtccacctctagctcatgtcttgtgtccttgtttgggtctcaagtaaaggtttgggtcgaagtttgggtcttgggtcctcagtcattgnnnnnngtccccgattcaggtcagggtcctaagtcccggtttgggttaggttcccagtctgagtgcaggtcccggtccatgttccgtactagtccttgtctcgggtgttgaccttttcggggtataggtcacgattcggttctcaggtcctggtctcaggtccagtccaagtacttgtcccagtttaggttcaggtctcggtgctagtctgggtctgggtcccagtcctgatctcgattcaggtctgagtcctgggttcgagtctgagttatgttacgagttcgggtacgggtttgggtttgggtttgggtcttcgtctatgtttcagtctatgttttggtctgggtcttggtcttcttctgggtttgagtctgggttctggtacgggtctaggttctggtcaaggtcctaactcacaggtcctaggtcgcaggtcctagcgcaagtctgggttcaggttcgggtctgggtcttggaaatggttccaggtttgggtctacgtacgattccaagatctagacaccgactacttgtttggttgaagagttgggtcgtgggtcaagatctgaatcctttgtccctgcccatgtctgtgtttggctccgagtttgggaccaagaccggggtctaatcttggatcccagtcccagtcctgggtcctgattttggttctaatttagagtttgggcccccaatctaggtcttggta

SEQ ID NO: 128212 - DNA, 657 bp, Cannabis sativa
gtaatctgcttgaagcctttacaacgggaaagattggactagtccaacctaaaattgcagaaattataggcataaaagaagctttaagttggattgcttgcaattcttggggcacgttttgttggagactaatgtctgcttccaagctatccaaagtaaaatttctacgtcttctcaatttggtcttctcgttcaagatgtgcgccatttttttcatcttacatttatattgatttgtgttttgtaaaacgatccgcaaacaagttgactcattgtttggcaagagactcttgtttctctacaggtcgtgtgcttcagctggaggactgttccgctaaagtgcgatcattgttataaacgatattattattaattaatgaatctactgaatttattcaaaaaaaaaaaagctgtcttgagtaaagaaaactactttatatgtaggtaactatataaacttgaataggcacactaaaatagactttagcgtgtaacattggtttgaccattccttattggattgtcattcttggaacaacaattgtcaagatagttttgataagagcattgttattgggtatcagtggtgtctaagaccttctagatgtgtcgctttgtaattggctagcgatactctctaaaagttattacattaaa

SEQ ID NO: 128213 - DNA, 564 bp, Cannabis sativa
tcatctactttatattattttataacatttttaatttttttaatttttttttttaaatttacagttttggttactcgtttttttatgtgcattttggttggttataatttaagttgttcaattagttataattttgttaaaatgtacaaatagaaaaatcttataaaaattttcaattaacattatatgatgtcactatattcaaccatctactaatttgtggagaaactatagctaaaaaagttaaaacttcatacaaaaaaaagctaaaagggatacaatcaaacttaaaagactataaaaaatttatttgtaataaaaatatatttacttattaaaattaaaatatttaaaataaataatatttaaatgttttttattttgttttaataatatatctcatatttttatttttaatattagcaaatcacatcaattaagattttcttatatgagttttttaattattttttttacatattgttgcccctgattttgcccaatatacgtagaccaaccagataaggacacgtggatcaagcaatttacaatatttgctaagtc

SEQ ID NO: 128214 - DNA, 1706 bp, Cannabis sativa
  modified_base (1509)..(1510): a, c, t, g, unknown or other
aaaaaaaaaaaaactagagataataattaaaagaaaatacttattggaggcctctattgtttcttcgattaaatatatatatctatattactgacatattataacaattattatttaataagttttatacatatattttcagcataaatactttattttttaatttataatgactttatctcatcaatatataaattctgaatgatcaaaaattagtgagagatgtgatttttttttaatagtgaatgttaaagaatgcatgcattatgttataatgtgacaacactcataaacatatacccataaatgttgaaacaaatcttattcataaaataattttttaagttcatttcaataataaatattgacccggtgacctcaatattcaattattataatttcattatatatataataaagttcaatactacttcaatcctcttaaattttttattggagtatataatatatatgactgtaacatttgtttatttctacatacaaatccttgatatcgtatgagtcttcctatataaaattaaataataatgaatatataccatactattattcaaaaagtaatatatattatatagttatgtcaatataattaaaaatgatggcattcatgtaatattctatagtgtgtgtggagcattgctattaagcacaattagtgcctagcactttcttaatatgtcgtcttacaattggttaacgatactctaaaaattattacatatggatatgagacccgataccaccaatagtaatattgacatgttagagggtgctaagctggtatttgataagtacacgtgtcaatagtataacgaaataggcatattggcatgtttgtcattaccagctagctagctactcagtgttgacttgtgccgatagctctttgaccaaattgtttttgtttttatttttattaaattgtttctcattaccagctactcattctggttttggggtcaaaatggtcgtttccaaaaccagcggattcaactgattctgaaaactctttttcaagaatctactaattaattaattaattaagtactattctataaagttaattacatgacactcattactaataatttggtttggtttgctttcactagtaggatctataaaaagctacataataataataattaatttaattatttattttgtaatagttggtgtgagtggtattagagttaggatcgtggtttaatatcaaaaacgacgattaaaacaaactcaatcactcaagtgaagaaattcaattttaatttgttaacaatttaattaacccatacttattattctaataattaaatacctattttcttaatcaccaccaaaacatacatctctccacaatccacatttccatttttagccacataagattctttttttttttattcaacgtgaattatattttcttttttgaaagtccttaaagaatactatctaaattcttcttcttcttttttattattattattnntattattattattatttcttttccgaacaaaacttctatataataaatcatctcatgagtcaaaattaaaattatcataaaagactagcaaatgcaaggtggtaattactagggtggtaattacacagtctagtaattatactatattttaaaatacaaggtgtgtttggatatgaggtggtaattacatatgaat

SEQ ID NO: 128215 - DNA, 896 bp, Cannabis sativa
aaaaaaaatacacatgagttagaaaaaattatgaaaatgaaatcaaaataagtattgaaattaacataaaatcatgtgaagaaaaaattttaataaaatattaagagtaatttttaaaaattatttaagtttacatttttttataataatggggtgtatttataagtttaaggggtgcaaatagaactccccaatagtatttaccctactttttttccttttcaaaaaaattattttataattattttattaatatatatatttttaaaagaaattaatgttattataatcaaaaaccgtttacaataacaaaaaaaaaaaaaaaaatagactaggaattttacccgttcaaaaagtatttacccgttcaaaaaatattttcatcaaacattggagcatattttgctaaatcataaacagtttagttaacatttctactgacatgagaaataataactctagcaaaaaataataaaagaaaataaatatctgaaattaaatcattaaaactagacagatttaaagatataaaagataaaatagtggaaacttataatgcatctatttcaatgtgggtgagtggaggctgaagttgcatcgcccaattagtgttgtgaaataaagttttcgcctctatttcatctgatctaactttgcctttgactggcttggataaagttgccataacatgaccctcgtgatcacgaagtattgccccaacatctaaaactttagattccatatttaccaatacattaatatttaatttaaagtcatgaagatccggtgacttccaaaaaataccttcaattggtctcttagagccaatgaccctcgtgatctcgaagtatcgcccttatgttagggtttataaaacacttaagaaatatataaat

SEQ ID NO: 128216 - DNA, 2881 bp, Cannabis sativa
agaaaagaaatcacttattttaaaaccataattctatatctagaaatatcttaataagatagacttgtggactatgcagagttaactggaaaaccgcgtaaaaaaccttgtgtcattattgttattattattcttctcaaatttcttatagtttttgtgtctaatttattacgataaaggcttattaattagttaacaaaaatctgcgttaacagtttgaagcttttgttaagagcctacatgaaaaaaactcaaaaaaatccctcctaaccaaaaggaaaaaaaattctccatggcttatcatgatgaaaacaataacattcatccagaacagactaatcgtcgtcctggaaaagaaccaatgggttcaccgaggccacacgcgtcagggacaacctgtgcaacacgttcaagaacatgcaaaggttgtcatgatcgaaaccaagaaattgggaatgaggaaaccgatactaatgctcgtggttatgtacataggagttagaatgcctatgaccccactaggtatgtatcgttggttgattggaaaattgccaactatagcaacgtctggcaaagtctaaccaacaaaaggcttaaggaaacgctacacaaaatcaaactgatcctggagtgagaaggacacaaggtagacctcggggttcgagaaccaggaggcaggagacaaataaggaaaatccccagaacactcaggagatacaacctagggaatctagggacgttctagaagacaaacaaccgaacaatcaagcacctcgtcgagtggtacctcgaagagcctagggatttacgaattagggaaacgaaaacaatgacataccagaatcttctcataggggcgagaacctaaggcagcccagaactagggaacaagagatccctcgtaataacaagagaaatcttggaacacaacctaggagaagtgggttaccaccaggcacccccaccgtccttctcgaacaagaagggaggaggcatacacataccccagtggaggatgtatacctaacccttcttaaaagagaaggcttgtgcagggcaaggcaagttccaactagggacattcaagatcccgagagcacatttaattagaaaggcatgcacaacaactcaatgctaattggaagcaagaggatccaatctaattgcaaatcatttacttgaaagataaattcaggaggtaccatgatggggaatatgggaaactgcctagttatgacttgaacgaagaacccgagcctttccacccagacattatgaactatgaatttccccagggaattaagaaccctcatgtctcgccgtacgatgggactacgcacccagatcctcaccttaaaaactttgataccatcatgggcgccagcaatgtcacgaataacttacattatattttattccccacctcgctgaccgagaaagcgagtagctgattcaataagtttacccatcactcaattacttcttgggaatagctgtctaatgatttccagaaatagtttcaggcaacaagagatagaccacctggagcatcctcccttaccaacgtgaagcaacaaccaggcgagtcgctcaaggcttagctaagtcattttagtactgctgctactaatgttcaaaacttgaacgatagtatttagcttattgctcttcaagcagggatcatgactgacctctgaacagttggaggcgagctgtgggattatttacaaggttgctcggtgaggaacatcagtgagttcaatgaaagagctcaagtgttcgtacaaaaagtggaagcgaggaacgagatgaaattgttaaagattggctcgggaagtaaacccaacactgtctcagcaagcactgtctcaacaaaggctgacaatccaagtagctctaacaacaagagaaaatatgactctaggcaatcagccaaagataagaaaaaatagaagaagtacgataagtacgtgccaatgtacactatttataccgagcttaatgaaactcgggaaaacatttccctcaccaatgagcatagggttgcattttgcaagcctgagccaatgagacatgcgaggcacaagagggatgcaatgaaattctgttgatttcataaggacatagggcatataacggaagaatgtcgacaattgaaagatgagatagagagccttatcttgcgtggttatttcaaatagtatgtaagacgatacggtattggaaaaaagtagccaaatatacccaataacccaagcaaccaaatattacaacctcctcctgtagaaggagaggagattttggtcatctcgggagggccgcatctcgctagagaaagtagtaatgccaaaaaatgatatgtcaaggaaataagaaacgagcggtaagttttttctctggaatcatctaagaaagtcaagactgaagaacctccaattgtatttttggaagaagacacaaagcacgtgaggtttccatacatcaaccctctcgtcattacaattcagcttgccaacaaaagaataaaaagggtgttggtggataatgggagctctgtgattatcctatacaaggatacactgaagaaaatgggattgcaaaatgcaaagttaaaaactttcatggtaagtttgtgtggatttactgaagatagtgtcgccagtcaaggaattatttaactaccattaactgtaagcgagccacctatatccacaacattaatgcaagattttctagttcttgacctaccatcggcctattaggaatttattttcaatttctgatatttattaggatgttgttggaattcttttagaattcatatcaggatgttgttggaatttattttaccaggatctttgagaccatactgcttgtaaga

SEQ ID NO: 128217 - DNA, 949 bp, Cannabis sativa
ctctctctctctctctcttccaatttcatccaattttgaagaaaagctaggattttttggtgtgatcttgcttacttggaagttttgaggatttgacgtagttattttgaattagttctcgattaatttcttaatttaaatacttgttgataatgcttgaaggtgttcttgatgttcttgtgagttttgatgcatgttggtaatttgaggtcatatatatgtaattatttgtatattttagctattgggattatatagttgcatttagattgtgttgtgtgattttaagattaatccttattgtttaaattcagggttgggctttgagtttttggattttctttgaaggtttgaaaactttgaattcaagcttatgaattttatataatagtgtgatttgtgattcatgcttagtactgttgggttcaaatttcttattttattcttgttggggttctctttttggtcccaaagttaagttgagatgatgtggtattaaatttgaggttgtgcatgatttagttagctttggtatgaattttagataaaaatttgaagttttgaaaaatggcaatttttgggggtttctagggccctcaccgcggccatgactaggctcaccgaggcgtaggcaacctggtagttgccgtcgcagccatagccttgctcgccgcatgagaccttgtttccccgagaaataagagtttttatttttgccataaatttttactcgggactctgtttagacgttcttgatatcgttggaaagctcgtttcaggctctatatgcttatttgtaattgaaatgcaaattatgtgattatgtgaaagtgatatttaggattaatcctatgtaaagaccgcttagctttaatttggaaattaccagataaatagggtttaattatgaaactttcatattagttatgaattatcattttacggagat

SEQ ID NO: 128218 - DNA, 1328 bp, Cannabis sativa
  modified_base (1147)..(1158): a, c, t, g, unknown or other
tgataagccatgagtatgggagttgggcaatgtatgtacatgttcgggccacactagaccaagtgggttggggtctaccagtgttgaaacttttttaactttgttttgtcgcttaggtcggctaaggagaaaagacttgtaatattttgtaaaatgatttttgggatctcgaaacctgtaacttttgtttgtaaggttacaattatttcaagtttattttcgttccgttttcgtttaaattttaatttctgcgcttatctttttagtaatcctatttaggggaatacggtttcttaatcatcttgggtagcgtgcctaaatgttagggcgttacagttctgatccctggtcgcttgtgttactgggaagatcaggctgatcatggggattgtcctaccctgttacatattattgaaagtgtcctcgtgcaatgagaccttctatctcattcttcaactgacgacactcttttgtagtatgtccaaaatctccatggtattcacattgttttgttgggtcccttttacatcttgtgtgtctcataggttttggctcgctgaaaacaaattcctatatatgtgtgaggtagatattttcccgagtttcattaagcttgatatattcaacataaaggggtatacatttgctgtgtttcttctgtttcttatccttggacagccttttggaatcatctttcctctttgatcctgaagcttccaaatcgaattcttcaaaagaatcataccccaattgccttccgggttccctcacatgatacctcctgaacttattctccaactcgtctattcgcaaatggagtaaatccctttgctttggaccaagtggttgacgaagatcagattttttcaagtttaaatgttctcgtaggtctcatcggtggtgacaactgtcggatcttgctttacccatatactgcattatgccttctttatcattgctacgacaagtgtcctgttgggattttatgccctaaataaaacccatttcaatctaatctgatttgttatcagtagaatattagaaatcaattatgtttacatgtagttttcatgtttatggttttatgtgtacaaaatctgttaagtctagaacttatagttgttcacaattacagtgatgtcaacannnnnnnnnnnnattgtgattatatgcttcaaaatacaatgtccctggtaaagatattgaatgtatggagtatacattgaactggaatcgatattgatcttggtaaagatattataatctttccgttgtatctttctaagtcaatatcactaattgatcttagatcaaaagattttaatcct

SEQ ID NO: 128219 - DNA, 1148 bp, Cannabis sativa
tatatagaatagatactagtatataaaaaatgttgctatctagcgacaaatgttggtttaaccttttgatatttttctccattaactttaacacttacgccaataaacgtaaattttaaggagaaaaattacaaatacaccttttcaaacgattatttgttcaacatcatagctaccaaggaattaggccttgaaaaatctaaccatctttcgaggtatatcgtatacttgaagcaatataaccatttttgggaaaattacttcaaaagctgttcgggtaagatttgcttggacgatagtgattttgtaaggataaattgtttcttttaattctcaaataagggttttaatattcaaattttattttgtggtttactttaaattgtgatagtaagttctctgttagggttttcttttggttatgaaatattgggttttaggctaaaaaatagagtaaggttgtctttctcttcaaatttttctcattggggttcatttgactgtgaaattaaattatacatgtatatcttatgtgtcttataattttgggttttgtgtgtatatttatattagattttcatcaataatacacaattatgttgctatttcctaaaattatttcgaatttagtactttatatttgttttaatttctcttatgcacttaagtaatcgattcattcaaaaaaagattatttgcatgaattttctcttataaattggttggcctttgaaatgacaaaatttacgcttcctagatggacctaatcagtatgttctttcaattattgtcttttcatttttttttaactgaacatatattgttttttttgtgattttatagtcaatttagtcttcattttgtttattttcttttaaacactgttcaggcatgttgtaatcatgaatttaatatttctgcacaaccttctatggtcatttcaatatctgtcggtaggttgtgaactcaaattggttatctaaaaattttcaattcacaaaatataactacttgaagctactcaagtagctaggttcttcaagtccccataaatatttatgtatatctttatatattaaaagtctctatctaacgacatttcttggtttaacagaatatacttacaaataaaagaatattctgttaaa

SEQ ID NO: 128220 - DNA, 846 bp, Cannabis sativa
  modified_base (300)..(305): a, c, t, g, unknown or other
gtaacgttacatgtttctttcattttagttttctttatcttagaaatgttgttgcgttcaaattgtgttttcatttttgtttgtttgaatctgtcaagacttctttgtttgcttatttattctaccttgacaagtttctctttaacatctttgccgccagctttaattagttacctcactctatcctcattatcttcattaatttgctacatatttgagcatttccttttgggaccaaattgaccactgactatcattttttgatggagtgaatcatatgttcttacaagaaatattatnnnnnngagactatgttgctacgagaatatgatatacatgttcatttatttactgtcctagtagacactacaaatgatattcaaaatataaatgatattcaaaatataggaagaggggcaccgataatgtaaatagcattcccatacaaaattattttgcttctgaacttttactcgtacgattgtgcttatgtaatattagccttgtcaaaaattaattttatcaattagtaattttatcatttagtaatgttaaagaacaaaattactttgtctagtaaactttttcacttatatgttctttgtgatattagcgttgttaaaaatatatttttatcaattagtaaaaatttaagattttcgttaaatttttcataaattgggctaacaagatatgatattggtagacaaattcaagtactgaaaaatagaaaagtgaaaaaaatttataaggaaatttgattaaaaatataagagtaatttgcggcgaaatcctcttatgttttaatttttatacccttaatctccttatctttttttttttttt

SEQ ID NO: 128221 - DNA, 1083 bp, Cannabis sativa
aattattaccttttcaacattgcagtcatttgttcaggaacttggtggccatgtatagggtctaaacgaataactttcctttgcgcaacgacctctagcatccagtgcatactagaaaattatattgggttataggtaagatagtataaaaataattcaaagttttaatatataaataaacaattagcaccaaaaaattaaatagtgtttgcccgatattccagagaataaagaacattttgtggttgttattcatcagtaataactaagcagccaatcatcttgctgcattgtcaagactgactcttctctttatcgtcaataccattcactgcgagaagctctaggtcgtaaaactagaaaaattttctccaatcatttatgctctcgtacatgttcctgtattaaattgttaagtattagtgttttataataatttcactagaatttgatatataaggttaataattagattaaggaagagtatagatcattccaaacatttcctagttgctgatgaagtcacacaatgcaacttgctgcaaatcctctccagataacgtgatctaggtacgtggtgttatgaatcccttagacacaggaattgcgattatatcacgtttatctttgagtttcagaaattcagcaaccatccattatagcgatttagggatcaaatccatgatatttcgtgagaataattcatcttcttcatcatgacctccaattttaacttaattcactcggtcaactccctacttcttttagtaaaaggacaatttgttgtttgtgatatttatatttatagtaaccaccaagattttattatttatttatatttttaataaatggtaccatcaatatatataaagaaaattagtataattttatttatttttaaagcacctaattttaataatttttattttatataaaagttataactttaattatactaatttttttctttcaattaatatttttaaaaaatatgcctatcaaataaaaataaattatattttaaatattatgaggaaaaaattaaaacaaaaaattatatgaaattttcttagaaaaaataaa

SEQ ID NO: 128222 - DNA, 783 bp, Cannabis sativa
agccgaattgctaagagcatagacaggaattccagctaaccgctcctcaatggcctcaatagacattccagctcgcggtggcggaggccggcgagggcgagaattggattcattgtttgtggaaattctagcccaaactgggttgggagacccagatgaagaaaactgttccaaatggggaattcgtttggaaaatgcggtttggaggtgggagagagtggtttggagatgggttttgaggaaagatgggtttttggggagttgggagaattggtggaagagattagagcagttgtggtgaaaggtggtgaaggcttgttggaggttgagttgagggggttgtttgggaggtgagaaagtttgggaattgttgggttttctggaattcattttctgagaaagtggggatttgagctttttgttagagaaagggttttggggttttggggtttaaggatgagaactgaagagaagtgaactgaaagagaaaaggtaaagaagaagaagaagaagccaaaaaagtgaattatttgagtttaatattccttttatagaaacaaagataattgttataagaaactattagtggtctattataagataattgttatgtattaatatccatattagtttaactaagtatcaagttttatatagtttaatgtgataatttttaggagtattgttagccaattacaatgtgatatatctagaggtactagacatcactagtgctcaacaaaaatgctcgtataattaagtatcgtatctcatataaattaa

SEQ ID NO: 128223 - DNA, 918 bp, Cannabis sativa
tcgaacccaagacctttaagctataagctattagttgattgtaagaataccattacgctacactcaaaaaaaaaaaaaaagagattagtttatatatatacttaataactagacataatattattaccgtattacaattatgtcattacaataaaattaacccactaattttttacttagggcaactccaatgccaaaacttaaatttagtattaaatcaaaaccaaaaaaatactattttagtactatattttttttataattacaatactaaaaattacattaaaatctatattctttgttataatgttattttattaatataaaaaatatatttacttcataaatgaaatatttaatttaaaaataaaattgaaacattttataaaaaaaattacactaaatataaatttttaaagtgtcattggaaataactttaatcctaatatatattagaaaaaacttctttaaaacaaaattataacacatgtttacaattatttagcaaaatgaataataaaaaacaaaaggagaagatataataattcgtccaatcaattgtttagaaaaaaataaattagttttattttattatattcttttttatatgtatatatatcacataaatattattacatttttcagtcttattttctctattttgtaattttctaatttatttattcttttaatttatttgtgctctattcatattgtttttcctaaaaagaaaattaaaagattaccaattgactgtttaatagttgtcataatatattattattatgtttactttttatttttatccgtttacctcatcaattatggaaataaatatattataagaatattttaattatggaaataaattttctatttaaggaaataaataaataattgattttctgataaatgaat

SEQ ID NO: 128224 - DNA, 635 bp, Cannabis sativa
tattattattattataaaattaataaattaattataattttaattaattaagctgtcatgtctagtcacactaaatttgtatcattcatgaaaacaaccaatcaatttgtctctatactcacaaattctttccatccaccaattaaaaataatcaattaactaaattaatataaaaacattaaatcaataaaccacattattaattttttttaaaaaaataattaaaaaaccagaaactggactagacagctcattatcctcatttcagtacatggatttgatcaaataatcacacaaccaaacaaaattcttcaaaattataaatataaaactatatcattagacttttagatattagacattattattattattataaatgcaataatttaatcaagatgcataattaattaatttaatatatatatatttggtgacatggcaaagtaaggaaaagttgaaagaaagattgacctgtttataagtttgatcaaattataactcagatattctcattgtctcatcttctgatcatctatctccaatcaaaaacggtgacgtttcatacgttgttcatgatttgaaaccaaaaagcctacacacacaatcaatcacaacaaaaaaaaaaaaaaaa

SEQ ID NO: 128225 - DNA, 577 bp, Cannabis sativa
ttgtcactaatttagttttaattacaactgtgactaaaaacacatttagtcacaataaattgtaatttttgtgactaatacttttaattacggatcttttagtcacaataaaataatgataatttataaatagtcacaacttttttatctttaatcataaattttgttgtgactaaatgtaaaaaaatttatagtactagagaatttgaagttaagacaataaaattatggaacccttacgatattttttttttttaaatgatcatataagttactaatttattaaaaaaaaataatctaatatttaaaatatttaggcagaaaagtaacaagagagtccaatgtttaaaaaatacataagcaatttgactaattaaatatgctatttttgatgcaaaagtactttaaacttttataataaatcttttcagatcatatcacacttaataaataacatgctcaaattaagggcatctctaatggagaaatccgaatttgatgttaaattaacaccaaaaatctactatttcaacactaattttttttttcaattctaaccacaacactaaaaattaca

SEQ ID NO: 128226 - DNA, 1111 bp, Cannabis sativa
tagtttacaatgccgaaaataagatttacatattttattgcacacgtaattatttttcttttacgcatggtaagtagttgtacgtctatacattattttcgacaaagtaaactatattaattttttaaaaaacttacaagtgatcctaaatagctataacatatacgatcatggaaagaaaattaaattaaaaaactttttggaagtcgaaacagataagggtctatcagaacaactctttaagaaagtctactacaaaaaaatttcaaaattatatataattaaaaaaagaatatcgatttttgcaaaaagaaaatcattgaaatttgatatgtatagttagttatattctaaattcacttacataaaacatgaaacacaaagaaaagtagcccaaaaaagtttaagcaagtcttgtagttttcaggataattaagagattttgttcttcttcttgttttctttgcaatatatgcttcaaaatcaggtgttttctccttaagctcatccacgacaaggcctaacatacatttttcatacatagacacaaagtaaaattattaaagacataacataattaaatcaaaagggagagatgatcaaaggtttttggtagaaaagaaactcatacaatggtatatgattcgatcgaagagatcgaggcgagtactactgcgaaatgcattaggcttactagcaagaatgtgaagaggagataaaccgttttcatttatagcatcagcaagatcaggatgagaatttattatgcacattgccaaaccttcaaaaaaacaaaacaaaataaaatagagcaatgcaaaacatgatcaaatagtataagataactattccaatacattctttattgtttcaacatttaggagatttttagttttttttttattatgattgtgtttgttttaggttttaagaactacttataaatttttaaaaaattatgaatagtttatagtgttgaaaaaacatgttcaaatattttattgcaatcgttactattttttctaatacatgtgataaataactgtttgaactttatttttgacgctgtaaattatgtgaaattttctaaaaatttacagattgtcttaaa

SEQ ID NO: 128227 - DNA, 1454 bp, Cannabis sativa
tacaggattctcgctagtttgaaagtcttgtacaaaattatgaattggggttgtcccacacccgtagagattgagtatctttactcagttaaggtcattccatcgaggaagaacgtcgcagtgggctttttctatattggtactcacgctagcaagccaaaaattattgtagacttgccaaataaggtgtctttcaaggacaacttcttctggacgtctggtctctcctccattggcacaaccatgtttcacaaactccgtaagtgattgttctcttcttacttatttacatcagtcttcctttttcaagtacttgactaaagttttgtttgttttgacagctcttctgacgagacctacacctacccccgacatggttagtaggcacaggcgcctgatgactctcccttacaagtcttcgatcatgcaaattccttttgaatgaagtaaacttgcgatcgacaggccttctcgctgacaaagaatacacttgtgattacaagattcccaagtatacttcttggcagcaaataattgttccacccgaagactaggcctgggatcgcttggcccaagcacaataccttcaaagcattgcccctcgagaatctggtgaaggagcatcccgaggtaatcaatgtggttggtcacctactgtacttagggctaagcgtaatacattagttaccttccaagattcccgtcttaatttttatacttggaattccattctcgtggaccgcattgctcataagtttgaaagttggtaccctagattccacgtccagattaactgtcatgagtcattttatgttatagccgagcaatacggtactatgaaagataggacaggtcagatagatgcgagttgggatttagaaccaatcaagccttttgatatattcaaaattacaggctataaggattttagcaaatattatggtccttctaccccttcatctagtgatagctcgccttctagtgattttggtaaatcccttaggcagaaaattatactcctcccttttttaatcggtttttttataatgattgtaacgcctcgtcttgttttgcagacataggttatgaagacattttggaccgcaaggggaagaaaaggacatccaaccctgagtccctgctgctgccgaagtgatttctcccaggaggcaaaggaaaatcactactcataagaagaaatcaccggtcgagcctatcaatctcgaggtttcgaacaacgagatccaagatcaagttcctcctccagttgttctcgatgccaatgttcctcatcccgaggcgactcccgctgcagcttcttcgagtcaggccatcgagatccttttggtcgcagctgaggaagctgggtctgaatttgcccaggcatatggggtcgcctgttggcgcaaacttcaaactctccttcccctagattgggattttctcaatcttag

SEQ ID NO: 128228 - DNA, 782 bp, Cannabis sativa
ttcaattcgcattattttactcataatatatttaattcgtactaaatgtaaattttatattttgaatctaatctaatttgtattataactcaaattcaattcaatttaattcacaaaagtaaagattaaattaattattttaaatttaatattttatgaacactcctaatcctatcagtaacaatatcaataaaatagtaaaacatgttttgtttttgattatttggcagcaagtaaaacatgtgttaaaatatcattaagggaaaaaaagtggtgaaaaaatacttgtagattttaccaataatattattaatttttttaaaattgaagaaaattttaataatatagattttttttttcaaagtaaaaaaagaattcaaagcctagtagtatatatataaaaacacttccaataatttttctactttatcttttaaattctaaaatatatcaatgctattttttctattttacatcaaatttttacatcacaccatcaattagcttctttatcttttctttatatcttttctatatcatttaaataatatattttgattaatataaaaataccttaaaatagagaatgaacatacataatttgttggaaggagtatttgctcatttattctttaatttttttttttaaaaaatatctatttaaaagagatattggaaatgcttagcggtatttgaattgcccattttggcttcatctcaatttcatctttttgtcttatcttttttgtttttgtttttattgacgaataaatctggacata

SEQ ID NO: 128229 - DNA, 1731 bp, Cannabis sativa
actttgagagaactcaatagagaatctttctcgactgtattgtacctgttcttactcaattaataaagaggatttggtagtgttccagaaacaggagttgagccatagatcacatcaatctatcagacttgaactagtatatatcttggtgttgattttattattttactgctttaattatttccagttttccatactctgttcatccatattttcttcctattattgttcgtaatttgttaatcttgtcattgtttattgtttgattgtttaaagtttaattgatttgattccgcacctttagttgtaatttttctacaaatcctatttgctagcaactaaggatgagtgcctagaacagtttagaatttggaaaactcaggtggaaaaccaaataaatcttaaaataaagaaccttatgacgaataatgggttgtagtttattaattttgaatttgacaagttgtgtcaagaatttggaatcactaggcatagaaccgtagtgaagactccagagcaaaatggtgttgctgaaaggatgaaccgaaccctattaaacaaagttcgatgtttacagttcagttctgaattagaaaaacctttttgggcggaagctctagcaactgcaacctacgttataaatagaagcccaaatacagtgatagacttaaaaataccttatgagaaatggtacaacagaacccccaacctaatgaatttaagaacttttgggtgtacaacatatgtacatcaatctattgacaagttggaacctagatctgtgaagggaactttcctaggttatgccttaggaaccaaggggtatagaatctacatttccaagaagggtaagctaaattttgtgattgctagaaatgtgattttcaatgagttggaatatcctcatttgacctttaagaaaggtagtgtgtttccatgtaaatgcaggtaaaacagggaaaaaaaatactacgtgcatggaagtggattacggaacgaagctcccggaagaagggtcacagatgaaagctagtgtaaaactgaaaggtatagcgcgcaaccacaagcttatactgagcaggaagataacaaagaccaaacagaggttccggaaggatttagatagaaaggtctggaaggttatcagttggcgcgtgataaaacttgaagaaagattcatcctccagtaaggtttgtggaagtagacttaactgcattttcactggcggtaggacaacaaactaaaattgaagaactcgaaagctacaaagaggcaatttcaggtgaaaataagtcaaaatggcttcaggccatggatgaggagatggattcacttcggaagaacaagacttgggttgttgtaccaaatcttgagaacaagtagatcattgaatgcaaatggattctcaaggtgaaagagagaatcaaagaaaatgaaccactgagattcaaagccaggttagtggctaagggctttactcaggtagaaggtatagactacactgaaatctattcacctatggttaagcacaaaatgttaagattgagcatctctgatggagtttgaaattgaagagcttgatgttaagactgactttctcaatggattcttgtatgaagtgatctacatgaagcaaccacttgggtttcaggtgaaagggaaagaagttgaattgatgtgcaagcttaacaggtatttacatggcactactacaaaattgggctttagag

SEQ ID NO: 128230 - DNA, 984 bp, Cannabis sativa
ttattttattgatattgaataatctggatttcattgaaatagagttttatttagggcataaaacccaacactcagaatatgagtcgagtctgataaatattttctcaatatggatatatgaaacacattatatactacggataatgcaggagtcaagactagctaataggctatatgacctacctactccaatatcaaaaggtctaataaatctaggttttaacttccctctctacatatccttttcataggcaatactcagagaaaaacgaaatctcccatttagaactcgataattctacgcttttaattagcataactttttgtgtatgtaatgaaatgagcatacaactcgaattcactctataactttttaagttccatggatcttttcggtccattgttattcttttctcacatgtattactccagtgaacatgtgtctaatatttctctcataccatactttttaaagtacctaaccagtggtatatttaattatcacttttagacaaatatttcgtcaagggaacaaattattctaagataatctaacctttattaaatatgctcacaacatgtttctaatattccattaatcctcccagattacccatatctttcaagaataaaatattatactatttttgttttaatctctatggttctcgataacttcataatttcttaacatcatagccaaagatatcaactttgggatttcacaagattagactattccttcgtatgaattccatatcctcattcattgtcttaattatctacactgatagacagtatattaactcagtatgtccaaacactatcactcggttgaaatcataagatcccacaatacataattcataattacatctttatattcctcctatgggacctcctaagctgatctactgacttaactattgggttttgtgccctaaataaaatccatttaactataatcagatttactaattaata

SEQ ID NO: 128231 - DNA, 1075 bp, Cannabis sativa
  modified_base (960)..(967): a, c, t, g, unknown or other
tgggtgggttgcacttaaattttagcaactcgaactttagattgggttagaaaatatataagataaaccgcccaaaccgaccgatgtacaaccctactaaaatagtagtttttaaaaatattcataactaagggtactaaatgtgtattttgacaaaatacaatataccaaataattatttacctatatatatttatatagatatatatatatatatcaatatgtgcaaaatatttaatgtttggataacaacataaaaattgatttaacaataaaattaataataatagaaaacaacatatatagaaaatgccttttatatatagcagaaaaatgattgttaaacatctacaataataaaaaataatacaatcatataatattaaaaatatataataatgtgaatacaaaaaggataaaatcatggaaaaaaaaagagaagaaaaatattaaaaaaaaaataaggaaaaaaaaaggaacatgaaaagatggaaacaaatgaattaaaaaagataaatggaaaataataagaaaaatttacaaagatcaaaaattttaaaaaattacaaaagtacatcaacacagaaatttttcattttaatgctttgaattttttatttacaaaattacttcttcaataaaaataataaaccgttcttttggttgttttatagtgtattatagttgtaacaccttaacaattaggcacgctacccaaggtgattaagaaatcttaatcccctaaacgggattactaagcagaaaagcgcggaaactttaaactttaaacaaaaatagaatgaaaataaaacttataataattttaactttatcgtcaaaggttacgtattttgggatcccaaaaatattttacaaaatattacaagtcattccactagccgacctaagcggcaaaacagagttacaaaagttcatcattggtagaccccaacccgcttnnnnnnnngtggcccgaacatgtacatacatatcactcaacactcgcactcatggtgatcagcaacagatttaccctttcctgcacagtagagcacccgtgagccaagcccagcaa

SEQ ID NO: 128232 - DNA, 804 bp, Cannabis sativa
cttctataattgaccactcttccagcgcagacaaatccttaaatttcaaggtctccaatgatgtaaagaatgggtttgtttgtattgcaacagaagaagaagaacaataaaactctgaatctattctcaccacatcacaactactaatgcaaagatctttgagagaaggtagctgtcccaatgacggcaagacgctgcaataatcacaaagatcaatatccaggcttactaaattaggcaagcagcgatgatctcccatccaatttgggaaactgtagcctctgtaggcctcaatcctaagaaattttagatttggatgaggctggagggcgttgaggacctgcaactcatcaacttcaggatcacgaccatcatcccaatgcagatttagctgaataagagacttcttactctttaataatggtgttgcagcatctgaaacttcctcaagcctaccaacattcacattttctagtctttcaattaaaagactcccgtatagatcttgaaactctttcaacaattcaataccaccacaatctctatttgttcccacaacaaatctatccagtgtttgaagattttgtagcttccccaattgcaatggcatcccttcaaatctatacccactaggaacactaagatttcgcaacttacttaaatttcttatatcatttggtagtctagtaactcgtacacattcttgcaaaaatagagtctccaaattatacaacttacaaattgtattaggtatctcttcaatataattacaatctaacctcaaatatcttagatacttcaaat

SEQ ID NO: 128233 - DNA, 1306 bp, Cannabis sativa
ttccaaggatatctttccctggaataaactgcttctgcatgttatgcttgtacaatgtgcatggttccaaggttcttgatactataagttctgaaacagaatgctttcttctccctgatttgccagaccgaattgaggttacaaaatcacagttaccactttcagcaattagttcagagctgaaagattttcatgagcaaaggatgaaagctgaaatagaatcttatggagtaatcattaatagttttgaagagttggagcatgcatatataaaagagtacaagaaggtgaggaacgggaaagtttggtgtatcggcccggtttccttgtgcaacaaagatgaattggataaggctcaaagaggtaaacaatcttctgttgatgaatatcagtgtctcaaatggcttgatttgtggaaactagcctctgcagtatatgcttgcctaggaagcttatgtaatttattaactccacagttgatagaacttgggctaggattggaagcttcaaacaaaccatttatttgggttataagaggtggaactagtacaacacaagaactagagaaatggataaaagaagatggatttgaagaaaggacaaaggaaagagggttggtgatcaggggttgggctccacaagttctaatcctatcacacccttctgttggagtgttcttaactcattgtgggtggaattcatctcttgaaggaatatctgcaggagttcccctggtcacctggcccttatttggtgaccaatttcttaatgagaaactgattgtgcatgttttgaagatagctgtaagtgttggaattaaatccatctaagtccttctaaccatatgtcggttacatggaaaagcaacttgcacaagtataacaacttcaatacagttacaaataaagatcctaactaaaataacagaaatcgaagacatatacctgccacatcaccaatccgagaccacttactctactcctattgcaacagtataaataagcactccctgctttcgatttccatagatagatctgaatactagagagaaagagagaacctgtaattgctctgagttcaatgataagaactcagagttgagaaaaagagagagagagtgagaaactgtgagaagaaagagattgttcttgagagagaatagagtagaaaccagaaagaaattaaatagcattaggagatcgaaaacttaccagttgatcttgtagctggaagcaccatgaaagcttgtattgaatctgaagttattagtgcaagggcttagctcatttctgaggcgagctcaaga

SEQ ID NO: 128234 - DNA, 934 bp, Cannabis sativa
aaacagatgctttgatgatttcgaatgctttaaataagccacatactagaatctcatatttttatgattaaattgtagacatttctagtcttttgtcctttttccctagagttactgcgtctcatgtcaaacatagagccaatatggcaactcacgggttggcaaagtatgatctagtattggatgaagattgtttttggttgtggtctatacctccatccgtttactctgttattgtaaataatttacaacattaattatgataacaaagtatttatcctaaaaaaaaataaaaagatttaaaaaagaaataacacatgtgttccaataaaagtgtaatatttcaagcattttaatcattttatctaaatttttcttttacaaatttaatttattagttatttcatttattttattatatctaatttaagagataatttatctgtatgagattgaattatttgtattgatttaggattttatttttgcattaaattagtttttttttactatataatatatatagatatataaatgtataaattcatgtgaattttataatttcttcgacaaaagacaaacttaacccgatgaggtggttctctacttttgtaataatctaatttattttttttaaagaagttttaattgattatttaatattatataaaaaaaaaaattgattatttaatttaattttttatattataatattattttagttgtttgtttttgtgttaggtttgatttgttttgtactttgtatgatagtatgtttatgtgcctaatgtgtttttttttttggttacgtatatggtggtttgttttgtgtttattttaaaaataactaggtagcagtgatacacgatttgttccacaaataataaagataatttttttagaaaattattctatatactattttttaactttt

SEQ ID NO: 128235 - DNA, 829 bp, Cannabis sativa
ttcttgccttaataatgtttatatcatactgtatgggatttctcttctttatttaacacaagaaaaactgtatgatggtgtttatattgtaggaccaaatagaagaaaagatacttccaaactttgaaacttatgttgcagaggaggaagaaggctcaggtagaaaagttttgtagatgaattgcactttctacaactttagaaacgtgtttattggagtaaaatttatttaatcatccaaacttgcaggtggttatggaactgtttaccgggcaagaagtaagaaagatggaactactgttgccattaagtgtaagtcagacagaattctcatttcttcattttagtatattgtataaatttcactgtgacatgcaaagatgtcaaattccagtcccttgtattcagatcatgtaatttaggaattcagaatttctcaaatatttagagtgaaaaactagtatatagaaatgagcgccaatctgaaaattgagccttgaatgttaattatattggtttcattttgaggcacttcttgatatcaccttttcctttttgttttatttttattacaggtcctcatgttaatgctcataagcatcatgttgacaatgagcttaggatgctggagcgatttgggtagtagtactaacattaagaacttttgcattgtgctttgaacgattgctttgaatactgactagccaatgattttgtgtaatacacaggggtaaaagctttgtcattaaatatgaaggttcggtcaagaatggagattctgattgctttgtcttagagcatgttgaacatgataggcctgaggtaattc

SEQ ID NO: 128236 - DNA, 1152 bp, Cannabis sativa
tgttagaatattagctgtatattagttggaaaaaattagggtaacttgtatttagtagttttctattttttccaactaatatacagctaatattctaacaaggccgtatagggactttttcaacttaaaaaccatctcttttccatcttgtaccacctgaaatccaggtggtttctccatgtatatttcttcttctagataaccatatagaaacacagttttgatatcaagctgctccacttctaaacctgctgagttgtcattgacaacataagtctaatggtcttatacttcaccacaggtaaaacaccttggtgtaatctatcccttctacgtcagtgaaacctttgacaactaatcttgccttaaatcttactggctcatcctctgtcacaccttctttaatttttagaatccatttgcatgagatcaccttcttgtcctcaggtcttggaaccaagacctatgtcttgttctttctaagcgagtttaattcatcatccacagcttgagaccactccttcttgtactttccatttaaagtctcttctatactcaatagttctggtatgtcacatgaatgatctattgacaaagcatagacaatcagaccagtttccgcaaaccttgctacatatgaatttctcttcaggttccatctctagcaagctggtagtcaggcagatccggttgttgctcagtctcatctagagttgtgtctgtgctgtcattcttctcacttggttcaaatcctttaagctcaatttcaaactttgctaaatcttccctcttgccagatgaatctgcatcaggtaacacactacctttctcggctttcaagtgagaaaaatcattttcattaaacacgacatttctataaataatcaccttagattttccactctggttaatgtagattctataaccttttgtgcctataggatatccgaaaaacgtgcctttgacagatctagcatcaagcttatcatcagatcgatgtacatatgttgcacatccagacactctcaagtgtttcaggtttggtatcttcccgtaccacatctcgtaaagtgtcttcaagtctatgactctattaggactcctatcaacaaggtaacaagcagtagttaaagcctctccccaataaggctt

SEQ ID NO: 128237 - DNA, 2388 bp, Cannabis sativa
  modified_base (28)..(55): a, c, t, g, unknown or other
attgcataaaatacaattcaatataatnnnnnnnnnnnnnnnnnnnnnnnnnnnngcgttccaaacgagccctttatgtattatactgtatgctgggcaattaaaataaaaattcgaaaacattttaatcctatttaatggtattattttggtactaatcatcagaaacaatatacattaattaatagggaaacatattcttataaaaatgctaaaattttaaaatacatcatttatcaatctcaaaacatatcactttagtgaaaatacatctcaccaaaaaaacacatttactttaatacccctcaaaaatatattttattagataaatatagaaaactcagttaaaaattattttcctgacatgtaaatttgtacaatcaggttataaaaatcggctatagggagtcaggccacttttattacactaaaaaggtatttgtcttattagtggtgttacacacctcaaaatgaagtgagaaacttcataattcccctaatattaaaaactaaaacttcccactgatcttattttggtcagatatccaataattgggccgggtgaatgtttgttttatgtgctgagattcaaaatatctttaaatatgaaaatggaattttagaccacaaattgaaatttctaacttgtttactttttagtgtggagtaaattatttttaaaaaatactttgtttttttcaaaaacattatatattttgtatattatatactgtgttaagttttcactgttatttcacggttaatttcagttccactattgttttaattgttttgttttattgttttatggttcacctaaaatttaatatttttgtgaaaacattgtttgaaaattaagttggtaaatatttttttttatttaacattatagtttttttttttttgaataaatcaggaaatttattaattaataaactcattcaaaataatagaacgcacttcagaagaacaatcctccaattgaagcacacaacctgtagagaaacaagagtcttttgtcaagcaatgagccaacttgtttgcaaatcgtttaacaaaacataactcaacaaaagataaagctaaaagtaaattcctaacatcttgaacaataagatcaaactgtaaggacataaaaacattactttggactgcttggacacacatcaaactatccgtttctaacactacattgtctcagggatgagttgcaatccaactcaaagcttctttgatgcctatgatctcagcaattttgggttggacatacccaacctttcccttcttgaaagcttctaccatggttccatgatgatctcaagctacacagcccactccaaaccgcccctcttgttcaaataaagccccatcaacattaattttaatcttgtttaacatagatgcaatccaacgctcatagttctaacccccatcattcaaagaagacaacgaaatgcccttccttccttgagcaaatttgtattgatcaagcatgattctagctgatgttacaatatttgaagcaagctaactcttgttttgccaaacaaagtcattccgcgcacgccgaatagcccaactcgccatgaactacagaaaccaaggaaaaaatttcttcagaagaaaccattgagttaagggcaccgaaatcccaacgtggttatcaataacaaaggtatgcttttctattccccttcatctaattaataaacaatctagatatatgacttttttttggtaaagatatagattgtaattgtgatatggtagattttaatttctacatcttgaggttccagtgactactcccaaaaacaatgatattttggtaaaaatataagcatatttgctttgaatcgagtggactggaaaattaagaaaattcatggtattagtatgtatgtcgttaatctgttgtgtatttatataaatgatgaaatgaaaagttgaatgtgatgaggtagtgacagaggtacttatgtggttggtgaagtagtagaggttggaaaaggagtcaactattcatagctggtgacaaaatcttattttaaccatgtcgtgagatacctctcatatatatataaatatatattaaatgttctgcttacaattaatttattctctgaagaacgatgattctaataatttaatatttcacccataaaacaaaggtttttttggggatgcttatattatatgtcaagactctatacacaactcatttttctaagatgtaggcttattatgggtagaaaaagaataatcaatagagataagatataaaagaattaatgattatattgacaaatctttatgtgctcgtttggaacgtcgtattagctcgtattgtattgtattgtattatattaaattggattatatatcata

SEQ ID NO: 128238 - DNA, 1071 bp, Cannabis sativa
aaagttattttgacataccccaccttagggggacaaagtcaatgtgtctccagtagtcttcaaaataaaaatcatgttatattaacaataattgagattgaatatttttattatataagttcattatttttaaaatagtatttttattcatttattttaattatttatttaataaaattatcaatttaggttctaaaaattaatatccgaattatttttattttaaatataatttttaattaaataattattaaaattatcaatttatatatgtagctcacaaaaaaattacaaataattattttctacttaagtataaatttttaaaataaaataaattttctataaaaattactaatttaagtaggtctaaaattaattaacattaattttttatttaattataaaatttcaataaaattattaactttattattatataaaattaatttcaataatatattaatatgagttaatatttgtattagataattgatatccaatgaaatatttattttatgtccaacaatgttggatatgaaaaattctagtgttaaatattatgtacaactttgatggtaataaaatgggatttatgtatgcttcaataaacatgtcttcaagtttgataggtctgggtgctcttcttcgaaactccaatagggagataattgctgctatgacaacatcaatcaaagggcgtctaaaaccaaaagaaatggaggctttggcactatcctggagtctcaaaactcttttttaacttgaactaccagtgcatctaattgaaacagactctcttttggttgttcaaaatttgaagaagtcatctacaaatctcttagcttttcatgccattcttaatgatgttaaccttcttgtgtccaattttccaggagcacagatctctcatgtttatagatctgctaataacgaagcccacttgttggctaagtttgctcttacggtggatactgaatgtatatggttggaggaagttccacctccactttgactcttatgtaatttgtttccaagttaatacagtagtcttttctcaaaaaaaaaaaa

SEQ ID NO: 128239 - DNA, 1424 bp, Cannabis sativa
ggattgaatgtacactaaataaaatagtatatatttaattggatgaataaccttacaacaaaataagggattttttttaatttttgaaaaagaaagtttatgttgttaatgtttttctttcaaggaaattgatgatgtgaaacatcacctaactttctaaattcttgcacgaataaatatgtttgccctaagaatattatgtattctataacaaataagatctcctgtaataaatattcttttattgataaatacactttgcccaaaactcaaaatggaattaatggctttcttgctttaaattccaacccaaaaaagaaaaaggggtatatagagtccttgatagtagattattgccaatgttgtcccaccatactaagaaatgtaatgttttttagttatttgaaaggggaaaatgtagtgtgttttaagaagcattaattaattggttagtcttaaatcaaagtgtcttctatgacaaacattcatgtcaagtcaatcaaacttcataataaatcggaggtggtcccattttaccaagttaataaagttggatttgagttaataattattaatattttattgtatttattgcttgaataataatatggaaatttataatagtattagaatatacattatatatttactatcaatatacatacctaataatttatttttgtatgaattatacattttatacgaaattattttaatttattgtataatgtataataagtatttgatttacctatcactacctatgaatgattttatgttcgtgattattttatattttttttatttaattttgaaaatcaattattattataaatattaaaagtcgtgtattataataatatttaccgaaatttttaaaaattaaattaaaataaaattgaactaaaaaaattgtatttaagaattaaataagatgagattttttatgtggttgagatgttaaagaatcttagtccacgagtcaataatattaaactctggctatagagtatttttactattttttctattacaaaaatgactgcctaaaactggtaaccctttgcatgaagggataaaacattatttataggtgttttaactaatgggttgggctaacttggcccattagggtgtgtaaactggaaaaatctcactgatgtgataaattacatttaaataatgatttttgggccgattaggtgaggtccaatgtgttggtaaccttcgcccgtacgcggacatactattgacagtgacaaccttgcatgagtcgtcagattgttggaggaatgtcagagtagtgggcgttagtccaaaaatgtgacttccttttgttgtgtgcttatctgtaacgccctaaataattaggcacgctacctaaaatacttatgaaactccaatcccctaaacgggattactaa

SEQ ID NO: 128240 - DNA, 640 bp, Cannabis sativa
  modified_base (262)..(263): a, c, t, g, unknown or other
tttccttcctctctcttcgaaccaacccagaacaaaggaggttgttggtgatttttgggtgttttcagcaagaattcaagggaaatcaagcgatggtaagccctagaatctctacctcttagttcctgaaatttttacgtggtttgaatatgtgattttgagaattagtggctgttaggattagcttcagttgtagtttgaattatagggtttatttgagttggtttaaagttcttgcagctggttttagtgtataatgttnnatttatgcaagtttgggtttgaaaacctaaactttgatctttaatggcatactgtggttcagtgagattttttatgaattgctggttcaaaaatattgtttatgccttgtttaggtgttttggaaagtacggatgcatttggtgggattttgagcaagaaatgaaattttttgggtgaactggtgcaaactgggtaaccggttttaccagtacctgtaaaatcggttagtcaatttttgcagggttcctcgaatgttccatttcctcagttcttaattttagtgtcgtagttgggtgtttccctatttctagagttagagtaaaccctagagagtataacagaacctagagtggtgggttcgggtttcctggattag

SEQ ID NO: 128241 - DNA, 1355 bp, Cannabis sativa
tgtcactaatttagttttagtgatcacaagtattaccactaaaaatgtatttagtcacaataaataataatttttgtgactaatacttttagcaacaaaacttttaatcacaacataaggatgatataatttataatgtcacaacttttttacttctagtcacaaattttgttgtgactaaaagtaagattttttatagtacactaaatgaaatattttcacgacaggattgggaaagagatgttatagtttcgttgattaattataggtaaaattagttaaagttaatagtaccatttttataaaacttcctttgaatatcagaattctcaagcaatatttagaagcaataaatcacattatctcaagatttttgagcacaaaatttgttttatgcacttaaataaaaaatctcgtcaagtttcgagatgtgtaaagggtgatacgagcagaatgatatgactgaaactctcgtgagtaatagtctatgaaatttgcaaaacaatatctgttttaaaaaagttcttcattcctacactaaaggaagcatttccatgttagaaatcattaggaaggagatattatagtttcgttgattaaatctaggtaatattagttaaaatttggaccacctcattgtaccattttttaaagcttcttttgaaattttttaattcgagcaatatttagaaataatatatcacttaatctcaatattttccgagcacgaaatttgtttccatatgtcttatgcacctaaataaaaaagtttcatcaagtttcgagaggtatggagagagatacaagcaaaataatactagttaattatatgaatatagctaaaaaattcgtgagtaatagtagtccatgaaatttacaaaatttgcaattttttataaattcaaatattctactagcacaaaatttatcattacttattgattaagtttttaattgatttgattttcaaccttagttgaaaatttcccacatcatcaaataatatttacgtattatatatgtatgtatatgtaatctatatcacattgccttttccacgtaaaataaatattgtgaaatatcaaaatatcattgtaaaccatggaacaagaacataattattgagagttacatcttgaaaatgtaaaccatggaacaataatcacatagaaatacattgtcattttgattattataaaatagaaataattaagttggtggaaaaattatatgtaatgacgtgctatttcagtcatgtatttaattagagaagaactttaatatttttaccaaattataagtataaataaattctctctcaaagttcttcggtagcaaaaaaaaaaaaaaaaaaa

SEQ ID NO: 128242 - DNA, 987 bp, Cannabis sativa
actttgaactaaaaatgtaaaaaaattacagaatttagatctttaggtaattattctaattaatttttcatatcataatatttttaaaaaaaaaaaatagatcaatttttaaaaataatgtctttgcataactaataaccacccttacaacctccataatcataaaagcaatgaatcaaaataaaaaatatatatttttttaattaattatgatatatatttgtaataaaagatagcatttatagacataatcttaatattagtgtaatagttatgcaagattgcatttataatagatgttaagagtttagattcctaacacattttttttcctttttaagtttacttcttcttttaaattatttttgttctccatgtggttatgtggtcgtgaagttcaaaactctcatcggatccatatatcttttaaattttatttttaacttttcaattttagcatgttgtttttttaacaaagaacagtgtggaagaatgttgttaaatcaatagatttaattaagaatggtcggcctgagggttggaataaagtggcagatttacttacggatgatagaaattggaatgtttccaaactcaattccctgtttgacaaagctaccaccaataatatctttaaaggaggtaggccggggggcaaggtagtgacaaatggatttggtctatagattcaactgatcggttttctacgaaatctacctgccttgctcaggcattatctcgtgcccctcctattacggtggcgccctccatttagaacaaactttagaattcgaagattttggagcgccataagattttgtggtggtgtatcctatcaagtgccttaccgatcaggtcggctttggctagaagaatgcacattgaggaggtttcttgcctcctttgtggggaggaggagaaaactatggaacatcttttcctctattgtaactttgcctcacccctttggaggtcatccccttgggg

SEQ ID NO: 128243 - DNA, 1474 bp, Cannabis sativa
gcttcgaccacgcccacccccaacgtactccaggttcgttctttccaagctagaaaaccttgatccccctgttctccatctctcaatatcactttctctctgttttcccttatacagtgatagtaccacaccaaaattatcctttgtcggtgccaatggtctagacggaccacaaaataagtttccttaaccctgagaagcccaacctcgaccctctttctcacccaaactctctttatctctcggtttcactctcactgaagccgaagttgtccagcttcgccctggccatatccggtcgtgaacgagctaaagaaacccgattttggtttctcctcatcaagatcttcaaggatttattggtcgatcctccatgcaccacttttgaccgagaactgccaccatagacggtggagccccaccgaccgagaccctcggccagctactgtgtttaacattatgagcttgagcttcgagtatcattttgagcctcgtaatggatttaaacacgtgggtatcatttatctactatttgctttaattatttgagttagattattggttctgaattaagaatttattataatcttggtgtttgagatatttcgggttgtataaacaaatttcttacacttaagtataattccatatttattattgacaaacgagatttatactcgtttattatgttagtttagaacatattttagagtcttttatgtcaatttagtttggtttcacggttattttcttttgttgcaagaaaatatgataaaaatataaaaaaaatggagaaacaagctaaatttgtagaaaagtgggcttaaatggagttatttttcatcttggtgaggttagtgatgtttgggagcaagatggagcaaagagacaaaaattggaaaaacttgtcagtctaggccatggcttcgaaatctggagccatggctccagaaaagacaaaatagcataaatgacctagggcctacgtctactgaagcaaaaatttgaaaaataaaaataaaaagatgactttctcaagtgaggttgcagctctggtaccccaagttgcgactcctaagcgtgttatttatcttttaaagttttaaatctcaatttttttagtatcttctggagaactttgttagtatatataaagtataaacacattatcattcgtgtttttagtacatttttagagctctaaactcaaaaattcttaattagcaactacttagtattttcatcttcttcttcttcttctctttctttaattttgtttatgttcttatttattatatgaatgcaatggttatgaacatgattttcatgcactaattttcttatctattttaatgtctatttaatgtcactttaatgtctattttactttttatgatgttctactgatttattcctctttattttaatctatatgatttatgcttaatgcttataaatacttgatcactatttg

SEQ ID NO: 128244 - DNA, 949 bp, Cannabis sativa
attcaaatttaagttgataaggaaaattagttagtaataactaatttataacttaaataggaatatttaatcaaagagattggattttcagtttgcgggttgatcatatttataataggtttgcctgactgggagaggcaatcaaaaattacatttgtttttccatttatgtgtttgattttgaacgtatgacatcagaaccatgtggctaacctgagcagttgagaattgactagtctattctgtttgaacgtgagcatcccttgaaatgtagcaaaatctttttccactaggaaattatgtttgatgaggtggaactcgaattttgtgatgcccatttttattgccagtatctctttaagtatggaatggtagtgtagctaggaatctttgaaagccccacttttgtaactgcacactttgcgtttgccacgatcgtcttcctctagtaggatagctagctagtgtttgtcactcgcattttcttataagattcttttcttgtaagagggaatctgaagggggtaggcctagcatcatctctttaagtttttcgattgcaaccatttgttatttttcccaagcaaaagatcatttttggaacattttatattatgggcttgtgatcttagacaagtggggtacaaaatcccttacgtaatttataattttggggaattgttggatttggatttttgtgaggccttcatttgggaattttaacagctcttgtgctatgtgttctcgggcctcatattttccatcatgaagtttcattctaagaaatttgatttgtggttggcctatttgttggaaacttattttatcaggatttagatttactactcttgtatgttgattacataactataatttaacatcctaaatataaaaattctaaaacgataaacaagcacataagagttataaaaaatcttacattgatggc

SEQ ID NO: 128245 - DNA, 1419 bp, Cannabis sativa
aaaatttccgtgtggcagtattttgtaaaaattaacccaaattccagtatttttgtaagtttatctttattttacttgttttaatttttatatttatttgtatgttctttaaaatatagtcacctttacagttattgtcgttattaaatacttaagttgatgtaaattatatgctaaacttaagttgaaagtaaaagtatattgaataacttatacataaaaattaacatattttaataaaatatatagtaaaataattaaaaaataactgtaatacaatattaaaaatttaacacactacacagtattttttttttttaaattctatcccaccataaaaaaatacagtgtaaaagtcccaatttgttagagacaatcttcatgtctactgtctctagaattagccatacattacatattcatggacattaacgacttaacgtgtttactattaataattcttctcaaataagaaaaaagatttgtcttcttctagaggtagaatcaaatgccacgtaagcaatgtcttccttgtatcgtcgtggcttattaagcaccacttcagtccaaattcgatccacgtatgcacttataacaaaaaactctaaagaaagaacaaggaaagcgtcctaaactttgctactaaaaaaagccatgaattcagctctgccacgtggcaatctaatgacagtacacgtcgacagaaaatatttcttacgttgatcgattggaggcttcaggtttgaattttttaactacacagactaatcaaccaatcaaaccactaaatttaacccaagaaaataaaattggttgattattatgggagaaatctaaggtgtacctttcaaaaatgtcattttatatatttttatttgttttgacatcctgtattaagagaattttatgatagtatatgtggtaaatttttaagtctaattataatttttgttcctgaactttgacatgtaccaaattatatcccctgaacttttaaggttattgaaaatacccctgaactattgagattattgaatttaaggatttttttctaattttagtaaaaaagtttaacatgaatgaaagttcaggaggcataatttagtgcatatcaaagttcgaaatgcatgatttggtagatatcaaagtctggggaatatgatttagtatataaacaatcactgaaatagtaaaattgaataaaattagaccaaaatcttaaatctaaccatctcaatagttcaagagcattgaaaccatgatttgatttggtacatgtcaaaattcaggaacaaaaatcctaattacctaatttttaatttaatattatataaaaaaaaattaaactaattttttttattattatatgtttaaagtatttgtgagactacacaggtttttgcactattttttaatagt

SEQ ID NO: 128246 - DNA, 750 bp, Cannabis sativa
taacaatctcaatagttcggagggaatttttcaaaaaaagttcacggagcacgatttagtacatgtcaaaattcaggagaaaaaattactaattagcctaataaaattagtatcattaaaacacatatattatttaaaaacttataaaacacatctactattttctaataagaaattaaataaaaaaaatattcatagaaaatatttataacaaacataaattaaacacatacctcaatgttcttgatgtatgagaaataaatgctttataagatatgatgtgtagtgtttaacaaggaaatcttttgctctaaagtgtcaacatatatgatattgtaaagctggggaaactaagtgaaaagcaaagcatttccctttggttagccttacacattatttatactgaccaaatattagagaaaacaatcaaaactgatagactttttcggtgaaatttattattacaagttttattaaattttattacaaaaatatgacataaaaaaactcatacaaatataaaaaaaaaataaaaaaatataaccccataatattatttatttatgccataaaacaataaatctttataactttctcatttattatataatttctattttttttttatggtggaaaaggatacatagacacgcactttgtttgggaaatttgaatttatatgcttaaataattaaaaaattttattattataccaaaaatttacactataaaaaaactatactttttttt

SEQ ID NO: 128247 - DNA, 906 bp, Cannabis sativa
  modified_base (864)..(867): a, c, t, g, unknown or other
aagtggccggtgggggaggtcctgggttcgagtcccaggtaaaatatgttgtaatatataaacgcttaaatcaaaaaaaaatgctaaaataaataaataaataaaataaaatagttgaagaaatgctttataaagcccaataccttttttatcgttagggaagtaattagagtgagtaaaatattattttttgagaaattctaggtcactcatagtgtgtaataattttatgaggtgttagatatttatagaaaattactaattatttataggataatattttatagtggtgttagacataatgcttaataacaatgttttaattttctttaatttaagctatattagttgttgactacactaatatatatcattttatatgattagtatagcttacaaatattattttttaaaatttttatttgttggtaaaaattaaaagaaaaaacataaaatatcagaaataatgaatatatcattaggggtaattttatagtacacccactaaaatgattatttgggtatacttctatctatctattttagtatttataagagtttttttttttcttaaaattgtgtgcattgtagttatttataactaccactaagtatgtttttaaaaaattcttaataggttatttaaaattttctaaaaaaaattagtggttctaaaaaactaaatgattatgaaaaaaaattaactaaaaacttttcaagggagtctactatagatttttgttatcattattattttatcatcccaaatagattttttacactattaattatttcaattttttttaaaaaaaaaaaaattacaggttgttctaaaatatatttagggaaattctacaatgcacnnnnttaaaatggatatattgatgtacccttatctgttttagc

SEQ ID NO: 128248 - DNA, 756 bp, Cannabis sativa
  modified_base (315)..(323): a, c, t, g, unknown or other
aaaaaaaagagatgggtattgatttaccagaagcaaagcctctgttgaagacagagattcttaggtatgaagcagcccttgaagcccataacatccttgaagccatttttgattcagattttctaaaaaaaaaattatagaagaagaaaaaaagagtgtttttatagagtggtagtgctaagctaatcttctctataaacttcactaggtttataatatatattttagtaggttagttggttgccataattttgttttattttccattttctaatttcataattataatagttttatattattattattattatnnnnnnnnntattattattattatttataaaagtaccttttatattattccaagaaaattgaagtgtttttttagtaaagttggaatccacaaatacattcaagattaataaaatattccttacaaaaaaagggtgcttttctatggtgcactcatagtgtttgggatatttaaattgttataatttttgtttttttttttttgttttttttttttttatgatatttttttttatgatagtctatattatagttatatagtctatattatagttatttaatctatattatagttatttaaaatattttataaaattttaaaataatttataatatataaaaaatgggttttttatagtatattttacacatataacataaaagagacacttaatttactttttgaatcttatttttgatatattaattttttcttataaaaa

SEQ ID NO: 128249 - DNA, 893 bp, Cannabis sativa
  modified_base (74)..(74): a, c, t, g, unknown or other
aaaaagctgttttttgactatttgtcaaacacatttttttcacagctttttgaaaaagcagcttttagcttttncaaaagctgtgccaaacgggcccataatcgctaggctacttggtttgtggtaaaaaaaaacaatagcttagtgagattcatactcacacattttacactaaatcacgatatgcaattttcacacaaaaatacgacaaaacataacaatgaatgagtggtctaatcgcaaagtgcatactcccaaacggtttaatttgtaagatagaagccatgtgtttgaatatgggacggtggcttcgttaggaaacttggatgtgaggacaatatttgcccatccaaccactcttataacatcagtctaagggacattcacgcacttagtatttggttggggctcatctcgtgtgacacactccgaggacacccgcctcagaaaatgggcgaggtttggaactctcttgttacacccaaaaagactaaccacacttggtagtctcctccacttttttagtaattaataaaaacaatagattaatttgcaccgtaaataattaaatttaacttttacttacaaataaatacttacttaaatttaatttttggcgataataatatttaagttataattttagaatttttgcaggtacctgattaagtaaattgtcacatgacactcctgattggtttaagtcattaaatttttattatttaaaaaaaattagtttaaatataccaataaaaaaatgacacattaatttaatggctaatatttaagggttaagtaactaggagttttagaaatataataacttaagtattattaccactaaaaattaaatttagctatttatttacaattgaaagttttttttttttttt

SEQ ID NO: 128250 - DNA, 890 bp, Cannabis sativa
ccattagtttgtttcaagaaaattttttttttttgagaaacctgatgctttataaaaaccagagaagagtaaagtcaacaggtgtaactggaaggcaaacaaccattccagacgcactcactaaaaagcctgagaccaattttagcatgttcatgagccaacacattatgacttctatgaacatgctttacaacaaggccaggactttgagttagcaaggctgagatacaattaactacatcactcaaaatagaattattacaaaaaccattattaattttatctaccacaactttacagtccgataaaagaagagaaactggcagtttagtagcttgtaaccattgtactgtagtcaaaatggctttagcctcagcaacatccggaggaaagactccctgcaatggtagcataaaaccagctcgaatggtaccaccctcgtccgtgactatggaagctaaactagttttttgggtagccacatcgatagctgcatccgtatgaacctgccaagttcctgctgtcgaaatggggattagagcctgatcctctgaggttacagccccctgcttgagattcttgacacgagctaactgaaattcatccaaaaaattacaagcagattgaaaaatatcttgaggccatgaccttttatgttgatgaaagactttatttctatagttccaaatagcccaaacaaaacagaacattaagtttatttgatgggaatcaaaagtttcaaaagcagcatcaaaaaaagtatctatagaaccagacaaattattagtatagaaattaatgaaagttgaatgtttccaggctttcctagcatttttgcactccaagatggcatgtttcactgactccgtggtttgatgacagattgggca

SEQ ID NO: 128251 - DNA, 1209 bp, Cannabis sativa
  modified_base (1136)..(1142): a, c, t, g, unknown or other
acctttgttcacaacactctataatttgctaaaaaaatcacaagatttgaagagaaaaatccaaaccctagatgctctagggaattcgagagagagagagagagcttcttctttattttttttttctaattttgtttcttaatctgtatcccccttttttttttgtgtgttgtctccagttgcttttatttttttatttttttatttttttgtaaaactcatcctttatttgtggttttttttatttatttatttatttttttttaatttcagtgcctcctataggaggcaaattccataaaaatttttgatatatatattttaaaaattttatcttttgacatttaatctagatttttataggaaaatcgagatagaaaatctcctttaatcttgatttttatatgagtttttatcccattggtatatatctcaatttttattttagcgagaattgggataaaatactcttaaaaatcgggataaaatgcttatttttgtagtagtgcatgttgatatgatatgttgggctttatagagagttaagattggaaggatgtgggttggaatggtaaaaattcgattgctaaatttgttgtgtcgtctgcttcagtttattttaactaatagaaaagtgtgaattcttattcacttgaagattcctcatttgctgatgtggtgatcaaagtgcactggttgccaccttatgataatatgattaaaaacaatgtagacacgcctcaatttttaatgagaatagagcatttggggttggttggctcgcataggatcaccgtgggaccttattttctgctgctgcaatggctaagcaagggattgtagattcatagtagaggcgacaagtttaaaagatgtttacttgtttatttgtaataaggcacaaatgtattctccatttgattttacttgtttctaattgcaacatgcttctcaatagtttgagcaatgcgtctcttgtctttgttagacgatccgcaagtaatactatgagttatttggttagagatatttatttacattgagattgtcgtagttggatgtttgtctctactaattagcaagctattcttttagttgatttgcagtaataaaagtgttaattccatttttggcannnnnnnttgacaaaaatattttattattcattgtatattttcggctggtatacattaatatggtttcctattt

SEQ ID NO: 128252 - DNA, 1261 bp, Cannabis sativa
  modified_base (29)..(39): a, c, t, g, unknown or other
aatgccatttcaatactttaaaatgcaannnnnnnnnnnaatggaataaaaattgtttcctttccatttcattacctccaaccaaacgccaccctagatctttgtcgaagattgtaaagagtttaaagttatgctcttaattttaagaagattcagattcattgattgttattactctatgacaaaaaagaataagggttatatcactgaatgggagaagtcatattccgctgtgtaacatctttgtaagtattttgtactcaatatatgaaattgatgttacaataaattagtatatatgttaaatattaatttacgtgaaaaatatatcgatcttgttaaacaagcattcccaacaagttaatttttttctcttttatttttgttaatctaaaaaattaaaggtttacatgatagtgagattcgcatatttttcatatagttatagaatttgtttggcacataaaattgagttagattgtactagattggacaatacagaatgtaattatttatttagttttagaatggactaggctattaattttttttaaaataaatatataaggactaataaaattaaaatatttatttcaataataaataattataacataaaatttaaatcatagaattaaataataaattttgtaaaaaaataataaatcaatacattatacataaatatatatactaagttaattttatgtataatgcacgtataattaattttttttttaattaggtttaattagatgatcttaagtacaatatattttttaaaatattttatgtgtttattatatgttcaatttttttaataaggtaatgtatttttattttttaatttttgaaataaagcttgagattttaatctttgagatttttttttaactattgtgactattagtgtgctctttactctttagatgtgattacacatatacgtattttatatatacaataaaaaaataaattttaatgtttatattgatctctctatacataaagattatattaaaaaatattttgacaaacttttagtttaattagagaattaattcaaaatacattttatatattattcccaaacatatattttaagaaataattatatgatagatataatattcttaatttatagttagaattgtgtggttacaataattataaagtgtacaaattattatatatagatgtaatttttatttttaaatatatataattaaattaattttttatataaaatatatataatttt

SEQ ID NO: 128253 - DNA, 1240 bp, Cannabis sativa
tctgagctagattctcaataactacaagtgtaggcataatgatttctaatcttctattgataacaaataagattatattgaaatgggtttttatttagggcatgaaatcccaacacatgcatgccactcaaccaagattttcttgcatatcgcttggccatgctgttatcaatgacaccaccatgccaagtgagattcttcccaagtgttgaagacgaaggcaacggaggtacgacaaggcttgcatgaaaggtgagtacaaccatgccccctacaagttctaatgttaaagaggtacaagtagtagagacattacacatgcaagtcctaacatcctaaccaagagtgcacaatagccactaccccttcaactctgaatcacctgaaactagacaaaggtacaaggcgcaagacaacgacctgtaacttgcagcccatggatatcatcttgtcccttgggaccacaattttccattagagcctataaatactgttgagattttatgccctaaataaaatctatttcaatgtaatcttatttgttatcaatagatgattaaaagtcatttaagttagcatgttattttcatgatattggtttaatatacaatttctaataaaactagaaattattattattcacaattacagtgatgtcaacactgtggaaggtaaatatgattatatgttttaaaacttatgtttcatgattcatcaatgcgcaggatttacactgatgtgataattagcgataaagtttacttacaccttggctaattgttatgtccttttcagggtattggtaaagtaggctagtatcagatgtatatagtacacattggactggaccattattgaacttgataaagatgtcataaaattaacgttatatctttctaagtgaatatcacaaagttgatcttagatcaaaagatattaatcctaatatggttaggttcgatcacaagagtgttatttatgttcttagagttgttcgttaaaacttaccaattggttcgggccaatacttatatcttaagaatatgatagtataattgagtggaagcgctaatcatagatacagaatctatagcttgtatctgaacatagaagtcaaatgatgatttccttcaagcttgacttaatagagataaatataagagatcttatttagtaattatattagtttaatgaaatatcatttataggaagctggatgttttaaggataaaatatattg

SEQ ID NO: 128254 - DNA, 1095 bp, Cannabis sativa
cctcctcctccactagggcctgcaccagctaggcagccagtgatacggcccatgggcatcccatagatgtataaagagagcttttcctttcatgaatgaggagctcaaagagcttggtgatggcaagccaaacatgctctactctactggccttcgggatctttcactggtaggttgtatttttagctttattcatcttcctggcactatgtaagctggccagccaagggatttgttgcatgtggctggccggtggctggccggccatggatgtacctatgaggggctggctggccatagcagtcccaaagatggggtgaccggctactgttgtagtttgatactgattttgtcttgttttactttcagggcttgataaagttgagctcggtacatgatagctcctaggggtccttaaatgctcttcgagagcaggtgaagaccatggagcttctcttctagcgaaggacaaagccatgtctgagatggaggctctccttatggagatatagagcataattattggcttaaagaccatgcttggggccaaaaacaaggagaacaccacacaagttgcctttatctctaggctggagtctgagcttgcagggcatgaggagagactgggagcagctcttgatggccagtaggccataagggaggagtatgctgacttgtcctccgtactcacctatgagttcaagttgcgtaaccccagagctaatctgtcttacatgggtagtgagacttttgtggaaagcacgttggccagaggaaaggcgctcttcaaaagccagttgggagcagactagactgccacctatcaagaggggtcatcatcagggaattatgatgaggggctgaccagcccacttgttgaggaggtggccagccaggaaattacccatcacgccagccaacttatttgtaatgatcgtattttagaatatagattagtaaaggcaattagcattaattattaatgttttttataattatgtatgagcttactatgttatgaattccatttttagaaacaggcattatagttataatttctcaatttcagagattttattaaactctagaggtatt

SEQ ID NO: 128255 - DNA, 925 bp, Cannabis sativa
ttcttttttttttttttaaatggactaattttgataattataataacctaaatttacatataaattaattaaaaatacttttcttttgcaaaaactgtataaataatcatatatattctctttatcttataaatatatatatatatgactaaaaaataattaaaaaaatacctattgttgctctggtcgacgatgatggtgggattctggtcggaggtgctgcggtgcggggtggtcgttgatcggaggtgcgccatgcggtgtggttggtgatcggaggtgcaccgtgcgggggttacgcttaacattagggaaatttctttttgaaccccttttttatgtatgaaagaaacataatggtttttttttttttatgaaagaagaaggtttagggaagaagaagaagaaatggttgggaaagaggaagtgtgacactcttaatgtgcacaacattagaggcgacacttggggcgacattatcacccctagtgccttgaccatgtcaggtggcagggcattaggggcgacaggtgttgcccctaataatgtgagcggaaaaattcccgtctaataataacaagtggattttcaacttattatgggcaacatgtgtcgcccctaataagttgtttgtcgcttcaaaatgtattaggggcgacacatgtcgcctctaaaggtcttcaatttttttttaaaaaaaaactttttctttaggagcgacaataatttgtcgctcctaatagccttactattactttttatcgtctcaaaaattgtcgcccctaataaatgaatttgttgtagtaggaaaatgaccactgaaatagcaaaaatgaaaataatatagatggagaaattacaccattcacaaggaccaattgtatgttttctttttcaactgaattatatattgttttcccaaaac

SEQ ID NO: 128256 - DNA, 861 bp, Cannabis sativa
tacattgaattggagttttatttagggcataaaacccaacatgttatgccactccttccatgcagtatcaacagtggtgtaggaactaggatcttctaaccaaatattctcaaacctaaaacgtctatgggttggatcaggattagttctaggttagcagaggttaaaactaactcaagaacttgatgacctgacccatagaagcctaaatgatgcaaggaatgatcaggaaaaagatcacaccaagaattagaagccacaacccaatcaagcctttcacgaatagtcttattggtccaggtaaatttattcccatgataaatgagaggggccatggtaaacttgtgaagaaaattatgaaagcagtccataggagcctgattaggagaactacccctgaccttatcagtattagaaagatagctattaaaatcaccaataactaaccaaggaagattagcagcattataataaatattatgtaaaagcttccaggtgatatgcttttgttgagtaacaggggaaccatagaaaaaagtaaggtgctatatataattactagagaaattaataatacagtctatatgattggtagaatagtcaataatatttacgttaacatcatccccccacaaaagaagaagtcccccccccctcccaaaatacttccgagggacttcaaaaccattaacaaaacctaaaacctgtttaaacctatcaacagaggtgggcttcaacctggtttccatcaaaaaaagtaatgtaggcctatggttcttaacaaggagggagagtcaattgaatgctcgagggttccctagcccccgagcattccagcttataaaattcatttttctgggc

SEQ ID NO: 128257 - DNA, 522 bp, Cannabis sativa
  modified_base (463)..(495): a, c, t, g, unknown or other
atggtacttaataattagttatcaacttttttggttaatttgttgtcttaattagcattttttttttattgtgtgtgtgttttttttttttttaaatatttttgtaatacttttttataaatatttttttataccattattgttatgtgtcaccttaaaatatttattatcatactgattcacatacacaataattgataaacggttttttaaatcacttattgaattaaaatttgtgggaagtaatattgaagtgcaccaataatagtatgttatcttttttggtgttggcactttaatgtgccttttaacattagtgttattaatatgtacatatttttattaacttttattatcattttctttttgttttttctttatttattatgaatgatttttttttttcagtaaataatattttgtattattattgttgttatcctaaattttgcactctgacgtnnnnnnnnnnnnnnnnnnnnnnnnnnnnnnnnnttggagcatctgctcgggaagatagac

SEQ ID NO: 128258 - DNA, 1413 bp, Cannabis sativa
  modified_base (1354)..(1363): a, c, t, g, unknown or other
ctactccccttatattgtattaacttgggagaaagaacgaagtgttttcctctctgaaaactcttacaattgatctccgagtaattgtcttagattaatattttctctcttgaatctctctctctagaaattcttttgatccttcatagtgaggctaggccactatttagggatggtttccctttttcctataatatataaaataggaaattacttttattacataatcacggtacacgaaataggaaactggaataggttgccatatttctctaactcaatcccacgattatagggatagtcctcgtacctagactttacaagatcattctgaagtaattaactccttataagtagctcgacaagccagacttctaactggtcggatgctctatcttccactatagtagagtaatcaaaaattaaatatgctgatgaattatacagaagttgttttggacatttacctctgcccaggtaccaaaaatgcaggacatgtgtcacttggtccttctaccatgtcaatgtgcaaaaatctggataacatttaccctccaagtctgtgcgggaccttcctgtttgcacgtggactttactcgttctagagtcttatctgagcgggtgacacgtgtcctaggcgtcgattgatgatccgatgtgactcgtaccaaaggtctcttcaatttcaactcattaatgttgattgatggttttgcctcaaatcacgtcttaagattcacacatggagacaatcatttttccaacaattaagtatacaacgtacactcttggggggatttcgagacatttaaaatttgaaatgattactcctcctctttgaactacgtataaataggattgaaaaccctaattaatcacttttagcaattcttattcttgaaaaatcagatcaaagataattttctctcaatttcttgaaagaacttccaataaacttcagtcagcaccacctgagcacatcaaacgcttcaaattagtgagtaagttcttcatatctctcttttacacatttgcatgcttaattttctgggtttctgcctacgaatcttgattgttctcgaacttgttctaggataaccacataaattttaggtttaagatttataaatcttgattaagcttaaccaagtcatttgattctaactgcgctttgattttaacctcacaatactaattttcacttatccattaagggattagtgagaatttgactccaactcgaaattttgaacttctaggtttaaaattctactattgtgcgaaatgtttgtttttgatccctctatttgacctggttagtacagccaagcttgttactgttgggttttatgcnnnnnnnnnnactccatttcaatgtaatccagtttattcaacatcaataaagaaacataa

SEQ ID NO: 128259 - DNA, 518 bp, Cannabis sativa
aaggcctatactatacatttattttttcaaatcaattatttgaacaccaaaaattaacaataattaaaaaaaataaaaaataaagatccgtttaaacgagttaactcgaccaaatcgataaaaatcattaggcgggttacaatttttatattttttcattgaaaggtttacaattagatttttgcaatcagacaaatatattggattggtaaaaatgtactataacccgatcaaaccgactgatgtacacccctagttaagtgtataaaaattaaaacataagggagttttgccaaaaaaaaaaaaagaaagttaaatgtataaaaattaaaacataaaaagattttgccgcaaattgctcaaaaaaaaaaaataattagtggaattgttttaataaaattttgagatttttttattgaaagccaaatttcgggatattaatttaagaataaataagatatatatatatatatatactaggtgaaaattacgtgccgagccacgtaaatattagtttt

SEQ ID NO: 128260 - DNA, 2500 bp, Cannabis sativa
  modified_base (833)..(834): a, c, t, g, unknown or other
ctaatatgtctaatccctgttgtgacattgtcctttaccaatcggaggttggtggttctgctcgccattcgagtcctgagtcgactccgtccccgccttcatcgccaataattcggaaacctcgtatgtttcaaggtaaggctcctcccctgtctaaaaaggctagtccttctatgtcgtcaccccctccgtctgtgtcaaaacgagtcactagttcatcgtcgagtctacagcctcaatccaaacccgtaggacctcctcgtgctccatctaaggtgtatattccttcccaaaccactgttcagccaaaacgaaggtcctcacgtgataccacgtatcaaccacttgaaaagaaatccgagaccgaacccatttcagtcccatctacagactcgtttcccaaacagtcgtctaaaggctccaaaaaatcgaaatgtccaaaagtccccatagcatctgttgacccatccactgttcaatgctttgttgatgtctccaaagcttcggtttaccaacgatggtttggtagtcgtgacctttggttcgaacaagtagtcatgttagatgattttcctgaattgcatgattttttaaaaattaggaaatgggtaaacacggtcactaacttgtctgcacctcatcccattgtagttcgagaattctgtgctaatctagataggactgttattgctgagggtcatccagggtgtgtgagtgcatttgttaggggtaatcgtgttccatttggtccatccactattgcatgcatgttgaaagttgagtccatcaggaatccaacatatgggaaacaattcaatccagatcaaactttnntgggtagagtgctaactggcagggatgactatctgttggacaaacaggaaattttagccactcatctgactcctttctatagggtttcttcatcgcgtagctttgtacaattagtttcctaattctcacttgtcatcagttacacttgagattggcaagtttctgtatgctgcaggaactcatgtgtctattcatctgccatctctcatatttgaatggatgcttgaagcttcagaaacaactggcactcgtaacaagctaccctttccaagcctggttcaacgagtactcatggctgctcacccaactcttacaacgcgtgactatcatgttcaaagtcctgtccttagtaagagctttctctctgtggttaataggcagccctcatcaaccacttcttctgcttccaaggtgagtaaaggcaagtctcctatgttcaaagggttatcggattccagctggcaggtacaaatgttttctgagtttaaatcttttgtcaaacaatataagaaggatcaaaaacgccagcttgcattgaggcctccatgtataaaatggttcgcactatcaagtctactctcttataccattattctgggcattttgtacctccatctactgacatttctctgcctgagtttcatagagattcgtttggagcatcctcttatgcgtctgggagtaatgcacatgtacacgggggagccgtctgtatttggccctgtcaccagtccagcccaatcggatctgcatccttcagctgactcgtctccagtaaccactgcaacacccttggtgtcgactgggccaccttcccagggggagtctggcaaagaacacgatcaagcagctcatgtttaatgaagggggagatgtttgtacttacgtttttttttatatatggctttatgggttgctatgtttataattctaaagacatttttttttggtgcattgattctatgattactggatgttttttttttttagtcattgaacataatctgtcgaaggggagaatgtaagtgttgttattctgtgacaaattattttaatagaatgtctagtcgtgtttggatttttagtctgatatatctgcactcttgcttactattagagtctgtgtgagtctgttatgacttaacggtaggcgttagttagtgcaagttggactgatctattgtgtataaatagttggtttcattctctaaactgattatccattaaatcgatatggttggttaggtcagttttatcgtgagagttagagttgtatcttgcttatcttgttgttgtttttacaggtctgaatgtatagcttgaagatggtgatctatggcaaaaagatcagagcctgaagttactgagttgagactgaaggtagttcagtgcctactttgtcatcaaatctgaagggatttcagattgaagaagtgtcaaagacgaactcagttgctgcacaagggactgtgttcttgcaatcaagattcttgattgttgttggtaattcattactaattgctgtaaagtttgtattaaattccttagagtgaactggaaattgtaatacgaatcttttgagaactagtagatgagattaccctcgtttagggaacccaagcactagtcggctgagatgtgttctcagtgcagatgaagcttgtaa

SEQ ID NO: 128261 - DNA, 1580 bp, Cannabis sativa
cggttatccattggatcggatatctcatccaacatctgatccgatccagttgaatttttaaaatttgcatccgatctgatccaattatgattggatattcgattctattggatcggttggctgggattggatcagataactttctgcacacccctagttgtaagaatggaggcgcggtacgtttagaccactggcgccggcagaggttcggctgtcattagtagaagagagggagaaagagatgagttagggttttctaattagagagaagaaaggaatgaaaaagaaaaaaaaaattgtttcagattttttattttatttttttaaaagaaaaaaaaactgaaaagaaaaaaaattattttttaatttatattttttaattttttaagtgtaccaataaaattgtgccatgtgtataccgtatcaaagtagatgtacacatggacaatccagcatgacacttgacacctaaagtggatggaaacggtaaattgctaacagtttcctaattttaggggttttactgccaaaatttgagttttgagggttaaatgcaagtaaaataaaaatatttgaagttttgccgccatttacccttttaaaaaagcttttatatcaacatggaagcttttgtcatttcccaaaacatgacaaaaaatatgttttaataaaaggcagtataatatcgtataaaacttataaaaatatacagcaagaaagtaagaaatatcgccttacatatttttataataaatggaaaaaagtcaatatatagtgtaattttttctttatttaaggattggcatttttggtatttaattttcaaaaataccttctacaatcttaatcacgcatcacaaatattgtgtatatatgaaaattctaacgtgggaactagaaaggggacatcactttttactccaccagtaagtatgaaaattctaacgtaggaactaggagggggatatcatttttttctctaccagtagaacgtctctatttttagcatttagattataacttaatttttttagagatttttttctataataaactaaaaatgtaacaaaattacatttatgacctaagaaaaggaaaataaacaaaaataaaaactaaaagttgttatttacaaaaataccggccaaaaaaaatggagggatcctttttcttcgtgacccagccgacgaaccccaacaacccattctcaaccattttccttccaaaaccaggaaaattagatataaaaaaaatgtagatcttaaagaaaaaccactcaaatcccgaaaatccaaatacgaaaagggaaaaaaaaatcatccaacctccattgttgtacaacaaaaactcaaaaacaacattcagtcaaaagcccaacgcgttcagaggagaagaatcgaagagaaggagatctgaaaatcattgaaactcacacataattgaatcagagaaagaattgaaagtggttaccaagtttttcggcaaccattataataataataatttagagagctataaggaattaagagagagatttttacgtggttggggggttaatgagccttagtccatgagtctgt

SEQ ID NO: 128262 - DNA, 671 bp, Cannabis sativa
tgaacatatttgaggcatcttaatcaaattcagagtactttcattttttcaacacccagagcaccaggtaccacaggcactcagtgcccagtttgacatattgtaaccctgggcacttccaagcattcatactaaagaactttcttgggaatttttttgtcttcatcaaaaataaggaaacaagtgattttgggggataaacagaccaaccttcaggctagcatggaggcccagtgcccaagttaacatttcatcaatttaggtcatttctaaggagtttttttgagaagtattctaggaatatcctttgttttttaaaagattaagatataagtgttttccagaatcaaatagaaccatttgttgcctgaaactagacccagcgtcgaggttaatatttcgtcaacctgggctgattccaaataatttcctaaaaaagtgtcctgggcattttttccctcaccaaaaataacaaacgtacaagtaaactcagggagaaaacaagaattccaaggggcaaaaaaactaagcccagggcctaggttgacctggtgatgggctgagcgcccaatttgacaatcaacttggtgcgctggcttcgatcattcaaatgcaaattctgctccaagcattctctttggcatggtcaaaaacggggtgggagacctcgt

SEQ ID NO: 128263 - DNA, 3572 bp, Cannabis sativa
ccatatggttacaataaaaatgtatccattaagtagtcaccctttaccatttatttattattaattatatatgaatggcaacaaatcaaacaaatcagaaaacaaaacaaaaacagaaaaaataaacaaaggactcaaaaacattagacgaattccatatgtgggtatatatattgggatattgggtcttttttttttttttgaaaaataataggaaataaagaagtttgacctcacggtcgttacataagatattttctagtatagaagatagctcggccatatcaataatatttttagcaaaagcccactaagacaattatgagctgcaaaattacaaaatttagaaataaataaaaaattacagctaaataaaagattagagagctttttatattgttggatataattatcaatactccaattagaacaatttcctttcagagtattgataaccgtctttaagtcactctcaatcataacaaaacggtgattcatcatgactgccgtctccaaagctaaccgatatgctgcaacttctccaataagcggttcagagaaattaagcatgttggtagccatccacaaaatagctcctgtgtgatccctagctaaagccaccacgcacatggaacaactgtccactctaacgtcataattgattttgatccaatcctctgagggaggggaccaaacaagagacacaacatccatcgtcggagcaaataaacacaactcataatctgtgtaacaagtagagatagaattaatacagtgctgaattaatctgtgtaccttgtcgttgtgggctttccaaatcgtatccaccacaatcgaagcatagagaaataatttgtcagtatccagcccttttgaccttaaattccaaagaaattttacccaatcccaaactcgagcaccagattcaaggacagtcgtaactcctcaaggagatgacctctccaaaggcggaaagtaaaattgcaatagaggaaaagatgctccatcgactcctcaccatccccacaaagaggacaagaaatctcatcaacctgaattctcttagcaaggaggccactcataggaagagcattagaaagtatacaccaccagagtaccttatgatactccaaaattttagtgttccagagtttgttccactaggtgggggcaaccacgcaggcagtgggtcactcaagagcttcgataagataagcagacttagtagtaaataaaccattaggctcttttgtccacatccacatgtcaataacctaaccacagggtgtaccacctttaatgatatccctgatcgtttatgggtctaaaatcgttcgaagctttagcatatcccagtctccgttatctaacaatagttctgcaaccttcgttacttccttggcccagccgaagttggctttgggtaaaaatcttgaccgtgaataacccaaggatcagtcgaaatgttcgtctcttccccatcagatatcagctttcacgcacctttcttaaggatttccttagttttcacaacattcttccagaaataagaatctgagattttttaggattgatcctcattgatgaggacctagccccacctagccagcaaagcttgattcatttttaaagtctttcagaaacctaggccaccccaggacttaggtaggcaaagacgatcccaagctttcaaatagatacctttgttgccctattcacaaccccaccaaaaatctttaaccatacaatcaattttggatgcgagtttcttagaaagcttggtggtctgtataatgtagactggcgtagtaagacccactaatttgatcaaggtcgcacatctagccttagataaagttttcaatttccacccgtggagcttcaaaaccaagttctcaataatgaaattaaaatcaacatcattttgattggacttaaataaggggagtcccaagtagttcatgttgctaatggaaatgttgagcccaacctcttggagaatgcctcttttcataccctcactagtgttattgctgaagaagatcgaggttttgagtttgtttgtatgttggctagaccaatcacaaaatttctccaggcattgccaaaatccctttgcttccccaatagtcgcgctacccacaaggataaggtcatccgcaaagaacagatgggagagtctaaggccatccctactcaaagtggtaattctaatggaactagcctcaagggcattctcgagaatacgcgagaggatatcagcagtccagataaagagatatgggaacagcgagtccccctaccttatgccacactcaggggtcaagttaccgactgaacctccatttaggcaaatgttgaacgaagttgtagaaatgcattggcggacctaattacaaaacttttttgaggccttaaagctacgaaggacgtgatcaatgaattgccagcttaacttgtcataagcttttcattaggtctattttgatagcaagaggccttctttaccttttttaagattaaaggaatgaacgatctcttggaccaacacattcttatcattaatactaaaaccggaaacaaaagtcgtctgagtagggcaaatcagttgggggaggatcggtctaattttatttgcaattatttttgagataatcttgtacaccacattacaaagagaaataggtctgaactgagagactttttttggattgggcaccttaggaataaggattacatttgtcgcattaatgcccctatgcatggtccccgacttgaagaaatccacaactgcctcacaaaagtccatagcaactgagctcgagtaattcttaaagaacatgactgacataccatccggacccggggccttcatacaccccatagagaaaatcatttgtctaattttctcatgccctgagattaattctaggccatatctctcttctgggggagagatggtctaaaatcagatggtcgagacactcaagacgaccctgagctaggttggcaaagatgttccccaggtagtcaaagaattctttgccaatatccttcctactcgtgattcaaaccccatccttattcaagatactctcaaccacatttcacctattacggatggtggctacaatgaaaaagaatttagagcatttatcccctccttaatctaagaaattgggtcttagtaaaatgtagtgatataagattaaataatgggcaattttcatttatatacaagtaaatgtacaatattacaaaaaatgtgcaaagaaacataattacataattttatacaattttatgaatatttacaaataaacatatatgtttacattttaacttgttgattactttcaattgattttctgaagaaaaaaaacgcataaagttaaatatataaatataaaagttaatatttatattttaatatattactaaaataatatgtttactaaaatttaatctaaaattaaaaaaaatatacaaacacatttataaattttatttatattttataaacaatgcataaatttattaaatatttgattagtattattaatgtttataat

SEQ ID NO: 128264 - DNA, 2313 bp, Cannabis sativa
  modified_base (1559)..(1565): a, c, t, g, unknown or other
  modified_base (2277)..(2282): a, c, t, g, unknown or other
gaaggagtcattatattttgctatcatcaatgtaaggttttctaaaatttatatgtaatgatttactttcataaaatatagttttaaaatgatgattgtgatgatttggatgtttttatgttggtttatgtgcttaattgatgattgtatgttcattaagaattttagacaaaaaatatttttagtttcatactgaaaatattttttaaaaaaaaaataagatgaaaaattaataatttaggcttttatggaattcaatttggattaaaattgaattagttatgattttttgaagtttgaaaaaaatattaggctagggttggtgtgaggcgcgcggatacgagtgtagcttggtcgaacacgacttcagacaaagccatgtccgagatttctcagactagggctgtccaaggctactgctgaccgagaaatgggcctcaaggaccctgcgtgcagtcatccttctcgcacattgccccccatccgctcgcgcgagagtatgcaatgcactcccctgtgttgcaccatgttggccatatttcaacttataaaaatcattttttcaatgaaataatattgaaattttggtaaaattttgtgtagaatctaaattttcaaatataaatctaattatcagattaaaattaattttttagttaatttaaattagttttagataatagtaggctttaaatttaaaaaattaattctttagcaaacttgccattatgatttttttaaaatttgattattttattttgatttattaattttaattgtaagatcagatatttgtatattttattaataaaatatgaaatgctcttattttgacattaaaatattaataaaacttaaagataatctagagaaattttaaattgttaaccatatcaaattttcaaaaaaaaatcatttttaaaatatattttattaaattataagatttgaaatataacattagatttatctcaattttcaaattaagatattatgttatattatcttatttgttatttaagtaatttaatttttttttatataaattagatatttgacaattagttggatatttaaattggagatagtttagggtttgttagattttaatattttctaataacctaatttgaattcaagttaagatatttttttaaatatattttattttaaaataaaaatatcttaacctactttccaaatattgttacattgtttattttttgtttaattgcttattcaatttttttaaaataaacctactatttatttgatctaaattgttatgattaacttgttgatagatccaatgatctgattttagtcatagtccaattgtcaatagatcatataaataatttgcaacggttgaattttgtaatttctttcatctgtgataaacctagtattagttagtgatctcggctcagtgagtaacatgatagggcccatccaaatcagtttgtatgaatgagcctatatgtttgcttttggactttgatgcatataggaagcctatttttttttctaaatatataaatggactaggttgctaaaannnnnnntcacctatgataattttatttaggtccaattagtattggacttattcaattaataacaatcatttaatgaaaggttaaatttctctcttttgggccttgtgtgagagttaggagccaatagtaatggatacgacatacttatatatgcttactaaaagcaattttaacttagagttaaaatagtagtggtggtccaagctagaataattactcgaatatttggtataaatttaagtctttcactttaattttagatttaaaaaagaaattttaaatttcagtttccagaatacattggatactatagtataactttcataagtttttaatattcattttctacaatggatctaatctgtatgttaatgtgtggattataagttttgtattctgtgaccacaatccacttgaactattctaagaactctttttttgtaactagacctaagtcatcaaaagaacacaaccacataatagatcaatggcatttgcattttgttcatactggttttgacaagattagtctctgcaaagaaaaaatatgccaatatccacttgaaagtaggatcatttgtattcaaatatatagatgtacgttgaggggtggatatgactcatatgagttatcgttaaattcttataacagtcactctagatataccttatgcaaagaaattttaaatggttgagaaatttcatgaatttttagcannnnnnaaaaccattaaaggtaagtggttaaagatct

SEQ ID NO: 128265 - DNA, 1374 bp, Cannabis sativa
aaaaggatttttcatgtaaaaatttcttaaataaatactctaaatattctccaaacaccctaaaatctcaattttaagcatgtaatatcgaatttcccttcttaatttataaaaattgttgcaaatatttctcttcagtttcatgttgatatttttataacaatttgtctatgtagttaagagtcgctatacctataattgtagtatgagcctacgagagtctatttattagtattaaatatacaaatattatatttaagaattacatatatattcctataatttatcattagagtatttatatatattttagattaacgtcaagttaatgatatattaacaaattaattaaagaaatgagtaaaattataagtttgaaaggagatattattttatatgatttttatagttcataatcaattcttgcaataagaaaactataggatacaaatcttttcaaaaggcatagttcgagttacaaattttattaggaaattctatcatgtaccgatgtactttttttgtgttttgaatataaaaatagttttaattttattttttttaatgacaatataaatcataattatttaaaatattttgtaaaatttttaaaaaaattcagaataatttaatgcattaaaaataaaattctaacgatctgtagcactcgtgcttattttattttatacatgtgtgaaatatacgctttgaaccgtacttgctatattataaattattctaaatttttcaaaacttttaagaatgtcttaaataattataacgtcgattataaataaatagactaagaaattctttctggtgccaaaacaaacaggtgtggtgcatcactcttaacggtccacaataaaattttgaaaaatttacatgatagactaaaaattcaaagaaaaaattacaaaaatacgtcagcacggaaaaatatttatttttacactttgaacttttttatttacaaaaatatctcttcagtaaaataataatcatttttttttgttgttttatagtatatttatagttatattatagttgtcatgatgttgttttatagttgtactatagttgttgtgaggttaatatctcatattttttagttatttttttattttttgctgagaaaagtatttttttgtatgtaaatttaaaactttacaagcatatttttgtaaataaaagttttggattgtaaaattgtaaataaaattttaaaaaaaaattataatttttatgggtttttatacttttttgtgaaaaaataagacttttttttatgaaaaaattgaaaatatatatatatatcttttctatataaagtgtgcctatataactgaatttcttggtttatgagaaattcat

SEQ ID NO: 128266 - DNA, 902 bp, Cannabis sativa
ttataccgtcgattataaaatgacatataaattactaaaatatttttttttcatctattccgtcggttataaaatgaagcataaatatagataaagaaaaattataaattttcatgcaattttctctacctatatttttaaattttaaaataattttatataatagtaaatacagattacaaaaaaagttaaaataacacttataaaatttgtataaaattagtaattagttatattatcgataacaataaaactaactattaactaattatataataccaaaattattaatagctagaaacgatcctaaaatttatatttcatgtattataaaaattaattttaaactaattacataaattagtagcaataatcataaaacttgttacgcatgtatcataaccaaaaagtggtaagtttgtccccaatcaataattaaaggtttcacaaatttggcacactcatcccgtattccattaatctcctcgttactgtagggagcgtctgacttaaactgtgaaacaaaagataaaaaaacattaatcaaacaaattcttcgaaagataccaccacaattgaacacctaaacaaaattaccaccaaatgattatatgctatttataatcaacaaccttggtggtcatcttaactactttcatatcaagtcaatatagttcgtttaattgatgattattcttaatgatattttatgtgtactcaattagaaaatgtgtaatataatgatattttagttaattaggatatggatgtatatatttacaaagccgccattgataaaaaaaagggtaatttacaaaaatacttgattttgacataatctttacaaaaatactgtcacacggcaaaaataacttttatactgtcgtgggacattttttttt

SEQ ID NO: 128267 - DNA, 811 bp, Cannabis sativa
atgcaatataaaatgatttttaatcttttattaattagtaaatctgactatattgaaatgtgttttatttagggcataaaatcacaacaccttggccatttggtttcgtgctttaagagtccccaccatattcacagcttatgaggagcggtgcttatagtgaattgtatgggaacctagttacatgcttgtaaagtcaggaaagatgagttttttctgaacgaacatgtgtttacaagtttggattaaacttgattctgttcttatggtaggggcctctctccctgacgaaggaagcaaaaagatcttgtgctacttcaagtttgaacgcctccctctagtatgtttcaaatgtggtttgtgttgggcatgaggaaaaacttaatttgctctgttcgaataagaatgatatgccttgacgatggtcactgtgctctagttgtatggcccttggttccagtgtggtcccacatcttagggttaatgccctgaaaagtttataaagatatttttaattattaataagagttgaacattttgatatatgcatgaatgttaaattataaatatttaatattaaataatttatatataaatatcgagaaaaaaaaaatattcatacataaggttgtaacttgtattataaagagaattaaaaatcacttagtcacaaataaaacagtcagcaacatattaaaatttatgaatctttaatcaataattgatattttcatttatcgctatatattttcatttattctcatatatggaacacttcttaatgggtaatacccattgatgggaactaaaa

SEQ ID NO: 128268 - DNA, 1612 bp, Cannabis sativa
aagaaaataatgacctagaccaactagaatttgtcacgtggcaaacacttaacaactagatatttacaaaagttcaagaattataatttaagtattattatcattaaaaattaaatttaagtatttacttataactaaaaattaaacttatatatctatgccaaaaattattcttaataatattgattttgcattttcttattatgttgataaacatgtttttttgaacatggtataagaaagattgtgatgtgttgcgttttaaacatgtacaatatatataagttaaataaatatatattttcacactaaatcaattttattattttttgtttaaagcaagtttatcaaatcaaattggtctattagagcactcacaatgaggtataatagctaaaaggtaaaataaaatagctaagagttttaaattgagctccatcaaatgatttaaactcttagctattatacatatttctaaactccaagaaactcttctctacatatagctcaatgaatagtgaagaggtaaacatattttatattttttctttttattttttgtttctttaattaattttttattcttctttttattcatttgtgtattgttttttttttatttttattaataaaatatatgtgaagatataatatttaaatgatatagagaaaaatataaaaaagttgatgtatcgtgtaatgtatatgtgtgaggtaaaatagaaaaagggaagttttagtgaggtattttaaaggataaaatagagaagttattaggagtgctcttagttatggtgcctttggcacctccatttcataaacttaaaaaaaattagaaaaaaaaattaatctagctagtagttgatattaaaatgcagacaatatatattacttttaatatagatttattttcaatgtcataccaattagacataaaatgtaatttttaaaaaatataacatatgaattcaatatatataatatatagaaaaatttgtataattgaacaaaaatatgtaaacatagaaaaaaatttatttttatgtttcaaaattttttatttataaaaatacttcttctaaaaataataaactcaatttttgattgttttatagcttatttatagttgtattataattgtcattaagttgtttttttaattattttataatttatttatagttgtcgtgatattaatttcccgttgttttttaattgtttttttttactttttgttgaaaaaaatgtatttttataattttaaaactacacaaacatacttttgtaaataattttttacatatacacattcacattttatatttttagttgtaattaagttacacgttagttggctcgcaacagatataactgttgcattacaatctcaacaacaacccacgatccatgctttattggattgaaaccttcatctgatgcaaccttaggtcaaccacccagcaacctttgtttgatgtaaaattttcggtcaaccacccagcaatttttgtctaattgaaaccttcgtttgatgcaaccttcggtcaaccacccatcaactttcgtctcattgtgtaagtgatagtgtaagacacgaaatgctttcttatac

SEQ ID NO: 128269 - DNA, 687 bp, Cannabis sativa
tttcaaataacatagaaaaaaactagcataaatttagtatacgtgcctcgcacgtagtttttttctagttttttaaaactagcataaataggatcttaaatttaatttcaacaatttattttaatataatcaacttgaagataatttatagtagaaatgaatataaagaacgtaactagttttattataacatctttagatcgagttatcattaagttttattttgacaaaaaaatcatttgagaatactatttagtactattttaaaaaatacaaggttcggtttatcatttaataaaacagataatctaatcaataatttttacaaaatatatggtttaaatagtatttaccctttttttacaacacctccatgcaaatcacagtaagaggtctaggactaagaaaacttcattaatcaaatggcatcacccattataatgttcttaatacacaaaagataatcaaaccaccaaacaatactactgttctcggaaaaaaaaaataaacaacacctaatattatgagtattcaagtaaacaagaacactctttgcagaataacctaaaattatgaatactcaaatataaataatgagtatacaaataaaaacaacaaaaaatgtaaagagtatgagtgtttaacaaaatttacaaaccgtccaaatcaaaccgaataaaccgacaa

SEQ ID NO: 128270 - DNA, 1881 bp, Cannabis sativa
ataattatgaactaaaatagtagaaaagcccccacagaattaaataaatctagtaatagtagttataatataagtataaatatttttttaatgataaataaacccccataaggtaaaaaatttgggtccatcattgattgtcaacaagggtgataggctcaattttgatgcccttggaattattattttctccccgagtttacttgtatcttcattattttttatgacagaaaaatgcctggaatatttttttagaaagatgattggaaacaacccaggttgacaaaatatcaacctgggcactaggtccaatttcaggctatcaaatgtttccatttgattcccgaaaatacttgtatcttaatccttgacaaaaatagagaatatgccagaagactttttggaaaaactcatcagaattggcccaggttgacaaaaatgtcaacttgggcattaggccctcattttggcctccaagtgggtctatttcttccctgaaagcacctgtttccccatttcttatgaagatgaagaaaatgctcgagagggattttctgtttgatgcttggaagtgttcgaggttgacaatgtgtcaacttgaacgttgggtgcctggggcacctggtgctcaaaaacgtaagttctccgaatctgattctgatgcatcacatatgttcgtgaaatgtctagttcatgtccctttacaaagtttgacccattttcactaagacggtcccctaaatggaaacccaaattgggttgtcaacttgggtgctggggaaaccctaggcacccaggatgatttaagtggtgatgtctcatgtattttcagcttccaggcattggagttggatgtttcatgtcttcatggtacataatattgaaagatagtgagttggtgttagggtttatgccctaaaaagtctataaagacaatactgattattaataaagagttgaacaatttgatatccacttgaatgttaaattattaatatttattactgaataatttatatataaatattagaaaataccttattcatatatgagtgtgtggcttgtagctgtacagagaactaagaccacttagctatgaataaatcaatcagtaacatattaaagttatggaatatttaatcaatagttgctagtatggttcactaatgctcattcttcggtgcaagtaatctcagttcgaattacggatgtagtatgacatcaaagtgaaggtgttctatattatagagattatatatgacaatgatcgatatgaatgaagttgtctttatctaacatgttttttaccataaagatctaatttatatcataacgatgatcaatagtagattgacctaaatcttgagtaatcatgaactcctgttcatgttattagcttttttgatttactcattaaagtttttgagagaagatgattcttacaacttctgttttgggaagctaatatatattgtggatggctggaaacataatttacaattatggaatcctaattaaatatgttattcagtctatccctacttactctatgaatctctttaagcttcttatgtcttttattcaagaaatccataaactttgtgcttactttttgtggggtgggaacttgaataaaaagaaacgaaattagtgtacataggaaaagttgtgttggcatatgatggtggtttgagatttagggatatggccttgtttaactaggcccttttggctaaacaaactacgagattgtatacaacttctgatactctggttgctagattcatgaaggtcatctgttatcctaattctgttagacatttatttgtatagactaaaacatacatgattatgaataaagtgcggaattaataaatcata

SEQ ID NO: 128271 - DNA, 926 bp, Cannabis sativa
attgttacccttacaaaaatatattttttttgtttgaaatgaaaacgttaattgataaaataaaaactagacctctcggtcattacaaaggatagagctcgggatagccgagggttccacaaaatctgtgatagtttcggcatacgcccatctagcgacattgtgagccgcaaagttacaatttctagagataaaagaaaaattacaggataaaaacttcttagagaggtgattacaatcattcacgtaattaataatgttccaattgggttggacacctttaattgcattaataaccacttctgaatcactctcaataatgataaaatcatgtcccctagtagcagcagtttccaaagcaagctggcacgccgccgcctcaccaatcgaaggatctgtgaagttgaggttattggccataccccacaaaaccgaccctgaatgatctctagccaaggcaacgatgcacatgttctcacgaccaaccttaacatcacagttaattttgatccagtcttcaggaagggtcgaccagctcggaggaaacacatctactgtcggggagagcaagcaggcagcataatctgtgaaacaattcgaaatagagtcaatagcagtattaatattacacgaaacatagttatgaactttttcatttcgggttctccatataatatccacaacgatcgaggcataaagaaatagcttgtccgtgtccacccctctcgtcttcaggttccagatgaatgtgacccagtcccagaccccgcccccagagtcagggatcggaaagattccccacggggaggctctccacaaatggtacgcaaagtcacagtagaggaacaagtgatccatggactcctcagctaacccacacaggggacaggaaggtgttgggttttatgccataaataaaactcatt

SEQ ID NO: 128272 - DNA, 1066 bp, Cannabis sativa
aatctcagcaaacaagatttttttgtcccttcctgaatatgatggtagacccaaatagcgctcatgacacggttgtattggcattaacaaaatctgatgtagactcgtttggattgaagggagagtgtttggggagaaagttaatacagacttatccacattcagcttttgactcgaagctcggcaatataaatcaatggataatttaatggcagttgcagaacgttgattagcacggcatagaaccaaactatcgtccgcgaagaacaagtgagaaacacttggagcagaacgtgaaacccgtaaaccttgtaaattaccaatagcctcctcatgttggaaaagtcttgatacgccttccgcacatataatgaaaagataaggggataagggatccccttgtctaataccccagcttggatgaacagtcccttgaactgagccatttataagaaacgagtaagaggcactttgaatacatcgctgaacaaggtcaaccacagttggatgaaaacccaaggcaagcatcatgtgttgaataaaatgccattcaaccacagtaaaattgaattattatacaaattgaattttttatatctaaattgatttattaataaaaataatatttatttattttttaaattacttaattacttttaaattttactttcttttttaatttatttaatcattcaacattaatttttttctttctttttaacatctaaattaatttttaagaattatcaaataaatatgttcaatctttctcatttttatttagagggagaagggtaggatttgattatcaaagtttggggacaaaattactaatttatataaacacatcagtatttaaactacacagtgggagggaacaaaccagaaaaactaaatttttgtaaatatcaataagtcgtatattttaagagacacgatatgatagtatcataaatttaggagtataaatgctaatcttcaaagaatttacatcattaccggctagctcaagtggccatagagggtgcgtgtgtattggaggtcctgagttcgagtcccaagttat

SEQ ID NO: 128273 - DNA, 647 bp, Cannabis sativa
acacgcctcctcttagtatcataaacaactaacccctctttttgaaatttaaaattatttcctaatataggctcattaacatcaatcccactttttcctccttgatttttgaccagcccataaccacctgtaactcctaaaaaaccagagtcaagtaagtttctcaatattcctaaaaaaattatataataatcttaacagcgtaataactttttattttaaataaatcttgaaaatagtgaaaatgagccactatttataaagtaatcggtgaataaatagtataattacaaatttttaacaaatactgattattctctcaatttcttgattttaggcaaccataaagatctgatcttttgggatttgggagctgatttcgtcaatcattgatctagaataagtcaaagatgttggtcagatggttcgaccagtatcttaccttgcgaaactaaagtgataaatctcaccaatccatgtcaattgtatgcctctggtcggatggtctacactgtcgagcaatgagtgggaaagatgagtcagaattgtactagttgatttaacaattctaacatagtatgttgcacttcctgttttccagtcattccatcctgttgggttttgtgccctaaataaaaccctttaca

SEQ ID NO: 128274 - DNA, 1344 bp, Cannabis sativa
gtcttgtcttttgacatgtgtgtgtgagatgtgtgttttaagtttgtgattgtatgatctttgctctaagttttcctttggacttctgttgtacgatctgatggcgtctagcagtaagcaggttaatgatctgaacaaccaatatgacaacatacaactggatgaagaggaggagggtgaactgttatgtgatattcaagaggatattggtcaacctattgacgatcggtggtgccttgttggcaagattctgactacgagaatcatagattttgatgctatgcagaacactttagcttctttatggcagcctggcagaggaatgttcgtcaaagagttggaacaaaacctatttattttccaattctaccatgaaatcgacattgaaagagtcattgaggggagtctttggactttcaatagattccaattaatctttgaacgtctgaaacaaggtgaaaatccaagaagtgttcgtctacatcatcttgatatgtggattcaactacataatctgaaaacagggtttatgacagaaacaaatgccaaaaatgtaggaaactacattggtacttttatcaagtcggaccctaagaacttcatgggcatatggagagattatctcagaatcagagtaaaagttaatatagaacaaccactgaaaaggaggatcaagcttaagaagactaatggagattggctgtggtgtaatttcaaatatgaattcgtcccaaccttttgtttcatatgcggtattattggtcactctgaaaggttttgtgatagactattcgaaacacctgttgatcagatagaaaagccttatggattatggatgaaggctgaaacacgaagaggaaagaagaagattggagcttactggttgcgtaccggaacagatgctgacaaacatttctcaggcgaattcaatacaacaaatcaatcagcccgtgattatgggaatcatactagcgtggatcgtggtcatgatgaaggacatatctatatgattaatgctggagagaatcatggagtcaatgataataaagttgattttgttcactccaatcaacctatatcagttgacaaagatgaacgaatgccagctctcacattaattgtgactgatacaaaaagaagaaggacagatatagaagggattgagaagtcagatgacgtggaggaggatatgagccttgacccaattgggctgtcaaaaaatgggtcgttggtgggtcctggaatccaggcccacctaggatcatgagtatccttagttggaattgccgtgggcttgggaacccacgggctttacaattccttaaggatcttgtaatccaaaag

SEQ ID NO: 128275 - DNA, 519 bp, Cannabis sativa
  modified_base (484)..(494): a, c, t, g, unknown or other
tcagaactgactctaaacatgcatccatcgtttgtgtgacattttattttacatgtgcatgcaaatttcggtaaccatgttacgtaccatgaaggtaaaactaagaaaataatctcgagtatgtgattaaattttaattttttttcttttatattttttcggattttttttccttacagaccgttgtgttcacacattgttttaaaaataattattgttttcacattgcaaaaatatagtataacattgcgataatatgaaattaacatgtaaataacacaaaatcataaaaatataaataaaaaaaagtttgtaaaaataaaaaagagtttgtaaaaataaaaaaaaggggaaaaaaaattatttttaagtatattgggtaaatttaaaaaaaaaaaaaaaaaaaactctactggatagatgctttttattggagaatattgtcccacatggattaattgtgaaagtattgagccatatatannnnnnnnnnntactccactcattgccaattggttt

SEQ ID NO: 128276 - DNA, 1449 bp, Cannabis sativa
ctaaactcacaactacaagttttgctattgataattaacatgacaatatcctaattattgaggaaataacaaactaaggctctggaaataacacaaatcgacaaatcagattttttgggaatcctacctgtgatctagttaactggttttataggtcctgtagaaccaggtaatcggtttgtaccagaaaaccccaaagaatccacaacttgcccaattagtgtccaaactatatcaaaccttccagatcacctgtaccaacttcaaacaacattttccaagcaataacaacaagaaaaatactcaaaacccaaaaataccattaatgactcaagttttgagttttcaaactcaaacttgctcattctccactcaaatcatcaaaactagttacaattaatcaatttcaacttaaatagactcaaaaagtgaaccataatcaattctaaccctaacaaccattaactctcaaaattgcatgatcaaacaaaacataaagcttgaataatcaaataactaagttctagggttacctttagctagaacttcctcaatcttgatgaattcaaagaaattagatgaaaagcttctaggtttctcttggatcgcttcagcagaaagagagaaagagaaggtttaagactttggtttttgtttgtctaaatgatttttgtcttttcttaattgattataagaaataatactaaggattttaggctaaaataaaaaggattaaccagctgtcaatcccaaatttagccacctaatccaatggacaaaattcatgaaatgcccctttcttccattttaagtaacctttagcttaggggaaaaatggtccaaaaccataatccccgcctaaattcggcattctaaatatctctatctttatcctgttaagacataggttctaaacttacccatgtgactcttgagcaaaaatcataacaattgcataattcatatttagcataactctaatgcccatttctaaaagtgagacccacaacaaatataaaatcatatataattataaaatatcaatatttaatgctaattgcctttactaatccataatctaacatgcggtatccctccattaaaaggatttcgtcatcgaaatctaacctgagtaactctgtatattatcccctcataccggactctagctcccaggtggcttcttccacctgactgttcttccatagtactttgaccaaagatatggtcttttttcgaagaaccttttctttcctattgaggattcgaagtggctgttcctcataggataagtgtaactgtagctctagggcctcgtaactcaagacatgagtcgggtttaaaatatatttcttcagcatcaaaatatgaaatacattatgaacaaccgataacactggtggtaaggctagtcgatacgctacttgctcgatcttctcgactatttca

SEQ ID NO: 128277 - DNA, 826 bp, Cannabis sativa
attaggaattatggtaggaaaggggctaagcctaattgcatgatcaagcttgatcttcaaaaggcttatgacacaatggattgggaattcctagaagaaatgttgagtcatttgaatttcccggagaaatttataagattaatctccacatgtattagaactcctaaattctccttgatgtttaatggttctatgcatggtttttttgaagcaagaaggggattgagacaaggtgatcctatgtctcctttactatttgttctagggatggagtatcttagtaggattatgagtaaaattgggaagaaggaggattttggttttcatgaaaggtgtgctgaaatgcaacgcaatcatctaagttttgcggatgatgtgcttctattttgtagaggggactttaaaagcatttatctcttgatgcaagggctgaaactattttctatgtcttcgggtttaacaccaaatagtgcaaaatctgcaatatacttcagtggaatggatgaaaaagaaattaaacgggttttggatatgactggttttactaggcaggaggagcctttcaattaccttggggtacctatttgtgcaaggaaaatagcagcaggggattgcatcagccttgctcagaaaatgacaaagagaattcgagtttggtcaaccagaaacttgtcttttgtgggcagactagtattggttaattcagttctcctcacaatacacatgtattggagtcaaattatgatcctccctaagaaagtgattaaagagatagaaggagtgtgcagaagttttttatggacaggaaagagtgtaatgatagggg

SEQ ID NO: 128278 - DNA, 2612 bp, Cannabis sativa
  modified_base (217)..(225): a, c, t, g, unknown or other
  modified_base (2560)..(2566): a, c, t, g, unknown or other
tatttatgttgttaaatcaacatacttgtgagaagatctaagttcctggtaaaataacttccaacagtcaatacccggtatcacaagggggatgaacctctataaaaaatttgtgtgtctattccttttcattcttgtttgtgcaaacacatggcaagcatcagatctatacaacatggctatcggttgatcactttttgaggtcaacagtttggtnnnnnnnnngagagcgtggatatcgtatctgatgaagcgccatggtgaacataaaaagaactcctatcgcaccatcttcatcttcgagtctccctcaagacccacaaactgtagatctaggtactccggtcccagtcacgacttgaatccccataaacacatcaaatgtggtgaatcttgtcgccacaataggtgccacaagtttggccatggccacaatagttggccaaactgatacaagcaccccaattgatccaagtgttaggcccctgcctccaagagtagacccaccattgtagcctgataccaaaggaaggacccgtggcgatagcttttgaaacaacaactagatctcatctccggttccatgctggagagataagcccaggagttggcgagcctataatttgcgagccccatctggacctaggaaaagactttgagttggccagacttagagaagttgtaggccatgtaggcctaactgatgaatcacgcactactgattacgatgttttctctcaatagagatgaaaattcctatgatggatggatgaccaggagtatatccttcaatttgaccaagcagagttagatcactgcaactgagaggccaacgatctaataagatggttcaactgaagaaccaatagaagaggccaggatctcctcagagatccacttcaaggaagacttctgccaagatccttaggaactaggacagaccttcccttgctagagggaggatagacctttcctcaaatgtcaaattacaaaagtagccagatcccaacaaccagcgacattgggggctggccaaggatctctggctcaacaacacccccaatgtgtagccactggctggccaaccatgagtaggagtacccttggctggccagagtacaacattggtggaccctacattgcatgtaagactaaaaaatctaaggagcgctatgctcagacactccatcatgagcctaaaagcaatatcttagctattgaagatcggagctctaagcaacaaaagcctgaatagcccacaatatccttcacaaaagaagatgctgctcaggtcagtttcccggacaatgaccccatggtcattactgtgaaaattgagagcatgatcgtggcaagatgtaaggtggatgacggagcctcttccaacattcttttcaaatcaacatacaaaaagatggggctccaactcactgacttggagccttgcaactaagtgatgtatgtcttctttggccaaggcattgcacctgttgggtatattagattacccctcgcaaatggagaaaatataaccaccagaacattgatggcgcagtttgttgtgatcgacgttcccttggatttcaatgccatgataggccgatcggccctcaacgacttgaagccactaacatctatctaccacctatgcctaaaatttccaacaaggcatggggtgtcatgtgtgaggggagactaacagtctgctcgtcactattacagcttggccctgtctaagggcaaaaaagagaacaagcccagtaaggggcaatgaagtctagctgaagtctagcattggacctgtagaagagttggaagaaattgaagttaatcccagttttctaacaagaagactgcagattgaaaaaggcttggctctagaaataaaataaatttttgtagaatttcagagggcaaacctggaacttttcacatggtcacatggagacatggtcagaatcgacccctttgtgatgacccatgaactcaacattgatccaagaatctgtcctgtttagcaaaaaacgcagttactggaaaggagtaggcccaaccgctcaaagatgaggtcgaaaagctgagagctaatgacttcataacaaaggcattctacccttagtgggtatccaacccagtaccggtgcctaaacccaacaagaagttaagagtattcattgacttcatcaacctaaaaagacatctttccactccccagaatcaaccatcttttagatgccataattggcatgaaataatgagtttcatggacacgtatttaggttacaatcagataaagttgcatccaccaaattaggatcacactagcttcattacagacacaggcctatactgctacaaagtcatgccctttgggctaaaaaatgtaggggccacatatcaaaggctggtgaacatgatgttcacagatctcatcggccgcaacatggaggtgtatgtggacgacatgcttgtcaatgtagtgcttaaaaatcctttacaattacaaaatgaagttcaaccccctcaaatgctcttcttattggaattattttaccaggannnnnnntctactcacaagtatgttgataaacaacctaaatattaacttctaa

SEQ ID NO: 128279 - DNA, 847 bp, Cannabis sativa
ggtacaatatatataaaaagaggtatgttttaaataaatataaaattagaggtaaatttaattaattgattaataaaaggggtatttttcaacttacccctaggtataagcgggttaggcttactcttagggcccactcattttaggagcccaaataaaaaaaaattactttttaaaaaatatacatatttttttaataattttttaaaatatcatttatctttataataaatgtctaaattttttatacatatattatgcgtaaacttttttaaatattattgtattgaacttgtctttcttacttttaatgaaatagtattttctcattttacatttcaaaaattcaatcaatcaatttttattctattttattttcttaggcctagctaaatacatctttaatggtaaacattctagtaattagaaaataggtaggttatgatattttactttttttttttttgtaaaatttattttcgtaccccaatagtactcattttgcacactataacttaaaatacatatttattaatacatttttattttaaaatcatacatattttactattctttattttgaaatcgtacatatatatcctaagctcaaatttaattaataaagttttatcaatataatcaaactgcttttattaattatatgagtttgacaaataaatttaattatttaattacaaataattgatggtagttttgtaaaattgataaaaatttatgtatcaatttttagtgtacacaattaaaaaaaaaaaagattatttcacaaaaacataaaagcaacaaaataattacaaaaatacgatttcacagaattttaaaaaatttt

SEQ ID NO: 128280 - DNA, 560 bp, Cannabis sativa
caggtgagtgcacacctgatctacttatgatgactcaaagactagatcgtgaaaagtaatatgcacaagatagctctcatcaataaaaccaaatataggcatcaagaatagcaaaattacactagctataatttgataaaattcaaaaatcataacatgcatagataattgtagaaaaatatatttagtactcagtgcctttaagggagtctaaaaaaatatacaaattaaatttttaatttttcaaacattttataaatcaataaaattagaatatgtcaaaagttgctattcatcactttaaaatcaattctaataattaagttgagtccatacctctctcaagtcattaaactttgttcaaaaaacaatcttaagctctcaagtccttatcgagctctaattgtttagtcaaaccctagatatcactttcgtacctatgatcatcaaatggctaaattattgggtttcgtgccctaaataaaaccatttcaacataatcagatttactaattaataaagattagaattcattctatgcagcatggttcacatgattt

SEQ ID NO: 128281 - DNA, 999 bp, Cannabis sativa
ggtatttttgacaagtgttgctcaacatttgttgtatttgtgataatttaattatttagtgactgcaccgcagcgcactatttttttgcggtgcggtttctgcagttttttagtatcacggtggaggtgcgatttgaaaaattgaaaaaactgcatgtgcatgttaatttgaaaaaacggtcaaaaatcacaccactcgcaccgcaaatactcctattttataggtagagagtgagcactccctaaacttggtatttctttaaaatagagaaaagactacaagtttatcaagacaagaaatattctcttttacataaatttttcgagcaagcaatggagtaacattattcattgttataaatttattttattaatgtttatagttttatattactttttatgtataggtatgtgtgtacatgttaatattgtatatttaaaataaataaaatatattaaaagatagaacaaaaaacaatgaatagataattgatagatagtgtgatttaaaagtttatagtaaaataaactaagtagaatttagtaaaggatagagaagaaaactatgcaccaaacaaaactagaataccagattttaaaataaaaaatatctacaggagattagatcatcattttaattctctccatagataacgacagcacacaaatatttaactagaaaaaagctgaactcttttgtatattttttcttctttgattccaataacatggctgctagaaactttccaatcataaaatttattccacgacattgccaacttgttcaaagattttaatatctacaatatcacatgggaaaataaacagataaatctacgaatctttttctttttcatttgatgatttgattgataattgatatgtgcaacaattaaattaactaataaaatgccatcatctgtcccaacacaaatcattaaaacaaaaatggggcaggaggctttttgtctcaaccatttttttttccttttcattttt

SEQ ID NO: 128282 - DNA, 750 bp, Cannabis sativa
  modified_base (74)..(75): a, c, t, g, unknown or other
aacacgaacagatacaaaaaaatataaccagttttgtcataaaatatctagatcagattattattaagttttannttgacaaaaaatcagtttaaggttctatttgtaaaatttcagaaaatacagggtgttttttgtcatttaacaaaatagaagaccaattggtaacttttacaaaacatagagtccaaaatagtatttactctctttcacatatcacatcactctctctctctctcttttgtcctacactctccttactcttagagcaactccaacgctttattagaaggagtagcccaaaaaacttttgtcagtagcatagttattacaatttacatcgagtagctctgcattggagtaaacctaaatgaccactccaactgttgtgtaggagcaacggttctattcaatttttttttattaatcaaagtaaaattaatttcaaatatagggcaacagttacaattttaaaatttatttcaaataatttaattaataataaaaaaatcaactattttatctcctataagtactcatcatttttcgctcttcttctacaaaatttttacgatttcttacaaaatttattatcacaaattttctatttttttcttcttacaaatgtcatatcatttttcaaaccacttttctacattatcttatattcataaatggattccacataccaactctcaaaattcaatcattcaatcttctcaatccaatctttcacaaaaaaaaaaaaaa

SEQ ID NO: 128283 - DNA, 3244 bp, Cannabis sativa
  modified_base (265)..(271): a, c, t, g, unknown or other
cattcaaatgatgttgattgttgaagttcatctagtcaccaagaactgcgattgtcaaatggagcgttatgtcttcaatcgcagaaacgacgagacttatattatcaacttcggaaagacatgggaaaagcttcagctcgctgccagggttattgttgctatgttcccatcgagaagtcccaacacgatacactttgcgacgtatttaatccacatacgccttgacccaataaaagcagaccaatcacagctgtgtgattttcannnnnnnaccgcatttattttacgtgggacgtaatcaaatcacacaatttcaggggatattgttgtaggatatcaatctgatttgtagttaactgtcctcttatgtaactataaataggagcaggatacactgaaaaacggacggaaaatactttagagaaaaggccctaattttgtaattgaaatctaataagatagactcgtggactaggcaaaattttaactgcaaaaccacgtaaaaaagcactgtgttctttctatttcttttattactattatttctgcgcaattctatcacaaaataggctttcatttagttaacgaaaatctgctttaacaatcataatcgtcaaacaaatcaagcataaataaaaatttattaataacacaaatataattacaatatatagtgtactagtttaggcttacaaaattttacactcaattctaattttatcatcatcaacaatgaagcaaaaaagtgtttacaaaatgaaatatactctttaaaaattctaagatctcaacttcaaatatcgtataatattgctccaaagaaatacttaacaatgtacctgcacattctaaaaaaaaaacattaatgaataagcacgttaaacttataaagaataacctaccatattacaaacacatcaacataagaaaattaaagtttttaactattccaatatcaaataaattttgtaaaattaaatttaaaattaaaaattacctaaactatactaaaattatgataaactatactaaactttttttttttctaaactattaaacttacactaaaaaaatttatttaactaaactacattacatatatattttttctagtaacaaattaaacattaacattaaaattaaaatatatgctacaaaaaaatttatgaatcttttttaaatcaaaattttaattcaaaatatactaaggatattttctaaaattttttagctatacacactacaatatcactaaaaaataaaataaatttcacacaaaaaaaaaaaaatcaaaatatacatagcttatattttcaaaaatataaacaatacctaattttatcaaaataaaattataatacttagaattcttaattatgcattcaaatcaaaatattcacaaatatataaacttgaattcttaaaaaaaaaaatacttgtgcatttttaccccaatctattatttttcctctaatatttatgaatttttagtaaaatttattctaattctatcgaaatttcggcagtataacaattataattggacgtttctgaaaatttcaaacatgcaaaaaataaaaaacaaaacgtacacaaaacaatacaaaacaaactaactaacattaagaatacaaaaattatctacccatctaaccgcagtacaattaatcgcagaacctacttcacgacagatgattatataagatattcaaactccactaaataaagaatttaaagttgtagtgattatatctttttctaataaagttagctacttttacgctcttctatcaacactaagaactcgatacctaaaaaataataaaatattaatattgattaaattttaaattttaaaactactatcgacttatatatataaatatgtttgaactaaaaatatatttatatatatatatatattaccgataataaagagcctctctcgaaagactgccaaaattggaggaggagctcagtgaagtttggcaacgacaaaaaaaatcagtaatatatataaaagtttcaataacaatttaaataaaaataaataatctaaacaaaaaaaaattccataatgatttaataaaaacgtaaaggaaaatctaactaatagctatataattaataaaaactaatttttttaattaatacttaaagaattaattgaatctaaactaaatattttttattacctaacaacaaataatctataatttttttattacataacaacaaataatctaaactaaatattttttaaaaaacttaaatcaaaaactaaataattaatctaaaccaaatatttttttaatactaaatataaaaataattaaacaattcatttaactatctataaattaaataaataggtataaatatataaagtaaatatttttttgatatgaaaactaatacctaaaaagttaatccaaaccaaataatacttttattacctaaaattaatatctaatcaattaatcaaaaccaaatatttttttataatacctaaatctataactaaataattgaactaaactaaatatttttattaatacctaaatttaaaataaattaaataattaatcaaaattaaatttaaaaatatatattaaataaataagtatatatgtatatgtatatataagtgtatataaattatttttaataaataattaaataatacctaaaggaggttgtgggcgtggcaatggctggtagtggagcgaacagatcaagagaagagagatagaaagtatcgccagtggtggagctcgaatggaagtttcttggtagttttcctttgtcggtggtggatgccgcttcaaatggggtttctcgatggcggatgggcgccttctgtggtggatatggctttcgtctttggggcttcaaagggagattaagagagggacgagagagggagatcgtgggttggtttcgtggagtatcgacatcgcaagagagagagagagagagagagagagaagagactgaatgagagcaaggagactggatgagaaaatcaaagaccctagggtttggttttattaatagtcggttatatccgacggtttaaaaccgttaggtatagccgactattaaaaagtcgcgataaatccataaaactgtcgattgccctcctgagtgttctaaattgtcgagaatacccaatttttcctaacaattttttttttttgaaaaggatttttcctaagagtttaaaacagtcacttaatattgt

SEQ ID NO: 128284 - DNA, 1702 bp, Cannabis sativa
gtagggggataacgggtcaccctgtcgaatgccgcaggaaggtatgattttgcctaccggaccaccattaagaaagatgttgagggaggtggtggatatgcactgagagacccaaccacaaaacttttgagggaacccgaaacaaccaagaacatgctctataaaggtccaactcagcctatcataggctttaacaaggtctatcttgatcgcaaagaacccctcttttccttgcttccgattgaaggagtggataatctcttgtaccaaaacattattatcctgaatactccttccaggaacgaatgcagcttgagtaggacagagaagagacgggaggataggcataattctatttgcaataattttagaaatgaccttgtacatcacattgcatagagaaatgggcctaaactgatttggtctcttcgggtttcgcacttttggtatcagcaccacattcgtagaattcacacccttatgcattcttcctttcacaaagaaatcagcgactgcatcacagaaatcatctccaactgactcccagtaatgtttaaagaataaaacggacattccatcaagtccttgggctttatgattactcatggcgaacagagtatttcttatttcttcgcgagaagggcacccaacaaccttgtcctggttcgcaagagaaatcctttccctgaataaatgaccacagtctatctgccggtcataattagatcctgagaaaacatctttgaaaaaatccaagaattcctgaccaatcaattcccgctcattaatccagacattatgtttattcaaaatgcactcaatagcatttctcctccctctaatagctgcagagagaaagaaattttttgaccatttatcaccatccttaagccacgcaattctcgccctttgtttccggtaaaccgctttcctagttttggcttcattcaggttacgtctagtatcacaatctaatgtccaatctctagaaccagcaggcaactgttgaattctatccagtttcatctccagacctttaatttcctcatcagctttcccaaactgcgttctcttctactgaaacagagccacccgagtggcacctatctttttgaaaacgcgtgcgggagcccaagaatgacccaccgaaacccaggcattggcaacaacaaggttgcttctagcatccctcgtccaactttcctcaaatttgaaacacctcttaaatttaggtacagtccctaccgtatcaagacataacggtctatggtgagaagtactcctctggacagaacagagagtagctttggggaagaggtgaagccaggcaccattcactatgcctttatcaagggccgacttaacatgtctctcccccgaccgatggttatcccaagtcatcatgtcccctttaatatgcatattgataaggccacgagactccaccaggttagaaataaaagggataaagggatccctacccgacgacccctcccgctcagaatgactaaggacaaaattagtatcaccaaaaatcaaccaaggaccaccaaataggtctcctaaagccatgatctcagtccagaaatgtttttttgcatgattgtagggcggtccgtacacacacgatagaagccaagggtgggtagggggatccgaatacacaagccctgaaatatggttacgagagcatgagatacac

SEQ ID NO: 128285 - DNA, 1016 bp, Cannabis sativa
atcttaccataaaaaggaaaaattattttgtcacctaacttgccaaaaaaggactttacaagacataaaatctgaaccaaacctccaccaaataccacacttccgcactgaaaaaactaaaataatatcgtttaatactagcaatatgtttttgggctttgaaaataagaattttttttaaaaaataaattgaagaaaaacggtgaagaaacgacgaaatgcggggcttagaaaatagtggtcagtggtgaaagaaatgggttgaggagtataagaaaagatgaatggctggtctggcatcacgtatgactttaataaccctttagtagtggttatcgaggacacgcttcagccatcgcgttcctctatggcagcaaatattactaaataattgttgcttaagggttaatatcgtggtataaacattgggtgtacaatccttcagtactttaacatttattattatctaaggtagcgtttggtaacacttttttaattaattttctgtattttaaaattaaaaaagtgaaaaaaaatttaaaataatgttttataaaactattttcacttttcaattttttaattaagaatcaaaattttaaaaacaaaacaaaatcactttcaatattttttttaaacagatttttttcttaatcaatattttagattccgaccaaactcaaacccaaatccctccccatagccctggcgctgaacccgtcctctgactcgaacccaaattcgatttctgacctagacccgacttaaataaattcaaataataaaaatgaaaataaactttacagaacacatttttattttctgtttttaaagttaaaaaataaaagcggttaccgaacgtatttttgtttttcaaaaataaaaaaatgttaccgaaagacatttttgtttttgttgcccctgaattcgcccaaaatacgtggaccagtcgaaatgggacacgtggatcagataacttgtaaatatttgataagtctttgtacgccacaaggaag

SEQ ID NO: 128286 - DNA, 856 bp, Cannabis sativa
ctttatgaagttctttagggtcttcgcggacagttgttttatgttggttagggcactgacctcaaggttgatctttcttgtcgcaataaattgccgtcagaaactcacttgtaatttattccaatagtccaccaatcctggctccaattttttgaacaattcttcggcggatccggtcagtgtcaagggaaagcatagacattttgtgtcattactgaccctcatgacggtcattaccctattaaatcgggacagatggtcactggggtctgagtctcctgtgtaggtcgctaattcgagtattttgaaatttttagggagttctgcctctaagatgtttcgggcgcaaggttctcggtccctcgcaatcagcgtcagaattcattcccccttttgtctccgggagactctagcaatgtcttttcagaggatcgccaatttttctaagattacctcatttaaggcgtcacttgatattggtaccgcgtgcttcttcttttcgaggtggtttctcaagtcaccatgtttcttgttaattttttaccttaaatcaacttgaggatgcctttgacctttccttcctctttccccaggctcatggtgcacagacacgctctttcagtcctctatgttatgagggccaagactctctcgacttatcttgcccctctgcgaacctatcccttttgggaaatctgagcagaccttttgcggatccttagcccttttgtttctcacagggatcaaagtgggatttttcttacggtcttcctcaaaaggatatcgtatggggcttgactccctagttttaggcctttgggtgcttggcgacgactccttttgcgtttcctctagt

SEQ ID NO: 128287 - DNA, 2183 bp, Cannabis sativa
  modified_base (2102)..(2108): a, c, t, g, unknown or other
  modified_base (2139)..(2146): a, c, t, g, unknown or other
aaaaaaaaaagaagtctcaaggcagtataaaagttatttttgccgtatgacagtatttttgtaaaaattaggtcaaaattcagtatttttgtaagtttcccaatgtataaaggtatagtggggtccaaaaaattttatggtattttcatttatacttttataaatgatttttttttcctttacacttttatagttagtttttattcattataaaaatagatacatcataaccttaaaataaaattagcataatatattgaaatcaaaataatttttacaaaatagaaacaacataatctcgaaatagaaatggtataacctcaaaaggaaataacttttataaaaataaaaaaatatataaaaaaaaaacgtaaaaattaaaaaaaataaaaaatgttgtatatatagaaattcccctaaaatctttactctttcttgtttctttgagtaaaagattataatattcgtgttacaaatttaagggaaaagaaatattacagcttaaccataatttttgatttatatacatacacatgtttattataattatttagaatatcattccttttttttaaaaaaaatttaaattatatttaagatgtaaaatgggaattaaaaagtaatttaaaatttctctttttagttattttaattcttgaagattttttagacatgccatatctggattctgtacaattattatggttaaaagatgtataaaatgtactctcaatagttgcccaatatctaatatgacttggactagaccccggttccaaggttgacatgtcactaggccttgtgccctaggatgacatgtaacttggttcgcatatggtttagctcttcaaattcaaatttttctcaggatattcttcttaaaattttcaaaaaggggtaggagacctcgttcgcaatcttgaagcatagaagtattaggaaggtgcctagaaagcacccaacgcccaagttgaaacctggatttttgtgctagattctacttattagaattcaattctgttttgagcattcaattattttttttttgtagtaaaaaagaccttcaaccttttatagatcaaattcacactttgatgtttcaccctttcaatacggtgggatatctacaaaatcagggagtttcgagtcttctcgatctcacaaaaaaaccacatctttgagaactggtgaacaacttcacaagaacactaaatatgaacaagtgatgtcaacacattacttaggcatcaaaaaatacaagtctagcatattttagcactcactgggtgtccaggttgatgttaaaacgtcaaccttgatgttgggtgtaaacctgggtgctgggttattaacatggtcgcatggtgttgcaatcttcagtaaaataaccttaactcactcaatatcgattcgattgatgcgattcaacgtgtttttcaaagctattttaatgatctatcaagtcatgtctcatatccacataaaaattctataaactttgagtgaaaaattcgtcctaaataaagttacaatttttcttgcaaataacctgaaaaggatccgagtgacgagattcaaagtccaaaaactaacgatattcagcaagattaaattttcaccattggatcattatcaatcatcatcaattgctaacatcatcccgaactaaattttttatattttttgtattttttaattattatttaataggacctccttccctgtaaatgaagagatcctataactcatttttcacattccgaaaagtctttacaaaattagagcgtctttgtctagcatttggagcccaacactttaaaaattctttgtgattctcgtgacaaataaaaactcgaagtatatgtagctccattagcgttgtgtcacggggagtgaactactacatatttcttgtgtctctcttacttatacttaaatctcattacattctcgccaatcagttgagagagtgtggctagatatttgttttcagatttctgcgtcaatatcttggtactttcattgagagccacaactcgtgactcttaacaagatggtgtttgaatatattttactaggctctagatttactaacaagtatnnnnnnntaacatcctaatataaatttctaaaacaatnnnnnnnnacacatataaagttttagaaaaccatacattgggtgc

SEQ ID NO: 128288 - DNA, 1767 bp, Cannabis sativa
cacaaattgtgaaaaaaaaatattaatatgtagataaaatattaaataagaagataacataataaaaattgtttggtggtgtagtggtaaaaggtttattttaaactaagagattatgggttcaattcccaacctctatttttaattttttttaaaaaatatttaatgtgtagttatggaggattgaaccttggagctcttaagagtttttaaaaattttaccattacactaagcactagaactatcatttttataatagttaaactatatatataggggcccaacatttgatttcgccttaggccccatataccttaggacctgtcctgacgtggagtgcaatctagaatgtgaattgggccttaacaacccacaaaaatagacagaaaatacctatttaaggggcattttagttatttgtattttaccaatttactatgtaaatatctacttattaggatttaagctctcctatataaagagccttaactcaaccctaaaaaccctaagtcattaagtcataactaagcctcattaaagctgtaagtcggatagtatattctctctcacatgcccactataatatctctcaacgcttgagatttgccatctttgattcttattttgtaaccttatgagagctatatcagatcccacctatagtgatatgaatagtgttctctctcggtatcaatacaactgaaaaaggagtagatcactatccgctatcaaagggggtcgaacctctataaaatccttgtattcatttactttctagttctaattgtggaacacgtggcaagtattagattaatacgattccgttgtcgattggttaatttctgaggtcaacatgttctacatcaaaatattcaacaaaaaaacacaacaacaacaactacactggatttactaatgactttatagtttatagtaaatttttatactttattgtaacttgtttgttattcaattatgttataattattgtaaaaaactattttaaaataaagtaacaccaaaatatcttgacttaaacagcaaaataacataatataatcgaaaatttaaaatgaaaaaagggtaaggattacaatagtaaaacctacaagttggttagttttctttttgctttacatgtttggttatatgaggttatttctcttttaatgagtcaaggttattgtacacattgtataggaagaatgggtaggttacttgtttaaagtaaacttatttagatattaattataattttttaaatatgaaatattatgatatttatggtaatctctaaagttagttagtgtactaagtttatttaaatttaaaacttaattaattattttttaataaatataaaagaaacataaaatttatttttattttagtcatcttttacgatactaacaaaattatatatattcccctcatctcaaaatatttaaaattgctacaaaaaaaaaaataataaatacagtatcgtcaaggtatcttataaataaaataacataatgtagcctaaaaatttaaaaagaaaatcacagtttaaagttactaaccaaaataagtaactaaacgtgtatgatataaaattatcttgaaatatttttttgaaataaaaaggtaaccaattgatatcttatttatatttttctaaaaacttgaaaaaaaaaacgaaaaaatttctagaagcgagatttttctattttttgtaattttttgttggattttggtatttatgctaatgtggtattttggtattt

SEQ ID NO: 128289 - DNA, 984 bp, Cannabis sativa
cattttataatagactaaatatataattaaatttttttgtgtgtaattataattttaaaggatataaattactgttatataaggttgaaagttgaatcaaatatgctgttttggaaaaattgttcttttttttttagtttcactttaataacaggaattgtgacattaaggaatttatgtttagaggttttgaattctttgataaagataattttgctagtcttttgggtctgctttgggcaatatggaatagctgaaataaagccatctttcaatctactcgtagcactgatttcagcttggagaattctgtcagttgttatttgcaggaatacagggatgctcaactccgaattacttctccgtctcccagttcgcaaccggcttctacaaacttccaaatcccaagcaaaatatttcagcttagtgtggatgcagccctttctccctcctccaacaagcatgagtatggagctattgtcactgattgtgagggtaatgctgtagctggtctttctgctccttcaacctcaggtctccctccaatttttgccgaagctgaagctctcaaccgggcgttgctttggtgtcaggcagttcggttcccacttgctgctattgcctccgactgtcagaatttggttcatcgactacagaagttttctccggatcgttcagctctctcgggtattattgccatgattgcctcctctttgtcttcttttccaggtgcctcgcttcattatatcacacgaacagcaaacacaagagcctacaaccttgcacgagcagctcttgaaacgaaaaaagagatagtttggaaccatttcagttctcctttttgaagatcattgtagtagcttctttgtttatctttcgtctttgatcttcatttttcaaaaaaaaattaaaataaaaaaaaacaataaaaaataaaaatttgttttcttgcccacagcagaatattctagtaactgaatttaa

SEQ ID NO: 128290 - DNA, 703 bp, Cannabis sativa
tacaatattagggatatttatagatcattacacgaaattaaaactaacagctactaactagtaaaatcaagttagtttctctctaacttgttgaggtgacacattacaaagtcacacaaaattaacaaatatttatattaataggcaataataagtaatttataatataataatatatattatcaacaaagaattaatggttacattttaaaacatgttaaaagaagagttagaatttaaagaaaaaattatgcactaattttgtaaagatttaaaattcaatactattaatggtgtgtaatttaatacacaccaatttagtatctctttaatctttagagtaaaatggtataaaaaatagtgtaaaaatttcacaccaatttggtggtatggtacactttgaagatgctccaagtgcgacataatcaacataagtttcaaggaaggttttgaaatatcataaaaaataatcaaaaaagggagaaaataattacttccacataatatataaattataagaaatttatctagtagatccttaaagaatcgttttactagatattttatttgttttagcataaaacaaattttaatataattttttttttataattgcgtgtattataattatttaggaccacttataaatttttaaaagatttcaaataatttgtagtgccaaaaaataagatttaaacaatta

SEQ ID NO: 128291 - DNA, 2352 bp, Cannabis sativa
ataagactggactcactattaatataatctgtcaaaacaaagaaccttacaatctcccccttgacaaattatgttcaatgatctcaaaaaaacaactaaacaaaataaagacaatgacttcaaaagatatctagtagcatgaaactatagaactataaaatgtctttgcaaccataaacatagcaaaccataaaaacatatcaaaagaaagacttgagaccatagacatctctcccttcactgaacatgagctgattgctccacatctttgtcagactccccctgggaaagtggcatataagacaccaagttaggtgcagtggttactggagacgggtcagctgtaggaggaagattctgtggcactggacttgagactgaggcagaaacagacgactccccctgcacatgtgcagtactacaagacccatctgaggatgcaccaaacgaacctctatgaaactgaggaagagatatatcaattgatggagttaaaggatccccataatgattttgcagcactgtagacttgatgatgtgaaccattttggacatagaggcctcaaaggcaagctgatgcttttgatatgttgggattctttgggcatggcactgctgacttcagattccatgttctgaccactgacatctgcatccacttcatttgatgatgcgggttcggtgtttagggacttagtaagagtgttaggatacacttgggtaggcttagtggtgattgatccaggtttagactaaacaggggcatcatcctcaacactcacttcttcactactttctaagtcatcaaactttacgtttaatgattctaatacagagtgagttcttttattgaataccctgtaagcacgactgttggtagagtaaccaagaaatatcccctcatcacttcgaggatcgaacttaccttagtgatcacggtcatttagaacataacacgtacagccaaaaatgtgcatgtggctaacatttggtggcctccctttccatagctcatatgcagtttgtgacatcccaatgcggagatgaactctattgcacacgtagcaggcagtgttgacagcttctgcccagaaacgttttgatatgtccttggcttgcatcataacacgagccatttcttgcagagttttgttttttctctcaacaactccattctggtgaggggttttgggggctgaaaattcgtgacgtattcccattccattgcaaaactctgagaatatggaatttttgaattccttcccatggtcacttcttagccgaaatacttttccaactttggagtcttgctcagtttgcagtctcaatattagagcagagaatagtccaaaggtctcaaatttctctctaaggaactcaacccaggtaaaccaagaataatcatccaccaggaccattacatatctctttccactgagactttcattttgcatgggtcccatcaagtccacatgcattagttccaacactcaggttaatagtctgttgataggagggtgagatgctctattctatttccctagctgacatggtccacaaattctatctctggatactttcatcttaggattaattccccttactgcttgaagcttcatcagtcttcggaggtctctgtaattcaagtgccccagcctgtagtgccacaagtcgggtttatccaagaaactccgattgcacaaaatggtattgcataatgcatagcactgatctacaatcttgtttcctgttatgacaacacacctattaattgaaactaaacactgagttttagaaaaacttacagagaagttgttgtcacacagttgaccaatgctgatgagattggctttgaacccttttacatacaggacatctgttaactgagccactccattcaggtttacatcgccattaccaacaatctgtcctttgtttccatcaccaaatgtcacagccccctcattttcctctttgtaattaaccaacaattttttatttgcagtcatgtgtcgagagcattcactatcaaaataccactacccctcaacaaaagcagacagagacaacttagccaccaatccaaaatttagactgaagttatattttattttccattctcaacgaggtttgcgcccttgaggtttatttggttgtggaaaactatttggtcgattaatcatggctttcaagtagttctgcaatttatagaatttggggcgaatgtgacctttccagttgtagaaatgacatattagaatgaatttgtcattttgtggcagatttccagcaccaatctgttggaattttattttaccaggatcttagatctactcacaagtatgctgttta

SEQ ID NO: 128292 - DNA, 640 bp, Cannabis sativa
ttattatttttgtgcatttgtgaaattaacccatgaattatatatacatatgtatgtgtaactttgggttgaatcttcaaattggacgtgggctccaatacatctaatgagacaagctcattcaaactctaagataaagcccatcatatttatccaaagttcaaaccgttttaagaagccacatcctcattctttgaacatgtgcaacaatgaagcagctaccctacttctgcccactcgtcagctctctctcccaacaagactggcgcacggttcccactacagcagtccaactcttcctttgcgccacctgtccacttgtccccactcctcttcagctgacgcaagctgacccactacttgacacatatggcaccacttccattagctttcatgccatttattccactaaatagcacacgaaaatgccatatttgaaaagcaaatttgcactataaatagtagtcaaatacaatgaaaagaaatcagattttagtagagttattataccgaaattgtgtcttttctttccttcttctttattttgctttattaattttggtgtaaagacaatgtcttttttaggttaatttctttggcaagactcaagtataaattcatgcaatttttattcttctaa

SEQ ID NO: 128293 - DNA, 782 bp, Cannabis sativa
tgtcaagagcgttatggctcggtgcccctttacgagtgaactcgaacgaggtctctggggagagtatgcttatgaaggtgtcatctctggtgaagggactgtctaagaacctacgtctacaggccatggttagttttgcggcagtgtgcgacacggtgtggaatcatagaaacgcaatcattcatgggggaaagtgtgtggatactcctggtctgctaaaggaagtgtggaggaaatttgttgattatggaggggacaagctaggagatgtctcggattcaaggggaaacattttgaaaagggccttggttccgtatcaatacaataaaatgcttatggttgatggtgcgtataaaggaagttggtgcggaatggcttgtgtaatgatagacaaattggattggtcttgggattacgggtacttcagtaaggaaggttcctcaagccttggggcagagataagtgctattggtatggctgtggatgtaattgctcagaagaattgggttggtgccgtgattctctcggattgcaaagtagcagtcactgcttttggaaaaaggaaatgtccggattggaaattgacaaatatttttctgaatattctggagcagatgacaaagtgcagggagtgcaaattagtgtttgttaagagagataatttaacttttgtcaatagcttggctgttcaagccacgaatgaaaggctatgtaagaccttttgtaatggggaaggattgccccctgtcaatcctagttttctggtttaatcaatgaactga

SEQ ID NO: 128294 - DNA, 869 bp, Cannabis sativa
atatttaatataaattagattagttgatgtgtcaaattttgattagtttaataaagtgtgagatactaatttttaataagggatcttgattttgagattatagtagtaaatttaagaaatacttattattagagtaatttttttttaaaaaaaaaaaggaaagctaattataacctcctattacaacctcttagtcagtctctacgtccggaatcaatgccaaaatatttttttttaattttttttcatagcggtattcgttacaatatttgaaaaattcaaattccgaatttccgaatagtttacaataccgaaaataaagttcctgatattcccgtttatcacgcgcattcaaaaaatttcaaacgtattttcggcactgtaaactattcaaaattttttaagaaattacagggatgatgttgtaagcattacgaataccccatgaacaaaaatataccaacatgtattttcgaatatagaggttgactaagaggttgtaacaggaagttgacggtagtactcatcttttaaaaattagagtgataaaataatgtatagaaaaaattataaaatattattttttagatgagctaaaaattttgacacttgtcaaattattcattggacatgttgtactctttttttggttcattcacatgtttcttgttcccaatccccataaatttagtcatacattcatttgttttggtgtcatttcaattcatgcaaatgtattaggaaaaggttcaatggttatccttcttttaaaatcaaacgattatagttttagctccatcagttttgaatattggataattactggtatgaagatcatgataatgatgataataatttttttttttttt

SEQ ID NO: 128295 - DNA, 965 bp, Cannabis sativa
gcacaagaattatcgacaaggagtcgagcttccatgatctctgagccattgaggacgattacaattaggaagcttgctgcacttcaatctcatcagcagtagaaagaataaactttttaattacaattaaagctagaattcatgtatgtaagataataggtttcactcattctatggattgataggtttactaccttttttgcaacaatctgcaatatttctgatccaaaatagtacataataaaaaatggaggtttgtttctctgttctgcaatatttttggtgtcttttagttcatgtatgaatactgcatatatataaggaaaaaagatatgtcaatttcgtacaatttaagaaaaagactcggtaatttgactatgattagtttacacttaatattgtcttcttttattttttacattcttttttaaaataaaaacagaaatgagagtgaaactgctgtataaaactaaggtaagttgagtgtagcaaatgtgggatttcaatttcgtaatgtattgttgtttgtgtttaaaggttgtacagatggatctgtgtataaccaccaaagatctctttggttaactttgccaatttttcagggtgggttggttgtggaaacatgtaaaaactcttgaatggaaatgaaaaagagatgctaatccaatttcttccgaaatggtattgttgtcaaatgcgattgactgttatacactctataccatattcttattattcatacataatttatttcttaatttggttcttgtaattatttctgaagactaatgttctaagaccgaactagagtcccacatcgactatctgaaacaaagatctattgtatttatagtctaatctctggtattcggtgcacgaccttacttgaacaggatctgttctataggctcgtacctctgtttccttgagttctaaggagacaggaaaccaaacctggtggatga

SEQ ID NO: 128296 - DNA, 784 bp, Cannabis sativa
ataatatatatatatatataaataaaaaaaaaaaactcaataaagataattatcattcccaaaaagcagaaaatagaaggtatctatttatatctatatgtctatgatatatcttttatatgtatataggagaactttaaagagggtgatgtgggatcacatatgaagttttttttttctttctaatttttcaatttttttttatatatttagagtttctgttattacttaaaacaaatatttataatcaaaaaatttatttgtattctttgcataactcctatatttatgtttatatattacttttataattaattattaaaactatttatattcttcaatattaaatgaaaaaaaaaactctttatattctaacttttattcctttgtctatatatatagtgtcacataagttaaagttttgtagacattggtgattttaaaatttttgttatgttttttttttctttcaaaatttttttgttttactttcacattccttgacaatggcaatgaatttttgaagatttgttatattttttcttttcattattttttttttctagttcttaatgttctattttcaggctttaatttcattggcaagtctctcaagtggatattttgcaccaaaactattaggtaaattttttcttactttaaaagattatgactgttgactggatttttagccaaccgacgcggagtcgtaataaatgagatttaaaccaaaatcacaataataaatgcaattaataacgccggaattcgtaataaatgtaaa

SEQ ID NO: 128297 - DNA, 1878 bp, Cannabis sativa
cgactctctctgctagtgtgaaccgtagacgattttgaatcatctccgcccctctctccttctctcagattttcgctccgccggcgtaagctcttctgctcacgctcttgtggtctcgatctcccctacctctgtaagtctctctctttccctcttgttttctctccactaatctctttgtaagtcttaataaattttttatttaaatttatatatcatttctttacaatctagaggttatgatttgttcatatttaaattttgaagattgtgttgtttatattattcgagttgcagaagcattgggttatcatatttcttttgaattcctctctttcaggtaaatgatcctctgaaatatcaatgactttctagtttgtgaaattttagaagtttttggtttttttatttctttgattcttgtttacagattgagttttgtttaatttttgttgttgtgttgaatacgtatttttcgattgaactatgaatatgtcaatataattttattattatagtattgaggactgtggtgttaagtgatgtatattatctctttgtaagatattctattcatatatatatatatgtattgagtttgtgttataatcatgtatgtatgtgctctacttgtttgatgaaatacctcaatagttaattaaattttattattcacttccacctattttttagatcccattgtcttcctagtatgagttgtccagataaaaatgttgttttagttcttctggaaaggatttcttaaattaattacttgctctgcattgcttgtctgaagaaaagtgatatccatctcagtattttattgtcacgttgcccttatactaatatgaaaacttataactgattgtcatgtgataattgtaaatgttttgcaatcattaactttttcttttgtaactcgtatgtcaaataatcatgattcatgagacattatcggaattcacgtggagtcatctcatgtatcaagggctcgttcataatcttaatgatagttttatgcaaattctcgaaacttatgcatcaatgttacttttcttaaaggttatatccttaatgatttttatttataagataagtataagttagataaggtttaatattcagctggatgaattatgtataaacagaatccttgttttgaaatttcaatactccctggccaggtcagatgttacacttgtgtcttcttctacaaccatagtactcaatttactataacgtatttatataataatactagtgctgatgcccactttcgcagaaccaatgtctatccacatgtctagaatctatgtaaaaggtgaagttttttaaacttgggttcttttgtgatttgattgattaaatttttataggaaagtacaagaagcaaaaacagttctccttgtctcactattagcttagaatttcttacgtttgttgtttatgccatagttgtatggaggaaattatgatctcaatgagctgctctgtttttaaactgtaatctgtttgtgattctattatgctttttcttgccaatttgaaatatctgaccaattttcaaacattaggtatgtcttaccctttttatgcaattacaagtgtttgtcatgttttgggtaatttcttctctttgttaatggtaaggggtttctttgcaaacaaattagcttattaattacaaaattatcacaaaattaacacctaaccttattaattactattgccattgaagaaaaagctacctctgactaaagaaaactatggcaatagtaataataaaagttaatgaagaaatagattaatttttatccccctttttttttttttttttaaaaaaaggataaaaggtcttaaaaggtgaccttttat

SEQ ID NO: 128298 - DNA, 530 bp, Cannabis sativa
ctaataagggtaaaatacaatgtttattttagatcaattgagtgagacccaattcacaagatgatgattgtacgtacaagcagggaccatttaaggatgtcaagtgtcatgcaaagtcgcgtctgtaatgagaatatcagagaacatgtcattggacacactctgatagtctggtgtacgggacaaactatgacattgtgggggtccgtgtggagagttccctattggttgaggttcggaagctatttgagtgactcttcaattacccgctttgagattacctcttgaaggtatccagattggtcatgataaacttttcatttcgtggcccatatggcttttttcggactagggttaggggtgtgcataaatcatccaattcaatgataatcgaccgattaaattacgtataaccgaccgccaaacattgaacatccaattgtgatcggaccgaattggatgttatttttgaatatctaattggatcggatcaaatgttggatggcgtgtctaaaaattcaataaatcta

SEQ ID NO: 128299 - DNA, 516 bp, Cannabis sativa
gggggggggggggggggttaagagttcctcctctttgaaatggataaggtgctaggttggattgtccgaggagttaacggccaacagaaatagagcctggttagacaatttataaatacacagaaggttggcttggttggactcctcgagacaagggtcaaggcccaaaagttgggggtcttgtacacaaatgtctttactagatgatgcttcacaacaaacatagcttggcatcctgggggagaattgcagtagcatggaatcctcacagcttcaatgtcaacattgtaagatgctctagtcaaatgatctatctctttgttactactatagatggaaaaaataatttttatgctacttttgtctatgcatacaatgatagagaagggaggaaagagttatggagagaaattcaggaagtggcaactaaggaggcttggttggtgttaggtgattttaatgatattcttgccaaggaagagaggattggtcttcttgccaaggaagagaggattg

SEQ ID NO: 128300 - DNA, 1053 bp, Cannabis sativa
ggtgcattgtagaattttccaaaggtttctatactaaaatccaagttccaaacaaaaagtagaaaggcaagcaggatttgagggttcttaccaaatgttccagaaccaccctcatagaatgtggcatgggcatcaatccaaggcccaggcttgaacttgggcctatggtgctttggtttttttgggtgagaccaagatcttcctctccttgcatggtgatgttcatcagctttccatgcatggacattatcaggcaatagtactccaataacaaaaataagaagaaagaaacttatgagagctcgcaaaggcaatgccatggctatcttgacacggccttggctgtttttgtctctcttttaacacaacttaattattacttcatcataaaacaataatgttactgttacatttatacttgtgtttatggaggaaatcgatatttatggcactagattctaggtatgctttcttatggttctaattgatttgggttgtttttagagggtggagtttttatctctctacctctattttaaaaaccaaaaaaattctttgttattattatgaataagcggttgctaattcaggctgtggcaagcattgatttttttaatcatgagagttttattgttgctccttcaatggaggttttgatgagctaattttagccgttaattaataaagatttaatatgaacacatatatcaaataaagatcgagaaaaatcaaacaatgccatgagaaaagatataaaatttgatacaaaaacatggcaaaagaggaaaatggtggaaacagattattgtgccattagaaccaccaatttattttacataataacaaagtgaagtctgtgttttcaccaataaaacttaaacatcatgaaatgtaataaattagagtgaacaatggtaagtagttctgcttaatagcggtatatcaagttcttgtatgcatccttatgatttgagtagaagtcaatctcagcctgtaaatgaaaaacaagtcaaagctagctagtctcagagttccaattcagatgtagaacac

SEQ ID NO: 128301 - DNA, 535 bp, Cannabis sativa
ccctgagggtcaaggcgttacaaataaagttagacattgggaatgtcaggaatagtcgggattttagaattttccaaaaataccgattttatgattggttagtaagggcaagggcattttggtctttttacccattttgcgttttgtcctttagtggactttattttaataaagcaatctgatttttagttactttatggctaagatttattttaataaaacaagtttagtttttcatttattcaataaaataagaaaattggaaaaaactagaaaagactctcgctttccactccctctttctctctctcgaaatccctagaaccaactagagtttgggtgtgattttctgcatttcaagcaagtttctacaaggattaagtgttcataagctataggtaaactcttgactttatccttttaagtttctttagttttaagaaattgaatttatgcatgttttgagttgttggctgttgtagttgctgctggtgttttgtatgcatttttgtacactacaagaaaagccactttt

SEQ ID NO: 128302 - DNA, 522 bp, Cannabis sativa
tttctttattgatatcgaataatacgattacattgaaatagattgaaatagactatagacttttatttagggcataaaatccaacactatcatctctgtttctcttcttccttgcgtaaaggcgtcgctaggcctcgttggccactctacaaatgagagtggttcaaatggacgacatcacagtgctcacatcacctaaaaatctaaaggacgaccagagcagaggcctcaacgtctagtgaaggcactggtggccattcacaggtgtgtacatcaaacgaagtttttttttatgggatttgatatatatatatatatatatattaaaagatttaggttttttttgttgttttaatttatctttttgggttgtgtgtatatttttctttatcaactaaaatgattttccttcaagtgtaggttcttcaagtagaagaagaagaagaagagaagttgggttgggtttagggggtggttttgggctttcgagaaggaagagaaagagaaagagaaagaaagaga

SEQ ID NO: 128303 - DNA, 845 bp, Cannabis sativa
atgaatgaatgtttatgattaagaagaggactcatttgtctccactataaggtgccctagaggtagataaatggagctaggtccagctggtggcactaccatacaaaaataaaaatgaatatattaattaataaaaataaaacgacagacgctccctcgataataaccacccaatgccaatgccaatgacttaatatatttgtctcaacaattcttttgatgggcatccaaagaaagaaacacataaaaaaaagccaacactacactactactactagcccacccattcatctattcacatcttctttaattttttctttttacataaaacaaaatatatatgtatttttaacatatatttacttttgaattattctttttaaagtggataatattttttaataatattacatcatattacacctcagttatgcaatatataactgttgttaatgatatattgttattatatatataggaatatttatgttgaaattctttttaattatttgtaattgttatatatatggttttaataaaaaaacataatcgtaaatatattttattttacaattttactacagccgtactctctaaactgttaaatatttgtttaattaaagaaaaattaatttagttttttattcaaatttatatatttttaattaataaatatgataaataataattatttaatatgttgtctaattatatgtcgacacgtatttttaagttgacacttaacaattaaaatgatactgcctatcgtgcgttgcaagtgcttaatgggagatggaattcacaagacaattctggtttttggaagaagttttggtatttaaaac

SEQ ID NO: 128304 - DNA, 933 bp, Cannabis sativa
taatcaaccagtcatgtttcttccaaggattaacttgcagacatctttaccaatgctcttttttctactcaattcaatggctttaaagacaagacgggattaatgaacattagctatccatcttgagggggagtattaatagtaggaagttagttaattagctactgttctggtagttagctacaataccgattatttagttagttaagtgttagttttgttagttaggatgtgagtgtcctaattgtgtaattaacttcaactattgtactagcatttagtttgagctatataaggctcactcattgattaatctatacaatgaattctttctgcatcatcttctttctctcctttctctatactctattttgtaataaatatttaaaaaatgtatatatatcggataattatgtataattatcacatagtttacttgtttatgcttatttgaccactaaataaatgaagaaatattatttgttcatatcaaaacataatttattcgtaattaacaattatgattgctgacatgtcacacaaacatgagttattcaaataattgctcaaaaagttctcttcactaaattcacatgagagcctaaccaaaatatataaaatatatattggcatgctaattatgtttatatagcttgtgagtaccaagcagaagaggctaacaaagcttggaatacatgaaaaactttgtcattcttacactctaacaaaaaatgaggtattgagcatataaatctgcttgaagataagttgaagatgactcatttgatctcatacgactagatctgcttgaagacaaatcaatctgctcgtagataattatgctcttagataaattcgttcgtagataactgtgctcgtagataaatctgctcatagataaagatgactcaatctgcttgaagatgacctaat

SEQ ID NO: 128305 - DNA, 1249 bp, Cannabis sativa
cacagagaggaaatttgaataccatatgagcgagcttgacaacttagacaatcatgttagaccatatttacaacaagttggataccataaatggtcaaggtaccacgacaaacacaacaagttggataccgtatgtacaacagaagctcgatcataaatgacattaacttttttttgaatatcttgaataacagccatgacagacttgaaattaagatcaacaaaacacctcaacgaaataaaatcttcggccaacgattcttgactggaaataactaattccaacttagctttgaacatttctatatcatcagaattagatttcttagaagcggaaccactctcgaatgtttgctttgtttaaccacgatcatcgataaattcatccaaaaataagccatccaaattcgaattctgcctttcttcatcagtaggacgaatgtccttcacctttaactgaaaaaaaatgttacaaaaattgtaaatcaaaaacaacaaaaacaaaaataataaagattaataaaatgggacaaaacaaaaataaaacagtaaagaaactgaaaatcacctggttcaacgacaaatcaaatatcttgtctttcaagtccctaaaagttagatttttggccctgacatcgtcggtccaattcagaattctcggaatcctagatgcaactcttttgcaaaaacaatttaccatcgcaggacaacattcataaaaccatacaataaacacccacggacaccccaaagctctataccaaccatcataagactgaactccctttttctctttctttatttcatcttgataccatgttcaactctgcccttgaatgaatcaattatcaactcaaaggactccctaccccaacaatattcattccaacgaccattatcaatgatatctaattctgacctaacaacttccttctcaggagtattacttagaaggaaataatgtatgaaatacaaaatagttaatttcaaacctagtgattcatcatgtccccacctagtgcccaaaaaagcattctcaatagacttatgatcaatagttttggttccaggataacatacatcaaccaattggtttgattcttgagaaaataataatttattgcaatcaccaaaacatttagtaccaaaaataaaataaaatcttcaacactaaaccgtatacaacgaccagcaacctggtgggttttatgccctaaataaaactctttacaatttgattagttatcaa

SEQ ID NO: 128306 - DNA, 799 bp, Cannabis sativa
gagggtaactgacatgataggagtgtgaatctttgaatgttatgggagcacactcgtagcgttgagactttggaagatgctttgcaacctccagtagttcaggttttggttcatgtcgcagggatcttgcttaccttcctaaggctttccttgaatttctagcttggtgagggccaccaatcgaaatctcaagtctaactgcaactagagtaggctagagaagtgcattgccctcagctatagctttaggtcatacataccgcaaaatagtattatttttttttgtctgatgagaaactctatctcatcctacaactgattacactcattagtgtcaagaccgtaattgttgtggtagtaatagaatttgttcatgtctctcttccctaactctttgaagggaagaggtttgtgatacttcactattgaatgtgtggttgtatagatctccactcttggtgccaaaagggtgggctaggtggtaaactaaagctcatactctcataagggctttcccctagtcttgcgcttcttttcacttggggagttgccttgcttaccaccactgttggctcttttccctctgttggattctctttttttctcattgtcctacgcttcagtaacaagagtttgagagtctgctaacttcttcttgccaccattagagcccatggctagagtgataactttttctaacttgataaagccatattctccaacaaagaagtcattcatagtgtaaacggccttaagacaaaggtcaaaccacagtggactcatctccttgagtccagct

SEQ ID NO: 128307 - DNA, 1615 bp, Cannabis sativa
actcagttggagtttatatgtgaaagttatgcaaattttactaagagagattaaagcaaaaaaaaatacctggttagagtgtcaggtgctgcgacggccattactagcactacagcgctaattgtgcctccaaggcaccacgacatgactttaaagggggaaaatgacttttcgaaaaagctccaggcaccgcggtaccgtcgtcatgcaaaaggtggttttttcgtctttttgcatgttttggctaaaatttctattttgaaagcaaaagatgatttaaaaaaattgaggggagcgaagggagactaaaaataaaccctagaaaagaaaaagaagaagattggagcaagactttggcgatccatgacaatcccaatctgatttccttctcattctcttttaaattctatgtgtatattgatgttaaattaattttggatttgattatgagctaaactcctcatggtgagaaatcatcaacaaaataataggaactcgaagcagtatttaaagatactaaaagtaaaaatcttacaatcttcacttgtaataccctaggattaagaaatggattagcaaaactctaattagataattaagaattattgaggaattatattaatatataatttaatatatgtgtatttatatggtttatgatatgttaagaccctgttggtgagccacgggcattttagtaattttgacctgagaagggtaaaatagtgaaattaatttattaatgtgcttatgggattatattaatatatagtatgcatgtgttgtctttttcaggtgtgttctgacaggttggcgcagtatagtcacaactgggtatttcaggcagaaccgagttcggggccgaaatacaattctgggattaattattggtattatatatttatgtgtgaataatctgaaattaattgagtgtattgatgttatgtggaatgacatgcttatccttgaaagcctttatgtgattaaatggcccttcggggcaatagagtaatttggcaatttggataattaacaacaaaggagaattttgatcttgttgaaaatttgcttggattcaagtttgaatgattggtggcttttgtgcttgagattgggaaagtttgaggtagtgttcttactgttttcaatttaaaattcttgctagaaataagaatacatattgtgatttatgctagtgtgttcttagttgagcttgtaactgtaatttgttgttgttgtgggatgagattatttttcgtgaagctatggtgttcttgaaggtagattcttggtgagtcttgctttaaattgaagtgtgtatggtatgttgtttaatctaattttcggggttattattgttggtttttaatgtttgaaattgggttttaaactctctgtatgatgattaaaaatctatttgatggtttcaaagttttggttaagtgttggtttgtttggaggtgatctaggggctgcaattcgaagtttttactggtttttctgggtttggaacccaggtgccgctgcccttttctttctgagcagatccttatgcaaacttcgaatagccataactttgtgattcggactccgttttgggagttctatgtaccgt

SEQ ID NO: 128308 - DNA, 595 bp, Cannabis sativa
agtatcctggtgagatattccatccccaatataaaaagcagatgagacatggaatctccttgactaaatcctctcttggtctcaaagaagccttgcatagtgccattgaacatgatcgagaatctaggagtttgtacaattcactgcacagaagtatcaaattgctgatgggtacaagatgctttggccttctcaggaaaagattagatggtgtaatgttagcctatttagattttttgaagcttggttcaatgatgtaagctgtatggagaccattcttaagggcttaaaacgacagttaatgaggacaacaaaaatctctctaagagaatcaaaaatatccaattcgtactccaaacatggagcaagaagaactttggtgattgtcatgaaaaaattaaagccctagaatttcggcttctaaatctccattctggtgatgtaaacaatactaatctgaaagaagaagaagatactgaaagaaaaatttttgggcaatggctgagacaagagcttatttggcatcagagatcaaaagaaaccttgtaacgccctaaataattaggcacgctacccaaaatgcttatgaaaccct

SEQ ID NO: 128309 - DNA, 1194 bp, Cannabis sativa
tgtgaggtcgaggtctcccagcagtgtacatatcagatgtggtgtcttgacttctgggaagtaggattgacaactttttcttctatatttgtaaatgtaaccatgatttttgtactagtcattttgtaaattagttgtaaaagaattttattagtaggggatccccatattccaatagtatttgattaataaagtttaattttttaattcaattcaaagtttttaattaaaccacactaaatgattagcaataataagtttgtaaaagcacacatggcgtccctgagagtcagggcgttacaattgtccatgtacaaaattgtaccttttgaattttgatatgtaccaaattgtgcccctcgaactttgacatataccaaattgtgctcccaaaacttccatctatgttagacatccattagtaaaattagaagaaagtccttgaatccatcaatctcaataatttgagaggaatttttagcactataaaaaattcaaatgcttgatttgatacatgccaaagttagggagatcaaaataaatagttttagtttttttttttttcactcagcaagaactttttaaatggataagtgttattattgtttataggttataagtgtctaatattataacttagaatttatttataaattgttctgaattctctgacgttatggatttttataagacttagttcgaatattagaaatcacatcatattatagtttagaatttttatggtgtcttatattatagtttagaatttcatgcaaaatgaatttatttattcttaaatttaattttcattagaactatgataaaaaaaaaagtagtgctctaaaagcatctctaatggtgtcttataaaaatagtgtattgccactttttagaatatttttataaatataaattttaatagtagtgtaaaataaaatttaaatttggctgatgctaaaagttgtgtcaaatttaaaataaaatataacatgagccaaattttaacccacaataaatactacattttttaataactactttgccactaattaataaatttattaattaaaaaaacttttttctatttttaatttacattttaatttcaaaatttgccatagtaaaaaaaagttaatcataaagaaaataaaataaattaaggggcttttacatttttacacttcaaaacagttt

SEQ ID NO: 128310 - DNA, 1046 bp, Cannabis sativa
atggagaaatgttccgtacctctgagaccgctttcctccttgttttctactttcacaggagacttttcctcctcttcttcttctttcttaggcaccacactcaccttcttctcctcgacctcttccacctttctcctcttactctccttctccttctccttagcgacgcgagcaacagacaaaatctccttctccgcggtaactttatcgagaaaatcactatgttgagcgacaaattcgaaaactttgtccaagaaccctagcggattggagggattcaaagtggcagtaaaggacgccgtggctgatgatgatgaagaaggggatgcggagggcttgagattggggttgggcttaggtttggtctctttgtgctcttcctcgaactcggagattatcgccatagctgggtgtgaatcggatcagagaaatgaatgtgagctgagaatggtgatttgagagtagtgagtctgagtagggtttagacttagatttgaccaccaatcaagtacatacatatttatatagtctctgagttatctaagtttagagtgttctagaattacattcttacaaaataaaaggaaattgtccattttcaactaagacacgtgttgtctgatttttctaattttttcatattttgattttttgttcttccaataattatattaaggcaaattatgtaaaacctcatatactttttgaagaattgcatactactacctatcttagccgttggattccgaaaaaaatgaactttgctatgatctaagggatatgtgatgttaactaggggtgttcatcaaactgctcaaaccgctcgcactgtaccacaccgcaaaaaaaatacggtttaaaattctttacagtgcggtcgcggtttgaatttttcataaaccgcgcggtgcggtgcggtgcggtttgcgattttgaattgtgtatatacggttcaaaccgtaccgcaccgcatataataaaaataccaatttttatatttatttaggttcaatatgtgaagacccaacctaagcccactaattatt

SEQ ID NO: 128311 - DNA, 656 bp, Cannabis sativa
  modified_base (27)..(32): a, c, t, g, unknown or other
actaattatcttattcttttaactttnnnnnnaataaaataataatatattattagtaactacaatacataaagcaaaaaaaaaaattaataaattaatataagtatacggtcggtttattactaaaaaaaactgaccgttcaatggtggttttaaccgttagcagtttttttggttttcgattccgtcggtttcaattccaacggtgttcggtaagtcggtttgaacggtttttttaattttctggattttatgctaccagatggctggacagtaaactcaggtgaagtaatttgaaaaactagtaaagaactgcaaagtaggacaagctgtggtttcaaaatttacctttgatgaagaagtaccaaccttagaagcaggaaatgataactcatcaaagataacattcctggcaatgaagattcttccagcagcattttcacacaaatactctttgtgctttggagaatatccaagaaataagcactcttcaaacctatactcaagtttatgatgatgatagggcctgaaatgtggataacaagcacaaccaaatggtttgagaatatgatagttaggagtttcattaaacaaacactcaaatggactaagattatcaagcacgggtgtaggcattcgattaattgagtggcaca

SEQ ID NO: 128312 - DNA, 1139 bp, Cannabis sativa
tttttttaaaaaaaatcattttcaatattattttaaacagttttttttcataattaatattttggactccgaccagacccatacccaaatctcccccacggctctggcgttgaacccaccctctaacccgaacccgaattcgacttcagacctagactcgacttaaatagaatcaaaaaataaaaataaatcatacaaaacacatttttgtttcctatttttaaaaaagaaaaataaaagtggtcacagaacacatttttatttttcaaaactaaaatttttaaaaacaaaacttttactttcattttgtgattaagaaattaaaaaacaaaaatgttaccaaacggcaccttaaagtatgatttatcatttttctcactagattttaacattataaaatcttctttaggattattttttttctttcttatttgtctctctctttaagtgtcttacagaaatgatttttcaatttttcttttatgttttcctcatcattttaatggcaaaaatgacagaagtttatagcttcatttttttttttttcagttactttgattaagtcaatcactgaagagagagaataacatactaataattatctaaaaacttaaatttgacaataaaaaaaccaaatcgtattgagcaaatgatgggaggaaacaatattgatgagtttttttttttttttagagaacaaatattagcatacttcacacaagtctattcattccgaaacattttaaaaaatgttctcgtgtgtaagagcaatgatgcttaagaattttgtgtaaattaaattgtatgaattaattttacatgtcaattaacactcaatttacacaggtatgatttttaaattttcaatgtaatctaattcacacaagtacatatatgaattggattagattgaaacaagaaaggtacaagcttgtttgggtacgatgtcaagcaacaacattttaatcgaaggtccactaaattagaagcccgctaatatgtagcctttataacttttctccctataatattgttagggaatgtaacaccctaactatcataggcgtgttgacgtgattttaaacgtactgtccaactcgttgctaatcaacgaggttaatgaaaatcgtgattaatta

SEQ ID NO: 128313 - DNA, 541 bp, Cannabis sativa
aatctatatattatattattataaataatataacatttatattaaaaaaaatcagttttttattttgatttatatatttatttattactaacaaattttttgagttgatgtatgagaaaaaagtcaaacgttcgagatatatatttccctgttgcaacaaataacttgatcttaaaagggtacttggtataagagtttcattagggattttagttgagaggggttaagattaaagaaatctcaaactcaaagtatttatagagtttgagataacgtcaaaaataaacttaaaagtggaaccaaacctacttaatcataagccttccatgcactaaaatcataccataagtttagttttatattcctatttctaagaaattaaccgcgataacaaagactccatgtagaatctattttcatattttacactttttttcctcacttatccattataattatactaggtaacaacccctcgctttgcgcggttattaattttttttaaagataaacatatacatattacattattgttgttgtt

SEQ ID NO: 128314 - DNA, 1010 bp, Cannabis sativa
atacttgtgagtagatctaaggtcgtggtaaaataattccaaaactgtcaagtagtgttttcgagtgttttctaacaaagaaaatgaaatttggaatgaaatcaaagattatggtccgtgtgcattcattcgatatcaaattataagtcgtaatcttaaaaaatgaagaacaattcatttcataaacctaaaatgtccacacaaaagcaattcaaagtaaaatacaagaaatcaaagaatgcataaagagtttggggacttactcaatgttgaagatcactgagtaatttgagtacaagtggaaatgatcttgaaaatccttgaagcttcgaaggaaacttgaaaatttgagagaatttgatttctttttctttgaaatctctaagtttcaaaattactaaaagagaaaaatgaaatccaaaaccccttcataaaggtttctgagagggtattttggtaattcaacatttcaaattttgggttttccccctaaaggtgctatcagtacacattagggtgtccaatcgttagcacacgacccaagttacatttttcgagttgaagcattaaatgcttgaaaacatgaagggacaactctatttacctaccttgtagtatgagcatgtaacgccctaacaattaggcacactacccaaggtgattaagaaccctaatcccctaaacgggattactaaacagaaaagcgcgggaactttaaactttaaacgaaaatagaatgaaaatataacttgtaatagttttaactttacaatcaaagttacatatttagggaccccaaaaatatttttcaaaatattacaagtctttccactagccgatctaagcggcaaaacagaatcacaaaagttcatcattggtagaccccaacccgcttagtctagtgtggcctgaacatgtacatacatcgcccaactctcgcactcatggctaataagagatagatttaccctttcctgcacagtagagcacccgtgagccaagcccagcaa

SEQ ID NO: 128315 - DNA, 1005 bp, Cannabis sativa
agagttggaattagcagagttttatgttatacttggattggattttctatctaaatattcggtcagcattgactgcaagcgaaaaatggtaaccttttagccagagggcggagatctattcatttatgtttgatttgttcggggatctcgaatcctggttattttagtcttaagagttagaaattcactacatagtggttttgtaggattttttgcggttgtgattgactctagtagacctagaacatttgggcctgaagtggttagagatgtaagagaatttcttgatgtatttcatgaggagatgctgggattaccgccacaatgagaagtagattatataattgatttggcacctggtgtgggacttgtattaaaagcattttacaggatggtttcagtagaactcaaggagttaaaaatacaactttaggggatgcctgatttaggatgtactcaacccagtgtatcgccttggagagctctggttttgctgtgaaaaagaaggatggttcccttcaaatgtgtattgacaaacgagagctaaacaagttaacacttaaaattatgcatctgttgcccatgatggataaattttttgattaccttcatggaaagtctgtattttcaaaattagacttgcaacctcgttatcatcagctcaaaatttgggaagaagataatctgataattgcattttagaccaggtatagtcattatgagtttttggtaatgtcatttggattggtaaatgctctagcagcctctacgattctcataaatagagtattcaagaatttcctcgataaccgtgttatagtggttatcgatgacatccttatgtactcttagacagaagaagagcaggagcaacatctctgaattgtattacaatgactcacggattacaagttctatgaaaaatttaaaaagtgtgacttttgattatcggaggtgtcttctttagggcacattgtcggaaaagatggaatcatggttgacccg

SEQ ID NO: 128316 - DNA, 693 bp, Cannabis sativa
tataacttagatattattactgccaaaaattaaacttaagtttttatttacaacttggagttaaacttgggtatttataccgcaaactactctaaaatttttgtatttataagtaaatatttaaatttatcaattaaataattttttatttaattttctataaaatattgttaaaaagttatataaatattattatttttaaatcaatatataaatattattaaagctataaaatacatatgttattccgatttttgcccacctgacatgacatgtctacgtgggcaacatcagtgccacgtgacagtatagatcgccaacgagaaggccaagtcatttacttagcacttcaactaacggagagtccgagcactcaagcgggacgacgaatgatgaaccagccacctcaaggaggcagactagccacccttggccggccctatggcctacataggacggctagcttctggacatcaaaggaccggtcatcatgcaatctgtaggtgcatggctggccagatattggcctgacaagactttggttcgtagcttcacacgtggaccgtaagccagactgggaattgggccttaataacccacgaaaatagaggaaaaatatctattttcaaggggcattttagtcatttgtattttactaatttaatatgtaaataacaacttattttacctatt

SEQ ID NO: 128317 - DNA, 892 bp, Cannabis sativa
agtcacaactattttacttttagcaacaagttttgttgtgactaaaagtaaaattttttgtagtgacaaccaaaagagttaatagtaatgagcagcagaacacctttctgtatatagtatatccacaacattgagcttagcagtgctatcagatatggtagtgactgaaacccttatgctaatttacttttgtaaatcttgtgaaatgttggtctgcaacaaatatattccaaatttaaatatattaatactaataataatctcgtgaattaataaaataataaatatagttaagagatcttcttacattggaggaaggaacaccatgaaagacacgatgttacctaagacattgaagacaatgatgagggtagccatatccagatgggtttgtttggttactgagagagagggtgggacagaaatgaatggggttgggtgaggacggtgatagagaataaaaatccagagagaacttggtttggttgctgagagagagggcaggacagaaatgaatggggttgggggaggacggtgatagagaataaaaatccagagagtgcttggtttggctgccgatagagagggtcgggcacaaatgaatggggttgggtgaggacagtgatagagaatgaaaatccagagagagcttcgtttggttgtagagagagggagggcagacgagggcaggacggaagtgaatggggtttggtggggacaatgataaagagagatcggagaatgcaaagaaataattgtgagagattggtgctcatttggatcatcactaaaaggaggtcaacagggtcggccctaggtataggcgggctaggcctgggcctagggcccactcattttaggggcccaaataaaaaaaaaatatcttttaaaa

SEQ ID NO: 128318 - DNA, 1456 bp, Cannabis sativa
  modified_base (1183)..(1189): a, c, t, g, unknown or other
atttatcccaccctgctggatgggataaataattccagacagatgaggttagctggattagttatctagacttctaataagcccaaacactgaattggacaaattaatctgtctaattcaattcaattttacgtaccaaacagtcccttagtgttttgtgggttacattacaattgattgcaccttaatatttggtgagccaatatttcattaatgttgtttgtgcataattggaccatttggcggcttgcggaattaagaattgaaactctcttaaaattttttgaaagatgctggcttatatatatagattatttatttgataaaatataaagatgttatattataaaagttaaataagtattattatgaaaaattgtattgttgccactacaggattgatattattttttttgaaaaaaaaataaaaatgaaaaataaattaacagtgtgataatatttatagttaaaataaataatatcttaaataataatacgtaatatcataattataatatttttaaagaattttatattatatttaaaaattaaaataacgtgaattgagaaataaaataaaatattatatttttaaataatataaaaattttatagcacatttaaaaaatatttcgggcggttagagatactcttatacactactatatatatattgtttataatgcagttgagcaagtcaaaagtgtgagatatatatagacacccaataatgtcatttctttccttttcaaaaatttaaatctaagcacatgccatctttaatttatatctataaaataaagttaatgaataagaaaattgagtgtaatatttttgatcaatgcgggatgtacatctatctatgagagaaactgttggtattcatggtgaggctaactaattgctgatgtgaatctcattgaactttcagccctctgagccaaataatataatccaaattaaaactaaacttttattaattttagtagactcgtgtacctaattacctagactctctccattataagtttaattagtgtaaatcctagctagttacgttaaaatgcatcgtaatcattcaaacaacttccttagaaaaatagtagaaagctattaatttatcgacaataatttaagtggtaaaaaaacagtaggttttgagtttattattattattattatnnnnnnnattattattattaattttcattttaatttctcacacattatttttatttagtgatagactagaaagaagttcctatacttagtagaatcgacaatatatagttataaatcaatagaatagaaaaacccaaaaacaaaaaagttacaactccattgcaaaaaattgcaagtaatctacgattggttaaattagagtcagggccgacccaagtattttggagccttgtgcaaaattttaaaattaggctttttttagaaaaaaaaaaaa

SEQ ID NO: 128319 - DNA, 1557 bp, Cannabis sativa
taattatatttataaatatatataattgtggattagtttagaatgaaacctttaaactcatgttacaaagtatgagcccccactatcatgtcaatagtacgatagtttaaattttcattttttataataataataaaaaaaatcactaataaaattagtcttttgagttttatttttatattgtatttcatattaatatttttatttaagtaatttgcggtgtgtaattatttaagtttaatttttatttgcagataagtacttataagtgtcaagtcattatctacgtgttattttcttatttatattcttaaatgaaaaaataaaaaattaataatctagaccaattagggactaccatgtgtcttttgatttaacacttaacaggtattgtactgaaattttataaatataattaagtattattacggtaaaaaaaattaacttaaatatttatctgtaataagatattaaatttaaatatttatgttacaaattattttttacatttaatatttataattttttataaaagtaaaatttaaaatcattgttgaactttattacaatgtaattattattatgatgatgattttctttcttttacaaaatatgcttttttactatgaagaaataatctcatgagttaatctaatcgtaaggttgaagatgttgaaaaaaagtaagattatgggtattttagtgatgttgtctatgaaataatcaattaaatttgaaacattatttattaatttggacttgtttgctatttttttgtacaaaaattctcagacaatacattctgtacaacaccacgagttgcctatttactatttattattattattattattattattattattcaactgttttttctttcattaataacttataattattttttttattttttttttgagaaaatactgaattttcatcttttaagtttgggttgcaagccactaacggtggtgggcttttagcggctctctttctctcgtttttggagttggttttgtgcgaggttctttttcaagcatgtgcttcggccttggtggagtgttgctctttcatatttttaagttttcaatttacttcctttcaagcgcctttgctccggtgcgcaatgactcgttatgaactttcggaatcttgtagatgtagaagggagattatgatttaccccaaagaaattgtctcatcaccttcactgtttagaaccatttcaggaggtcgagcgtggttttttctcgtcaaaagttggcagtgctccagggcctgtggacctgtggtctacctgtcttgggcttgcattttgcctcatgtgcgttagggggatggttgttgaagttgttctatctttgttgttgtttgtttaatttgattttgttaggttgtttgtgtaacctccccgctttaagcctctattgggcccataaacccacaaaataatgattttttatacacgagtatgtcactatggctgcttcctagattgatgactgaccctacagaccaatacgagtgtttctagcgtgctttgtcctcacttgc

SEQ ID NO: 128320 - DNA, 613 bp, Cannabis sativa
  modified_base (548)..(563): a, c, t, g, unknown or other
aatgagaattctaatcagtttgttggaaccaccaaaggaaatcgaaccaataacatatctgacactcgacccatttgttcacactgtggagttcctggacatgctatagctaactgctatataatccatggttatccacctggccatcttttatatggcatgtttcctagagaaacacctaaccaatttggtaatcaacaaaacaagtcgatagccgatttcacagcaagaaatgacaacaaagaaatgttaatggagaactggatcttgctgctcaatgtcaaaaagtcatgaatttgctaactcagaagttgcaggagacagctccaccaccaccacaaactaatcagcctgttgtatcaaatattttaggtaaaatcacatctgttcctaatttcagttggatcatagatactagtgcaacacatcatgtgtgctccaatccatcattgtttcattctattcaatttgacagtaagattaaatctgtaggcttgcctaatggttccaactgttgggttttctgccctaaataaaactcatttcannnnnnnnnnnnnnnntagttaataaagatcagaaataaaattttatgttgcatgggtcacatgat

SEQ ID NO: 128321 - DNA, 756 bp, Cannabis sativa
acttgcaatggggtcaatttgggagagtttttagatcgagcaggcagatttataaagcttgaagaagcaattcaacgagtagacacaattggtcagaaaaagaccagccagagtcacaccactacagccaatacattcgtccaacataatcagaactcttagcctcaaaataatagttgttccggtcaaagtggtaaaagatcgaacaagacaataatcaagataatgggaagaaaggaaaattcaataataactctcagaaacagcatcctcgagacttctttcactatccttattgaagaaatagaaactatttttacagcaacttagtctgtggtatcgtacaagagaccccctccaatctaggaagacataagcaagagagacactactaagtattgtcacttttatggggactgcaaccataaaaccaacgagtgcaataatttgaaataagaaatagaattcctcatcaggaagaataattgtcacttacgaaggttcataaaggccgactaggaccaaagggttgcccaaccagataataatcagaaccagttgattctcccacctgcggacggacatttataagtgattattgggtgccctcatattgttggatactcaaacaaagctagagagatgtatgcttgaactctacaatatgaagagaaagatgaaataatggttgtggaagaaaaaaaaaacaaaactggcatgcagagaagaactagtcatctcatttagtgaagaaga

SEQ ID NO: 128322 - DNA, 1597 bp, Cannabis sativa
  modified_base (1554)..(1561): a, c, t, g, unknown or other
catggttccctttaaatatcttaggactcttttagctccattacagtgaactgttgttggtgcctttagaaattgggtaagtttattgaccacataagagatatctggcctggtgtgagataaatattgcagcccaccaattacacttctataaattgtaggattagagagcaattcaccttctgttatggacattgaccttcttgcagtagcagatgttggacaaggctttaggttggtaaggttgtgtcttcgaatcaagtcttatatatatctcgtttgtgttaaatataagcctgtcacatccctgtagacttcgattcccagaaagtagtgtagtgagccgaggtctttgagagtgaatcttctatagagttctgaaatgaaacttttcaacttgttgttgttattgcttgtcacaacaatgtcatcaacatatattaacacaaagattacatcaacaccatgtttatagaagaacaaggatgtgtctgattttgagttcttgaagttccaactaaccaaagtggattttagcttgtcaaaccaggctcttggtgcttgttttaagccatacaatcacttatttaacttgcacacacagtgttctttccctggttcttcaaagccttgaggttggagcatgtagacctcttctttgagagtgccatttaaaaaggcattgtttatatccagctgcttgatttcccatcctcaagtgacaacaatggtcaatataattctaactgtagtagctttaataactggactaaaggtctctccaaaatcgattccaggcctttggtgaaaacccttagcaaccaagcgagctttgaacctttgatgtgagccatctaagtttaatttttcccgaaaaacccacttgttgcctatcaagttctgatctggtttgggaggtacaagtacccaggtgtggttgtccttgagagcattattttcactttgcattgctttgttccaaccaggatgagaaagtgcttcctcaacactgccaggttcttttgtttctgtattgcagtgagtttgtcccatgaatacccgaggtttgaagattctagcttttgctcgagtaatcatgggatgaccagatgtttgaggatcatctgtagtctgtactggacctggagagtttcttgttgaatgttctgttttcagcaaattgtattataaaatcatcctgaaaaatagcagcaggactgatagtaattcccctctcattttctgcaactggagactcatgtgaagcaacaggtataggatgcagagagttaaaagagtgagtatttacctgagagtgtgttggtgtggagagtgcttcttcaggtatgctcaaggatgatgagggagttgctggtctacgagcagaaaaaccagcaggaggttgagaagatggcagaactgaccaagaggaactttgaattatgactggtttttcagcttggtaattgtttacaaaaccaagtttgaatggaaactctaactcattaaacactacattccttaagatgtagattttgttggaaatattttacnnnnnnnnagatttactaccatatatgtttcattaacatcctaa

SEQ ID NO: 128323 - DNA, 1822 bp, Cannabis sativa
  modified_base (38)..(83): a, c, t, g, unknown or other
  modified_base (1481)..(1494): a, c, t, g, unknown or other
aattttaattaatcacgtttttctataaacctcgttgnnnnnnnnnnnnnnnnnnnnnnnnnnnnnnnnnnnnnnnnnnnnnntaaggtagttagggtgttacatcccaacttcccaccagcaaccattaacacagcagccacctacacatgactccagcatgttatctcgagttcatcaaatgaaaacaaggtctcaaagtggaatctacaaacctaaggcctacttatctactagacatcctttgcctgaatctcttattcctactgaaccaaggactgttcagcaagctcttaaagaccccaaatggtttcaatcaatgcaaaaagaaaatactgccttgattcgatctcatacttggactcttgtaccttatgagtctcatatgcatgttattgataataaatgggtgtatcggattaagcttaatgcagatggctctctcaacacttacaaatccagacttgttgcaaaaggatatttacaaacacctggtattgattatgaagacacctttagccctgtggttaaaccggttaccgttcgaacttttctcactctagctgtcacttcagcatgggatgttcgaaaattggatgttagcaatgcttttttaaatggagatttgcatgaaactgtgtatatgagacaaccaaaaggctttgaggattccaccaaaccgactcatgtctataaattacataaagctctctatggtttgaagcaagccccacgggcttggaatgagaaattgaggaacactttgttgcagtggggttttcatgcttcaaaatcagacacatctctctttgtttatggatctggtactagtctgattattctcttagtgtatgttgatgacatactagttactggacctgattctagtctcatctccaaactaattgctgatctaaatacctcctttgccttgaaagatctcggccctttacactattttcttggcgttgagatttttagagatgctgcaggcatgtatctctctcaatctaaatatgtgactgacctgcttgttcgacttcagcttgatggtgccaaaagctgccccagtccaacaagctcaactcaaaaattatttttggctgatggggaaccttttcaggacataactctttatagaagcacacttggtgctcttcaatatctcacattgacacggcccgatgttgcgtttatcataaataaactaagtcagtttattcatgccccaactgttaatcattgggaagcatgcaagcgccttcttcggtatctcgagggcactctttctctcggtctcctactcagaccagcagcttctatggaaattagtgcttactccgatgccgattgggctagttgtattgatgatagaagatcaacagggggttatgtggtgtttcttgggggcaatctagtttcctggtctgcaaagaagcaaaatgttgttgctcggtctagtactgaaagtgaatttcgannnnnnnnnnnnnnttctgctgaaatcaaatggctggtcaacttattgtctgaattacatattaaaccagctttctcaccagttatttgggttgataaccaaggcgcagctgctcttgcagccaatccagttttccatgctcggagtaagcacatcgaaatagatctccacttcatcagagatcaaatcatggccaaagagatatctgtcagatatgttccagcaattgatcaagttgctgattctctaaccaaacctctgtccactgatcggttcttatatcttcgaggcaaactcaacatggctgaaaccccttttcgtttgaggggggatattaactaa

SEQ ID NO: 128324 - DNA, 584 bp, Cannabis sativa
tggtagcgaggcttatgaagaagggaacgacaaattccatggcggttggtggtggtggaagtagtggtgctagcgtggagttcgcgaggtgcgattgttgtggacccagcttacattgctaaaattaggtcaaagaatcggaaccaattgaagtgcaaagttcagtgcattaaaagaaaagcccatatcgaagaagacaattaataaatctagaaactaaaaggaatgaagaaaagctttcagggtcgagatcatttggttcggagccatagttgatgatttggagagatctacaagagtttgacacctggttggtggtgaagctttgcgaagtcgagataaaaataaaaatggagatatcgagatggagatggagagagagagatagaccgtcaaggaaaggaagacgattcactagcaagattaaggattgggaagcttgcggtaaaagtctccaaaaggttcactttgttgcagattagtcgccaaccttgagaattagcagtaatagtcctcaaggtcatatttttgtaagtccgttagtcctaaatttaactgctctgttaacttattcaaaagtgcca

SEQ ID NO: 128325 - DNA, 1527 bp, Cannabis sativa
taacacatgcttattggttatcacgggaatcaagccaacaattgagcataaaaagagaaagtcaatttttgtgggtagtgacaatatttataatatttctaaggcaattaataataaatggcgagtttcttgtaatatgaaagttgacaatttagatactaatttgaatattggagctcctacaaaagaggtaagtcaacctaagaataatggtaatttattatctaattttagggagttaagtacatgttgtacattactaattttaaagtgaccaattaatgataatgagatgcttgttggcgtgactaattttttgcctttagatactggacttggaggtagtaatgagcccccaattatttctgggtcatccactttggatgcaattttacgtgagcatttgattgataattcattagtgtattgcttgcatggggctaacttggctcacgttggatctgtgttgaaccagattgacgggatttttggtttttctgtgggaatagttgatgggagttcaaaggtacgcattaagaaaagagttctccttgtatttatcccttcatgcattgctaaaagaaaaggtagtaaggggcgtaagtcacttggagttgatttcttcgccccagcttctatctcacattcagtatccaagcatcatacttttgattctaattctttgatcgaaacagtaatgcttcaaggtgattttgtggattttggttataattcgatttcgatagaagtcttagattcatctactcatacttcttcaattcaaatattgtctcaaggtggttgtgatgtatctagttcctttgagatacccaaaaaggtgaacattgttgatggggtcatttttgatagcttggtggtgcctacttttgtctctcattatgaatgtgttggcgtagaacgtctagattgtgggaaatgaaatgacgttccaagctctccacaccaatgtctagagtgacaaacagacattttatttttgtcaaaaactattggttctcttgctcagatggaattgttttgtgttcgtttgttttttttttttttttagaaaattggttgttgaaagagtgggtagaagtggcagcctttgtttgatttggatggacaatgtagatgttactttgcttaattttttaagaggccatattgataatttggtctcctcttctaattttgctcattggcgttttaccgggatttatgggcaacttgatgcttcgcttcatcatgatttttggacccttcttcaaagagtggcctattataattcttatccttgggtctataggggagattggaatgaaatttcttctgtgtctaaaaaggatggtggtgccccaaagcctaggtatttgatgaataatttttcctaggggtgttcgcggtgcgggtagtgtagtttttgaccattattttttaaaccaacccgcacatgcagtttttctaatttctcaaaccgcacccgcaccgcgaaattaaaaaaccgcaaaaactgcaccgcaaaaa

SEQ ID NO: 128326 - DNA, 987 bp, Cannabis sativa
gaaaacattatttaaagatgcaaggagtttacgacaatcttctataataacctcaaaagaagaaagcacaggtaatgaatttcgaatagcttgaactgctaccaagcaatctgtctccaactccacttttctctatggttaagttttaatccaacttagcacttcctttataccaattgcttcagccaaatccagagtgcctatactagcaaaactgcccaacttagccattactaattccatttgagagtctcgatcaactatgtcataaccaaacacgatctcggaaaatagcgacatcaatagttatcttgattgcattctcctacggcttaacccaaaatttaactccatcaccagcttaaaaaattgaaaatgaagcctttgtacctctatgttggactgatttccattgcacaaaataactcataaatgagataagaacaccatccaccgtagcatacttttggttctaaaccaactcgtttcgagccttccataatccccagtacaacataacaacctcctcacacttgtctctattgcacctttctaaaatttaatcaaaccaactgcaaaaatcaacgataacaatcagcctaatcccagccaaaagcctctgccaacattgagcagcgaatgaacaagaaataagcgcatgaaaaatagtttcctcacctctttgacaaaccaaacacatgatttaaactaggaccctcttaccacttaattgagtcaagggcaaacaatttgaagcagcccgccataccatgttgagagctttcggtggtacctttaaattccaaagcttgcaacatcttaatcgttttcaattctaaaattaatgttaaaatattctattaaaaaaactagactaaaaagatcttctaaatgtaccataacaatacttttaagaagtataatgtagacttacccaactcgtaagtatacgtatcgttttaacaagtaatactcaggtaagtgaga

SEQ ID NO: 128327 - DNA, 1773 bp, Cannabis sativa
taatattaactttaaaatatgaaggaaaaaaagtaaataccattttaaaccctgtgttttgcaaaacttaccaattgaactcatttattaaatgacaaaatagacccaatatttttcaaaatagtaaaaataggatcttgagctcaattttcaacaattttattcttttaatatagccaactttaagacaagagcctcccctttattcttttcttgctttagttgaccttggtgtgttttcctttttgacctttgtgtttccctttctgtctgtctgttgtccctctttgtggtgggttgtggggttggcttttgtttcagctgtggggtcttgctgtgtccgtgggttgggtgttggttctactgtcttttggcctagttaactgattgtttgtgtgggtcttttcactttgtgtttgtctttgttttgtctgggtttgttttgtatttatgacaatggatgaggttgttggcgattctggtgggaagcaaggtagatgcatctccttaaatgaggtatctatttcacttgcccccagtgtggtgactaccaaggttctatctaaaatttgcctctttagcaaaatactctcctccagaacatttattgttaaggatgtggagaaggcttgctccagtatctaggaaactcagggttaagtggagcctactgatggtttacttgctggctccaacacatttcggtttatgtttgagaatggctcgattagcaaacgagtgttggagcacggaccgtggtgcgtcaaaggggatatgttggtgcttctctcgttgtcttctgggtttggcgtcaaggtgttggcttttaactcgaaccgtttttgggtccaaattcactcactgccccatgactacttaacctgagtcaatgctaacttgttggggactttggtgggtaaagttgtgtctattgaactggacgaatcaaagcctctcacttggaagagatggattcaggtccaggtggaggtggatgttagcaagccgctgtgttgcagttgttttttcaaactttccaatgaagttaaccagtggattcaactcaaatatgaggaataaggaaacttttgttatatgtgtggcttgttggggcaccaaaggagggactgcaatcttacctctccgatcatggtgctgaatgacaaaggtttcccttttccgttgttcggaccgtggatgaatacccactcattctatgccaactgcttctctggtaagagtggaacctcacttgctatgaacgaagggaacgagatagtggcgattggagacggcctgaaatcgattggagtagtgcgttcgtcaccggtaccggagatggttgcgaaggacctgcctgttgttgctgctctgattacgagaaaggggatctcgagatctatgcggggccggtcttcgaggggacgaggtggtacctagggtctgagggcatggcacccgagatcgtctcctgcgacggagggagttggtgctaatttgggtgttgtttcactttcaccccacctggagatagaaaagtcgtttgcccttttacccattacaaaagatattttgaatggtaatgggggaggtgagtttatgggtatccgtgtgagtgagggtttgaattgtgtggtcaatgcgtaggctttgactggggctgtgggccaactggatggagtgtgtagtgggccgaattatggtaaagagaaaagtaaggattatgggcctttttttttaagagttgtgaagttccaagtgttgggttttgtg

SEQ ID NO: 128328 - DNA, 544 bp, Cannabis sativa
  modified_base (511)..(518): a, c, t, g, unknown or other
tttaaaaaaaaaatagtttaaatatactaataaaaaaatgacacttggataatgaagatttctagaaatataatttaggtattattaccgtaaaaaattaaagttaaatatttatttgtaattttaagttaaacttaggtatgtatgccgcaaataactcttataaatataattgctaattttgttcaacaaaataaaatatttgtttaatgtatgtacctgctataatccaataatgcttcatcgatgatcctgcatattgacaaaagcttcattcaattaaaataactctatattcatttattttaaagcattgttattaggcatgatgaatgatgttcaacactaaagcgggacatataaaattattacaatgtggagtttattacattttcataatttttagaaaatgtatatttttattatttttatttcaactagttattatatatatacatattaatgtattataaaaatatcttaaacatatatttatatctttatatattannnnnnnntatctaacggcatttcttggtttaac

SEQ ID NO: 128329 - DNA, 752 bp, Cannabis sativa
attttatttaggataatattttacatacacttaaatgtatttgtctacatttgctaatatatttatttgcccatactaatgcctttacctacacataatatgagctacagacacttggccctcttatatatatctatgtggtcctatacaattctgccacatggcacttgatatatgtatatgtgttcttataatattttgccacgtgtaccaatcaaaattttccacgttggcctatcaaaatataccatgtggacctactagaatatgccacgtacatataccaaaatgtgccacatgtgctagcatggcctatgactaagctgacacgtggattgccacatatgtaacatagaacgacacatcatcatccacatcacttgcttactcatcatcattgactaagaaaggtgggatccaccatattttcatacctagaaatataattaattgtaggtgaagatctttctccataatcttttatctacaaataaaattatttgtttatttgtaggtacatctgtttgccaggtaatggccttattttcttgtagtgttccttgatttttgagttgacctagggttcataatgtcttgtctatgtcttttttctagaggaaaatcgcaaccttataacaattacagtcataattttattgccaatgtttttggtattgggttcatacaggttttgttcaggaaaattgttcactcctcccaggattgttcaggttcatcaaacagtgttatgt

SEQ ID NO: 128330 - DNA, 1386 bp, Cannabis sativa
ataaaatggattacattgaaatggaattttatttagggcatattacccaacaagaaatagtacaaagcagcaagctacaaggaaggtaaagaaccattccaaactaactcattatctagtctaagacctagtttagctattttatgagcaatcacattataatctctaggagcatgacaaattgctggccttggactgaaggataataagttcttaatgttacttagtacatcatccaaaacactattattccaattacaagagataagtttatcaactattgatttacaatcagtcataagcacatccacgggtagattaatcagttgagcccattggatggcctgataaatagctttagcttcagcaacagcaggcggcacaagcccataaaaaggagtagaaaatcctgctttaaccctattacaagcatccataactaccactccaatactatgctttcgacaatgggaatcagtggttgcatctgtgaaaattctgaagttgtatgattctgttggttgtgctaatgctctaggagcagcagaattgtgacctgttgcatgaacctgctgcacatctaaatacttaaaaaagaagttgagactccaatcatacacttcctttgggggaagggtgaattaattatgaaaaagattattcctttgattccaaagagcccacaaaaaacaatacaaaataccaatactatctttatctaaacctcattttcaaaaaatatatatatatatatatttatctaaaccttgaacaagactaataaaaaactcataataagtagcaaacttggaggatcgccaagcttttttggatatggagcaacctagcaaggcatgcttggtagtctcaggtgcaagtttacaaagaggacacaaaggagaatcaatcacacatcgtttaaagagagaggacgctacaggaagggcattagatagcattctccagacaaagagtttaactttaggagggtaacagatgactaaattttagaccaaaactttttagaagcagagaaagaggaagaggaggggagatcctgatgagaaaaatccaaatggtaagcagatttaacagtgaagagaccagaactttccctttcccagattaaatcatcatggccataacatccagaaacaaccttaagaatatcattaatcattgcttcatcaaagcatgatcgcaatttaccaacatcccaagttcctgaatcagtaataaaatgggacaataaacaagaagaaggataatcattattaataaaaaaaattatgcttattgttatattatttgatataatataatatagattaaaatatttaaatgtgacaaattatatattaataggagattaatatatattatgtg

SEQ ID NO: 128331 - DNA, 542 bp, Cannabis sativa
aaaattatatgaaatttttttagaaaaaataaaaaaatatatacatgatttagaagaaaaattatgaaaatgaaatcaaaataagtactgaaattaatataaaataatgtgagaaagaaaattaaataaaaatattaagagtaattttttaaaattatttaaatttatatttttttgtaataattaagtgtgtttatcattttagtgcgaataaaactccatattttaaaatttttaaaattttataaaatattttatataactataacataaataactataaaaaaaaatttactaaacaattctaccaacaacgaaaacaatatggatagatttttgtatttgagtgcattataaaatcacaaatgtataaatgtatgtatataaacttattaaaagtgactgttatctttatgtatgatcttatcatcagttacttatatatattgtacgagacatcaatatattctcataagatcatatacacaaattgtgtaacgccccgatattttgccttattttacaaaaatactattttcatg

SEQ ID NO: 128332 - DNA, 674 bp, Cannabis sativa
gggggggggggtaaaacaggtaacctcaaaactacccttctttataatagtcttcagaagcagaatggtgatagattttacaaagctaccttgagctatatgaatttgctaaaacaatggtttgtgttgtggaaaattgtgaattctcatttgcttacttgtgataatcttgacaaactccatgttaagcttgtcactaggagctacccgatttgtgaagaccagttggaaaaccatgctcacctcttttttagatgtagtctttctcaaagagtgttagatcgaatctttaattggttgggctacagcgcttggccaattacttttgagggctagaaaaagtggttgtccatgagaatttccgatatgataaaaagagtaatgttgacctcgcttttagccaacaacagtgagtctgtaccaccatcgtacttgtggttatatttagaatgaagagcgattcttgattcttctctcaatgaaagcaccaaaatgttgagctcgcttttagccaacgatagtgagtctaatttagtaagcggcaagtagtttataacgattgatatatgataaagcaagataaagacacaggaattttatagacgtttagccccgagcagttcggtaatagccgaatcctcgttatttgaattaactcaagaacaaggagaaag

SEQ ID NO: 128333 - DNA, 1531 bp, Cannabis sativa
  modified_base (27)..(39): a, c, t, g, unknown or other
aggatgttaatgaaacatacatggtannnnnnnnnnnnnctggtaaaatattttcaacacttaaatccaaggcaccaaattataatcacctaagaagctttggttgcttggcctatgaatccactttgtcctttattagatccaagttttctccaagggcagccccatgtatttttcttggatatcctaatggcatgaaagcttacaagctattagacctgaattctaataatattttttgttctagagatgtaatatttcatgaaactatttttccatttcacactcatgatgcctttactaagaacaccagaatttcttttttacatctgctacagacttttttcatgataatgagtaggtttctaatggatctccatcacaccagcagcaacctgctgttgaacctgctgctattgacatcggaatgcctcataacagacgcatcaaaacctcacataagccctcttacttgcaagattatcattgttttcttgctcaaactaattgtgttaaagccttgcaggaatcttctaaagttactccttattctctctcacaacttgttgattacatcagactttcacctacttttcaagccattattctggccatttccagccattatgagcctgattttttcagtcaagccaaggggattccagtgtgggacaatgctatggattgtaaaattgatgctcttgagaagaatcacactttgatcattgtttctttaccagctgaacaccatgctattgggtgtaggtgagtctacaaaatcaagtacaatgctgatggatctggagagagatgcaaagcaattgctaaaggatataaccaacaagaaggtgtggattacacagatacttttgcacctgttaccaagttggtgactgtcaaacttgtgcttgcacttgcagcaataaaatggatggtatttgcatcagcttgatgtcaataatgcatttttgcatggatatcttcatgaagaagtatatatgactctacctcctgggtatacccctaagggggagcttccaccaaatgttgtatgcaaacttaaaaaacctctatatggattaaagcaggcatcaagacaatggtttgctaaattttctagtgctttggttgatgaaggatttcatcattccgcaacagatcattcattgtttatgaggcacaatgaagagaacttcatcatccttcttatatatgttgatgatgttatcttggctggtaataatttggttgagatggagactcttaaagttcatctgaacaataagtttcagcttaaggatcttggagatctcaagtatttccttgggttagaagttactagatctcctaagggaatcatgatatcacaaaggcattatgccttccaaatgttagaggatcttggccatttggggtgcaagcctgtgaacacccctatggaagccaatttgaaactaagtcaagatgaggaagatagattggttgatcctaagctttgtaggagagccattggaaagttgcaatatttgac

SEQ ID NO: 128334 - DNA, 1189 bp, Cannabis sativa
gttctttgacctcctattgcccttttgtagaaaaatggtatttttgccatcttgccttcaagaaaagatttgcatacagaagagttccagcttttagttctcttgaaggaccatcttttgttaacctgtttattctgtctaagctaatatggcctaaatgtagatgccatagatacggttcatcatcattagaaactttttgcctcttatttgattgaggcaatgctactctaaacaattcattatttaaaattaattgctcacttggcttgagcacataaagtctgctactatgttttgtagaacaaataggcataccttttttttttttttttttttaaataataattgcattcttaataaaccaatattgaaaattattcatgcaaaagagataaagaaataatgttcctgatacattcaagaataaaataaacattgttcaataacaaaaatttattattaaatttcaaacagactttgccagcacccttggcagacacttatgctccattacccacgcacatagtcacctctccattggccagctcccttggcgattcaagtatgtacatagaagaataagtattattagtggctttagaatcaataatccataaggacttatcatcttccactaatttagattcaataacaaataaatcatttttacctttcataagctcggagcgatacttgttatagtttctcttctagtgtctcattacgccacaatggaagcacttgccttttgcctttttgtccttggacttggggatgactttgttcttcttggccttgggtgacttcttgcctttgagcttgccaccattgttgtcctaattattccacttcagtttcttatcagaagaaggagagttagatttttcttcaatgatgtttgattccccttccttggacttatcctatttaaggttctcaaacatagtcaactcgttcaacaattaagtcatgttgaactctagcttgttcatcacatagtttgtgatgaaatcctcgaagcaaggagataaaacacaaggatcatagtcacttgagtcctctcgtcaatgatagcctcgcacgtctgtattgttagcccaagatatgtttccaagagggggggtgaattggaattttaaactagtttcagaaatttaaaaatctcaaagacaattcatgcaaatat

SEQ ID NO: 128335 - DNA, 1082 bp, Cannabis sativa
cataaaacccaacactaagatcctggtaaaattatttccaacaacatcaagcttaataatgatacaagaaaacagcttcaaaaccccactcaatacaggagtctcatcgggaaactcatctatttaaccatcaccagacttgacatctcatttgcagtcaacaatttgagccaatatctacacacacctcgagaaccccacctccatgcagttaacagaatcctccagtacttgaaaggcacccctagcccgggtttattcttccatgcctctgcaccagtaccacttcatctccaagcctttgcagacgtagattggggagcctatttggacacttggtgctccatctcaggatattgcatcttccttggcaattctctgatctcttggaaatcaaagaagcaacacactgtctcactttcatcagctgaagccgaatacagagcaatggctaatgccacttgcgaactaacatggctacactccatcatgcacgacttcaacatcaacataaaactcccttcaacactcttctgtgacaatagtgcaactcttcatatttttgaaaatctagtttattacgaacataccaagcacgtggaaataaattttcatctcattcgtgaaaagatccacaatggcaagatcaagaccaatcatgtcttctccaaatctaacatagctgacatctttacaaaatctcttttcccagcacattttcataatttagtctccaagatgagtgtcaaaaatttttacacttcatcttgagggggctattaaaacagttaaaggctgttaattaattcagttagacagttaggttattttctagtctttcctcgtgtactctatgtatatatagtcctatgccattgtatccaattcatttaatcaataatattgttactctgtttttcatttcaatttttctaatacacaattcagtatatgctttacaacctttgtacacaatccataatagctcgagcatgcttggtgattttttttcacatttacaatttaaattctagcatgataatcagcgataggtattcttacaccttggataagtggtatgt

SEQ ID NO: 128336 - DNA, 581 bp, Cannabis sativa
ttgtttattctaatggggtgaatccctatttatacaaaagtattgactaaaggaatgagaaactaaattaatatgtaataaagaaaaatataatcaagcatcaatggtgataattaatatggtgatttggacattcataaataatatttcataacaaatatacatttattgtgccaattataaggttggcttataaagaacttgaaaacttatagaaattacataatttatggaagaaaaaaaattagaattcactttttttttatgacataattaaataatagtttgggattatagattttttagtttgtttagcttttttctgtcatatttttgtataatgaatcaggaataccacattttataatttctctcgtctgtctcgctctcttttactcttgcgagacctaagcgaactagacacaatttcggttgacctctcccagttgttgccacaacgaaatgttaaagcttctctctaggggtgttcataaaataactgatccaatccaatccgtaaagtgcggattggattggattgaaaaattcaaaatctgcacttgtgcggatcggatgttgat

SEQ ID NO: 128337 - DNA, 752 bp, Cannabis sativa
gattcggatcttgacccacgacccaacgcttcaaccaaactcgtagtcggtgtctagatcttggaatcgtaccaagacccaaacctggaaccatttcgaagacccagacccgaacataataccagacttgtgctaggacctgcaacctaggaccggtgacttaggaccttgacaagaacctagacctgtaccagaacccacacccagacccatacccagaacaagaccaagacccagacacaaacacagactgaagcctagaccaagaccgtaacccaaacccagacccggacccgaactcgtaacataactcagactcgaacccaggactcagacctggatcgagattaggattgagacccaaacccagactatcaccgagacctgaacctaaactgggacaagtactcggactgggacccgagaccaggatggggaccaggacctgagaaccaaaccgtgacctataccccgacaaggtcaagacccgagacaaggactagtacggaacatggaccgggacctacacacggactgggaacataacccagtccgggacctaggacccttacctgaattgggacatggacctatgactgaggacccaagacccaaacctagacccaaaccttaacttgagactcaaactaggacacaagacatgagctagaactggactaagatcttgatttagactcgagaccaaggacccaagacccgaggcttggacccgacccacagtcggtgtctaa

SEQ ID NO: 128338 - DNA, 674 bp, Cannabis sativa
ctgactgctttagatcagtgtcatagaggtttgcaggaagtgaaggcagatcatacaccttaaatgtgataggacgtggtagcgaataaaatatgcatttactaattataaataagataaactaataataaaacttaaatataatactgaatattataattttgtaattaaaattattaaaacatgaaaaactaaaattatatattaatttatttataagatgtgatataaatttttgagtatttataattaaatatttaaattaatgacaataatttttttatatgattatttgtaaaatattgttgaaaagttatataaatacatactaaaactatatatatgttagttattggaaaaaaatatataaaaaaattaaatcacgaattcaagcctgaatatgaaaaacgggttggcctgttaaagaaatacaggctgacacgagtaaagcacaacacgaatctgagcacgacatgaaaatatcgggtctacgggctagcggggcttatgggtcgtaccaggtctatgggtcgtgccgggtctactctttaaaaatgttggcacgatacgagatgacccattatttttaatggcacggcacgacacgacccattttttttaaaagtacacataaatatgggtaggaccagcacgacacacacgaacttacaaca

SEQ ID NO: 128339 - DNA, 823 bp, Cannabis sativa
  modified_base (48)..(72): a, c, t, g, unknown or other
aaccatgcaacataaaatgttatgtctgatctttattaataagtaaannnnnnnnnnnnnnnnnnnnnnnnntttagggcacaaaacccaataagaaggatccgtgagccaatgactttccatatggaattgagatgaattacgattttttgggctaagaacctgaaacttgaccttaaaggcacgatggtcagaaccatagaatcccaaatggaaaagagtagcctgcggatacagattgctccagagttggttcgaagtacactagtccagacgctctaaacttgtaccatgtctccaagtaaatttaggaccaacatgaggaagaggaatatggttaaatttatgcataaatgagtgaaaagaatgcatagcgtgggaaggaggggagttaagggagttcctatgactaacagaaagataatcgttgaaatcaccaatgactaaccagggcaaaagaggagcagtgtcaaataacctattaagtaaagtccaagtaatagttttttgatcaacataaggagaaccataataaccagaaaagtgtcagtctttaccattaaaattatttataatacaatctatgtggttaagggagtaggaaatgacattaacatcaatgcaatctttcgaaaaaagtaaaagccctcccccaagaccctgcctaggcacttctaaaacactatcaaaacgaagcttgtgtttgaagtgcattccacatccagccggcaacttagtctccatgacaaacaacaacaaaggctgatgctgcttgacaagcagggagagattacggaatgctcgagggctccctaaacctcga

SEQ ID NO: 128340 - DNA, 1183 bp, Cannabis sativa
agagagagaaagaaagagagagagcgagttcagacttagaggttaaggtttgccacttatgacttacttacttttgacttaggattttaggtgttatcccattttttacactatgacgtggtagaatacacaagtgacatgtgtcttgcattcttcgcatctggatggagatggatgttccgaacagacctcataaaatacatctgcttgttacccgagcagggtggaaggtagattatccgagcagaggcaagtttggctttccggactacttatcaggacttgactgcttcagaatgatctcatgaagtccaagcatgaagataatccctacaatcatgggattgagtcaaaggaatatggcaacctattccaatttcctattttgtgtattgtaattatgtaatgaatattccttcctattttatacattgtaagcaaaagggaaaccttccctcatgcattaaggccctataaatagtgacttagcttcactgtaaaagggatcgaaagaattgctttagagagaaatctaagaaaattactcagagattttattgtaagagcttagagagagaaaaacactttgtttttcgttctcgagtttatacaatctaaggggagtaggctattaccacacttaaggggccgaacctctttaaaatctggtattctttatttacttattcggtttcgctctattttaattatgttcttaatcacttaataattgactcattgtcgttggctaaaatcgaggttaacattttggtgctttcattaagagtaaaaacccaagtttgttgtttgtcttaagtcttaacaagcatacagaatggtggtgcaaactcgcagaggcctggtcgatcaaaacgacccaatggtggcggatcctaacttacaaacccctgggaataagagaggaccaccagggacaaatcctgaacatgccaacacacaaccacctactgtgggccatggtgtgacttccactctggctggcatcacaccaagtgtgcaagagacttggaataccagttctgcaaccaaccaatccactcccaacactggagtcccatccacaaccaatcttcacaggacggttagggatgatactgagattcaaaatctccgtacagcccttggactcatgcaaggccataataatgttgggttttatgcc

SEQ ID NO: 128341 - DNA, 1030 bp, Cannabis sativa
ttaatgattaaaatgtatagtttcatgtaaaaaaatttcaaaatgtataagttttcaaaataatttttttttgcacattttttataattatattatttttgttatttatgaaaaaagcccaataacaattatactaacttaatgaaagtaatgtcatcatttaaaataaataatgaagggattgtgacaggataaccatatgtatattttttttaattaagaacaaaattgatgtatatgtatgtatctatgtgggagcgaagtatacctctgaagaacttttcaaattgtttatgaaatatatgaaagaaagatggttttgttattgtgtcgcaatctaatttctcaagcaataatacaaaagatattgactttaaagcaatagaattttgcaaattaatagttggtctagaagattgtggacattttcaacacttttgccatttatatgctttgttcactgtttttggctttgtctaaattgtctttcctaaatgaaaacaaatcatgatttgtaaaataagcagctgcatacctctaacaaaatcttgtgaagtcattgatcatttggttaccttacaataagatctgaactggtcaaataaacttgatctgtgttgtctataaattctttgtcaaataagagcatctcttcaatctcaacgatccaaaatgaaaaaaaaaaaaaaataaataaaaaatagtgaaagaaaaaatggggaagagaagaagataacactgcacactaaaatctgaaacaactatccactcattttccgttattttctcactgtctagatctgtgtaagttgtttgagaatgttgttgttttgtttattctctgttcggagaactatttggccgattttttagctcgctgggctagagaatcgagggttaaaactccggtttggtaagggatgtagccccttttatggctactatgttgtttaaatattctttttaataaaatttcttacttattaaaaaaaaaaggctaattagtaattcccccccccccccccccccc

SEQ ID NO: 128342 - DNA, 934 bp, Cannabis sativa
ctctctctctctctctctccaacaagcatataaaaactagtaacccgatgacatgtaactcgtgaatctgatacctgtgaacccattctcacaggttttgactctgctcagccctagttaaaacaataattaattatttctaaaatcataattatttaaataatactttattatttcttaaatcatcaaatatcttatttgtgttatcaaggtagtttgggaaaaataaatatgtaagttctaaaatttaataaattaagtatatcgcaacagtagtttttaactcaacaaattaatttattagctatgaaaattcgccctaagaaaatcatagtcacactctcaaaacttcgatgttgttattcgcattttcacctgcataacccgttggaaataattaaggataatatttggagacaaagagtcattaagctgcctaagggcctcactccgtgatcccggaaggttaaggctctaaccttgtggaccagtcctcacagacctctgcgagtgaggtctgcaggaatggagaccaaaagaaggtgtccgcgagtcagcaatcctctcctctggaaggtaagacattttactcccgcgaagatcatgaaccttataccaagatgtattagttcggggtactcctttgaccgtggaggttcggtccacacgtgccaagctaagggcccaccgctcgctcatttcctatgtacaatgtcaaaggttgtccttcatgccacatggagtgtgcatgtccttgtgtactgtgcaaaacaatctaacggctaggaggaggggtaattcaaatgaggcaggccctgggatgacacgtgtccaaaacaccgtcagtaccaccagtacaatctgtcatcgataaagaccacatggaaaatatgccacctatcaatccaatggtgggggttcatccttatgaaga

SEQ ID NO: 128343 - DNA, 1190 bp, Cannabis sativa
atcagatccgatccgaataagtcgggttggatctgattcgatccgagtatctaatctagcggggcggggcgagatagatccttacatggtgtgtatcaggtcggatcatagccggattagatccgacccgacccattgacactcataattataggagaataaaatgcattttatttggcatggcctgaaatttcactagcaaattgtttaagaaaacctaaaaactaggaatgtaatttttatattttgaaatacatgactaacattgtcacacgtgcaaactctaaccattatataaacgatcaaaaagctgtaagttttaattattaattgtcatatttattatattaacaaacaataatatatatatatataaatatatatattatttacttctttttacaatttgggaaaaagaagacatacgatcccaaaactgaattgttactattatatcgatagtggatagaatgattgttgactgtgattcatgaaggcttagacgattgatgctacaatgtataaaaaaaaattatcacttgttaacacttggactaattttaaaatatttttgtaatataattataattttcttaattgcttctatgaaatgaatttaagtatattggctaatcataaaattaatttgaataatatttaatttagcttcaacaaataaatatttaatttaaattaaataatatttattgtaaacaaataaatatataatttaaataaattaaaattttcagttaataaggatttagcgtcggtatttaaacctttgtcgttagtttttagggcatacagcgttagttattagtacataactgacaccatagtgtatatatgtcatcatttattttataataactaacgtcattgttaggttatttttagtattgaatttaggttaattttagcacatttttctgtttagtttaaattatgtttggagcatttttacgcttttatcttttaattttacagatttaaaatagatgaagagttggaaaatatcagtagaaaaatgataaaacattgcataaaaatatcccggggcaaaagatcaaattcagattcgaaaaaaagataaaagcatgtggaagttgggtgcagagaaccacacgggccgcggcatggtattagcatgccacgacccgcctacatggaaaaagtcgaaggagccc

SEQ ID NO: 128344 - DNA, 843 bp, Cannabis sativa
atttctagctatggctctctttagtattacaattgtgagaacaatgtattttagatgaagaattgataagattctatgaagaatttatgaaggaagagaggtttaaagtctaggaagccttgatggcatacgagacttaaagggatagaggtttcacacgtgtgggaggcttcatggagcatgagagaagacttgtgcttgtggaatgacttagcctcctagagagtgatctaatatcctttatatagagtaaggcttacaaagatcttaaaccaaataggtaaagatatcccttcaaaatagggattttaacatctttttatctattatttaaattacaaaaaaggataactaaatccttagaatatagaattaatatcttgagtgaatatctttttcttcattggttgttgagcctgtcctggactttgttcagcctaggtatattcttgtcagccttggtatgtccctgccagtcttggtatgtgtctgccagccttttccacatagttttgttgttcagctctctttgcaagggtcaggcttccgtggatgaacatccctctttggtctgacaagcatttttggttaaccaacttgttctcaagacctggccgccctacaagcttcccttggccagacatggttggccagacatggttggccaaggtcttgatgacctacttaactctttttgcttattcttgcttggcagttatgcttgattgctttagaatccttgacagttgacatgccgtacgtgtaaggtggctttgtcctgttattgacaagctgtattccacgtgtcttcaatttcgactatgtggacataccacgttaagt

SEQ ID NO: 128345 - DNA, 872 bp, Cannabis sativa
cggatatccgcattttgcggattggattggattggatcgtgcgaattggattggatcggatactttgtgaacatccctaataatagctaatgtgtaaaatataacctattaaatctttaaaatgcttcattcatgtataatatagctaaactatttagctgcttaagctacagttataatgcatatccttcttcacataatagagacactgataagagtgttcaaagttaggtaattaactatacataatatatgttgacatgttaattatgtaattataatgagttgaaattagaggcacgtgattggcgcatgcatgccgagacttgaaaaagggaaaaacacaaaagggaaaaagtaataaactaggggtgttcatcaaaacgctcacactgcacaaatcgctcgcaccgtaccatactgcataaaaaatacggtttgaaatcctttacgatgagtgttgcagtttgtattttttccaaatacatgcggtacgatttgcgattttgaatttaataattacaattcaaactgcaccgcagtatatatacactacattatttttttagagacaaaatttcatataattaatgatttaatgattagtatatatgtaataatatttaaactttaataagattttttttttattgttaaaactttattgattaatttttaaatttttattataatattcgacaataatgatagtgtaaacttctcaaaccgcaccacactttatttttacggtgtacgtgattatgatatgtgaaattaaaaaaagggatttttacacttggtatctttttttgtcatttttttacatttttatctttattcggttatttaaacatttttaaaaaaattatttt

SEQ ID NO: 128346 - DNA, 762 bp, Cannabis sativa
tccatggcttgctagtttcttgaaggtggatcaaatggatgtcagaacagcattcttacatggcaacctagaggagaagatttacatggagatacctgagggttatgatgagaaacctgatcagtaggaaaaataagaaggaagattaaaagcttgaaatcccaacttagtgttgaatttgaaaagaaagacttgaggccagccaagaaaattctaggcattgaaataaagagaaataggcctcacactatcaacctatctcaagaaaattatctcaagaaggtaattgacaagcttggcatgaaagatgccaaaccagtaatcacccctcttgctcaatctttgaaactgtctcaagaccagtcaccacagacagatgatgagagaaagcatatggaaagtataccctatggtaatggagttgggtgcctaatatatgctatggtgtgtagtagacccgatttggctcatagcatgagtgttgtaagcaggtttattagtgaccctggagaagaacattggaagggtctgaaatggatactgagatatctcaaaggcacactcaagacaggtctgatacttggaaatgacagcaacaatggtgatactgtcactggttttgtggatgctgattattcagggaatttagacactaggagatctctatctggttttgttttcactgtgtttggaggctgtgtcagttggaaagcaaacctacaaaaggttgttgctttgtcctccactgaagccgagtatatg

SEQ ID NO: 128347 - DNA, 1132 bp, Cannabis sativa
tagaaaaaaaaaaaactcacataactaataaactaacaaaatttgtaaataaactaataagttacaataatataataataatagaaaaaaaaaacttacatattttttgtaaataattaaattgctaattagttatttagtatacttcataataatatttaaataaaactatttaatatacatttagtcagtcatattttttattatataagttttttaaattttaaaaataaacttgatttgttaactaaataaaagttgtagaatggtaactaatcagtatataataccgatagaaaactaattagttacttttacataaaaaaataatttttaaatcatataatttaagatatttacaaagcataattgtaaacatcttaataactaaatagttattttataaagttatattattacatcttattatttaaaatacatttgggtaaccttaaaatttcttttcgaaactaatgagttgtcatgcaatataatactgtattttaaaaacatttagcaccaccaattaactatatagtttcctattataaacaacagaataaatacttgattaactttacagtgcaggttgagacaaaaaatctcattttatacaaagtgtatgatattatataaatacaaactctaaatagtaaacctagagaacaaaccatgcagttgtcaagtttgagctataataaaatgttttgctcacacataatggttgtactcatcaaaaggaacttatcttgctacaactacttttcctaatactatataaaaaagaagtttttatgtcaacatacaaagacaacatactaccattaggtgatgtaacattatgaaatatacttgatatgagatcaaaaatatcattgtactcccacaaaaattcaaaataccaacatgtccaccaatgaaaaagagatacaaaaagcactagattcaaaaacacatggtaactttttggttacttatgatgataaaccttaaggtatacaatatcaaaagggaaatttgataatttatgctaaaaaattagatagggtgtttaattatacccaattattacacataaaaaaactatacctatcttttaattatcttccaaaaatacccctgtcttttcaaa

SEQ ID NO: 128348 - DNA, 739 bp, Cannabis sativa
tatttgtatgtggactgtataaatatttaatgggccggcccatagtatttttgtaatttttttttttttttttttgtatttttttgtttttttccttatatataaaacatgctataattaataggttgccaataaattattattaaaagaaaaatcacttttataattaatcatatacatactaaaataaacatatttataatatttcaaaaactaattagctattataattaaattcatttttaaaataaaactaatttaattaatattttatgaggaaacaaaatatgttgaaaaataaaataaaaagagattaatataaaattataagcaatttattaattatttttaatcacaaccattcaatatattaatctaattaattgctaaaagtaatgtaagtattatagttatatattttttgatagatttaatcataccaaacatagcattatttatctaattgtcaaatatatataagtttgctgtaaaacttttactataattaattaattaattaactggctaatcaagatgagaaatactaaaaggtactcgtatagcaccatctacctatttatgtaataaaggattaggttcaacataatttaatttaataattattataaaatatcgctaattaattacaaaaaattagttaggtaccgaaaaataataacgtgatattatttttatatatatatatacactagcgaaaagttacgtgcgaggcacgtat

SEQ ID NO: 128349 - DNA, 2444 bp, Cannabis sativa
tgactccattcttttattcttcctttcgttgtagtttctcaatgaatataaaactcgtccacccttgaactcgcactctacaccataatggaaacgcattcttgaaattcttgtgtttcaaccacaaattgtcaaactgaaaggcgaaaggtctccacgatggcaaattcaaatcgagaacaatggggctatgatttgacacttgttggggtttcgtctaaaatttgaccttgtgaatccatcattcaacattggatcaattatcctcaattttctaactagctcatcaaggagcctcatgtaaaacttagtccaagctactcatcccagaacattgctctatctctatatttacttagatcatatactcttgtaaactctatgtttacttataccgtatatactctcgtattgcctcgatgacatctttcctactgcctcaaccaaaactgaaatggagcaatctcttaataacgagtctataaccttaatgaatgtatccacaataaaatctaggataattttacatatggttgttttaatcgctctccttttctccactgcctcacccctcacattacaagatagaatgttcattttaaatccttcaactccctcctatcttttaatatccaaactacaaatgttccaccagatctccttagtgatgggaaagtcgtattcttgacttattcgattcttcaatcatattttctattagattttggcatgttttctaaccttacttttttacttttcaggctatatacttcaaatattgtgtccacttcctcactttcctctagtttagattcttcgcctccagctctttattattgttgtttgatttactacccctcaaagtctcgttccagaatcattgccttcttaattctcctgatccttcgatcttatttttaaaatttttcccacaaaggtcttaactattgaaattgaatccaccacttcataagttgactagttgtccattggcttaacttcaagccctacaactaattcacttaaccccataatttccttaagtggaataattattatgacttctaatcattagagggcctgttaaacttggatccaaaataaatctttgggctccgttcagccccataaagtttcggcccaagactcttctgattctagaacagatattcaataagctaaaataaatatttaggtacaaagccttgatcattttgctccaatttaattcttaaatgatgcaaaatattcatctagctagtctccttcaattttccttaagagttttcatattctataaattctagggaaggctttcaacaccaatccagtagcctctacaatcaaccttaatatctaggaatcgtcatctaacaggctttccttcttcttcaacgtctaattgtccaccacacatagctccaattttccttaagagttctcatattccataaattttagggaagactttcaacaccaatcaagcagcctctacggtcaatcttaatatctaggaaccgtcatctaacaggctttccttttcctcctcaacacaatattagtgttttagtgttctatcatcaaacatttcgctgacctccaatctctttcacagttctccactcctatgacttcttttttgcttgcatatattcatagaacttctgcgattttccttaaaagttttcatattccataaattttagggaagactttcaacaccaatccaggagcctctacaatcgaccttaatatccaggaactatcatctaacaggctttccttttcctcctcaacacaatattagtgttttagtgttctatcatcaaacatttcgctgacctcgaatctctttcccagttctccactactatgagttctatttttgcttgcatatattcatagaacttctgcttcattcttctttcacggtgtaaattctttcgtccaaatgctaaattaatttcaggtaagcactcccatcttccaagtttctcgactctgtttcttctcacctggttagtttctgcaattccttttttttttttcttgtggtttcaattattttttcaccacgtttgcccaagtttgtggcatcctctttcctttgcctgatcttctcatcacactactttttctacttgtcttttcccaagtttttaccccactaatccaaacaaacagttaacaaaaactcttccatccttttgagtctctttcttcagatataataaccactgtcgttttgatattttttagcattaagactcccatcctttgcgaagtacgaacactctctttctattctggaaactctccataaacagacaaattattcttgaaagattttttatgctattcccaagctgctcccttttctgttgaaattcttccaatgtttcatataaccaagtcgttgcatcaatggttatggtgatctcgta

SEQ ID NO: 128350 - DNA, 2393 bp, Cannabis sativa
actaatcagattgaaatgagttttatttaggtcatataacccaacatgttgacccacaactcgttggcccgattgcactccctcccttgtgcgcctcttttttgaatccaacaaaatgacatcatcattcggatcctcaatatcagtgtcattagcatctatctcattcccactatggtcaacaccaacatgatatcccatatgtttctcaataaccttaggagaattaaattgaagagatgtccccccctttatgtaggaccgaattgccacaaactcctccaacaacctcctcacttctccgcgcagttgccacgcgaccattcaatcggctggcaaacatctcgtatgtctcattcccatcacgcaaccactgagagcccaccaggttgtttcaccatcgttgttgagcccccatccaagtaccataaggctttattatcatctcagttggtgtatcaaaatgcttaggataaaatttctcaaagtgacctattataccacagataaagcaaaacgtagggagatattcacatttgaattctgcccagaaatgtaggagtgctctgtttaatatgcatcctgataaatctcttggtccagatggtatgaccccaggttttttccaaaaatactgggacatagtgaagagcgatgctgtgaacaaagtttgtcaattctttgcgaatggtagtattcctgatggactgaatgatacgaatattgtattgatcccgaagaagaagcaacctacttcgatgggtgaccttcggcccatatccttgtgcaacgtcttgtataagatagtgtctaaggtgcttgcgaatcgtttaaaagaagtgttgcctcaggttatatcctcaaaccaatctactttcatcctgggtcgccttattactgataatattgtgatagcgtttgaggtcatgcactatctcaaaagaaagcgtaaaggcaaagaagcctatatggcactcaaactagatcttagtaaagcttatgatcgcgtggagtgggactttctttgtgttatgatgagtaaaatgggttttgacttgcgttttgttgatcttgttattgctacagttagctctgtgaggtataaaataattcatggcggacatgagctaggttcgattgtacctgagaggggtattagacaaggtgatcctctatcaccttacttatttcttatttgtgctgagggcttctcatctttgatacgaaagtttgagcgggatggtaggcttaaagggtgcaaggttgctaatggtgctccggttatctctcatatgctttttgtggatgatggttatctctattgtcgtgcaaatgatagagaggcttcgaatatattacatttgcctcagctatttgagatcgcttctggacaacaagttaattttagtaagtcctctgtcttcttcagtactaatgtgcctaatgctactcgagaccgattgtgtgggatccttaggatgagacttacagatgaacatagtacttctcttggcctcacttgggtcatgggaagaaataaggatgccattttggggtttttgaaagaaaaaatgcagaagcgcattcacaattgggagggtcgtttcttgtctaccactgggcgtgaagttctgataaaaactgtagcacaagctttgccaagttttgcgatgtttgtgttccttttgcctttgaaaacgtgttcgcatttggagagccttatgtctaagtattggtgtagttcgagtagtcgaaaaggtgtgagctggtttagttggaggaaactatgcaaaaataagaaagcatgtgggatgggttttcggagtttgcgtgagtataatctatctttgttgggtaagcaaggttggcggttattgctataccaggactcccttgtgggtaggatatataaggctcgatattttcctaactgttcattcttggaggctgagttgggtggcagtccaagctttatatggcgcagtgtctttgagacacaaaagctactcaaagatggtgcccatagaagaatatgaccttgttcatctactgaggtgcttaacactcggcttttgtctgacgctaacccgtgtgtggtatctaatcatccggcgttgccaattgtaaagtgtctcaactcatgaagccagatagtagacaatgggaattggagcttattgaggacttttttgattcccgtgatgttgagctcattaaacaggtgcctttgagtgttaatcttgcgagtgatagttgattttggaacaaggatccaactggttttttcattgtcaaaagctcctataattacttacagtcggctaatgatagttggaattcatccatggaggatgatgtttggaaaatgctgtggaagattaaagctcctccta

SEQ ID NO: 128351 - DNA, 970 bp, Cannabis sativa
  modified_base (911)..(919): a, c, t, g, unknown or other
aaaaaaaaaaaaaaaaaaaaaaaaaaaaaaaaaaaaaaaattaatccaaccaaagaaattaaaaatgatcgagttccctataagtggcatgcgttccccgatattattttacaccgaacacatgaaggagaagtaatcaactaatcataagaccatctcaaaatcaaaaataaaaaaattgtgttaaatttagcataaaaaataaatttgtgttatatttggttcactatttacaattgtctacaaagtgtaaaataaaaaaataaaaaaattaattatattaataatcatttcatattttatgaagaatatacaaaaattattattttttattctttaaataatggcaatataataaataaagaatataaagtttagtaaaaattaatgaattataataattagtggtattatcgtaaataaaaaagtaacatttatcgtgtactaaatttaacaaaatgctatatcttgtgccaaatttaatatactttttagaacatcattagagcataatttttcttagagcatctctaatggagtactaaaaatgtagtgcatggttatatatagcacacttaacaaaaattattgcttcaatagtatttttaaaagtgtgctaaatttggcacatgctaaaaattgtgtcaaatttggcacaagatatggtattgtatcaagtttggcccgcaataaatgctatttttttatttactataatgccacaaattattatgattcattgacttatctagatccgatctaattatatattagatgttgaattttactatccgatcaaattcaattaatttcagtcatctaatcgatcaatcatccattgaatgttggatttgatcgattctatctactagatgtttttcatatatatatttagagaaatgctaaagggnnnnnnnnntgcctagcaccctcctatgtgtcagtattgctattggtccaactaaatatc

SEQ ID NO: 128352 - DNA, 759 bp, Cannabis sativa
  modified_base (59)..(63): a, c, t, g, unknown or other
ctaataatttttttttattttgggcccccgaaaagtgtgggccctaggcacgggcctannnnncctatgcctagggccggccctgtatatacattagctggaaagactagtttgactcatgttatagtaagtgctacttgtttatctgttatttgattacctgcttatatgatttgtggaaaacgtgttgttagaaaagcatgataggaattatgaatagcaatataatatctgtgtgagggtggaagttcttattagcattggtgattgtccaaaaatacttggaaaatttatggtcgcaggtgtattagattatgcacctgaggcgacctggtaggcttaaccgtgagctttctaggtttggggctggcgatgaggatttgaatcctctaccaccacaaaactaagagcaaatatatgctacaatgtgagagacaatatgatagcaaggagatcagatcagagagttgagagagcagcaagttcggcctgcttttgtccctattccttcagcacctctggttgtgccacatgatgtgggaaatcgtttagattcgttgtatgaacagttcaaaaaaacataatccaccaatgtttgagggtggatctgatccaaatatagagaagtggatgagcatgataacgtctatcttcgactttatgcgagtcgagagtaatgatcgtgttggttgtgctatattcatgttgtaggaggatgctcacatttggtgggagattgtgtcccaaggtcatgacttg

SEQ ID NO: 128353 - DNA, 2278 bp, Cannabis sativa
tatttataactcgctgactgcacaatcttaagcgagatcaggatgtacaaactattgattcacgtattgatgagaaaccattttgcatcagatggcataatcccgatggagacatagataacgcatagcgaggcatctactttgctgtatgtaaagaggtattgacgaggtgaaatttttattagaacacttagcctataatatacattataataactaagtgtaataacttgaaggatatgattgtccagtctgctaggccttatggtcaaagagtagttcttatgtttgcttagtacaccggtgctcatgcaattgctagaatacaagtaaactaagtaactcacttatgtactaagcgagacacctcaacgaggtacatttggcagcgtgtcctaatccacgtcagcgttgacctccttaaagacggtttaaataacagatgtgtgattttttactattaactgcatgtatttaagtggagcgtaattaaagcctacaatttcggggaatattgttataggatttgaacttaaatgtaattaactgcctacctatatcactataaatagggtagattatacaaaaaaggggatgaaaaaccttagaaagaaaaaggaaaccctaattcggtatctagaaatatctaaataagatagactcgtgaactatgcagtgttaactgcaaaaccacgtaaaaacccggtgttattattgtttcaattattcttctaaaatatctcatagtttctgtgtctaatctattacaaaaataggctcataatcattaatgaaaatctgtgttaacatcttggtgctttcattgagagcttacatgataaaagctctgaaaaatccctcttaaccaaagatgaaagaattatttctccatggataataatggggaaaatacaacaatcgtcctaaagagaccaatcgtcatcctagaaaagaaccaatgggctcacagagaccacccaattcacgatcaactcgttcaagaagaagccaacgtgataatgataaattccaaaaactgggaatgaggaaatcaacactaatgctggtggttctactcgtatgagtgagggtgcctacgatcccactaggtaagtaccattggttgagttggaaaatcgtcaactctaacaacgtctggttgaggaagaccaacaaaatgctgagttggaaagggaggcagcctccaccagggcaacataagaaagcaacacacaaaaccaacctgatcctagagtgagaaggctgcgaggtaggcctcaaggttcgagaaccaggaggtaggagacggctcaagaaaacccccagaacccttaggaggagcaacttgcggaaactagggatgttcccaaagatggacaaccaaatgaccaagcacctcgtcaagaagtgcctcgaggactctgggggttcacaacccaagggaatgaaaacaatgatttaccagagtcttctcgtaaaaacgagtacagaagacaacctaggactagggaacaggaaatccctcatggcaacgagagaaatcctgggactcaacctaggacaagtgggttaccaccgagacaccgtcaacgcccttctcgcactgatagggaggaggcttatacaaaccctagtagggggcatgtatcaaacctgtcccagaggagatggccaatacgtgatgaggaaagttcaagctcgggacattcacaatccctatatcacagttgatccacatgaggaggggatagacctttccgtggtaatgatcaacttacatggagtagtcaatctgagtgttactcagacatgaggtccatgagcaactgtgaatgaagacaaccagatcttcgtgaatgcttaaattagaggcagcctaatttgtgcgagcacttgaatcagaatgttcttgatttacaccaacaactttatgacaattgaaagcaagaggatccaatcaaaatacgaatcagcgagttagaaaacaaattcaagaaatatcaagatgggaaattgcttgattacgacttagatgaggagcttaaacctttacatccaatcattatgatgggactacagatccggtcgctcacctcaacaactttaataccataatgcgagccagcaatgtcaggaataatttacgttgtattttattccctacctcgctaactggggctagtttaataagttcaccctgttgggttttatgccctaaataaaaatcaatttcaatgtaatctagattattcaatatcaataaagaaacataagtatt

SEQ ID NO: 128354 - DNA, 547 bp, Cannabis sativa
aaaaaaaaattaaaaaacaatatatggagtaattcctcttttcattttaagtagtcacactattcaacaaaatgcttattataaaattgataactaaatttgattaataaagaaaaaaattataagaaaatcttataaaagttttggtgagaagttatttaaggaaagtaatttttttattacataaattaaattagttatttataataattattattgtatttggatatattaaattttctctaacaaatttagtattatttacatttagtagtgtatatgtgtaataattctctgaaacaaatgtgatgtagtgatcatgtactgtggatgggcccagaggcagaggggctttaacacaagcgaacgttatgcatatggttgccttgcccacatttatggataacttaaaatatattgggccagggcctgcattaaaagggatttttatagttattttcacaaatgcacaaaaacaacaaaaaataataaaaatacggtttcaaggaattttaaaattttttacgatttttttttattttattta

SEQ ID NO: 128355 - DNA, 1789 bp, Cannabis sativa
  modified_base (26)..(42): a, c, t, g, unknown or other
  modified_base (1668)..(1675): a, c, t, g, unknown or other
aacacagggtccaattggtaactttnnnnnnnnnnnnnnnnnaaaatggtatttacccttataaaaatccaatcaaaatgtaatttataaaagtggcttctaccatataaattatcaatctaaattacaataaaagcattcaaataattaaatacaacaagtaaaataagtcttcaaataaatagtacttatatcgtcacattcataaaattacaaataacaagactataatcccaattgtgtggactcctcctcctcctcatcatcgtcatcatcaccattctctcaaagactgcttttgtagaatttgcagcatttgtggatagtaagattgttgcgatacttttggcatttgtgggtagtacggttgttgtatgtgtagcatcaattgtattggtgttatcgatgacattgtttctgttagggtttatgccttaaaaatcctgtaaagacatttttaattattaaataatggttgaacattttgatatatgtttgaatattaaattactaatatttgttattgaataatttatatataaatatcagaaaatttcttattcatatatgaggttgtggcttgtagttgtacagagaattaagaccacttagctatgaataaaatagttagtaatatataaaagttatgaaatctttaatcaatagttgctagtacggttcactgatgcccattctttggtgcaagtaatctcggtttggattacagatgtagtatgacatcgaagtgaaggtgctatatataatagagattatatatgacaagaaccgatatgaatgaagttgtctttatctaacatgtcgtttattataaacacttaatttatatcataatgatgatcaatagtagatcggcctaaatcttgagtaatcatgaactcttgttcatgttattagtttacttgtttcactcgttatagtatatcaaagatgatgattcttacaacatctattttgagaagttaataatgtggatagcaaagaagatgacttaaaaatatggaaccttgactttcctaatggatcgatcgctggttctcctttaagtgttaattctagaactggattattgtgcaaaaatttagatgggatctaaatttagaatgagagatgtctttcttgtatattccagtggagagttaaatctaactaggtatactgattctgattttcaatcaaacaaagatagtcgaaagtcgacatctgggtcagtatttactcttggtggaggagctgtaggttggagaagtattaagtaaactagtgttgtggattcaaccatggaagccgaatatatagcagcttgcgaagcaactaaggaagcaatttggttgaagaaattctacattgctctggaagtagtttcagaagtagaaaaactgctggtgtgtttggatttatataccatgatctagatttactaacatgtatgtttcattaacaccctaaatataaattttctaatacgatgaaattatacacataagagtttagaaaatcttacattgatgcaggagaataataatgaccccttccacttagatctctaacttttgctcctttttgtcgcagagtaataacaagatcgatctgagccttgatctccttctctccttctagttggttaccaccgtcttccgcactatgatnnnnnnnntgacttgctatgtgtgggcatgatactgccaggttttgtgccctaaataaatctattttaatataatcagatttactaattaataaaagatcagaaatcgcttttatgttgcat

SEQ ID NO: 128356 - DNA, 1923 bp, Cannabis sativa
  modified_base (42)..(61): a, c, t, g, unknown or other
tttctaaatattggagtccacaattaaattaattcacaaatnnnnnnnnnnnnnnnnnnnntagtgctaattgcctttactaataaaaaattactagaacggtcattacatcttttgtcaagcttcgagtggtgcagcccaaggtgctattaatcttcttcatgagtttgaacttgcatctggtcaaaaggtcaacattgccaatcttctatatttttcagccccaactctaatgctcaaacccagtctcaaattagcgctattcttggaatggccgaagcttctgatggtagcctctacttaggcttacacaatatcattggccgcaacaaatcaactatctttggcttcctcaaaaataaagttattgctcgccttaacagttaggatggcaagtttctctctcgtgccagtaaggaaatttcttctcaaaattgtcatcctgtctctacctacgtatgccatgagtgtttttctaattccacgaggcatttgtgaggacattgagaagcttatggcaagattttggtggaagacttcatctagtaaaggtcgttgtagtacttggatgtcttgggaaagaatgactgtttcaaaagatgagggtggtatgggttttcgatgccttcaagagttcaaccttactatgcttgctaaacacgtctgaagattattatgtcaccctaagtccttggtacgacgtgtattcaaggcaaaatacttccccaatactgattatctctcggccaaacttggcaataatcccagcttcgtgtggcatagcatctggggcgcccaaagtgtggtccgagctggtgcttttcaaaccattgagaatggactaaccacaaatattctttcccacccatggcttccacattcgtcgaacaggtttgtttcatcatcccatctggccttatatgaacaaactgttgactccctctttgtaaccgaagaaagaagatgggatactaaaatcattaatgatttattcaatcaccgtgatgctaccctgaatcttggcattccactgtcacctattgccgacgctgatttctggtcttggtctggagaacgttcaggtatcttctctgtgaaaagtgcttacactcttttgcaaaatggtaagccgaagagccagggagctgataactctggattctagcgcaaactgtggcatctaaagctctccacaaaggttaagaactttctgtggtgggctacttctgagtgtctcccaacttgcctccaacttacgtcaaaacatgtgagaatctcatattcttgcccggtatgtaactcccatactgaaacaactgttcatgctttattaaatttccatcttgcttcgcattgttggtgaacattggggattactttgaacatggctttaccatcctcattcggcaattggctccaagaagtcttcctaaaacttgatgaggatcaagtatgtcgtgctgcaatgttatgctgggctttgtggaaagcaagaaatgctactgtttggaacaaaaaagtgtcttcccatactgagattctggcgttagcttgtacaacccttgatcactggcgaaaagctcaagacaatacatgtttatcttccttgttctttgagaacaagggtgatggtgctgagctttggactaaacctgaatcaaacaacatcaaggtcaatattgatgccgccctttttacacaagaaaattcatacggctttggaattgtggctcgtgacagtcaaggcaaaaacttgttaccaaagaggtgatttttctgctgaaactattgaagccattggtatcaaggaagctttcagttcggtgaaaaataaaaaatggcagaatgtacaggttgagacagataactgttgggttttatgtcctaaataaaactcatttacatataatcagatttacttat

SEQ ID NO: 128357 - DNA, 507 bp, Cannabis sativa
aattttttatttacaattctaaaacatagtacaaatataaaacaacattaaaataatgtgaaaacatattatataatgttgctgcaaaaataaaaaataaccatccgtatcttttttaaaacaattaaattaaatccataaaaatattgaaaaactgtaatgtaagattgtaattaaatccataaataacgtatcatatttgaatatttatgaatatctcccaaagaaaaattatttaaattgtacttgaagttgcattatttagggctttctttttatatttgaagaaggagatttgaactttggagcttctttttactagaagaagtgtagaatcactatgaccactaggttggctaattgtaaatattcatggataatttttacatttgtattaattgaagggataattttacaaatacacaaaaattacaaaaatacggttttacagaattttaaatatttttacgaattttttaattttatttgcagaaaatacggtctttt

SEQ ID NO: 128358 - DNA, 912 bp, Cannabis sativa
gagagagagagagagaagaaaatcgtaatttgaaatgaagatgcaaaatgaaaaaaattaaaaaagagcacttgttcaaaaaaacaataaaatggggtaggagaaataagatactcattacttgtagaaaaaatgaaaagacaattactattttttatttaaaaaaatataaaaataaataataataaaaaacaattcatcgattttcaaacttttaaatattaacgaattactaactaacctttaaaaaaggtctaaacaaaaaaaaaattaaatatgagttttgaaaacttagattatacaaacatggcatattgaatgacaaaaatatctaaacataaaataaagtcatataaattattcaactttgaaagtgttaaacaactaaattttagtaaatttttattatgtaaaatccaatactcatattaaaaattcttttatgttttgatattttacatttaacttttttttttttacagtaaaaccctttatgtttacttttttttcacaaatttgatgtgtcaactaaatatcactgttaaataccaattgaattattactgtattgattttaaagttttactttcacgtatacacaaatatacacaatgatcattcaattggtgtttaaagataatatttaactgacgcctcaaatttacaatctgctacgaaaaaagaagaattaagtataaaaattaaaatataaagagattttatcgccaattactcttctcgaaattataaaattgtttgtcaagccatctccaaccggcctgtaaaacaccaaaatagtgtggcttcacactacatataattcaatgagatactataatcaggactgactcaaacattttgggggtcttgtgcaaaattttaaaattaggccctttagaaaaaaaaaaaaaa

SEQ ID NO: 128359 - DNA, 1342 bp, Cannabis sativa
gtgagccaaggcccagcaaaacagaaaataatacaatatgataattataataataattgtacttcatagagtacgacactgcgtatatatactgtgctatcatactttatattacattattccacataataattctattataataaatatctatgtagcataaatctacgtattacgctcacactcttttttacatttaaggccttactgagtctaactaggttatgccttacacgcataactcttttacagatattcaagtaacagattattgcacacttataacaatacacacttagagtaataaccctaggtcgtgaatttacaataacaatcaaatatcatattatcgcgtcattgcgctaaattttatgtgcttggttcgctgtcttacctaatttctaatgtatgaggagaaatctcgaaccacaagtgatcctgaccaagtgtcggtatctttagtcacaatttttggatttcacacaataggttaatcctaaaatcacatttcataatattcatacttaagactccaacactagaccaaataatagagctcgaaatgagtttttcaacgatataaaaaacgtccaaatcagagttcagagttaaaagttatgaacaaaatagaattggaaaaatcaggaatactacagcagagtgtggccacgacgacacattctattattatttttttttctttaaatgaaggtcgagtagaagtctcacaaggagagagaagagatttctgggatttgtgtgtacattgatcaacaaatttttattttcatctttcttgtttacgatcttcttagattcgttgacgaaaaatcacgtcaacatattctattattatttttttaagagtgttcatctaatccaatctgtactattttactcacaatgtattcgatccactaagtgtatattttattttttataatcaaatttaatctgtacaattatttaaattcaatctaatttaatccgcaaaagtatagattagatgaattactttttaatattaaattatttaatatttataaagaaaaaaaatattttttacttttttacataatacataattaataattagcaacaaaataaaataaattattattaacactaaattaaaataaataaaatactaaacaaaaaaattaaaagaaaaaaaaatatatataaaaaaatattagaaaattctacaatgcacctcttgaaaatggatatattaatacacccctattaaacacgtcgaaaactacgttcaaataatgtattgtacacgcaactattttattttatacacgggtaaaatagactatttgaacattatttttta

SEQ ID NO: 128360 - DNA, 1557 bp, Cannabis sativa
aagttcataaggctatcttaactcttgtgaaagtaaactggtctctggcctttgttaccaaaagtgacaaaatacttttagcaattgatgatggatatccaatccaaatcgagtgtagcatcatgatccttcattttcagctttatcaagtcattcgccagttgtctattattgagttccatatatctaatatggtctaatatgggtgctacaattctaggtcattccttctcctccaatgggttaaagcctccttcaaatgtcgatggttctttttttttcgattctttcatatggtggctcaaagcagtgtgttggttgttaagatgaattcctcgtgctttaccgcttattgcaacacaacttttcatcctgagattggagtcgttccctaagcttgacattctctttcaccaactactcgcaaaaacgagcgtcctctcagctcagcttacacgggtgcctcttccataatagtacaagtcgttagccttgtcctctaccatgactagcttagcctcgtagttcgtcaccttcttaaactccttgtaggtgttgaagctcctccttcttgattgtttgtatttagctaacttgatcgtctaagcagtactgcctcttaaattttagttctatttcttctaaaataaaatttttaagaaacgggcgtaactatttgaataatttataatattcctagtagataaaatcaactaattatttttctataaaagaaaagtttctctctattaacataacattgatagttcacgaaataatttctatttttaccaagataaaataactaaataacaacgtaacacataaaataaaatagtaaaaaaaaactttttcttttaatattgttacttaaagaaaagaaaatttctaggctttctagttatgatttttttttttaaaaaaaaaaaaaatatctagaaatatatctatacatatatattaaaaaaattaaaaaaaaaaaaatatttgatttcatatgggtagtacctaaacttggatattgatactaagatttttgtagtaaatgcaattttgaaattatacacctacaaataaaaatgcaaacatataatatgagacttacatggtagcgagcgaagacttattagccgatgtgtgtaactcgtgatgacgttcgggaccgatataactgtggctctgattaccaaattgtaacgcccgtacttttataaaaatattaattttatttacaagcattaaacgcggaaaattataatgtcactttttttttatttaatacttgaaaatgttcacaaatgaccagttttcgtacaaaagatatcataaataataactaaaataattgcgacataaatttaatagcatacataaataaacagagcgccctagaccgcctgcagttatatgaccctcagcgagttcacacacacaagcatctaaagttccactcgccactcgcattctagactttcagttaccttggtctgcacatggtaacttgataagggtgagctactaaactcagtaaggaaatgtgtgtcaggtagtcacata

SEQ ID NO: 128361 - DNA, 1044 bp, Cannabis sativa
atgttgtatttatgttaatttgttgttgatcttttgttatctgaatgctattttttgttgttgttttgatattatttttatgtaattttcttgtatattttcgtgttgttttcacgtaacaccgtaaaaatataaaaaaaaaaattcattaaacgttgtaatttcttttttacaaaaactggtattttatctaattattccatgttaaaaaggcaattttattttatttttgcaatttttgattccactgtaaagaatatccatttacatatattttgaccaagagagaggttgggttattgttattgaacatttttcccaaaaaagtagacattcttttgagagattagacgtgtgcaatagtgaagtgattgattaggtaaccctaccactgtgtaagtattaggtgcatgagccacttaaaacaacgcgttgattgagctaatattgtttacaagataatgtttgggtttggagggcccatttaaataaagataaacctacatgatcaacacgtaaacacgtaaagagtgaaagttgaaaccatacaaaatggcctaaatagggaaacaccaccaccacttcactcactttttagtactaataggtataggtggttcgttgactcaccctcttccacactttttgttttgcacaatgtccctttcatcatcatttcaggataaaaactacacttgcttttcagaattagtatttgattatcttaattttgatcatgtaatgatcaatcaataacaaaacgacacacgtagccaatccaacaggtttcagagtcgtttgttcgtttggttcgttaggcatactcgcaattaattggttaacactaattaacaattatttgttagttatgaaatttcatgtagaatcaacacaactgaaccagttgttcttataaatggttgaataaatactatattctagcctgttcgaatttgattatatttttaatgaaattaaatttagactagggaatagatccgcgcttcgcgcggttttaataatttttctaaaattttacattaa

SEQ ID NO: 128362 - DNA, 980 bp, Cannabis sativa
tttggaataaagtttatgacttaaggacatgattgtcatgattttaatatgtggatactataatgacaatttctattttgatgaagggccaaatagaaatagtcaataaatattagcaacaagtttgtctgtcggtaatataacaggtaatgatccctatttgcatcgtatcttttgactcttgtatcccccatcgccaagagaaaaagtttcacagaaaagttttgatgcaaattggaatcataccaatcaaaggtcgtaactatggacaccggtatacttctgctaatttataatgttattatttaattctcatgaattaattaggcttatatttagatttacagtattcataacatgtggtatcagagcatccctaaattaattcttgaggatttaatgtagtattgttatgatcttctattatgttttgttctttatatatgtttgtgataaattcatatatattttttttgggtatccaactacgattgactttctgcatatacagtataatttcgtttgttctatgaatacaaatgttttacaatcgtctgttatataaagaataatttatttgatatgtattgaatattattgtggatgtatacatcattcaaaattttgctttgaaagatgatattgtagtttcgtctttactgaatacgaaaactatttcgtatattataataagtctcacatgagacaaaagttgattgattaatatattatttttctttctctttcgtgctctgttgtgagaattttgagtttttttgttcattattattattatttttattattaaaatataatacttttaagtaataataataattcagtaacaattaatttaaattttggtttagaatttattaagaatatataatattttagttaaataaattgaaacaaaatatcactaaagtgatctcttttgtgtagattaatttaacaaaaatattatgataattgtgtgt

SEQ ID NO: 128363 - DNA, 607 bp, Cannabis sativa
tgggtgtacagtataattgcttcatttatatcatcacttttttcataatcattctactcaattttatcatttaaggataattgttgtaaaagttcccaaaaatataaagctgatacagattagtctctaacctcgaaaattagcgttaatagtttctaagatcacattttctgtaaatctgttggtccctctttttaatagattcgttaaacctaaataaaataccacgtgtcaattttttattggttcaaataatagtttaattaaaaataaataaattaaattaaattaaattaaaaaataatattttaaaatcataaatttatttcttttttttaaaaaaaaacacaaattaattaatcaatttattttttttttcttttttcttttttcattcttagtcgacccttgctcttctctctccttctcgttttcttcattctttgccaaaacctctatagacaccatggtctaaagctccgaccaattttcatcatttccactcgttatcctatctctcttgaaccccaatctcaccagccccacaccatcgtgtcaccctaaaatccacatctttgttcttaggttctaccgacctttcccttta

SEQ ID NO: 128364 - DNA, 792 bp, Cannabis sativa
  modified_base (308)..(311): a, c, t, g, unknown or other
atataattaaaaaaaaaaacataataaagggaaaaaagaagccaaatttaaaagaaagaaagaaagaatctttaatacaataatgattgattaattagaaaggtggaggagcatagtaagggaagaaaggtcttccatttgcggtggctccggcggaggaggaataatcgacagtatccttaatcttgtgaaacccattcttaaaaactccgaaaccgaacaacaatccgatcagaactaccaccagaattacacacgtgcaaaacatgcacaccctacttccacaacacatcttcttcttcttcttnnnnttcttcttcttcttcttctttggctttttgatagtaaagatcggatctttatcaatatatatatatatatattatgggatttgaatgaatggaattgagtgttgtgtttgagagagtgaaaatgtttttaggtaatgttaggaatgcttggacgctataacaattttgggattttgagtttgggttatgttttttttttttttggtttggttccttttaagtaaagggaacttttttttttattatctcctttttttaagaaaaataaaataaaataatgaaggggaaaataggattatgatgaggtggcaaaagagtttgaggaaagtttttggctttcatgttttttattcttttggatactcatttccactcaagattatctctatatatgtttggtaggagggataattgtacacattaaagccaaatgttggaggtcgtataagaatgtctattctatataaagtgtgcttatata

SEQ ID NO: 128365 - DNA, 1699 bp, Cannabis sativa
gacatgacatgttttgtaattgtcaattgtctgattaggcaatgacaatgtgaatgtgatatataagcttacctgattaggtgatgtgatatatgggtgcaaggtcatggcacaggcttgcctgattaggcaatgtgatatacaagctcacctgattaggtgatgtgatatatagatggcaggctatggcatgagcttgtttgtttaggtaatgtgatatatggataccgatattcgggttgttcctgtgaggcaaccatgataaagtcatgactttaaactaaaattattgttaggtttcttccagtcgctgatcttggttaggcagcggcagtgacatataggtgtcagactatgacacgagctttcctggttaggcgatgcaatacattggtgccagattgtggcacatgctcatatgattaggtgatgcaatacattggtgccagattgtggcacaagctcctctaattaggtgatacgatacattagtgccaggttgtggcacaggctcatgtgattaggtgatacatcaatatttgtatgataccagattatgacacgggcttgcctgattagagaatgcaatatatgatcacttttatttctatgcatatgattggttatattatccactcttgaatattattatttaatcattttataatagtgagatggataattaactatttcatgtattcttttttgttactttcttgttgggttcttgtgattcacgggtgatgtgtggtgcaagtaaaaacaagaaaaagttagagcagccatgaggtgacagtcttctccagcaatgtacatatcaatcctataggcatgtgtaccgagttgccatgagttgttttagctgctgtgtattttgatttcttattttgacttgttgttgtatatagtctttttttaaaaacttttataacatggatccccaaaacacagttttaatgtcgttatgatgtccgtttttagtgttttacattggtgaagtttttaatattatcacgaattttaataattaattaatctattagtactaaactagtttataaaatcacacacgtagcgtccctatatattaggacgttacaatgtgtgttatcaccgatttgaactaaaggaatactggttcaatgctacgacaacaaaaatttcatcaaattttgtggtaattacactaaggtaaaattcaagtaaaaagattttttaccttcaagcacctaagcaagacttcttaaaagtgtatatttattcaatcaaagtggaggaatattatattttgatgtaatatttgtttgattaaataaatattacaaggatgttacaagtgtatcacatattttatctagtggggattgctatttattttataatataataagtataaattaaaatgtgataaatatattattgtgtgaataatatatattaagtgtatggtaaataaatgtgtaacttatagttttaacctacactttgtaacctacacattgtaacttggagagaaattacaatttgttgtcacttataactcttttgttgatcacacataattagtagggttgttcatccgatccaatccgtacttttttggtcaaacaacatccaatccgatccgcatagctgtttaaatccaatccgcaataatgcggattggatcggttattttttctaatgataaattatttaa

SEQ ID NO: 128366 - DNA, 2131 bp, Cannabis sativa
atacaacttatgagagctgcttacacaaatggtgaaatatgtgaacatgttctattgtttctgaattattgctatttatttatttgttattaaagccaacattgttatttattcttaattgatgaagatttcttctaattacaggggcatcagacaatggaaagagttgttgtttctttggctattatattgtcgtctttgaataaaattcgactagctttaaagtactaaataaaaattaattaatgtattcaaacaaagttaggaataataaaataatatatatatatataaaaaaaagtaaaatattatcattgtataaagaaaccaaataaagggcaggcatttttattttggtaaatgaatctatattaaatgagtagctagtgcaatactcaaacttgaaggaaaatttaaacaatttacttataatcatatatatatatatatttatattgttacaattttttttatatttttttatggatttttataaggttttttacttgttttttttcttttaaaaaatatatattttcatgttgctttcctgtagcagcaacattaattgaaaatgactataatttagagtaattataatgtggacgatgtatgtgataatgaaaaaaatggactatttttttaaatgccgaaacagataaaagagtctaccaagcatataaaaatccaagtgatccattaattttttttttcaaatagtatatttcacaggcgtataaaatgaaagtgtcacgtgtgtaacagactgtttgaaccctggttcggtgtgttaatttttatttttttttttaattttttaaaattttgcaagaggtcttaaataactacaatgtacacaactataaaaaaattggactaaaaagttctcctcaatgcctctttgtcattatgtatgtttttcaaaataattaaattaaaaaaacttctacccatttgctcgtgaagtgtttcaccttcattgtgaaataagtaactgtttcctatgacggtgcttattctatataaagaaaattatggagactcgtatcacaccataacccttctctcagaggaatttcgtttagggtttggggttggtaatcatagagtgtctgaaacttcactcacagtacaggtatgaatcgtgtggtctatttatatttcgttgtagcattattaatctctatgccatgattatgatatgaatatcgtttagggtccttttttgttgaatagtaatggtttggtttgtcgtttgatctcaatgccatgattatgatatgaatgtaatattgcttaagaaatatgcttctcccaaacatttaggagaaaagttaaaatagttttttgagatatataataatatttcaggaatatgcttcggtttgtaatctaaatttcaatgattgattacatactctctgttttctgtgcagatgttatctcgttctcacccctttagttattattatattgtttttattataacactctacaaatgattctttactagtccgtctgataaagcagtgtgttgcaggtacaattctatttcattttctagataaatctattgatatgtgatgatcaaaatgtaagtgtattgatgaatttcacatatcatgatataatggttatatgaatttatatataactgaactcagtgattcgggacttctcgacaccaagttgaaaaatagtttgattatttcttaatttagatttttaaacattttatttttactaattctctttacaaagattctaagtaaatataatttattatatgcatattttgctcttcaatttatgtcaacatgagttgttaaagcaaagaatttctatgtttaagtgtcatgtctttgtgtggcaaattatgtaaatacttttgtttagtatttctgcttcagtattgtttgtctaacatcttttctgtagttagttgcatctgatttcactaagttcattttaatgccatgtatgctttctgcgtgtttgttagtttgtgccagctgtactttgctagttggttagttattctgtttttattatctttaggatataaattctgttatgtctgttgttctaactaactctcttcggttagaatcattttcttgattcttgctct

SEQ ID NO: 128367 - DNA, 1041 bp, Cannabis sativa
actgctttgagagagagagagagagaaaggaaggaaaatgggtattagttcgtttggtctttgacttgggccatgggcctggaatatacaataatagcccaactgtaaaaaaaattagaaaaaaatgtatttactttatttataataaaaataataattatggacataatattagatttcatataatagttaagctaaattttatatatgatagaggtcatgccattttgggtttgctactttatggggtatatttttggggttggttcggcgggctagtgcatcaatactcgactgatgtttgtgctgaagctgtgatttttttgtgggtcttttttgaaagctcgaaatgatgtggtttggcgtgagaaattttcttcagcaacggagatagttcttttagcaaaagtgacctttaagcaatggaaatatgctcattctaatagaatggtagagttatttgttcctacaagaatggatggtggtcttaagtattggtctaaaccaagtttgaataagattaaagttaatatcgatggagaaatctttttttcagatggaacagtgagattgtttgggatagtgttggcggattattggaagctttttcattgtgctttaatggttacgaggctcttttgttgagatggttggtattaaggaagctttaagtttgatcgaaaagacggattggcaagatgttcagcttgagttggattatttagttacaattcaagcggtgctcagttatatctttatgtcttcttcttttggagaattggctagtgattgtcgtcttatgttagaaagtttaaagtttgttaagatttattttgttaaacgttatgtaaacaaagttgtccattgtgttactcgtgactcttgtttctattaagattgtgttttcagtgaggctattgattaataaacactccattctttttcataaaaaaaaagttataaacttgcaaaataaaaaaaaaattattttatagactttttataaaatgaaaaaacttaaaaaaaaaaaatgttaagcta

SEQ ID NO: 128368 - DNA, 1316 bp, Cannabis sativa
gagttgtggagagagattagttatttcagttttattttttggagaagaagaagaagatataatgaaggattttggatttagagttttggggctcaatgtgggctgggactattagtttagtggccgttggaaaggggtaaaccctagtaaatgctatacattctttgaatctttgaccagaaatggtagaggtctaatctttaattatattatttaattcaagtcacgtacacacgcatggattggattcatgaagagaaatatattattagttttttgaggttttgttgctgtatggggatctttatgctaaagttcctctactttgcttccaagtccaaacctctaaaattaagaaattttaatgtgatggcaataattttgagctattttggcacaaaacccttttttaacaatgttttttttatatattacttttgagttattttaagtaacaagatgtgagtgctttaattgctatttagctctttgttctttatatttaagataatgaggtataattgctatttagcactttctataataacattgcagttgtggctagagatcatcagggtaatgtgatttgggtgcaaacgaaactttcgaatttttttgatgctttgtgtggagaagcagcagcttgttgtctgactttgaaggttgtgaaagataaaaactactagtttgtaattgtggagagcgacttcaaagttgtgatcaattcgctaaatggaaaggaatcttgttggaggcgtatcaattatgcctcattttgtaaaaggtcttttccttttttttgcaaaatgtattttgactaatattagtaaaatttgtaactttgcagcacacaatgtggctaagtgggcgttcacccacaagcggtatagagagatccctatctcttccatcccgattaatctcttttgtaatgaccatgaggtctaaccttaaattttaatgcacactcatttaaaaaaaaagttcatttgacatcatctctaatgaaatgctaaaagtatattgtatatgtatattttaatttattttcataaaagcataaagcatactgcaatataaaatggtataaatttaacacatgttaaaaattatattgaatttaacacaaaatataggatgagttaaattttataccacaataaatattttttttatttacttattttctacttattaatgtaattaataactttcaactatttgagatcgcttctggtcaacaagttaatttcagtaagtcctctgtcttcttcagtactaatgtgcctaatgctactcgggaccgattgtgtggg

SEQ ID NO: 128369 - DNA, 816 bp, Cannabis sativa
gatgtaaccttactttcatataatataagtcattttcactgttatcttaagtttcctaactttaatgcttttactttcactgctttttatggtgcgcctcatgcccgaaataaattgcacacctggcatttaatagaccgactgggttctaactctaggcttcagccatggctcattatgggcgatttcaatgattacctgtccctttctgacaaaatagggggtaacatgtctcgaactccatccacacaattccaatcattcatagacaattacgaacttcaccccctcacgccgtcaggaaacctctttacttggactaatcgccaaaagccacctcatcacacccaggaacggattgattggtgcctctctaacgaggcatgggatgccatctttcccgcttcccatctcaatcacggtgatttttttggctctgatcatcgccctcttattctcaacttgagtcacatgagcgatcctcacactcctcctccacgcttcattttcgataaactttggatgtctgaacctggatttgaggattgcttgcgtgaagcctggacccagaccacttcaaatactcactccaatcctttaactgatctcaatgaaagactcgcaaattgttcctctcggctcaatcattggaagaagtctttgggcccaccgcttactgcccaaattcgtattgtccagtcccagcttcaattaatcaactctttgcccaatcctacaacggaacaattagaacaaagtcaaaagcttgaagaagagttgagtggcttattgcaaaaagaggaagtttactggcag

SEQ ID NO: 128370 - DNA, 1161 bp, Cannabis sativa
ctggaaaaggacataacacttatcgaatatgtaagtataccttatcgctgattatcatgttagtttaaatccagtgagctgacaaatcatgggaattaaacttttgaacataatttaattaattttaactgtgtgttttagatttgatttgatttaatataatttcttttcgtcatgaatgtaatatttattctctagtaatgtaatatttatgttattgtaatatgatattttaatttattgagtttcgccgattttacagtattattatctttaatctaattaataagtttatttaaattattagttaaatataacaattgtgataattttttttaattaatataatatattttttattttattaaaaaattaatataataataaggaatattatttagtttaatttttagtactatggttatagtagaaatattttttgacgcaaaatttggtgatagtaataccatatttagcttatccttagagatgctcttagtaaaattttagtaattgaataaaggttaattaagatttttgccccttgaactatgacatgtactaaatcatgccctctgaacttttcaagtcgttaaaaattccccatgaactattgaaattgttagatttaaggacttatgtccatttttattcaattttgctaatgtgaaaattgtccatgtactaaattatacctctctaactttaatatctactaaatcatgccctctgaaccttaacatgtaccaaattgtgcccctaaatttttatccacgtcagacgtttttttagtaaaattagacaaaagtccttaaatccaataatttcaatagttcatggagaatttttaacgacctgaaaagttcaggggtaaaaatccaaattagcctataccaaatcatgctcctcgaactttgacatgtactaaatcatgcccttgaactttcatccatatgagacttttttactaaaatcggacaaaagtccttaaattcaacaatctcaatagttcgggggcaaaaattctaattagccttgaataaatgttatattttctatgattttatataaaaaaaataagggtaaatagcggcaaaagtacccaaagttttatgtttgtaagcggcataagcccaatgtttatttttagcagcataagta

SEQ ID NO: 128371 - DNA, 1390 bp, Cannabis sativa
  modified_base (1319)..(1339): a, c, t, g, unknown or other
tggaggcttgaagcggggacgttacacattagacactcaaactactttgggggtattgctcataatggggtacatctttatagtacccttatttgacgtaatctttattgtcttcctccttttcgttcatctcagcatctctatcaccactgacgtggttatgctagctgtttgggtcgtcctctcagtccttcacgttggacgtatccctgcctctcacatcactcaactatgggtgctttggcgagaggggatttacttcctccatgaccatctcgaggccaccttgtagagtcttcttaggaaccgtctttcgtgttaaaaccatgacaacaacagtagtttatgtctttcagctctcaatgaaatcactaaaatgtttaccgagatttttggaaactaaatatttgagaactaaagaaataataaggtgcaaaaataaagagatgaagattttttacgtggtttgggtattagttaaccttagtctgtgagttagtctattagcctcttagagtatttttgatgtgtttacggtattttcgcaggaaaccctaactctttaccctaagtttctcttgaaaaagaagaagaccaagagtaatattgacaaagttttagctatgtaggttgtgatgccccatacgtacgagaattgatggatacttataggctaaatggcaagtatagacagacacatgacccacctaaggtttctgctcaaatcccactattggagtaaattagagctaactgttgagtcctgtgagaaaatattattcccctgtgtgctacagctagataatgaagactattttgtaccatatggacacgtgtcatctaaaggttcaacctttgaaagtagaagccacgtatcacctaaagctttcttctttacaagcaggggttcgtaatacccgcctaacaaaaaggtggtggatgtgtgcgcactatcatgcttagatgtggggacaagatttgatctttgtcagaaaaaacataaccgttatttggtgatctggcgtctataaaaggtaaacatccgcaacactagtcgacatccgcattagcccttcaagtactcatccgggtattggttgagtaggcttccatggttagacctctttgatttcgacacttcaataatggtgttcgtctgtttttttttttagggaaattatagtaaatggccccatatcataggattatgttagttaatgtcctcattttaaaaaaaatatagcaaaatggccctaaatcataagactatgttagtaaatgtcatcttttcaacattattaattttttttttatttttnnnnnnnnnnnnnnnnnnnnnttaaacattatagtatatctatattagttttgttaaaatctttttttattt

SEQ ID NO: 128372 - DNA, 1717 bp, Cannabis sativa
  modified_base (354)..(359): a, c, t, g, unknown or other
  modified_base (1659)..(1671): a, c, t, g, unknown or other
tgtattctacctttgaatgaatcaatagtcaattcaaaggactccctaccccaacaatactcatcccaacgaccgctatcaacaacatctagatcagacctagaaaattctttatctagagtattgctaagaagaaaacattggataaaatacaacacagaaaatttcaaaccaagagactcgtccagaccccacctactccccaaaaaagcatcctctatagctttatgatcaatggtttttacaccacggaaacaaacctcaatcaactggtttgattcctgggaaaacgaaaatttgttgcaatcaccaaaacaatcaatgccagtgatcaaataaaactcctcggcactnnnnnntatacaacggccagcaaccttagcccaaaattcttttggattgggctagtacacttccctcaacagtaggctatgtacaacttgggggtggaaaacaaaatcaggaatatcaaaaaaatgaccaaattgggtgtcacaaaacatagaaaataaattcacagataaagtattctttatattatcaataacataaaaattgctagtacaacacatttggatctgtaaaaatcagagggactaaatttgtaatcccagacctccaatttaacaaacatgacaaatataaataaaaatggcaaataagcaagtatacaaactataataaaagtataaaaaaaattgaaaacaaactgacaaataaaacaactcttcgaacataaactacaaagatctaaaatcaaattcttacctaaaaatgaacagcaaacaactatacctaataatattcccaaaagacaacatacataaacggattaaactattaaaaaaactatgaaaaaactaaaacacactgtgaagagacattaaaacgaaactgaagtttaaaaatatttaaaaaaattggaaaacacaaacagaataaaaaagacaacataatgaaacaaaagttagaataaacaaactaaaatgcaaaacccacaaaataacaaataaaattgattaagaaaaattaaagccctaaaaatccaaacaaaaccaaacgaaaatttaaaatagaaaacctagaatatcacaaattagaaacacaaaaatgataaagtgaaaaatacaagaatatctataaaatagggggaaacaaaaaagaaactgtaaacacacctcagttcgaataacaccaccagcattatcgatttttccagaaacatcttcagtcctattctcttggacaccgacctttgatttcttcttaggaggagctcgcccacgcttcgttaatggaggagcaaaatcagagtcttcctcctcaataataggttgttttcccatggccttattagttaatgatttcaaacccattttggagctttttttttaacaggggaaggagatgatgaagaacgggtcacaaccattttatatacggaaggagatgatgaagagggaaaacggttatgggattgtgttagtgggagtagaaaaattttgaaggacaaaaatgagagggaaaatggatgagagatcgtggggaggtaaggttcagcaatggaggtcacaaattttaaaaaaatttgaaagaaatggaaaataaaaggaaaaagaagaaaaaagagagggaaatgatgttggaaattattttacnnnnnnnnnnnnnctactcacaagtatgttgtttaaacaccctaaatatgaacttacta

SEQ ID NO: 128373 - DNA, 667 bp, Cannabis sativa
  modified_base (133)..(133): a, c, t, g, unknown or other
tggggggggggggggcgaaattccttgtttccttcattgttttaattttttttttatcttgattgtaagttggctatttaaagacttgtaaacactttagaaaattagattatttttgaataaaattttgagnggttttcttcttgagttcttgaaagaactattcgaacttatgaaggagtattctttgtggcgttcaacctgacttatcaaacagatttccatcaccgtttgtggcgtcttccttcataccaaggttcatacttaactaagcattgggtcgcaattccacatcccaaattcgtgagttcttggaggctgccatttttggtatcgggtttcatcacaattgttggtgtagttcgtatcatttggtatcagagcttatgatcattgagtttggcctatatatcttttatgtttttctattcaattcatgtttgataatcttgtttaacttgtgttctatattcctgtcaattcgtgtttcatctcttatatttttctttgtgaaatctaaaactgttagaaccgcattctgatatttttttttgtgtcaaaaatcgtgtctttgctgtcatagtttgttgtaagtgctgaaaaagaggcgtgcgtgcgacctgctcctcttccatggcaaagaagaagagggccgtccgaaagccgg

SEQ ID NO: 128374 - DNA, 1149 bp, Cannabis sativa
aatagatatacatgaaatatatccaatgaatagaatcgatcaaatctaacatccaatggatgttgtatcgattggatgactgaaataaatttgatcgggtcagatagtaaaagctaacatccaatatataattggatcaaatttgaataaacttaaaaacattggatatggtccaataaacatctcttagagaggaacaaagattttgaaaaattattgctcaattattctgataattaaggataaaactgaaatatgaaaaacacaacatatatatatatataaaaagggggttaagataaaaaaaattgttcaataattgcttaaataatcttataatctaatcatttgaaactattattttatttttattttgagataaataaactaatcattttttttgcagatgtatagtaataataataaaaaataatatgattttaataataataataataagttgccttacctaacagatagaaataggccaacttaggcttataaatttggactcatttcattacataaccaaaccaaaccaaaccaactttcaaaaactcaaaagttgaccactaaaaaagctttaagaagaagaagaagaagaagatgataatggtggctgtggttgcagagcttctagaagagtattacacagcaacactggctagagtaacacagagtcttttatcatcatcatcatcatcatcaccaactctaactacttttcatggttttgccagaaattttcattctcattctcaatctcaacactcatctaattctttcattctttacttctaattaaactacttttgattacatatttatagccttattttcttttcttgtaataattatttattcataattaataatatggtttcattttcttaatttacttctcttcatgtgggatttttagttcattagaaattgttaatgttttgtgtgattttttcattttttttttgggggggtgatgaataattatcatatgatcataataaattataaatatatgatattgatgtatttaagttaggtgattctttaatatatgatatattatattctttaagttaggtgattcatatgtcaatctgggctattttcgcgggccgggccgggcccccggcccgacgggccgac

SEQ ID NO: 128375 - DNA, 649 bp, Cannabis sativa
ttgtctgattgaaaccttcgtctgatgcagccttcggtcaaccaccgagcaacattcgtctgattgtgtaagtaatagtgtaagagatattttggtaattaaaagcacataataggtataaatattgttcacaccttatggatatatttttgtaaataaagtgtcaatttatatttttcatgtaataatttttaatttttttaagataatatatatttatatataattgacattaaaaaaattgagatttataaaaatataacaagattaaaaaaaggaaaaaaattgagatttataaataaaagaaataaaaaattgagattttaaaaaaggaaaaaaaaagagatttatataaaaaaattaaatcgtattttcggcgtattaaattttattgaatttctcaaaaatttataaaatatttaaaataactacaacatagacgactatgaaaaaaattaaactaaaaaagtcttctggatgccgaaaccaataaaaagtgcatcaatatacatcttttagaaggttgcattgtataatttttcaaaaaaaaatgtgaagtgccttaaaaacaaatgaaaaaaaaaaaaaaaaaaatagaatgtaaaaaaaaaatatttgatcaacctagtttactgttattttgaaaaaa

SEQ ID NO: 128376 - DNA, 1548 bp, Cannabis sativa
ccttgaaggcttcagctgttgccatgtactcagctttagtagttgaaagagaaactaccttttgcatattagactttcaactcactgtgtttccacacacacaaaacactgaaccagtgagttatttccttgtgtctattggctccataattagtgtcaacatagccatacacttcagcttgttgacctgattttcttctaaaaacatgtcccaaatctgttgtcccttggacatatatcagaatccatttgagagctttccaatgatcctctccaggatcagtcatgtacctactaacaacacttaaggcttgcattagatctggtctagtacaaaccatagaatacatcaagttgcctaatatatattagcataggtaccttttccatagctttcctatttttctttgtttgtggacactgagtttgaaacaatttgacatgtgtagctagaggagtggctacacctttggccttgtttgtcttgaacttttatagtactttatctaagtacttcttctaatgcagtttgattatacagctggttatggtctttcaacctcaattcccaaaattttctaggccatgccatggtctttcatctcaaaacttgcaactttagcttgttaatctctatcagcttatcctctttcttgatttttttctctggtttacttgttcattatgtagtagcattcagacttgtaatgcccttctcttttacagtaattgcaaaatttcccttgtttgaatttagactttggtttatggttgttgtgacctttgttgccattgtttccttttccatgtccttgatcttttctgaatttcttttgagttcaaggctactttaacttctgtcattgtgagagtatcttttccatacaagattgtgtctacaaaatgttcataagatatgtgggcaaagaactgagtaggattataccttagtcctctatttcaagcttgactcctgtgtattccaagataattttattgaaatcaacaacatttttgagttctttagcatcaatatccatctgtatagtatacatctctatcttcaaatttaagttgtctgccaagtatttctaaaagaaaactgatattttaactgacgcgaatgctccacaaactaattgctgtttcttcatttgacacttctcaaagaacttcaccctaagactgagtaaaaatatatactatgaacctttacttcgatagtactgaacttgccatcatcatcttcttcattgtttattgcatgtagctttggatcaatggcttcataaagcctttgtatgcactaagagtgctttcattttaattctccatagagaccaagtcattgtggcctgtgaatttatcaactttgaactttacacagtcattcttgaagctttcttgaattcttgcaccaggttcttttgatgattcgagcattgagctcagaatccacttgtggtgtagaacactataccaatacaagaacataattcaatcaaagagaatgagaatcaaactaaacaataaaactaaaataatata

SEQ ID NO: 128377 - DNA, 581 bp, Cannabis sativa
taagtaaatctgattatatgaattgagttttatttagggcataaaacccaacagttcactcctcgtgacgcggcagtaatagagttacgtctacttcgtatttttatttctcactagaattacaaaaaattgactaagtgttagggcttgaaattctacaaagaaagtagagagatatgctctgacattataggaactttttagagtgtgaaaaataaggtagatgagctctccttctataacgaaagaggtcctgttaaataataattaagaaatacaaaaaatatcaaaaaattagtttgggcagatcttggccattgatgatgattcatgataatccagtgatgaaaattgactcttggtgaaaatcattaatttttacactttgaatctcgtccgtcggatcattttcgggttatctgctagaaaaatcccaactttgctgaggataaattttggacccaaaatctttagaattaggatgtgggtattgttcagaatattttaccaggatctagatttactaacaagtatgttcattaacatcctaaatatgaatatctctaaaataatgaaattaa

SEQ ID NO: 128378 - DNA, 1466 bp, Cannabis sativa
tcagcataatgtctctgctggtttcaagtctattgtaatggctgaaagtgtttaaataaaattttcactttgactcaaaaaaaaaacaaaaaatatatatatatatataagttttgatatattagtcctcaaactttatttattaactaattaattcgaaaactttttttttagaaacataaaatctttactcttaaataataatattttatttatttatttgtgtactaattataaataattttatattaatactaagcgtaagttacatgcaaatacatggtgataagttgaaaaaatacttattttttgtatccatcaatcaaaaatacctttatattatattttattaaaatatacccaattttttgagtgaattgtcaaatatacctttactctctacttaagcttaacatataatttacattaatctaaggggtctaattgggatattatctataaaagtgtttatatcttaaagaaaattaaaataaataaagtaaaatgagtatacaatataatttcctcaaataatatacatgtgtagatatatgttacttatatatttttttcattaaaaaattattaacatgaagttttatatgttgttatttatatttatatatttttaatgaagaattaattattttatgtataaactttaaaaatatatctataaaattgaatagtaaaatcattttttttttaaaattaaatatattaaatctaatgagaagttgtatgagaaaagatattttatattagtttaagcaaataataattttttttaaaaaaaaaaaacatcaaaattaataagacgcttttcaaaaaaaaaatttgattgacttaaaagttcttatataaaaacaaaacaaaaaaattgcttatcctaattttttttaatcttaaaaaatattttcccaattatttcttttttaaattttatcgatagctacaaattaaaaattagaatcatcaaaattatctttggaccctctctagttttgatggaaaaatacatgcatcctacctaaataattaaagaggtttttaaaatatctactatttttaaaaacctaaataataaaagtatttgggactgatattttatcacaaaaatataatagagcaatatatatatttgtacatatatattttcatgttttctttctctttttatatatatttataaatatatatatatttggttattgttacttgtgttaagaattttgtaaatagtacgtaagtgcacgtaatcaagtagtaagcttacataggtgaggtcgaaccacaaggaattgaactgagtaccactaaattaaatctatgtttctatttgacaaatcaatatttttcgagttcaataatcgaataaaaattcaagaagctgaaagagacaataaaaattaatcagaaatgagaagataggtcctattgataggtttacccaattgttaatgcct

SEQ ID NO: 128379 - DNA, 1357 bp, Cannabis sativa
aatcacgttaacacgcctatgctagttagggtgttacattaacgacctaactgatctctcccataagacccaatcgaacatcgatcaaagatcgtaactttaaactttagctaacatcaataattttaaaatatcacattttatgagaaagtgaaacaactattaacagtgtaatatatattcatagacaccaaatggtcaatcagctcaatccagaagtcctactatcacaattaagaatacatgcaaaaaatttgaactgacgaatttatgaacttgaagaagaaatttaaaaaacaatcatattttaattttacttagtattcatagaaattcagacatttataccaaattagataggttacgtaatttaaaaaaaaaataattagattttgattttattcaatattcatagaaattcaaatatttataccaaatcagagaggctaggtaatttctaaataatcagattttgattttatatttttagatttaaacctaaactttgatcaatagcagacaatatcaatgagaaataaaaaatattgcttctgaaatcgatgaagaagagacggtggaagaaaaggaatagaagaatagagagaaagtgaaaaaagagacgatggaaaagagagtggaaagtgaagaagagacgatagaaaaaagggtagaatgaccgcctggcgtcatttaatgtgacctatttcatatattcttactcaactgatgtattgaagtgacaattttaatttaatcctgtttttaaaaataaataatttaatttagtaatgtcgacttggtggttggaagcccagtttatgttggtattttttacagagatagtgtgtgtcattaatttgtattgtgtggcacttgtgaaaagagggtgtattgcattgtactctctattttttttttttaatttaagactattttttagaaaagacaaagttgccaaaaagattttgaagaacctgtttataaaattaaaataccacttaatttactcataatatatatgggcttacttttaataggtattacccatgaatgggtaatattagaaaaaattgagtttttatgattaatttttctatttaattaaaaaaatttcttatttttacattatatgggctgcaggggttgttccattagctaaaaaaaataataaaaaaaaattcagcaaaagaatgataaggaaaaaattgagtttggcttaaatatatttcatataaacatatttttcgatattgttacgaaaattataaacactacgcaagtatacgcagtcaagtagtagatcacgcaagtgaggtcgaaccacaaggaatttgactaactactactaaactatacc

SEQ ID NO: 128380 - DNA, 1006 bp, Cannabis sativa
  modified_base (44)..(54): a, c, t, g, unknown or other
  modified_base (980)..(981): a, c, t, g, unknown or other
acccacgcctccgcaccattgccctcctctctcgccgtcttccnnnnnnnnnnnatctccctttcttctcgtctctcttgtccatcgatctccaccaataccttctcccgtcggtctccctctcctctccatcgcatacgtcggaccaccaccatctcccgtcggtgtccctctcatctttgtcttagacatcggaccaccaccacctccagttcgtctacctctctctctttctctctctccgagcttagtataaatatatttatctatttatatacttttttatttattataaatttatttatttatttattataaatttatttatatactttttattaatttattaattttgttattgtataaatttaatgtgtcttaaagttagttgctattgtattaaaattaattattttaatttaataactataaaaactacttatttttagaatatatggtactgttataaatttgttttattaatttttaatatcatcgttaggagactaatttattttttatcttattttattttgtaaatattttgggatcattcttgatatgttaatgagttggcgtataggatgaagtgatataagctaaagctctagctctttgggtgtgctgtttcaagacgttatagttttattatttaaacttctggggatagttttctcccatgttgctcgctgactttagcagttcatagtttgttaaagcctacttttcggttagacgatgatctatccaagttcaaggaggttcttgtgctgtttgcggatgtatgtatcctaaattcatgaatgattctaattactacgtcaaaaaaagacaatagataagaaaaaaatgaagataaaacgagaaattgaatgcgattttttcaatgatttatttcaatgggagtgtccccttttatacaattatgtaagtcatagattaggatgccaaagagaggaataattgttgggttttatgcnntaaataaaactctgtttcaatgtaa

SEQ ID NO: 128381 - DNA, 2947 bp, Cannabis sativa
cctggtaaaatatattccaacacgagcatgtaatgtttctaataacatgtgttgcatattgttccctacgttgcaaataagggcagcgagtagttagtttgataagttaacaaatcatgccatcacctcgtgggaacaaatatctaaagaattcaaaaagcgatttcaggctgcatgggactagaagacaagaagcatcatccttgactaacatcaaacaataatttggagaatccttgaaagcattcttgagtcactttagcacgacaatgatgaaggtcaaaaacttgaatgattgtattcaattaacaacactccaggctgggacaactattgacttgtctaatgtaggaggcgagttgtgggatgattagcaagggcacccagtcacatcaataaatgaatttaatgatagggctctcatctatgttagaaaggaggaagctcgatctaaattaaaagtattaaaagatgactcggggaataaacccagcttaagcaatgcagacacgaacgttgcaaacacaagaaaaagtcacaaaccacatgggaaaaggaaagatgagttgaaggactcatccaaagacaaaaagaaatagaaaaagtatgagaagtatgtccccgtttataccgtacacaccaagctaaacgaaatacaaggaaatatattcctcacgaataagaatagggtcacatttcgtaaacctgaacctatgaggaatgcgaggaatacacaggatcagaacaaatattgtcactttcacaaggatattggtcacaccactaaggagtgttgatagcttaaagacaagatcgaaagtcttagttcttgaggttttttttttacaatacatgaagaataaggggaatgagcagaaacaatcacataactaaaatcaaaaccaaaatgtccagcaaccacctgtacagggcaaggacatcttggtgatttctgggggacctcaactcgcgagaacgagtaacactgcacaaaagagatacataaaccaagtgaaaaaccaatctttagattttgcacctgaaatgacaaaacaagctaagactaaagaaccccccaataacttttactgatgacgatgtgatgcacgtcaggttttctcatgcagatttacttgtgatagccatttagctcgcaaataagagaataaagcgagttttggttgataatgggagtaaactgatcattctatataaaaggacctcaaagaaaatggggttagatggagtaactctaaaaccatgcatggttaatctatgtaggttcacgggtgatatcatcgcaagtttgggtacagttgagctccccctcacaatgggagactcgcctctattagtgactctaatgcaagaattcttggtggttgaccttccctcgatatataacttgattatgggtcacccagcactaattaaattaggggaaattacctcgataaaacatttttcattaaaattcccaactcaaaacgaagtaggaactgtaaaagatgaccagttgttagcacgagaatgctacaacattgagttaagggaaagagccaagtcttatcaaatgatggttgtgataactgaagaaattgagaatggagaggagtatctagacctaaggatgggtgaagagaaatcccagctcgggctgatagaggagttggaagaggtattactcgaccccaatgtccatataaagttgtaagaattgtaaaggtttaagggaagagttgaagtagcaattaatacattttttaatggcaaactaggatcaattttcttggagcaattcagacatggttgggattgactcggatgtcataagccatcaccttattattgaccctcaccatcatccaaagtagtagaagagacaacttctcaatctagagagggagaatgcactgaaagaagaggttgacaagtttttaaccaatgacttcatacgagaagcatttacccactgtaagtgccaaagccaaaagggacctagagaacttgcattgatttctcctacctaaacaaagcatatccaaatgattaattcccattaccaagaatgaatcagctcattgatgccactgcagggcatgaactcatgtcttttagaacgcttattctggatataaccagataaaaatgaatgtcactgataaggagcataaaagcctcattacaaaaatgggattatatggttacaaggttatgccctttggtttaaagaatgcaagagccacatatcaatgcctcataaatagcatgtttgagcatcagataggttaaaacatagaggtatacatggatgatatgttagtcaagtccatcaagagcactgatcacgtgagtaacctcgtaggttatttctcaatcttaaggaggtacaatatgaagctaaacttgaagaaaggctcttttggggtttcttctgacttcttatattgtgccaggtgtccattctataggacagacctacaaattcataagttagcctggtcaggcaacgttccagttgtaatcttactactgcatatgtagaagtttaggcaatacagtattctactaacatattaataacatgttttctatcatgcttttataatcacaaaaattactaaataagtaaacacttacgtatcaatgccttataaatagcatgtttgagtgtcagataggtcaaaacatggcagtatacgtggacaatatgttagtcaagtcaattaagagtgttgatcacgtgagtgacctcgtagaatgtttctcaatcttaaggagatagaatatgaagttgaacttgaagaaatgctcttttagggtttcttcttacttcttatattgtgctaggtgtccattctataggacagacctacaacttcacaagtcaacctggttaggaaacggtctagttgtaatcttactactgcatacatggaattttagg

SEQ ID NO: 128382 - DNA, 974 bp, Cannabis sativa
ttcaaaagtttaattcccatgaattgtcagttcactggatttagactgacttgataatttgcgataaggtatacttacaccttggacaagtgacatgtcctttccagggaattacaaaagtttaccgtatcagatgtatggagtatacattggagggatcgatattgattttagataagatatcataaactcaccgttatgtaaagaccgcttagttttaacttagaaaattagtagataattagggtttaattatgaaactagaataaaattatgatttattattttatggagatttatttgaattcggggtgtattatttatgccatgcatgaaattttatgtttttacaagttttgtgtccggtaacatcggaacacggtgtttggccattagaatcacagtatttttagtatagcgggacaatatagttagacattgggaatgtcgggaatagtcggtattttataattgaccaaattacccctaagtggttttgtgactttttggttaagtgggggcaaaatggtctttttccctaattagagttttgtctttagtgggatttcattaagtttagtatatccttttatgtctaggataattatattttattttgctttaacctaaattaaaaaaaaaataaggaaaaaagctctcttctctctcttcactccttctctctcttgaacccttgaagaacaagcagctaattggagttctttagctggtttttgtgaattgtagttagttcttggtgattccattgaaggtaacccatttagcaccgcttcctcttagttttgttaagcttttaagtaatgaaatgttgcatgaaattgagtattagggttctgtgttgttgattgtgttttctgtagttgaattgagctaggttttgggttgttgtggtgtttgagcaagctttgagtttaagaactcaagcttttctctttaatggtaatttttgattc

SEQ ID NO: 128383 - DNA, 734 bp, Cannabis sativa
  modified_base (499)..(499): a, c, t, g, unknown or other
aacatcttgcaaaaagatttcttcaatggtcagaaagttcttttatacaagtcttgacttcatttgtttcccaagaaattacgctctaaatagtctggtccatttattattcgtactgtttttcctcacggagctgttgaaattgaaaattctaaaacttgtaatatattaaaagtcaatggacaacagttgaagccacttttagaattaacaccatctgaagtggaggaaacgctccttcacgacccgatttaccaaggttagtgaattctttcactactggtcctatctttaattgctttctttaatttcagtattttagtttatttttcgtcatttgtttttagataatcaacatccatcactgtgcatattctctatttttcttattctcatctcatgctcttatcagctacatatttaaacattgaggacactgtctcgttttagttgggggtaccgagtttattcttgcgttaagtttgataaatttcttacntttttgaaaattttgagtcaaattctgctgctaattacgttaataaataaatattgtgttagactagtttatactatatttagttaatttgatagtaattcaagtaaaaattacacaaacaaaacatattgtaaagaccgcttagtttaatttggagattagcagttaattatgtttaattatgaaaattatttatagctatttaaataaatatttatactgctattattgaatt

SEQ ID NO: 128384 - DNA, 1238 bp, Cannabis sativa
  modified_base (1169)..(1174): a, c, t, g, unknown or other
gaaatatttacttctggtgacttttttaacgacggtgacttttcctttggcagtgatttttctagcgacttttccgtcggtactaacttttttggtgactttttcggtaatttttatggtgtcggtggctattccggcaaaatttattgttgttttataaatatgggatttccaattttttttataaaaaatatagtataaaaaaattcatataaatataaaaaaaaaaaaaaaaataaaaactcataaacctataatgttatttatttataccataaaaaaataaactataccttaatttatatatttataaaaattctccatctctatattggttcatatatttctaagtctatccataatcaacatcacattattttcaagcctatgttgaatcttccattttgagatttattatcttatcaagtggcccaactcgtacgttgttagttaataatttgcagaagtaaaaggaaaatcgttgaattttgaagtgatgatgaataatgatattacatgttttccagacacattcattaatcactgtcacacattattttcaagcttaaataaatgtgtatatttcccttttgaaattcactgatcaatcaagggagaccccattttcaaaaaatcaacgacggagtgacctagaaatatatatattgtttttaaagaaaattacttcatttcctattttttaatttttttctaaatttactgtttgggttgtttcggtggtttctatatgagttactatacggattttggttacgagagaatatttattctatataaagtatgactatataacgaaatttttgatttaatgatattatttacgttaattttaacagattctttattaattttataatattatatatatttaaaaataaaattatatacagtttatataaaaaaaataatttaaattaaaaatacttatattttatactaatttcaaatgattgaagaggtttttttaataaaataaatcaaagttactttacgttaattataaatttaattaattatgtctaatctattatatataaaatataattatgtaataaaatttttggtttaatagtatttttaaattttctacgttaactttaacagaatatcccaatagaatatttattattaattttataatattattnnnnnnatttaaaaataaaaattatataaatattttatataaaaaaaataattttattatatatatttaa

SEQ ID NO: 128385 - DNA, 1012 bp, Cannabis sativa
tttttttttttttttatagaatacagtaaaagtatatatatataaaaaattgaacgtaaaaatataaattttttataaaaattagtgttttatataattatcccataaattaaaaggatatgcattataattaaaattaaggtgaatttattttaattataagaaatcaaagtatttagtaaatcaacaagtgtaacaagtacttataaaagctactaaaagtaacaagtaactaaaaaaagaacaaaccaacacaaacacaaactcaaactcaaacaaccacaagctttcaatttgaaaaatataaaacactagtaagttagtagctaacacaagcaattagtttgataattgcttgtgttatattgtatgatcagtaacaaactcgggtatattgtatgagtatcctatcgcccctcgacaactgttatgcttgtattgcatgacgggggtatagtagaggaagaacgatctccatcccacaaatctgagatagtgaaataggctggtggtttggggtgaggcaacactttctcaccactcaacattagaataacagaagacatattaggcctatcaactggcttttgttgaacacataagagaccaatatggatgcaacgcaatgcttcttcaatgttgtcaaatggatcttttaataagtatttgtcgataagcttaatttcgttgccttccttcatcaaagtccatgcctaacaaataaaaatatatataaattaaagagtttttttcggctaaaatatctcaactatatattatttcacttgcatttaaccctctaagatgtggtaaaactctctaaattattgaactgtttgcaaatttaaggtgttatctatttttcacagttaactgtcaacataaactgcttatgtgtacactcttgtacatgtgtcacgcaggaccggccttgagttaatttgggtcctagaaagaacaattttttgggctatttttataacaataagtgatatttttaaaaattattaaa

SEQ ID NO: 128386 - DNA, 881 bp, Cannabis sativa
  modified_base (509)..(539): a, c, t, g, unknown or other
tgcaactaccgcacaaccacgcaaaaaccactctgcaaccatcgtctgattgtgtaagtgatgataatgtaagtggtattttggtaattaaaatcacacaaaaggtataaatgttatttttaccttatgaatgtatttttgtaaataaaatgtcaatttatattttctatgtaataattccttgaataaaagtcgttaaatttaacaatcttaataatttaagaaaaattttcaacgaactaaaaaattcaaagacaaaaatctaaattagcttaaaaataatgctcaatatatatttaaattatatattttttatactatttaattttagttaaatattatagatagttttaagtggagattgcatcaattttaattaattatataattacctttgataaaaaaaaaaaaaatacgtgtaacttaagtgtgccaccatgcatatcttaatttagtatgtgtaataattaatggtgcctatctcaaataataataatcataataataannnnnnnnnnnnnnnnnnnnnnnnnnnnnnnaataataataataataattaatggtgccatagtaaatattaatggaaattttttaaatagttatttattttgcatatatatatataaattataaattatttgaatcttctaaaaatttattagtagtcttaaataattataatatacatgttcatagaaaaataaaaactaactaaaatgttgtcttgatgccgaaacacccctttaaaagtattttgtagacttacccaaagttaaaaacaaacaaactattttttttaggcatttgtttggttctcgaataagagaaatgctaaagggtaccagtggtgtttagcaccctcctatgtgtcaatatcgcta

SEQ ID NO: 128387 - DNA, 881 bp, Cannabis sativa
accgtagacttgctgtctcgaatctcaatagttcctggttcaacgagctcttgcaccaccctctcgatgtgaggacagccggcccagctccgtgtctcgggtagtagggatctcctcttcagagatcgaagttgggacaaaactatcctcctgatggtcctaatcgccatcgaatgcgtcacctccagagccaagcatttggctatccgacagtttgctcatctaaaagatataagatcttttcagtgtggtgaatgtgcaaaaataatataggtgacctcacccgcatgcaaaatttaaaatctacttagaaggctgatttggattctcgcaaagagccaatcagcccactaaagcacaacatcgtaggtgtgcgaatagaagaatctctcgaaaaatggctgggtgtatcccagtaacctaaggggcatacgttttctagcatgaccctgaagttattgggaagaacccaccgtttcgaggaatctaactaaccacaacctgcgagtttcgcacgcatatctgactagcgatgtacctcaaaaaatggctgggggtttcccagtgacccgagggggatgcgttttgtagcatgaccctaaagttactaggaaacacctactgtttcgagcaaatccactagtcgcaaaatacgattatatagaaaaagggaacactggcgtatgtcgcaaatggctgggcatatcgcagtacctcaaggaacatatcatcgcacgtatgagcattggaatacggagacacgcgcaccatttgaaggacttaaccaatgttcccatcacaaaatatatagagaatataaaaccctttgttctaaaacaacggctaggaatgataaagtctctgtaaaacctaaaggaagc

SEQ ID NO: 128388 - DNA, 850 bp, Cannabis sativa
aggttatttttagtattaatttagtgtgtttataatttagttttactcgtgtttggagtaattttacgcttgtattatattttatttttgcagattcaaaataaaagaagaattgaaaatatcaaaagaataagatgaaagatgaaaacaaaatgataaaaagatcacataaaaaataattgtgcaaaatatgagtcatgcctaggaatttttttttttttatttttgatgaatcagggaaagttgtattgctcaaaaactatctttgtacaatcaaatagcacccaaaagggcctaaaaagaactgctatacaaatataactctcttcaaatttcttttataaaatctatacaatttgtacaaactattaaacttttcaccaattacaaactttgaaaccagttggtatcttcaatagatacttttttcggccatattgcagtaactctttgaataacatcacttcttattctttcgaacatctttgcttcattcggtttactcttttcccacaagctgagattgcgagctttccataaagtataaaccaaacaaacaagagcagcagctaggacatttttcctaaaccgactgatctttgatctcccaatccacctggttagagtggacattgtatcagctttgaaattccaagagagccattctttagttctctgtaagcaggcagcaacagtactgcagaggaaaaataaatgctctgcactctccttatgagtagaacataattcacaatgctaatcaacattcattcccattttcctcaatctatcattggttcgaagcctttcctgaatagctaaccaggaaataaaagagtgttttggggtg

SEQ ID NO: 128389 - DNA, 664 bp, Cannabis sativa
acttttcaatttaggtaggttgggttgcagcgctagttggaatatgagtttctatgtagaattctgaaaaaatgcaaaaaatactgttatgaagtgtaaaaatcaaaaatcaaaaaaccaacttcaggatggttaaacttcttagtaggaggattttcatcagggaggttagtctgagcttttaaacatgcaagggcctcttgcatttgatgtgaaacttcctcttgctctgctaaccttatttgggtgtttacaagttctagttggactcgtattactttgggatcttgcttgtaatactcttcttcttattcttgattgtagattttgttgtggtcatctccatgaccatcccactcatccttatcgatgggatcatcagcaaatttcttgtcgtggtgctggtcttttgggtgcaaacgatttcctacctctaacgtttcactgtccctcatgacacccatctaagcgtttatcgagggagctggttctcactatcgtttgcgacatcatctctatcttcttgagcaagaagcttgaccactactttttgtgttgcaagtattttgtagataacaactttggtaactcttctctcaactttcaatgaaaataccaaaatttttactgagatttttggaaactgattataaaataaataagc

SEQ ID NO: 128390 - DNA, 956 bp, Cannabis sativa
cagccactataccacatacagtacgtaccttgctttatgagtgttggtaagtttgattcgtacctcgagtaccactgagtgatataccacagacaccctgtactttcccgtacgtaatgtactcttcaacaatacacactataccaatgcattctgcaccataactgtacaagtgttggtagtgtaacaaacatataagcatgcatatacatacactcacatattgatatcacacatgatgtacagttcttaccttctttccagattcaagtgtgctggccgacttgaacggaaagtattgcgctaaatggatgccctaatcacataacgaaaccgggtaaatcacttgatcaaaaaccacaataggggaaacccgaacccactactctaggctctcttatactctttagggattacaataagttaggaaatagggaaacacccaactaaggtactgaaatgcaggagcattgagaaaatggaacattcggggaaccctgcaaaaatcgactaactagttttgccagtaccggttacccagtttgcaccagttcactcaaaaaattccatttcttgctcaaaaccccaccaaatgcatccatactttccagaatacctaaacaatgcataaagaatattttacaaccagtaattcacagaaaatctctctgaaacacaacatgccattaaagatcagagcttaggttttaaagctcaaacttgaataaatccaacacaatacaacaaaaccagctactagaggctaaaattaactcaaattatgcatagaattcgaaccctaaggatttctaacacaaacagccaccaatacaagaaatcactactcaaaccatgtaaaaacttaaggaattcaataacaaaagctttctttcttctacggccaggatcacttcttcttgctcgtgctgtatagttcaggcatacctctcctgagc

SEQ ID NO: 128391 - DNA, 1032 bp, Cannabis sativa
tatagagtataatttcctcaatataaaatctattttgttatttaacaaaatagagagctcaattaataacttttacaaaacacatagtcaaaaaaataatatttaccataacttttttattagcggtggataaagcggttgctcgtctaaaatccattttgttgtaatgatattggtattatataattaagattacagatttaatttatatatgaccaaataaaatggcggcctcgaaataatattgaatatattgtttgtaaaagaaacaagttaaaaaactataagttccatctaatcaaatatgcctacccacaaaatagaagaaattaataaaagccagattttaaagataaactaattgaattcaactcgatcctttattaattcattgatgataaaaaattaacatatgaatattacgaatgatgaatttcttcctttgaccccaaatgtgtacataatacatatgaatataaaaattattatgtatagggtcgtccgaatatatccttgtaaagcaaatcagaagtagaaggagaaggaagaagtaggactatcagtagttgaagctgaagctcaattagtagcactattgatattatttggttgattatgataattttgtaaactacttgatgaagaagaagtattattattgtaagaagagggagtagacatactaatcatgttgttgttataactactgaaggaattagggaaagtatcattatattgcaaattattagtgcttgaatgagaagaagaagaagaataagaagataaagaaggctgatgatattgttgaaaactacttgatgaaacagaagcattagaagaaaaagtactaatatcattaatgttgtaaatagggaaataattatcataaggagaagaagaataagaagtactgctaatattgttgtaactattattattattaatgtaaagttcttttttggcaagttagttgacaaaataatttttccatttatggtaagattgttgagcattcatattcggattcttacc

SEQ ID NO: 128392 - DNA, 911 bp, Cannabis sativa
gtgcgtccatgtttccatcgtgactttattgaattcatatgaagatgcctccagagcttgtatattcatcaagaatgttactaactagcgtcaatggatcaaactaaacttggcataactaaaatgcgttcaactaatctgactcacttaaaagagaatgcagaattagaaaagagagaaaaaaaattatttcctcaacacgtttcagtaacttggggaaatcaatctccattaagttggtcttaacttaattaataagtataccttgtcatcatagcctaatagcctagaagttggtcgtttctttcgattgtaatcatagttaacgttgtcactggtaaaaaagtttagtacaaaatagacctgaaccactttttttgacttttctggaaagttgggagctatgttttgtatgctaagttaccaaaacgtggtggcgcagttggctagcgcgtaggtctcatagctataaagagtgatcctgaggtcgagagttcgagcctctctcaccccatttttcattttatatattatttttttaaaaaaaatgcaaaactaatacctttatgcggtctgatgagaagatctcattctttaggagaaattttgaaataaggatgctgcaaagcttcatcgacggttaacctatcctcctgcaatccaaattatgaggcgttaactaataagtttgtggcacgtgtgcttccaattctagaatcaaatgacagaaaaagataacataaaattttatatataatataatggattaaaatttatataatatatgcacacggtgtaaattccgtgtaaaatttattactgcaacaactaagatttaaaatccaacactattaatagtgtgtaatttggtgcacaccaatttggtgttattgtaggatattgtcccacat

SEQ ID NO: 128393 - DNA, 2139 bp, Cannabis sativa
  modified_base (58)..(61): a, c, t, g, unknown or other
  modified_base (926)..(927): a, c, t, g, unknown or other
tgtgttgatgtctttcacacttggaggaatgttcattttatgagatgaagtggcatcnnnntcgggaacagattcatgctcctcagaagggtgttgagatgatcttgtacagggcagtaaagaatgtgagaataattgatctattgaatttggagagttagtgtcagatagtggaaaaatatcttcataaaaataaacatctctagagttaacgatctcttgagtgtcaatgtttaagagagtgtaagctttcataccaggtggataaccaataaagacacaaggacgagatcttggatcaagtttatgtcgttcggtttccaaggtggaggcaaaagcaagacacccaaaaactttaaggtgttcataagcaagatctttcttaaagagaacttcaaatgaagtctttttgttaagtaatatagatggagttcgatttatgagataaataatagcatttatgacattaactccaataaggtaaggataaatgagattgaaaaagtaaagctctattgacatgtaatatgtggtgatgtttgcgctcagcaatagaattttattgagggcgaccaatgcaagagatgtacttcacggtgccttcgctattctaaaagcttgtcatattaagttctttagcattgtcacaacgcactgctttgatggaaactaaaaattttgttgcaataagcgataaaaattgcagaataatgaaagagacgtcagatttagagtttagcatgtaaacctaagtgtaacgagcaaaatcatcagcaatggttaaaaaatatcgataaccttcaatgctaataatatgaaaaggtccctatatatcaagctgtattaaatcgaaagcagcattagcaaaattattgttagaaataaaaggaggccctttttttttagcaaaatgacatatagagcanntataatccaaaggtttttcacagaattgtaaacttttatttagtatattagtaatgttcatagaaggatgaccaaggcgaagatgccaggggtccttcaaggtacaagtagtgtttgcaaaaatggaaacattggaagtgagaaaatgccgctcttgttcaaagaaaaatagttggccaactttcttagctatctcaatcgtagaagtcagggagggatcctgaatcaaacattgattaaaactaaatgtgagtttattatgacaatgttcaagataagcattcacataaaataaattgaacttgaattctggaatatataacacatcggtcaatgttagtttatcaaatatttttacggtgccagatttgtttatgtgaatctgatgaccattaggtaaagtaacaatattagcaacatgattagtgtttagagatgtaaaaaaaatgaagagaatgacatatatgatgagtagctccactatctacaatccataaaaaagagggaaaaaattatcattaccaaagacgttagagaccacaggaagattgccgctggtggatggagcgttttggatttgctgactgagtaaggagatcaattgctggctaagttgtagttgagaagagccagcaacaggggcctcaggactggccgaaacttagtttgccggagcagtaggcgtgtttcgctttttgtcaccatatccagatggaaaaccatagagaaaatagcatttctcaaccatgtgaccttgtttaaggcaattggaacatgtatggcgaggcttcctgttccaagaaggctaattcggtttcagtttggcaggggcagcaacaacaatgtcggtattgcgaagacaacattggcgcccttgttgaacaaccatggagaaaaccttggatagtggtggaaaaggatcaaagaggatgatctgagtccatattccccaataagattcattgagaccgatcaagaaatgaaggatctgttctttgatcatagtaatgttgaagcatgtaactgagtgaagcatgtggtgatcgagttatattcttgtttaacattgttaaaagaggtcttaagttggagaatgcacaggccattactctgattgaaatgatcatggaggtttgtccatatttcgtgagaaatggttttaaacatgatgctgttgggttgtgccgtaaataaaaccaatttcaatataat

SEQ ID NO: 128394 - DNA, 649 bp, Cannabis sativa
tacctggtcaacttccatgatagttttaaatttatctaagtaatcgatagggttagtcaaacctttatacttgagtgacttggagagtcaaaaaccctttgggattcgggtttgtcgcacttactctgtgaaaggtggcgtcccatgcatcttgtaaattggcttcctttgttgttcgatcatgcgaagagctcacaaaagattctcctaatcatcctccataaaaaaaatgtcagcattgttaataggtgtgatgtggttgccaggtgcgacagccacgactattatgttggcatgtatcactacacaactgcgggtgcggctagcactgctactgctagattggcagcattaatcgcattattgacatttgtagggggttattcagcgaggggaataccttaatcaaccaaacagggatcatggggttcctcctcattttcacgattcctcagagttgagctcaacctccttcgattgctcaacctcagggttgagctccaactccttgccatcctctatgtgctcctcgccaaggtctatatgcagttcatgtggaggtacataaccaccattgtcattactggccatttttggcagcctatgggtggttgttgggttttgtgcactaaataaaacccatttcaat

SEQ ID NO: 128395 - DNA, 536 bp, Cannabis sativa
cagtcgtttgatcatgagcagggacattgaactgaaagctgtttgtcaagaatttgatctcttacgaagtggagatcaaattcaatatgtttagaccgtgcgtgaaaaattgaattagtagccagagctaatgcactttgattgtccacccatatagtaggagcatagactaaggtgacttgtaattcagtgagcaaagatcgaatccacttgctgcattggccaaggctctaaatttgctttcagtactgaacctggccactacctgttacttcttggcagatcagcttactggattttcaccaaaaaacattaagtaacctcttgtggacctacgatcgtcaatgcagctggcccagtttgcaaccgagtatgctgtgagagtcagtgcaaatgtagaagtgagacatattgtaacgccctaaaaaaatttagacacgctacccaagttacttacgaaatcctaatcccctaaacgggattgctaagcaaaaaggcacagaatttaaactttttgtaataaacagaatgaaaat

SEQ ID NO: 128396 - DNA, 626 bp, Cannabis sativa
gaaattatggaaccctttactttggggatgaattagtggccggggataccttgcacatgaaagatttattccttagacgaagatatcatcctttttatgagtttaatcgacttctggaggggtggatctgcttccggtagaaaccttattctttcaaatggattttctttctctgaaactaatcctaccttttacaggcaggttgttagttagacttgattcaactagcatactatctaactgttttacgattcaccctttgagaatgtgacacatgtcttgttcgaaatcacaggcaatatataactgagtaatgattaaccaaactaaacataatggtatatcaatccaaaactaatatgaccatgcatcacctaacaaagatgagaacgagggttgccattgccaaagaaatacaaaaaattgtaagccctccttaagaaatatttcaattacaatttcaatccactcaaaagtctacgaccataaatgatcataggagaaaagcttgtataagccttcgagagacaaaagactagaacatcatatataaaacttaacataactaatgacaacaacataaaactcgtatatatattaaagagtaatttgtggcataaaaattt

SEQ ID NO: 128397 - DNA, 803 bp, Cannabis sativa
  modified_base (754)..(762): a, c, t, g, unknown or other
aaatatcggacgaaaatcataaactaacaggaacacaaaaaacactctagattgtcatgatttatcgcacaaaatcgcacaaatgtcacacaaaaattgtacactaatatgaacacaaaaaacacttcaaattgtcatgatttattgcacaaaatcacacaaaaattgcacaataatacgaatccataaactcatttaaatttgcaagattaacctcacaaaaattgcataaatatcgcataatgtcgtacaaacaaagaaaagccccaaaaatgctatagcctgaaacaaaaattcttacccaaacacaaaaatttataaattattcaccacatttcagtttaatcacagattgtgaatttaatgtagaaattaaagaaaagaacgtgattcaaagttggtgtcatgaacagaggcggggaaggtaatcagagactagatatggggtgtcgaaggtgattgtggatcttgttggtcattgggggtcacgtgggtctcctaggtcgcttgggttgagtggttgagagggtcgccttagttctcctgggttgttgtgggttcgaatggttgagtcggttgtagagtggtcggttcatctagtatggtgtggtgagaagaaagaggagagagaaaggaagttagagagaatgcaaggaattgaaaagataggagtaattgtagaagataattgaaagattgaaatatctttactatgtgagaaatcttttgttagaatttattttactaggatctnnnnnnnnntcacaagtatgttgtttaaacaccttaaatatgaactttct

SEQ ID NO: 128398 - DNA, 1637 bp, Cannabis sativa
  modified_base (27)..(40): a, c, t, g, unknown or other
  modified_base (1417)..(1421): a, c, t, g, unknown or other
atagtcgttttagaagttcatatttannnnnnnnnnnnnnatacttgtgagtagatcttagatcctggtaaaataatttccaacattttggagtttggataagttgtttatcaagctttattgccgtgatataagacccaggatcgtcgagtgtagttccactcaggtcggtccacacgcctgatattggattgaggtaagaaagctttacacactactaagcatattagataagaaacgagtatgatcattggtgcctcgattatgattgaggtaatagttcttattattgtgactcgattatgattgagggatagatacaatcattacctctatgagtaattactcgattattgttattatttgctttactgggcaacgatagtgacatatgaagctcatagataacgagtggtaagagtgctttatgaggcactgtgattgactcgtcttataaacgtttaattggttaggcattgctgagtatggattgaatagtgagtatgttgttgtgttttgttgtgattagttgcattttataatgtgtatgaattaatagtttttcttgctgagtttctgtgactcacaggtgcttcgcggtgcaggtaaaggaaagagtaaagcggatcaaccatgagtcagaggttttccagtagtatacatatcaactgcggtgcctcggctaccaatggacaggatccacccttctggctgtattttgaattgtaaccctcttatgtaaaactaattttgaaatagagtgtaaaagctttatacaggggatccccgtacttaatagtagtttatagttaataaaatttatgttttttattttaatttaaaagttttaattacaccacactttttgtaaattaataaaattagtttaaaaataagtttagaaaagcacacacgcgacgtccttgtgggatagggcgttacaacatggtatcagagcgactaaggtttaaagatcctgaagactggtttgatatgtacattggttgcgaagactcgttcgactcatggttcagtaagtgttaactgttagaatatttgtttattacctaattacttgcttattcaatatatgctagttattagaaaagcacagtactgagcaatggatatgcgtgtgtttggaaatacttattagtattggttatgatttgagatatattaaacaaatggaagttatgatcgtagttgcatagagcatgtacctgaggcgatttggtaggggtaaccgcgagcttactgggcttagggatgtaaacggggcggggcaggtgcggggattgctcccccacccccatacccgcttcttaaattcacccccatacccgccccaatacccgtttaaattaaagcgggggcggagtgggtattacccgacaggggaaggattcccatcggnnnnncattacatatatatttttgaagaaaaaaaatgatgtcttaaagagaattaaaaaataataattataaaaactttgtaaaacaataaacttaagtagaatattttgtatagtaaaaaaaaaatataattaagttattttaattgtagtagttataattttaaaatttaaatatatacatatatcatatcggggcgggttcgaggcgggtatctattc

SEQ ID NO: 128399 - DNA, 691 bp, Cannabis sativa
tagaatttatacattaaaaataatttctaatggattttttgggggcgtgtgaagctctctgtttcctctcatggcgaagaagaaacgggcggtttcgaagcctgcttaaatcacagccgtagtcgagaatgaagaaactcacctcccttcaatccaaactgaagatgaagaacaaccagcttctcagattttcttagatacttgtgaaaacttggaaggagatccaatagatgaagttcctagtgagatgattgctactcccaaatccatgagctgggctaaggaagtagagaaagttgattaccatgccaaagcgaaggatgtctggagcaaatttaaatacaatcaggtttgtactccttctacacgtcttgaatttactgaacctatgaaaatagggaatcaaaaagtagttgaattggatctagatgaggttgaaagcgaggcttatttttggaaaaaactcgatcgtgtgcattgttctaggagctaaccctccgttcagggtttttgaagggtttatccaaagagtttggggtaatttgggtatttaactgtattgcacatgttctttgacttgttcgttacagcttacccgtagacataatacttacatcttgggaacacggtagtgcaatagagtgagagcgttaatcatataaatggaatctatagcttttataactattta

SEQ ID NO: 128400 - DNA, 635 bp, Cannabis sativa
gtaaacacctatttgcaccctatggcctgttttcctgaaggtaaattaaccaagacctaagtaccatttgcaactaaagcattcatctattctatcattgcatcaagccgaccaggatgagacattgcttcacgaacaattttaggaataggcatgagcgtcaggacatttcaaaatggttgtatgtaaagaaatgacttggccaaagcttatcgttcccacagacaatgccaaactgttaacggtgagaactcatctactaatctagtggccaaaaaatataaaagtaacccagaaataagatgatgattaaggtgaagatgaagatgaaaagatatctgaaaatgttctctctattgcattcaagatctaagttacaaaaaataattttccaactcctactcacatcttagaaaggggtatttataggctcttatgtcttatagcctgagatacatggtggtcccaaggggacaaagtgtcactttcatgctacacgtcgctggtgcaggaggtggttttgcacctcgtaccttgtttggtgttaggtgtgttgggttttgtgccctaaataaaatccattacaatctggttagttatcaatttagaattttgaagtgatttatatttacatg

SEQ ID NO: 128401 - DNA, 741 bp, Cannabis sativa
actctgcaattcagagttcacgcaagtttataatatatatttatagatatgtgtttgcgtgaagcttttatatatattggttgttcatagaaatggaaaaatggaatggtggaggtcatgagtgtacaactgcttcaaactccattcaagttttttttttaaagaagaagagtcgaagaacattaattagctcatttgaggtttgggctgatcatattaattcgctcttttttcaaaaaaaaaaaaaaaaaaaagctgaaatcttatgtttgttattattctttttgtttcatttgagcaacaacacaataaaataatatatatatatatataaatataattatatttttgctttgaaatgcaaatctatatgtatatctgtatataaaaaatttagtaactttatgttacaattaaaacttgtctgtactagggctcctgaaaccattgagcactctctcttatcttgtccagttacagtaacagtatgggatcgggtaggtattggtacggtaatgcagcaggacgtctcgtttatggactggtgtatgcaccaatttattttgcttgattcggataactcaagcttgttggtggccttgtgttgggcaatttgaaatactagaaatgataaagtttagcaaaataaagtcatgggagtcgaaagcattgtggcgtctgcaacaaactaccttaatcaatggcatgttgctcaaaattcgaacaatgagctactattca

SEQ ID NO: 128402 - DNA, 1243 bp, Cannabis sativa
gtatatatatgggaatctatatcagctacagatatatatattttagtattggttatcaaaatgtgtcataattaactaaacaaaactctaatgagaaagatagaaatcgcactaaaagtttaaatcctttaacaaaaaagaaattatatgtgaaatgctaatatgccttttgtcagaatgttttaacaagaaatgagagtcagaatatctatctatttatataatatctcatttcttaaattatgatttgatgatcgattacttcagatgtggtcagaatacatatatatttatatatgtgtagttggatattttgatccatatagtgtagcctctgatttttatagatatatttctatttttatatttgtctaacacaactgacacagggcacaatacaagcttctattgtataggaggacatgaatattacaacattttttgttattatttaattgcttgaatataaatattagtgatttctacccttttgacgggtgcggaaaccaattaggtggtcaacagatttctacttgggaaaccaaactaaatctctcttagtatatgtttataaatatataaatatatatataaatatgatttcttttgagatccatctttttcaattattttttaaattttattacagtactatatattaattatttcttgagtgaaaaagatattatagataggttaggattttaattagtaataaaaagagtaaaactcactctttgtaattgttgggtaaagtaagtactgtgttgtatatactttaaatatttaataggtcggatttttatagattagaataatgcatgtccgtacacaaacttctttaacacatgcaggggctcactcggggatccacaattggggttctctctacatggatgagagagagacaaagatgatgatctagagagttattagccgttttgggagagatcttctctgatttgtgggttattattttgatctatcgtcgtagtgtactcttcatgtaaatatctctatttctctctctgtagaggagatagcagagagagagagatagagagaggtagcttaactttacgtagagtgtcgatatattttatgagtgagagattatttgcagagtgtgggaatgctgggctttggggagtcatttattgcaaagaacgagaacgtgagttccaacaaattttacacccaagtggggtaagtgagaaacttatgtgtgtgtgtgtgtgtgaga

SEQ ID NO: 128403 - DNA, 557 bp, Cannabis sativa
gaatggaatagttaattataatagtagcattatcacaataaagatgtactggcaccacggtcttttttagtttttctctatttattatctgtaacgattttaaaattagaaatgaagtgtagtgtagtcaatcaaatactatctagagcaggttttgttataaatttcagttgaaaattgcgatggcatgttgggatgggaaggccaaacacaattatttatgaccaggaaatatctaacatatgtataataaaataaatacacataaatttatataaatatatatttttgtggaaaatatatatgtaatggttgaatattataatacaaaattacatcagcccaactggcagcgcatatggcatttaatgaaaatggtgtgacattccttttattttcagactttccgtttcaagaaagtgcttttttttaatagaggccgcctaacctaacatttataccaattctttaataaaagaaaattgtaagaaacaataatattttgtaaaaaataatctttatttaaattttttattagtaaaataattttgtatgat

SEQ ID NO: 128404 - DNA, 834 bp, Cannabis sativa
tatctactaaatatctaattcttttacagctaatatataactaatatctaacaatacccattaatcaaaaatattttcatattatatttcattaaaatgtaccactttgtgggttgctcaatatactcttacccttcacttaagtttagcacataatttttttaactaaggggtataatgggaacattatttataaaagtggttatatctcaaaaaatatgaaaaataaagataaaaattaaaataaagtgggtatacaatgtaatttcttctttattacactttacttctttatttttttccagtagtaaaatttctttatgtttacttttcttaccattaaataccaactagattattaatgtattagttttgaagttttatttttacatatacacaggtacacacggtgattatctagttgatatttaacgatatatttaattaacgcctcaaatttgtaaagaaaaataaatttgagttttgctacaaataaaaataagggattaagtataaaaattaaaatataaagaaaatttaatgccaatttcacttattatggatgacaagtttggtgatgtttgatttatttttaggtgaattgtcaaaaatatattttaattttttttattaaaatatctaaatatatttttagaaaatgatagaaatttgaccttctatatttaaaatggtaagataattaataaaaataagattaataccatatctttatgttttgcaaaaattatttattagattctctattttgttaaatgatagaatgattaatttcacaaatgcacaaaaacaacaaaaatacagtttcgcggaatt

SEQ ID NO: 128405 - DNA, 1266 bp, Cannabis sativa
aaatagagtaaacaagaagaaaagaaaaaaagagagcaaaagttaactgttctgttaggatctatatttatatacataaattatataaggattaagcaaaagactgctacaacaatctaacagtaattacttaactaatatctgacaaaaccgatagctaacatcaaatcctattgaactatactaacatctccctcaaacgaaaatatgtagcagccatttgaagtttagactttaggaacttgaatcgattagttgagagggacttgatgagaatgccagctgtttgattcggagaaggaacatactgaacagatagttgttttgcaatgatttgatctctcacaaaatgcagatcaatcctatatgtttggacttggcatgaaagactggatttgctgcaaaagttatagcactgtggttaccaacccagttaacagggaagtaggcaagtggagcttgtaattcagtaagcagagatgtaatccatcttagttcagctgcagcattggctaatgccctgaattcacttttagtgctggattgagccactgcactttgctttttagtagaccaagatatgatatttcccaaaaaaaaagacaatatagctactagagcgtctgtcatctacacaacttgcccagtcagcatcagagtagcattcaatggtcattgcagcagcatgtcttaatagtatgccatctacataactcaaggggaaattgtgctttttcatgatttgttttgaaagacaatgcatgttatttgccatattgacatgcctcacaaaaatgaaactcaatgtttttaaaatttctaatattcatttgattcaaaacaagacttaaaacatgattggatgggtggccaagtttcctatgtcacttatctttgattgaactaacaccagacacactctcagtcacaagctaagttacattttgatttaacacagaagacaaagcagaaaaataggttgctttagactttagagcagggtaggctaaggaattctttttgtgagatggcttgacccaggtggagcttcccttgaagcactttcttctttgtttgattgtccttcacacaacaattatcagatgagaattcaacattaacatcattatcaacaattaattttgaaatgctaaccagattcttagttatgttgggaacatgtagcatttctttgaaaataagtgttggaattttatgtcctaaataaaactcatttcaatttaatctgatttgttatcaatagaa

SEQ ID NO: 128406 - DNA, 1041 bp, Cannabis sativa
  modified_base (989)..(994): a, c, t, g, unknown or other
gtaaaataatttccaacagacacgccatttcccgtttggtttaggcaccaatacttgattggctagccattctgtgtaatacacatcccggattaggccattggttagcaacttatccacctctttctctaaggcatcgacctttactatgttaagaggacgtcttttctgttgcagcagaggcatgtctgggttgacgttcaggacatgggtgatcacgtggggccttattccagttatatgcccttggcactacgcaaagacatccttggctgcccttaatatctatatggtctttcttctttcttccggctctaggttttttcctaggaggataattttagtggagtcgaggtcgcacgtacttacttcgtcgatgtcctccataggttctatagttgttttggatcccacacggggatccaactcatcttgttctatcacaatgggctcttcgtccctttgtaccaccaagactgacagatgtactgcaacattataatattttctcgcctctccttggttccccctcatcgttcccactccggtttctcgggtagggaacttaaggcataagtgtcgaatggaggtgatcgctccgaaattgagcaaggtcgatcggctaaggatggcattgtaggcgatgggacagtctactacagcaaaggtgcagtacttgaaagtgctctgcagggtgtcaggacacagggtgacagcaagccttacttttcccgttgggatgagtgtcatcccattgaatcccgtgagctgggaaccactaggtgacaagtccctgtttatgagccctatgggcatgaagtcttctatgaacaatagatttacggagctcctattatctaccaatactctagccacaaccttattggtaatgggagtttctataactagagggtcatggtgggggaaacccactagttttgtgtcttcttccgtgaaagtgataggtgttggaaatattttaccaagannnnnntttactaccatgtatgtttcattagcatcctaatatgaattctaaaa

SEQ ID NO: 128407 - DNA, 1464 bp, Cannabis sativa
agtttagccgccaaaaattcagtttttgtggttaagtgttacaaaccgtaaagttcaggtagtttagccgctgatatccaaaaaaaaaaaatagagaataccattggagatactctaacaaattatgacataaaattggtaaaaaataatgcgttgatctttttctttttcttcaaaatgtgtttcgtctctggttgatgatgaagtctatatagttaggtgttaatgcaattttcgtcaactaatctaaaaaaatcgtaaaaaatgaaaggactatgctgaatcaatttggctagataaaatcgcaaaaataaaaagggacactaagatttatagtagttcacccccagagttatgaggctacgtctgtttgtctcgatggtaatgaggctacgtctattttatcttttattaatcaattctaacacaccagagttatgttctcaagagtgtgtagacaacactacaaatggagattctaggtaaaactatatcaaagcttgtgaataaaaggctcatgagagacccaatacccataaacttgataagaatggtggttgtaatgttcttgggaataataaactaatggagacaagaatagagaatggtcttttcttcttggtaatgtgtatgtcaaggatgatggaataatggaggcttggtgtcatcaaagtttgaagaacaccaagaaaaaaatagagagagaaaaatgtctcaagggatgaagtgataatgcattcaagtaagtcagaaatttaggaagcagcccataaaggaaagtattaggtgagttggcatcttataatttttttcacctattgtatctattttattagaattagtgaatttagtataattttgtgatttcttttttctttttagcaaaagtcccacatggtttgcagatgatgtgtgtgttgtatttctaagctataaataaaatagtcttacattcactttattttgtcaggtgattgaaattgaatatctcaatcttgcctaattaattataattattttttgaattaattagtgtgtgcatattgaaattaatatttaatataaatagtaattataaattttgtaaattctaaaatatgtattgtagtataccatttaaatctataaatttcatatttatagttagaaaaataatacaatatatagtgtaacaacaatatatatttttctaaaacaatatatatatatacttatcacttttattatattattaaaaatatttttagagatgcatataaaaaggtttatagtacaattaagttcgttagaaaaaatatgtgtaagttctactttgttaataagttcaagttactgaagaaaatcaaaatcatttacataatattatttgttataattgcatcatgtgcttatcatataagataaaagttagaaaaaaataaattagattgtgatattctcatatttttaatacattaataagaa

SEQ ID NO: 128408 - DNA, 1126 bp, Cannabis sativa
  modified_base (261)..(290): a, c, t, g, unknown or other
caataaaaatgtaaccattaaatagtcacccatataaaaaaaaaatatatatatatttatataagaaaatcattacaaaaattaaaaaggcagctgctccaaggaaaggaccttatttgaggtcggagctggtgacaggatattaggataatgtatgttttaaagataattgatttaataatataacatttaattattatgcagagctttattaaaaaaaatatattatgtatagctatataattttttttattatttttnnnnnnnnnnnnnnnnnnnnnnnnnnnnnnttattattattattattataatgtataactatgtttttttttttagaattgatgtataactatgttttaatttcataatagagttgttagcggttaaaccctctcaattatagttttacttacacttaattctctaagttgaaattttaacggtaaaacctttcaaactactacacttatagcaaatttaaagtgtcatctaattaactatcactatagactatttatgtgtacactcttatatacgtggcacatttatattagtacatttaatattattattttaacattaaataaaattataaaaataaaaaatagaatattaaaaaaaataaaaagtattataaattttgaaatattcttttataattttttaataataatattatgtgtaccaatatacacgtgttaggtgtacaaaaatgtacatataagcagtctatgttagtagttaactgtaaaaaataaatgtcaccttaaatttgttaataattaagcaatttagaggattttaccaccaaaatttaaacttaaaaagttaatacttgagagggtttaactacaaaaaactcttaataatataacatcctcatctcctaaaaacacgtccttttctttttcacctaacgtattttccttaatttactattatcttgcacaaaaaaaaaaaaaacattctattaattaattaaaccaaattaaatcaaataatctctgctttttataattttaagaaaattttattagaataaataagattgggtgattctacaatgcacccccttaaaagggatgtactgatacacacttgacttgtttcggcatccagaagaatt

SEQ ID NO: 128409 - DNA, 2711 bp, Cannabis sativa
  modified_base (69)..(71): a, c, t, g, unknown or other
tttatttacattgttttaaagattcacatttaggatgttaaataacatacatgatagtaaatctagatnnnggtaaaacatattccaacaaaaccctaaaccctaaacactaaaaattaaacccctaaaccctatatgatatattgtaaacaataaaccactaaaccctaaaccctaaacacgaaaccgctaaaccctatacactaaacccaaaaaagcttgaagcctaaacccaaaaccctaaactctaaaccctttaccgtaaatcgtaaatctaaaccactaaacccttaaccctaaaaaatcataaaccgtaaaccttaaaccctaaactctaaacccataaccctaaacccccaaaccctatatgctaaatcctaaaccctaaaccctaaatcctaaacccctgaaccctaaacactaaacccctaaaccctataccctaaactgtaaacccctaatccgtaaagcgctaaaccctaaaccccctaaaccctaaaccctaaacactaagctctaacccctaaaccctaaacttgaaactgtaaaccctaaaacctaatccccaatgccaaaacctataccctaacactaaaccctaaacaataaacactaaaccctagaccctaagacctaaacccaaaaccctaaagcttaaacccgaaaccctaaaccctgaacactaaacccttaatcccaaaaccctaaaagttaaaccacaaaccctatatcctaatccctaaaccctaaaggctaaacccctaaactctaaaccctaaaccttaagccctaaatcctaaaccctaaaaccttaaaccccctcaacccttaacccaaagccctaaaccctaaaccctaaaccataaactcgataccctagacccaacccctaaaccctaaatcataaaccttaaactgtaaaccctcaacccaaaaccctaaagcctaaagcctaaaccctaacccctaaacactaactaaaaatgcaaaacccgaaaccttaaaagctaaaccataaaccctaaaccctatgccataattcctatatccataaccgtaaaccctaaaccctaaaccgtaaaggctaagcccataaactcaaaaccttagacctcaagccttaaatcctaaaccctaaaaccctaaaccccaaaccctaacccctaaaccctaagccctaaaccctaaaccctaaactcaataccctaaaccataaatcctaaatctaaatcttaaaacccgtaatcctaaacacaaaaccataaaccctacaccctaaaaactaaacacctaaagcctacacccaaaaaagcctgaaaccctaaacttgaaaccctataccctaaatcgtaaatcctataccactaaacccttaaccctaaaaaaattctaaaccataaaccgtaaaccaaaaaccctaaaccctaaaccctaaactctaaacccataacccaaaaccctaaaccccaaaccctatatgcgtaatcctaaaccctaaaacctaaaccgctaaacccttaaccctaaaccctaaaccctataccgtaaacagtaaacccctaatccataaaaccctaaacccccgaaacctcaaaccctaaacactaaacccttaaaaccctaagcactaaacacaaaaccttaaaccctagaccttattccctaaactctaaccctaaaccctaaagcctaaatcctaaactttaaaccctaaacctttaaccaaaaacctaaacactaaaccttaaaccctaaaccctaaaccctaaaatctgaactctaaaccctaaaccatacacactgaaccctaaaccctaaaccctttaccgaaaaccctaaactcaaaatgcaaaaccctaaatcctaaacgctaaaccagaaaccctgagccctaaaccctaaccccgaaaccccaaccctaaattcaaaacccaaaaccctacgtgctaaaccataaaccctaaaccttataccccaaaccttaaatccaaaaccctaaacccaaaacaaaaaactctaaaccgtaaatgcaaaaccttaaaccccaagccccagacctgaaaccttaaaccctaaatcctaattcttatacgctaaacataaataaaaaatcccagaccctaaacagtaaaaccctaaaccctatcccaaaaacccaaaacctgaaaccctaaaccctatatgctaaaccctatacccgaaaccctacactctaaactgtaaactctaaaccctatacccttaaccctaaaaaaactataaagcctaaaccctaaaccctaaactgtagaccctaaaaccgtaaccttaaaccctaaacccaaaaccctaaaccctaaaccttaaacgcttaatcctaaacgctaaacgctaaactataaaccttaaacctcatacccctacaccctaaaacctaaacacaaaacccctaaaccctatatcctaaactattaacacctaaaccctgaaccctataccttccttaagtcgtaaatcctaaacccaaaaccccttaaaccttaaaccctaaaagctaaacccctaaaccctaaactcaaaatcctaaaccctaaaccttttaccctaaaccgtaaacccaaaatcctaaactgtaaaacgtaaacgcacaacctaaacctcaaaaccctaaaccctaatgtaaagaccgcttagtttaaatttggaaattagcatataattagggtttaatt

SEQ ID NO: 128410 - DNA, 1809 bp, Cannabis sativa
aagaggatctccctgacgaatacctctagtagggacaatcggccccatttcccgtcctccatgaaccactgtatactttgccgagaccacacattgtaaaagcagtcgcacccagtgagcttcaaaacccaatttcaaaagcatagcctccaaaaacttccattcgatgcgatcatatgctttactcatatcgagctttagtgccatgtatcctagtttttcttgtctctttctttttaggtagtggagaatttcaaaggagaccataacattatcatgaatcaaacgtcctggaataaatgcactttgatatcccgagacaattgaatccatatatctcttcattctgttggccataacctttgtaatgatcttataaatgacattgcaaagggcaatgggatggaagtccgtcatcttatctgggcatttcttcttaggaattaagaccacattagcatctccatatccatcttcaaaaataccagagtcaaaaaacctttgcaccacctcaaccacatcttgagaaactatcgaccaacctttttggtagaacgccggtgtcatcccatcaggacctgggcttttatccgggtgcatctgaaaaacagtagcttttacttcttcagccgtaacactttgtcttagttcttcatttatctgcatagtgaccgtgccttttacacactaaacaacctcatcacaatgacctccagacttagtgaaaagtttcgaaaaataatccaccactacttctccaagaccggtgtcccaatcaacccaattaccatgattatctttgagtttggtaatttgattgttacgttttcttgaactagcagacacatgaaaaaaacgactgttctgatctccatcctttaaccaaaactgcttcgcatgctgcttccaaaagctttcccgttggtcaagaacagcaaacagagatttttttacttcatcatatcgtttcacagaatattcatccctttttccttgtaacactttaagctcaactttacaagctttgattctttgtttaaagttccttgtaatgctctttccccattcccgaagcttctctgcacaaccttccaacttttggtgaaaattaagactcgccccattctcccaacaatcactaattatttgtcaacacaaaggttctttaagccaggcgttctcaaatttaaatcgatgagaaggagtgaaagaatcttttataatcggttcaagaaacaaagggttgtggtctgatgaagtactttcaaggttgaagagtttagcataaggaaatacctgggtccaagctggattcaccaaagctctatctaaacgagcttcaatccatctttgagtgccacgccccttttcccaagtataacaatgacccaccagatcaatatccattaaagaacaatcggacagggcttgctgaaattcctcaattagccatcggaggtacgaatttcctcctttcttctcttcattgctaacaatattattcatatcccctatcacacaccatgggagggtgtaatcatcggccagagaacggagcaaagtccaagtgtcccgtcggtgtgctctgtttggttcgtcgtatacccctgtgagcctccagcttgtattatctcccatatacacttcaaagtctatgtgatgttgagaatagcccaatacacggcccatatcaccttctttccacattaaagctaacccccctccttgactatgggcctccactatgaaatttccttcaaagcccaaatgttgacccacccatgtcattcttttttttatcacattttg

SEQ ID NO: 128411 - DNA, 2821 bp, Cannabis sativa
  modified_base (26)..(56): a, c, t, g, unknown or other
  modified_base (2779)..(2780): a, c, t, g, unknown or other
aagttcttatttaggatgttaataannnnnnnnnnnnnnnnnnnnnnnnnnnnnnnaaaataatttccaacagtatcatgttgttatggaaggatcatgtggatgtaactctactttcaatgaatgttaattactttgattgttacttggtgtgtgataatggtcctcgttggcatctatctgctgtgtatggttttcctgaaatagaaaataaaaaacacacatggactctaattagaatacttcgtgatgtttctcctcttgacccttggatgttgttgggagatcttaatgaaattttttcacatacacacaaaaatagtggacctttaagacaagataatcatatggtggcttttcgatctactttagaccaatgctgttttaatgagttgccctttaatggagatgattttacttggtcaagaagtaggaaaaatcctgctgcctttaaagaacgaattgactgatgtttgtcaattatgtgtggttggacaatttaactccacctactgtctcacatgaagattgttatggttcggatcataaagcgctttctgtggtgcttaatttctctaatcagcacactgttgaaaggagaaaatcaagatttcgatttgagcggatgtggttaaattctcctgaatgttcaaaattaatagctgattcatggattggaaacgaaactgctggtgttgattgtgtttctcaattgatagcaagtttagctgattgtgcaaagaatttgcagcaatggcataactccacattcggacatatgaagaataatattaaagaggctcaatcacgagtgcaacagttacataacaacccgaatccaggcagtgatttttcaaaaaacataaactcgactgaagctattttagatgagcttttggctaatgaggaacaatattggcagcaacgttctagagtggaatggctcacttcaggagatcgaaacacaaatttttttcaagctaaggcatcttcaagaaaagaaaataatcatatcagaagattgcaggatgctactggtcaaattttgcattcaaaagatgatattgcttcaatcataacgaaatattttgaggctctcttcaaggcttctgatgaagatcattgggctctaaatcatgttctgtctacaattccaaccactattacagatgctcataatgattttcttctgcaagagttctcaaaggatgatgtttttttagctttacaaactatgggagcagataaaagtccaggtatcgatggtatgtctgctatgttttatcaacacaattgggacgtggttggctcgttggttacacaagtggttctgaatgtcttaaatcatggaggcaacccagcagcaatcaataagactcttattactctcattcctaaactgaagaaaccgaagataatgaaggattataggccaattagtctttgtaatgtcatttacaaattgatttccaagatgattgctcttcgattaaagcatgcatgttctaccgaatgttctttcagagaaacaaagtgctttcctacccaacaggcaaatcacagataatgttttagtggcgttcgaaatggtgcataatctaaagcatagaacaagagggaataaaggttatgctgctttaaaactagatatgagtaaagctttcgatcgagttgaatggtcttacatagctgctgtgatgggtaaaatgatcgctggatttctcttattatgacttgcctacacacaacttccttttctttcctcatcaatggtgaagttaaaggcacggttgttccagaacgtggactacgtcaaggtgatccattatcgccttatttattttggatatgtttggaaggtctctctcgattgttgcaatatgaggaagccattggacgtttacaagggctaactatttctcgaagagctcctcctattatgcatctgttattcgctaatgacagcctgctcttttgtcaagccaatgaccgttcttctggtgctattaaacgagctttagatgtttatcatcgagcctctagacagcttctcaatgaggacaagtcttttttgtctttttcaccaaataccccagaatcaattagaaattctttcagacaaattttggggatgccagttagtgaatgtcatgaaaagtacttaggcctcccagcttattctgagcaagataagaagcttttgtttgcagatattaaagaatgaatttggaaattattacttgcttggaatgacaaactcttctccattagggggaaggaaattctcttaaaagttgtggtccaatctattcctacatatgctatgagttgcttcaaactttctaagagtttttgcaatcaattggacacaatgatggcacaattttggtggggttcaacagatgacaaaaaaaagacacattggaggaaatggaagtttctttgcaaaataaagatggaggtgggtatgggatttcgttcttatgttcagtttaatcaagcttttttagctaagcaagcatggcgtatcttccaaaatcccgatactttgttatcctgaattctgaaggccagatattatccgaatggtgatttcgtgacagctgttaaaggtagctattcttcaatgacttggcaaggtaaatgttggggtagtgacttgttaattcaacgtgtgcgacttaaggttgggaatgggcatcaaattaagtgtaactcggatccttggattccaggaaacacaagtttcacaccagcatgttgttgggttttatgcccnnaataaaactcatttcaatatactcagatttacttattaata

SEQ ID NO: 128412 - DNA, 1076 bp, Cannabis sativa
gttcttttaaggactgaatgggcaccaagttggccttagctatcaagatgctactgcctagtcgagcaatgcattggctattgcatctttcttcgaaacttgccttatagtatagcctttcagctgacttaataagtcttgaatcttactcaaattaaccatcatttttctgccttgagctgtatattcacctaagatatgattaacgaccaacagaaagtcactgtatatgtcaagataatcttcctacactttgtgtgctaacttgagtccatcaattagagctttatatttatcctcattattataggctttgaaactgaagtttattgcctcgtgcagttgttgccctaagtgtaatgaggggaatgtctgctccggacagatggtcagtacagcttccttgaacatgcaacttacatgctaaaatttcttactcttgcttcttctctggctcttaattttctcttgaatcttgaaaaatttaggagatatgcctatgcattcagccacaaagtcagcaagagcttggaactttatagtcactcttggctggtaagtgatctcatactagccaagttcaatggcctacctaaatagttggcaagatgctttgggattctgttaggagagtgaagtatgtgtacctctattccttctggttttgtggagtaggggaattgttgaatttccattttttccattatttcatcatgagccattgttgtttcatttgcctccattattcttattattggagggctagctagtattgcctataatggccggtaggttggacagaacatggggctgtatgacaccctgagcttggcggatagctttttctaactttatgaagccatcaacttgctcaaggaactctttcatgttgtttgttgagatccttctaatatctctctagaattcactcaacgacaatatgcctctaagtaaagatgtatgacaacctttttcaaataggcctttgacctcagtggcctcagccatgaacctttgaatgtagtctttcaagggttcaccttgtcttattttatattttgacaagatcctccagt

SEQ ID NO: 128413 - DNA, 2660 bp, Cannabis sativa
tattcttctttcaataataccatattatccaatgcaatcatataaatgccaaaactatttattcaatgcgtgcgaaggtctgctcgaatccaaagaaccgaatagacaaaaaccatacttgggaaatacaagtgaccaagcgtcaaaaaattgctcagtcacttggggggcaactatacccgtacaaaatgttggtaaaagtaaataacaagctcaaaaaaaaaaaatcaaaacaacatagttgcataaacaattatcaaaacaaggagcggtattcattgaaaaagataacaaagcatggtaaatttgggattaaaagctgcccggtcagccagttgtcttaaaaataaaaaaatataatcaaagtttaaaaacttcctagccggtcattttgtctcaaaaaaggcctattggtcgaacagacatatataaaaaagataaaaatattcagacagtaggagtcccaggctcttggtacgaatcgttttggtctgagggggccggaggttcaacactctgagcagtagggatttcattgctctggtcggctggagctgtggaggtagttgccttggggttttctttggctgtctgagccgtgcaaaagtcaagatacattctcttggattcaccaaggtaatcaaagcttccttcagggttggccttccagaatttgtagaaaacctcaagagcagctatctctagggtctccacctccttctagagctcctcctctcgagcctgcttattcttgacatcctccctagtttggaaagaagagtccagacactctccctctcatctttaagataattgacctccttggacaaaaggacactatcggcctccaacttcttggtcgaaggcatctcttgcagttctttgttcagctcctcaatcttggtgttagtagtgagaagcttcttgttcacctccccaagctcattcctcacttccccaagctggctcctcacgtcctgagtttcctttctagccacatccacctccctctacagtgtgttggtggtgtcaaggttcttggcagtagctgatttagctcaggaataagcataagccatcttcacattgacctgtacggaaaaatgttagagtctgagctacataaaagggaatgagataaaaaaggagatatttactcgagtagcttccttcaagactcctcccaagacaagctccaaagatagctcattgtcctccctagacagttgatcactcacctcaggaagtgatcggttcaagtaatactggagcatatctttacccctcttggcctacgtactcagtgccacggccgtcaaaggggtcgtagcctgatcagacccgtcctagcttccccctctataactctttaatttcgagaccttctgaactggaaggtccacaataggtcactcctcagaaaggtcaatgacctcatcaactagcgccttctccttggacggagtctcatcgcctttagacttcttggctggaggagacaggcccaacctatcacctactctcttatttaaggcttggagtatcttctgagacatttctgcacggataaaacaatgttgttagaagcagatataatatatgtgaaagcataatataatagaagtaagtgcaagttaaaatagtctacacgcgggtagggtcattttcccaaacaagtacagatgggacatcatcgtctgaagactcttcctactccaacaagacggcttttccttttccctttataggggtagatggccgagcaggcatatcaggtttcctaatcgtgatagcatattcaactggtgcttggtaggtcgggggagctgtcttcttcttcttgcttggcttttcctgctttgaatattcttgagcatactgctcctgctctgaatattcttgagcatattgcttggcccagtcgtctcccttcaacttagccccacgcttgagttgaataagctctttctcctgctccgttcggcttggccttcttattcttcttttccttcaagggctttggcacaaaatcttcagggaagagcttgtacttgacatagttagcctcagttgtcaacaaaatgatatttcgagcaacttctagcagttgaagaattttttgtgccctctccctgagtcccaatgtgaaaggaggacggcagtacggggaatctgttggaaccgagtgtggacggtatccatgccctgaagaagtagtactcgtccacaaaatgccctattttgctgacatcagagtccatagtaccgttcaactatttctcgttcaattgggagaagtagaaataccctgacctgctctatttaggagttgacttcacgtcgaagagccaattggtgtcgtacggagatggctcaccccatccttgtgaagcatagaggatgaacagggcggataagtatttgatgccttttggtgtgaactgggttgggcagagatgatagtaatccgcaatcctcttgaagtacggaagcaaaggcagtatttcaccctgcttagtatgggcacccaaccaggcacaatatccctttcttgggctagttgaccggtgatttggagaagggaaaaagcattgacacctcccaggtatccgtccttctccaaactcctcatcttagcttgggttactatagatggagga

SEQ ID NO: 128414 - DNA, 1290 bp, Cannabis sativa
ccaaaatccctagccaaaaaaaaaaaaaaagaggaaaaccaaagacgaaacgaagaagaaaagaggagagagggaaatgaaaaatgagagggagatagataatgaaataggcggtttagagtttataggcatgaattgaaaactgaaaaagtaagttaaaatgggaaagcaaccatcaaatcatgatgattacatgcaaacccctctacaataaacaattatgttaaaaaaaaactgaaccaaaaaatttaaacacctaaaattactaaaataacctaaagaaactacaatacacacaatatgggttttgacaaatatattccagccgtatgggctttaaaattccataaactatgcccaaactttaaaaaagccatataaagtgtccatagtcaattatgccatatttattataaaaggtttaaaaaacccatattccacgtaaattctactatagtaaatgggcaagaaatgtaacccattttgtgctcatggcttctacttcaatgacttttaaatattaacagataagtatttcatgtctttttatgtctttatatttaccatcattttttcattatattgtgtggtaatatagttttatttattgttattttgtaggttgattttgtggagggcttacaattacaaagaatttgccgataaatttaattttttaaacatattatgttggatattaattttcagtaattttaaattagtagggtgctagtaagttgttacgagcaaaatgacattatctttggctagttatacttagaatttttttggtttctactttttcagtaatgttgagctagtgaaataatttttgtgttaaattataagattgtataataatttttatgttgaagattgtcattctaatataactttgttattggtttggtgttgcgatatttttattttcaattttgctagcactgtcaacaactattaataatggaagtttattttttaatatgctggggggctacttgaagatgtaatagcttattgtctaaatttttggagcagtattgtctcatgtggttcgcgttaagaatttagtagcctatggtttggcaaaacatgcttttcaattagacgatgagctatcctagtttgagaagggtcctgcgctgatagcagattttagcatcgtaatttcatgagtgattctaatgactatgtcaaaatatatatatagggatattggcggctaaacttcctgaactttatattttgtaacacttaaccacaaaaaccgaatttttggcggctaaacta

SEQ ID NO: 128415 - DNA, 829 bp, Cannabis sativa
tttatagtacaattttacattacaccatacataagcttttctaaaaatacatcaccaaaattctatttttttaaaaaatttattatactttattcatttcaaatatacaatattaatatatatgtatatcctcatacaaaaataattattaaacccaaaaactaattaataaaatatgttagaacaatgaatagtattatataaattactataatgcaaattttttgcctaaaaactagagattagtctcctataaaattaacacgtggatccgattttcaaaggatggatgagctgttaattaaggactcttcgagaattgaccttgcttaaaccaaactcgcgagatgatgaggccttcatagagtttagtcgcatactacgccttgcgtaatgtaagataagcaagactgagagggatttatataagtcgcacatatgtcgaaacgtatgcaatgactaagtagccttctcctgggactaggtaaagatcacttctttacataacaattggtatgaatgatgaaacgtactcgatgacccaatagggactctcgtgtccagtgtatcgatacataagatgtcaatcaatgcgactcaaatagaacgcaaatatcctagctagtgataggctcatcagccctttttatgaatatagaacgcatctaaagcctgcgagcttgtgcaggaacatgaatagacaaatcgcaccctataagtcgcatgcgttgctgcacttattagaacagattaaactgttcttcatttattcttttacgtttattctaatttaatattgttatttattataaaatggttctataaccga

SEQ ID NO: 128416 - DNA, 691 bp, Cannabis sativa
attggtgattaacccattcactcaccaataaaaggatcaagagggtgttgatagacaacaggagctcagtaaatattctttataaggaaacactgaggaataggggtgagcatttagcccaatgggccgaccaaaccggccaacccaatctgaaaatgggtcgagcatgctctcttttagtgggccgaaattctgttgggttgaaaaacttacaacccgttattattgggttgatcacgggttggaagttttctaacccattcaacccaacccaggccggcccaataagatatattaaaaaaaaattaatatacattatttttaagttttaacaaccatacccattagtatttagtccctcattttctccttagtccaaaccctagaagtgcagccacacactatttttgaaattgaaaaaccctaaaagaagcaaatagcccactcccaggtctcccagctgcgccgccccgtgttcttccctctatctctgattactctgtttattaggctgtagcagaggtcgtcggtgcctattcttataaagttctccatttttttttctttttcctttgatagaagtaaaaacttggaggaaagaatatcaatatctgaatttcattttggttttcctctttttcttttggctcggtggaaaaaaactcagttcgtcgtcagatttctttgctca

SEQ ID NO: 128417 - DNA, 735 bp, Cannabis sativa
tgagtgaccttctatgggccctctacctctagtggagcaagccaatcaggaccctactaggagtaatctgaaccgtagggaaactatatcaccatatagagctatctctcactggtcttcttattccaggccacccgatgaccttactaagggagagggacctacaatagaaccggtaaggtccatttagaggttgagcaatgataatggttggttcaaagcctagaggttaaggaccaatgaaccatttcacacccaaaagtatttttgggttgatcgaggtgctttacgtcggtacttttcccgagtgcccaacgagatgcaataggagtactttccacatgtgcatggggaagtggtgaacctgagtaatcagtttaactccgtccacacttacgaccctgaaaaagattgtttcaaaggaaatagtctctatagtataacgagtaacagcgctagacgtggtcactcgagagatgactctatcatcattcatgagaaatcccacaggcttccacctaggtcgcttgggcaagaaatggccaatagggccaatgtcttcaacttccttaagaaaaagaaggacttgaggaacgatctcaatcgaaagtggttggtggaagcgagagcttctagcaatgacactgttatacaggtagctaaagctccaactagtacacagaccaccaaacgaacataaatggtggagtattcatttcacataagctgaaatat

SEQ ID NO: 128418 - DNA, 632 bp, Cannabis sativa
  modified_base (594)..(596): a, c, t, g, unknown or other
tactccactcattgccaattggttttgagatggaacctcatgattctcaacatggtatcagagctatatccctagcgggcttataaaaagcgagcaaatggcatggcctgtgataatccactcattgtcaattggttttgagataaaaccccataattctcaatagagagcaggacatggaattgtaaaaagcgtaatgactattgctaaaaataatgtgtccaacacatattaatataacgtctcataattaattagcaaaaacttatattgttaatatataagataggataggattttgaaactttaaagtggctcttagtatttttcttatagaatttgtattaggaagaacagtggtcgtgtgaagagagagaaatagtacaatggaaggtaagaaacattcaactatatattgaaaattaatttgaagcagccatatttatatgttgtggttcttcaaattattaatattgtgaaattaaaagctagtatttagatggagtttttaccgacgtggaagcattttttctgcctttattaggtgtatgagtgtatcttgtgtattgtcatatatatatatatgggtatgcnnntaatgggtattacccatgtatgggtattttattctt

SEQ ID NO: 128419 - DNA, 595 bp, Cannabis sativa
  modified_base (222)..(232): a, c, t, g, unknown or other
cttcctcagagtcagatacgacacaatttttttttttctagaaatctttttggtgatcttcatcatctcctcaactttatgttctaggcattaagtcttatcacaaaaggattctcctccgcgaatgcaatcgttgatgacgtttctcaaatcatttttgggggtcttgcttttttagctttggcactttccttcttggcattcaattttctttggagatcnnnnnnnnnnnggctttttccactgtcatttgataacaaatgtacttcttaaacatcctcgtatgggatactagaatcactaagcggaggtgatttcctttgagactctagcttctatactctgacatctatcttgtgtttttgcgtgactctgcctagaattggtttggtcaccgtgccctaaggcatggttacctttcctcttctattgaggttggtcagtagctttagactttttaggctattttgtggaaggattgttcttttgttcttcaacaacgattcctttgtctttgtctttgcgaacgcttgaagttcatggtgttcggttttatgccctaaataaaactcttcacaatctgattagttatcaa

SEQ ID NO: 128420 - DNA, 1135 bp, Cannabis sativa
ttctctcgagctctctctcttgcagctcctctcgagctggtggtgtggcgaacacaagagctaaagttcaggggaagattcaagtgtctgcgaagaagaagaaaaaaggacctaactcaacagtcgatgctaagaaaactaagtctatgaaagaaatcctggggtagaaccaatggaattcactgatgaagaagatgatggagcaactgctcgtgatgcagcagagtttgatcctttgcgagacatcttgccagctcctatgtctccgaaatcatccctgaaattgattcttcaacaagatatttgatttgattttgctcatttcatggaggaaaataagaattgtaatgtctcaattgccagaggaaatacgatgacgcccccaattcttagatctggaaacgtggtgagaaacctagagactacttttgataagtctgagaaagagaaggcagtcaagattactatggaagacatagaagatgagatagcttactggaagtcatcaattgtttgctatgtgctaggagccaatcctccattatcagttttggatggttttgttagatgcatatggagtggaaagattgacaaggtcggacttctgtcatatggggtgttcttaatcagatttgatacaatggatcatcatgatgaagtgcttgatggtggatatatattcttcaataagaggcatgtcatcatgaaggggtgggatccaaataccaacttcaaaaaggaggatattcgtactattccaatctgggttcagcttacagatttggagttgaaatattaggggctaagagctttgtttaaaatcattggccaagtgggataacctattatggtggacgattctaccaaagagagagacaaacttagctacccaagagtccttatccaagtttccattcatcaagacttcccaggtactatctattttgaggatgagcctggtaataatacacctgttgaaattttttatgagtggaaacctataagttgtggaaattgtaaaggaatagggcatgccactactgattgccgtaaaaaacaaagtttgaaacaggaatggctagtcaagaatggtaaaaggaaagctgaagaaaaaccacaaccagcaccaggggag

SEQ ID NO: 128421 - DNA, 1131 bp, Cannabis sativa
actaatcagattgtaaagggttttatttaggtcacaaaatccaacagtgtacactttatagttcagtagaaagaacctaggttctattcaggcattagagaagtgttatatggtaaacacttatctgttttacattgtgacatagggcctactttcagcatgtgaatttctattcaggttgactgacacacttgaatcaagaaagaaggttagattagtatataatatgtatatgtatatgtgtatgtatgtaaattgcatgatgtgtatgtcactagtgtacattggtacagtataatgttatgaattgatatcacaacggtgcaaccatagtgttgggttagcagtacgggcatagtacttggtttggctgatatccaattccaaaaagtattaattgacgctatcatagcagtacaaacaaaattctgtgttggcagtacgagcatagtaatagttaagagtgatatcatggtcaattgtacttttgggtattattgatgctatcatagcaatacaaacatagtggcaggcccgcagtgtgatcatagcactggtagtggctaatatcatggtcaatagtaccatatgttaaaaatattcttaattatctattaagccttgtgaataggtgtatgggcgcctatatacaagttagtgatatattatatgctatatgattttcttactgagtatgtcgtctcacaatcattgcttgcatgtgtaggtaaaagaaagactaaggctgagcaacaatgagtctagaacttgaggatgattgtataggtccagacggtacgacctggagagttcggtctccggatgacttaggcttattttatagttgttgtgggactaggttgtaaggtttattttgatcatataaataaatttaagagatggatcccgacctttttctacaattatatatttacagttataaaagtttaaatttatcacaactttcgagaaaattctttgattagcaaatgggtgcacaataactaaaagatcactgtagcgtcctgattaagactcaaatttgtacattttaagtcttgagttttgtataaaaaatcaatttaaatacttattttcatgactttaattgtaaaattattttgattgaaa

SEQ ID NO: 128422 - DNA, 699 bp, Cannabis sativa
taataataataaaaaattatcattcaatcaacttttgaattaaagaagaaaaaagatgaatggttaagaataatatgagtacatgccaaagactcgtgtaattgtaaataaaaaaaatcttgtataataatttgtgaaaaaagaaaaaaatcaaatccaaaactgaactaagaaaacttaactgaacatattaaaaaagaaaacaaagtgaaaaagaaaataaacttagaaaaataatttaacaggaggtatttaagagtaatcaataaaaatccccttcaaattgtcaagggattattgatacgaacctgcaccaaccagaatgatgagcttccccgggccttcatctccaatcgaagcatctagaacctaatagtattaggtatattcctcccgtacttcttttcttttaatttgaattgcgacccagcgacatatgtaatcaaaagttgttggtaaaattagaattgttagaatattattttatttattattgaaacttaattaagttctctcacctaaaaacaactgaatgatcgcctttctgggtttggagcagtcgacagtttgggtttcttattctacttagtcatcatcgacgataatactgaacgaatttccgagtttgtagatagtcgaaataacgatgtatcagttcaaatattgttggggatttgttttatttttattttattattt

SEQ ID NO: 128423 - DNA, 730 bp, Cannabis sativa
tttaaatgaatttttttaataaaagttaattaatttttttaaaaaaaattaatttactttttaattttcttaattattcaaaataattttattttaagatctaaattcatctcttaagatataccaaaaaatatgttgaatctttctcattttgatttagagagtgtacgatttgataattgtaaaagtttagaaaaaaaagttgctaatttacaaaaatatgtcttaaacgaaataataagaaatatcctaacgaatgagtaaattttagtaaatataaaagttaagagaaatttttaacaagtcgaatattttagaaggcaatatcaatagtatttaaagtttagaagataaaattgctaattattcattctgaaaagagtaataaaaatgcctttttttttatatacatagggatggagatttgaacttgaaatctcttggtcatgagtaaaacagttaaatcactagattatgcttataactacgtcattgtcatttcttagtctaacttataaactatagtttttcgaattcttaaaaacatttaaattacatttattatgggattttaaaagtttttatgaaatatgacacatttaagtttgaccaatttatatggtgttttatttgtttttagatctttttatagtatttgatatgccatatatatgtaattaggttttcaaatcccatatttaatgtttttatttgtttaggaagttctatt

SEQ ID NO: 128424 - DNA, 1519 bp, Cannabis sativa
acacatctaagtaatggcatggagaaacctcttctatacatcacaccttctactatgatgtaccgtgcagctttcctcaccatcttttgagcttcaaactgtcatttggaagttctccagtgttgaggtaggctgctatgggtgtcatccagtttggtgtcgtgtttatcattttgatttcttccgcataattgatagtgggttcttctaagaattggattgggactaggttggccttatctgttactggattgggactaggttggccttatctgttactgtggtgctcgcaagccaggctaaagcatcagcagttgtgttttcttctcttggaattttcctgaggtgtaacctttgaattgtgcaagcatgtcttctatcttgcttagataggccattattttctctccccgggcctcgtactctcctgaaacatgattcactaccaactgttaatcactatagacctcaatgtattcggcatgcacctcctgagtaagttttagtccagtaatgagggcttcatattctgcttcattgttggaggccttgaatctaaattttactgctccatgcaggtgttgctccccaggtgtgacaagggcaattcttgcaccagaaagttggtctgtggctaacccatccacgtgcaatttctaggtaggtcggtcttcgttgttttctggtaggggttcttgcactggctccgggttgtcccttattttgcctgtgtacttaaccacaaagtctgctaaggcctgtcccttaactgctgttcgaggttgaaagattatttcgtactgacccacctctatcacccatttaagtaaccgcccagaggcatcaagcttttgtaatacttggcgtaatggatgtgggtcagtgtatacccgaacagggtgagcctagaaatagggccttaacttccttgttgctaagattatggagtaagtgagcttctctattaaaggatatcgtccttcagcttcaacgagtcttttgctgatatattagactagacgatgagcattgttttcttctcttatcagcacgacgcttacagcatattcggtgacaactaagtatattcctaattcttcttcgtctagggattttgagaatatgggaagttttgcaagtagtctttttaattctttgaaagcattctcgcagcattcctctgtccattccaacaactttttattacctcggaggatgttgaagaaaggaacacacttgtctgttgacttcgaaactaatctactgagtgcatctttccgaccagttaagctttggacttcctttgtctttgttggcaatttcatatctaggagggcttttattttctctgaattagcttcttctccctgagcattgataaaaaaccaagaaacttacccgagctgaccccaaaagaacattttaagggattgagtttcatgttgtattttctgagatttttgaagcattcatctagatcctttatgttccccccagcattcctggatttgacgagcat

SEQ ID NO: 128425 - DNA, 843 bp, Cannabis sativa
aacaaaaatctggcagcctttcataacggtagtctatccaaagttcatcacgcatccatggaagtgagaccatttgaccccttaaaagcggttttgaaacatccaagcctacccgaatccttaaaaaaggaccccacccctcattaagagaatcattgtgaacctctagaaattctccaatgagattgccaatgatttttgcaagagcctctgatttactgagaaaaggcaatctataaacttgaacccaaaatggagtagtagtgtaagaggatagtgaatcagaaaggagaacactcggaggacacagtattaaatgttgattatggaaatgccaaggttcttttgataataccctttttaaatccccttcacaaccgaaagtgaccatataggattcagagtcataatctgaaatgatgacctcaaaacgtcccaaccaatgcttatgtaagaaatttttgagttgattaggattgaaaccccttttggagtagacacggcagagaagacgagtattggtaatgcccagtggtggggcagaaacgttgtcaatagaaaccacagacctttctctttcggttagtgcagtagaaacatcatggagaaaagtatccatagtgtataggtagtaaaagtagagagaagaaagggataaaaaaaaacccagaaaaagatgaacaagaccaagaaaatttgaaataaactggggcgggaacaggtaaattcaaagaaagggaaatcaaacttacaaatatggttaaagagaaaaaataactactaactgccacagagcactctcttttatactctcttttacactctctctataaattagtgaca

SEQ ID NO: 128426 - DNA, 699 bp, Cannabis sativa
aaactttaaaactaaatttttaaaaattgtacggacattgaacgagcacgagcgtctgggcacttcttcttgagtttttactgccgcgcctagatcaatattttgactataacttcttcaaagctgagaacaagatctagaactttaatgatcaactccaagtccatatctacatttaaggtcatcaaaatttacaaatacgttcacatttgtcaaattgagctctcccacctccaccatttaccaccaaaacgtattaaaatcacatcaaatagctccaaacacatgattagccatcaactctcataacaaaataaaattgtattaattaatattttaaagaataaaaataataataataataatatgaaggtcatattaattaagataaatataaatttatcaatatctctatggtagtttatgtgctattattttattttatttatttaattaatttttagaatagttaatatatttactctctctactttttatattatcaaattatgctccttatagtatacaatttgttaataatactcatcaaaatttaacttttacagtaatgtagtcattctttgatattttattcaatgttatcgtgaaataagtaaactggtgaatggtagttgataaatggatagaagttaaatacccttaacgctttttatgttaatgaataatagaatataagac

SEQ ID NO: 128427 - DNA, 892 bp, Cannabis sativa
gcgggaagaaggccatgaggaattaatctaattcctttgttgttgctgcttgtgcttagtggtgttttttctgcagcttgtcttctctttcaaaaaaaaactatatacaaaaacctaacaaaagaaaaattagtatctacaagagacgacaagagttattgcaatataactcaatattgaatttggttgccatgtcagagttcagagatgattagaggtaaccaagtaaactgaggcagaaaaactcgaaaagtacactagtgttgacacaaaatttcatatgttatgataattgtatctatacttttcataattaactcggtcaaaccagaaactaatgtatttatgttcgggaatttcaaacccaaagtttcaaaacacgaaaatcatcagagaatgatcaaaagcttcaattcctaaataaaattcacagaaagtagctttaagtacttgtaaaagagaacaaaagacattcaaagcaatcatcaatctaaaaatctcaaagtaaagtcaaaaaaaggcctcctaaatctaattaggtgaatcttctctaattcaaaggctataatataaattatttttataatagtttaaaactcaaaaggaaagagccaagaaacataactcattgcagacagtcatctaaccttccaaattgctataaagaatcctgaaaagacatctagaattatggacccttctttcaaaaacaccaggcctcaattctagctctaaactacctaattttcctaaacaagaattgaaagaaagaatcacggcccgccaggagtgccaaaataaaaacaaccaggagcttggtcttcaagtatcatgccatcacctttgcttgtatcaattgcttctagcagcttaactacatcagccatgtcag

SEQ ID NO: 128428 - DNA, 632 bp, Cannabis sativa
aaattctggccttagagccatggtaataatgtactttcatgtaatatggatttaaatggatattgtttgtgtgttgatttggatgtattcatgttggtttatgtgttatttgatgattgtatgtgatttacgaaatttttccatgaaaataattttattttcgttctgaaaattttttatttggattccttgtgaaaaaattatgcaactttggtttttacagaactcgattccgataaaaattgacaaagttatgaaatgttaaagtttcggggttcaatggtccatcgagtgcaccaggcactcgaacaaggcagccacccgcgcgcataagcatcagacagatgcttgtctgaacacgcacgcttcagacacgccaccctgcaaattgacatgtccagaggctacaaatgtcgagaatcctcagcgcctgaggctactttccccccatctgcgtatgtactgggctgcttgcagcctggtcgtgggcagccttggcacaaaatgggatttttgtgagattttcccccaaattttaatattttttcaattttcaaaccctaaatttcaaaataaaatattatttttaatatatttaaacataaatatcaattttaaattaataacattta

SEQ ID NO: 128429 - DNA, 703 bp, Cannabis sativa
  modified_base (387)..(394): a, c, t, g, unknown or other
atgagtataattagtggtggactataatttaatgggccaattatagttttagggtgctcccatgtgcctctaatgaataggttgccaagctaacacatcaaatctgattaggattgtgatttattgacataaaatataaataaattaagttaaaattaactagttaaacaggccaactcaaacgaatatgatactagctaccacgaactagtaaaataagatcaatataaattgtctgcacaatcactttattaattttcccttcatatgaaaaaataatgatgtacctatactaaagagaaatgataaagagtacttgtggtttttgatttaagagtacttgtggtttagtatattgtgatgtgtaatattattattattattatnnnnnnnnttattattattattatgatgttaagtactatagtctatctcaattttaaatggtattttatattatttatattgaggctagttgttgtcagtaaaatattttttgagatttgtgttatctgagtacatgaaaatggaatattaattaaggcatctccaatagtaaaactcaaatttagtgttaaatcaatatcaaaatactactattttaatattaattttttttttcaattctaaccacaacattaaaaattacaccaaattttatattctttattattttattattttattaatataataagaatat

SEQ ID NO: 128430 - DNA, 1402 bp, Cannabis sativa
acacgcgtataaagtaaaatagtcccgcgtgcaacacactgtttgaacgtagttttcagcatgttaaacttttccaaaatttttaaaattttgtgggatcgtacatgaccatgagaaaaaaatttgactaaaaaattatttcgggtgctaaaacagacaagggtgcatcaatgtatccattttaagggggtgtattgtggaatttctcaaagttatttttcccttgccacagtgtttttgtaacttatgaaatttatatgggtatatttgtaaaaatcccaatatttgtcaataaccgtaataggatggttaatagtcactaaatgtataagagccacatgtaagcacccttataaccataattgccccattaaattatagtctactattaattaaaagaattttttaaaaaaatattagattttgagtaaaatgtttacatttatactgtcacacggcaaaaattaaatttatactgtccttgccttttttttcttttatgctgtagacgccgaaaattacataccaggcttctatcttccacactcacgaacagaaccaccccagcaatacgagaacacccgaaaacaatcattaattctggcgagatagaataaaaatagagaaatcgacgtcaaataaataattatggcaaaaaaactataaaataacactaaaataaattaaaaaacaaaagaaaaaaatgattaaaaaaactaaccatcttctgcacagcctcaacaccatatacaatattggctatatttacaagcccaatcatgaaaaatcagaataaaaaaattactaaaataacgcaaaacaaatgtaaaacaatgaagcagatataaccatttaaaaaaatataaaagagtcacacccctcaaaacctttttaccaatgggctcgtcaaatgtatttaatgtatttataggagaatcataataaaaaagaaatacaaaaacaaccatagattagaagaagaaatgtacttatagcctttatcttccacacccacagacaaaactaccacaacaacacgagaacacttggaaaacaatcattaattctggcaagatggagcaagaacataaaatcgacgtcaaataaataaatcatgccaaaataactgtaaaataacactaaaacaaataaaaaacaaaaggaaaaaggaaaaaggactaaaaaaactaaccatcttctgcacaacctcaacaccagatacagtagcgactatatttgcaagaccagttctaaaaaatcagaataaaaaaatcacactcttatctttcctaaaagcgtgactgaaaattaaaaaaactaaagaaaaaaatgaaaagaagatgaagaagaagaactaaacaagaaacaaaataaaaaacttatatgttaatggagagagaga

SEQ ID NO: 128431 - DNA, 1346 bp, Cannabis sativa
ccaaacaaaagtacaatcggtgagaaaaagcgatatatgcttcatccttgcaataaatagtctactactttcaagtttcaaaatataaaactcaagaagtttcaagtgtcatcagacccaattttgtattgttattgaataatttggtagcagaaagcagacttaggggaaatgatctatttttttcaccatttttttaatataagctagattccgcatctctttcaataatataaactatataatctaatcatatatttactttttttcattaatattttgattatgggagagtggccaccataaatttagactattatatactatagctcacctatcaattatatataatcttaaatttagaactaattcatcacctagagaaatatatatagaactgtttataaccatgctgaaaaaggaaaataaaaaaaatacaataaggggaaataaggaaatgaaaatactaatagtataaggacaacttctagtacatgaggctgagatgaagaggtgaaatttgttagattgcatactctcaaacaaagcaccttacattttctatgtaagtcccctgtttcgttatgtttcacaaatcttttatcaaataatctgattgcagaaagtgtgaactaattttaggcagcatatatcaattatatccatgattacttcataatctatatgacagagatccaaactgagctaaacatcatggcataaaataaatttatcaaataccaattataaatttccataaaaataataccaattacaaatggttttaaaatcaatgacagaagcgaccaagttaatctcaatctggcctaattaccaattcaccattacgaactactattaataagcttttaatcacaaaatgaaatcatactgatttactgacacaaacttccttagctttctcaacgactagcacagcgatcctcctcaaatcactatcaacgaagggcaagacctctctcgcgcctaatttttccatgacgaatccataagcaaataaaaatcgaactcaaaatccttgagacatatagtgttatttgaaacaggattcatgtgttgtattgatacgaaatttatagacaatacgcaagtacacgtaatcaagtagtaaactcacgcaggtgaggtcgaaccacagggaattgaactgaataccactaaattagacttataattctatttggtagataaataattttgatagaatttgaaataaagaaaaacaaaaaaattaaagaaagcaataagggtgtttaatcaaggataagaaattagtgaaaggaatcctgttgatttaattacccaattgttaatgctaattacta

SEQ ID NO: 128432 - DNA, 2252 bp, Cannabis sativa
aattaaaaacttaataaattaattaaaaatttaagaactaaaccaatttttagttaaaaaaaatgtgaaaataactctaatttctagagttatcacctgcaaagtaagggcaggcgccacttgcatctcaggagcaggcattgttggagcaccatgttgccttagatgtctggtctcttcatcttgttcattgattctagcttgcattgcgaaaacctattttcccaatcctgggtcccgaccgcgtaccctacctcttggacctctacctcggccacgtatattcaggggaagctaaactccctgattgccactagatctgaccgagttaccctgacttctcgtgttccccttggcatccattctaatagaacagcctgcgaaaccaagagctagcctggtcagatcgcgatcaagaataatttactaattacctcttatttcaaaatttaaaatatgcgcctttttagctatcaggctactaacatgctttctatcaggctttccttaaaacatactaataaaataaactactaaaacaataaaggcttactaaaccgtgagttcatcttatctccaatgatgattgtacatgtcgtgacgatcttcgaaagacaacctagcggctctgatacttaattgtaacaccgtactaggttaggcatgttatcgtgattttatattaattgtgcaatctactactaatcaacaagtttattaaaaattgtgatttattaaaccttttattaattactcttaaatctcagagtaaataacatatatataatagggatcccgtattttaaatatttacaaatgagttacaaaatatttgatacaaaatttgtcgcctagtgactatacaaaatacagtctactgtcccaaagatcatacactctaggcctaattgcctcaatatgtacaatttgcatccgctcgcactcacggctgctcagctttagctttgccattacctacacatgcaaataataactttgagtcgacatactcagcaagaaaagtataatcataaatataacccggattacaattaggcccccatactcccaaccataatcctatcccgacatcctacgcggtactaagtttaaaatgttcgtacaacagtattattgactataatatcagcctatactcagtactttagtcataccagtgtgatagcgccaatcagtacttgagccaaacatacatttatcggtatccaatacaactctaagtatattgataccgctatcaatgtaatctaatagtctttataaacatgcacggtaaacatataatcacataggcatatcatcatactaatcttacttcatttccaaattcaagtgtgtcggtcaacctgaggggaatagttgctcaacgatttacaggaccctaagccacaatattcgtaaaattgatgagtgacacactaaatgacttttcggggacttaaaatcaaaacttaaagtttccctatcgatggataatatggaaataccctaaatatcataaaaatagaaaaatctagggtgccctaaaatgccccaaccggtagaccggttcccaaccggaaaactggttatgtggggtctgccaagggatgaatcgaaattctgattcctacaggtccatactgaaccggtcgactggttcagtataggaatccccaaaaaccttttaaacaactcaattcgaccccaaattaaatcaaaccttccagagtgcctattcaagactctaagggctcgtttggtacgtcgtataagggtcgaattgtattaataataaataacactatgtttggattaagtaatgtactgtattaatttttacgatcaaatttattaatacaatgtatgttgtattatttaatacataataaatagttcgtattagcttgtattataatatttacaaagaatttgaggtcaacaccaatctccgacacggacccagacccggacttggactcggacccggaccttggaccccagacccggatcccgaacaccagaccccggacccagacccgaacccagacccgggaccccagacctgggtctgggctcggacgcggacccaaacctcaaaacccggacccagacctggacccggacccgggaccctggccaggaccccgaccccgacccggacccagacctggacccaaactcgaaccccggacctagatccgaccccggacccggacccgagacaccgaccccacacccgcacccgaacc

SEQ ID NO: 128433 - DNA, 562 bp, Cannabis sativa
cggggcgcataaccttgctgcttgggctgcttcttgtagcagtttcaagttcttttcttcaagggaagtggcaccctttgttgccactatgaacttgggctgttaagccttttggtttttaataaagttttgtgtttcatcaaaaaaaaaagatgtaaatagacgattttatcgtcgataattatcaagtaaagccatttattatgactcaagtgatctttttcaaaaaaaaaaaaaaaagcccagctcaaacccgatcccgaccccaatccacccgaactagagccatctcggacttgaaacccaaaaaattgaggtcacaaatgggttggttcggttcctattttttaaaattaaaaaaatttactagatgtacactcctactaaaagaagttttagatgtaattagacggttttatcatcaagtgaagccatttattatgattcaagtgatatttttcaaaaaaaaaaaaaaaagaaaaaagaaagaaagcccatcccaacccgaaacccgaccaacctagacccgaaacttaaaaaatttagtctctatacaggcggg

SEQ ID NO: 128434 - DNA, 891 bp, Cannabis sativa
taaattaattacaaactcacaaattattactttattatttcataattaaaatatttatggtatacatgaattatatttccaaaagtctaacaagcaatataatgaacgagaatttcgcatatttattggataatcatctatacatgacagagaattatacatataaaaaaaggaaagaaaaaaaatattgccatatggccaagcatatacagctatgcgagaccatgtcgtgaaccatgcttgtttattataggttcaaatgtccaattactataaattggagcctaagttcaacagtgtttcatgtactagcttaacatttatagtcatcaaacaaatatagcctccatccttaatttctcagtttgagtaattaataagatggctaaccaaaaggttttattatgttttgctctacaattgattttcgtagtctctgcccttcaccacactgcaaatgctcaggcacaggggttgaaagttggattctatgcacatacatgcccaaaagcagaggctattgtaactcaaatcatacatcaaactatggcagtagcaccatcacttggtgcccctctgatgagaatgcattttcatgattgttttgttagggtgagtagaaaacaatatatataattagatatctcttgtaagtatatatttacagttatatacattaatcttttatgtatcgcagggttgtgaaggttcagtactgttgaattctgccacaaaccagtctgagaaattcgccataccgaacttgagtcttcgaggtttccaaattattgacaagattaaggttgcattagaaaaagagtgccctggaattgtttcgtgcgccgacgtattggccctagccgcaagggattcggtggctgcggtaaggat

SEQ ID NO: 128435 - DNA, 1867 bp, Cannabis sativa
actttgttcagacgcgacttgacaggtgagttgagacacttgaaatgttaaaattgtatgtgttattaattaaatatcaaatcttacatgacttacaaaaataattttaaaaaaatattactaactaattttagtatactaaagtattaaacacctaatacttaataacaatattctataatttaatttaataatttttatataataccactaattaattataaagggcaaaaataaagactctttttatctcaaaaaaaaaaaaaaaaaaaaaaaccaaagacttttgccgaaagagagctagagctcttgtgtactgtctatatcgtttaagaatctttgaaaatctctttttagtaaaaggaaacaaaaatttacacttagctggtaatgattattacgtttattaacaataaggtaagatggataaaaaaaatacgagatgtataggaattgtaaaaagatggagaatgtgaaggaaaaagaggagagtaaatcttttagattgtttagtagaaagggtgtgtataattgttattatgcacgaaaaagtgaaactaagtgagagtgaatttttagaccctcctccaacacatttctccatcctaccaaacataatttattgatgtgtaaagttatattatgcatgcatattttaatgagtcatgatgcattttttctcattagtgcttcaattgatactttttaattattatgatatcttcatgcaacaattggtctaaacacaatctgtctatagccaagcgcaacgcatcatattccaaagttatccaacaaaaattaaaataaaacaaataatactcatcttggacaagcatttacagtggactaggcatcataataaatgagtgcagccaaatagtgtgaaatgtctattcaatctaatatacctaataaatgtggtcaaaggaaaagtcaaatataggaaaccatctcatcacttctctgcaatctcaattgggagtttgagacatgggacttctctatagcatcctgacctccattatctacaagatttctacactatttttttcactcttgaccagtaataacattgtgcatcagaaataatcatgattccatttttattttattttgaaatggaatcatgatttcttattattacaatatattcttggtagctagaaagataaagtctttcttggttcgagtcttgcaatatcatcatatatacaccacaatacattggtttaatcactacattggtcaatcatgatataagattattactcaatcatgggggacacaatatagctttagaccttcctccataataaaactaaaaattaataaattcacatcatcacatttatgctttcagtaactactagaataaaggtggtcctgggattaaaattaaagtcggaataaactttattttctttctgtctcaataaacccctttcaaaccagagatatatatttatatatatttaatcacaattcacaatacaaaataaagagtctaatttttattaactccacctgttattttaaggttgatgtgatcgaataatagttgttaaattacaaaacattttactttttagtcatatcaaaatttattcaaaatttatgacaaaaaataaaaaaattgagtcattatttttattatttttatgttgtaattaaaaagtttatgactaaatgtattaatgacaaaaattacaatttgttgtgactatatgtatttttagtacatttaatcataatatttgttgtgaataaaactaaagcagtaataatttatatctaaatactatattttaattacaagtaattttttattgtgacaaaaaatttagggattttttcagttttaacc

SEQ ID NO: 128436 - DNA, 2233 bp, Cannabis sativa
tatatatatatttcgttatgttttctattgtttcattttaaaatattagaacatactatttttacatattgattttttttattttagcatttttgctattatttttttatgaatttagtttaaattatttaaatagtcaaatcggagataaaaacaaatgtttttctttttttatctgaataaaggaaaataaaaaagcgtttttatattattttcattctattttttaaattttgtgagagtttcatatcaatatcaataaatatatataaaggaaagcacaaagagaatgatatgacatctaatatgagtttctttttattttctttgttttttcattttttatttattttttatacttttagtaatatgtgacctatttttatttttaaaaagtcttaattggtttagaaattgtatatatatatatatatatatatttaattttatgttatattgatcactatctttaagtttagtttatcttaaagttagtattatttattttctattgccgtcctacatttacatttgtggagaaaatattctactgacacaataaaataaaatgttaaaattttcataaatagtatgttaaattgtttctttctgttaaagaaaaaaaaggtctaaataatattttaaagagaaaattacaccctatactctttttttgttaacccatttcatttttacctttcttttctatatatttaatttataccctcttttatttgttatatcctgattatacctttatgtaatgaaaaaaaccttcctcacctctctgaacagtacccttatgtaaggatataatcggtaatggacttataaaatgggattcatttcaattgaatttaaaatgagactacttttagttaactgatgaaaaaaaggggtatatttcaacttacccctattttaaaaacatgctacatcatccatcacaaacccaatttattgattcaaaaactgttatctttttcctttattttattataaaaacccatgtaattttttttcaccatttaacatttcgttatctttcaatgcattttaaaaataacaaattatttttttaaatttagtactatttatttataatacatacatcaaaatgttatattgtagagtatatcattcaataagtacaatatatatttatataaaatttataaaagtcgggcaatatgcgaatcacagcttaattccctagtgtttgtatatatgatgttgaataataaatatttttatataacattcactaatcagtttatattatcaaaattatctaaatgaaaaaatattttaattttaatcaatattaaatataataagatttttttttaaaaaaaaatataaaaccattagaggtagagtggccccgcagctaataatgacatcagtttatcaatctgacactagtattagcagtgagggtgtcagtccgccactaaatactagtttttatcgaccaagtattaccgacaaattattattagcagagcctgccgttactaccttttaccagtggattgagggattaatagtagcagaatccttgacctctaataaccataacaaatggtctgtattagcttgtattataatatttataaaggattcagggtcaaccccaatctccgacccaaactcgaacctgacccagattcggacacatgacttgagacccagacctagacctggacttggatctggattcagaccaggactcgagacccgagactcgagactcgggacctaaacccgaacccggatccgggtccaaacccagacccgaactcagactgggacccaaaccggaacctagacttggaacctagaccaggacccagactcgggacccaaaccttgaccaggacccgagacccaaacccagacccaaacccgatctcagaccaggtcccgaacacggactcaggatttggacctagtcctaaacccaaactcggcacctagacacgaatccaaagccggacccgatcttgaacccgaacccgagattcaaacttggtcttgaacccaaactcgagacctggacccgaactcggatttggacccggacccgacccgggactagaacccaagacccagacccagacttaggacctgtaatatccagattaaaatagtacttaattttttttttttttggatattaattgagcgaggttaattatcttgtttctttgtgttgttagtgagttgatat

SEQ ID NO: 128437 - DNA, 856 bp, Cannabis sativa
  modified_base (29)..(33): a, c, t, g, unknown or other
taaacagcatacttgtgagtagatctaannnnntggtaaaataatatccaacaggtaggatccccaagtttctaaaagtgaaggttggtgtatctcaagaaggatgccagcaatttggcccaccaacttggcaagcaagaccgaccttctagaaaaaggtatgttgtggatttggacccaataaggaatttttctcatggagtcaggggagaggacaaaattagggtcagggatttccaaaaggatagggcatttgtcaaagatccaaggttggttgaggatggctctacgtctatctccatcacagtggaaaggagctaagtaagggttagagttggggactctttctttgacactcactggaaatcgtcccttccaatacttctctaaaaaattcttcagggcattgtggtaaaaaaattttgtggtatacaaggtggccataagatggaactgaggtggggctggtggaagtccctcatttgggtcaccatggtcagcgagggagtgtatagtattttcagtatcagtaagatgaagggctacagaaaaagagtgagctaagtcttccatatttgcaaaatagaatcaagcaaggaaatagtagatttttagaacgaaaataaggcaagcagaggaaacaacagatcattacttaaataggaaaattctagtaaagaaattaagagaagtgtaaaactgattttcgtatctcaaagtacacttgagtaccaaagatagaaaaaaggcgaaaaattaaagaccaaataaggcgtgggattttacaaatccagctcctgactaggtaggtagactgtaacaccctaactagtgtaggcgtattacgtgattttta

SEQ ID NO: 128438 - DNA, 1734 bp, Cannabis sativa
  modified_base (784)..(785): a, c, t, g, unknown or other
tcgctagacaactttaaatttcactaaccattaagattccaatttgacacttcgaacaacgaggctgaataagaagctttgttggctagtttaagaatggtcgaaacgttagaagtcaaaaatcttatatgttatagtgactcacaattgattgtgaatcaagttctaggcaggtacagacaaaaggtttaaagatggaaaaatatttggagaaagttgggaagaacttggagaagtttgattattttaagattgaacaaattctaaaagaacacaactcaaatgttgattcactggccaaattggcctcgcaaaatgaacttgataacttaaatctggtactggtggaagttttaagcgactcaagtatatgtgaaaaggaaaatgttgagatgattgatgcctcgcctacatggatgacacccatactcaaatatctactcaacggagaacttcctacagacaaaaacgagggacacaaactcttttattcagtgcctcgctatacgataatcgaagacaaactttatagaaggggttattcaatgcctctcctacggtgtgtactcctaacagaagcaaatgagataatcaaggaaattcatgaaggcttttgtggagatcatgtaggttggcaaagcttatcaaagaaatccgtcaaggatattattggccaacaataaataaagatacacacgaatttgtcaagagatacgataaatgcaagagattttcacatataccttgcgtaccaccaacagaattgagaatgatgacctcaccnnacccatttgcaatatggggaattgaactgattagggcattacccatagggcgaggagaagcaaagtatgttgtagtagatgttgatttcttaacaaaatggacagagtccaaacctctcgtttccataacatccaaaaaagttctcgattttgttatcaagaacataatttgaagattttgaatacccattaaaatagtatctgacaatagaactcagtttgatggtgaattgttcactgagttctgtgaaaagaataaaattattaaaaacttctcgtcagtttcaatacctcaaacaaatggacaggtgcagttgttaaaaaaaccttaaaggataaaatcaagaagaaagtatatgctgcaaaagggagatgaatagatgaactactgtaagtactttaggctcaccgaacgatagaaaaaacagcaaatggacacactccattcttgttggcatttggctcggaagcaatgttgccagtagaaattaatatcgcggcccataaacgtaaattctacaatcaagaagaaaatcaagaactccttaagttgtccttagatctacttgaagaaagacacactgaatcgcaagttattaatgcagcatatcaatagggaatcacgagatacttcaacaaaagagtgaagaaaaggctcttcaatgttggagatttagtgttgaggctagtatttgcaaacacgtgagatgtatctgctggagtatttaatccaaactgggaaggtcctgatgttatcgaattaatagttagaaccagggtttataaattggctcggcttaacgattcgctaataaaaaaccattagaatattgaacatttgcgaccctattaccagggaacttataatgtaaatgttttctctgtaatgcaaattcttgttttaaataaaattaaagtttgttcaagtaatttctgttgggttttatgc

SEQ ID NO: 128439 - DNA, 794 bp, Cannabis sativa
ataaacatgaataatacatgtaaatataaataacttctaatcttctattgataacaaataagaatatattcaaatgggttttatttagggcataaaatcccaatagaagaacggtgggaggctacaccaaaaagactgtgggtactagctcttttacactctaatattgagttggtagagctgctacattagagtaacgttctgtaagctggttattgatagtatttgtgaaggtgctctccattccaatatcttggtaggagaacaagctccatgttctcattgtacctcccagcttgtaggctctcttattagttatctctgtaacttgataggggccttcctaatttggtccgaacactcctgttgttgaatttttggcattccgaaatactcttcggagcacaaggtctcctatgaagaattttttttccttgacttacttgttgaagtgacttgctaccttttgttggtaggcatgcagctttaggttagtttgatctcttctttcttctacttcattaagggattctaccaatagaatattgtttgtatcatggtcataggttgtcctcatgtgagcgggtggcactagctctgcaggcaacattgcctcatagccataagctagagcaaatggagtttgctcgatggtcgtcttctcggtagtcttgtgtgaccataggacctctaggagcaatttatgctagttaccctttgcttcctcaaggcacttcttcagggtgtcctttagggttttattgacagctccatttgttaggttttatgcccta

SEQ ID NO: 128440 - DNA, 2287 bp, Cannabis sativa
  modified_base (1955)..(1958): a, c, t, g, unknown or other
caagaaaatgcgagaaattaagtgctatgttcactctagtagagttaactttgtttctttcatctgattttctgtttgtaatgaccacatttaattttttcataattactttataatttttctatttgggttgtttgttactatctcatatcagaaatagtattacattacataaatattttagtttagatttcttgccaaactctacataatatttttgtcaacagttataaacagtcatttaaaaagtttttttatcaatagttgtaaaccgtcatttaaaataactttttccaacgattataaagttttgtatttttatgacactcacatagctaatagttttaggaaccgatgagaaatagtataaaagacagttataaaccgttgagaaaagctaattttgtagtagtagcagattattgttgccggagaagataatcagaactaattggcatagtaccggagttggaaaaggcaatcaacgatagtgatttgtgtttcaattatatagttttcaatgaaatgagttaagaatgctggtttttgtgttcaaattgttgtttataatcgctagagaacaatgcgattccaagaaagaagaaatgagagaaaattgtgaataaagaatttgattttgtttgttttggaaaatttatggcattttgagatatttaatattgtaaaataattatattttattattattgatattatttaatataaagcttcaaatattttaatttatataaaaagaccgctaatcactgaaatgttatttttagtgttagatatttttctaatacaaaaaaagaaaaaaaaaatcatgaaaaaattgttatactcagaaaatgttattggttacagtgttggcacttttaagtactatcaagtattttgaagaatttattagcaagtattggtgggggatggctgttcggagttggactgcaaatcggtcaagatcacaagtgttgattttatttgatatagacataaagtaagcaatagaaattaatatgcaataataatatattatatatgtgtgccataagaagaaaatgccttgacaaatggggaaaacggatcatggaataaattatatacaattgatctaattattagaattattaggcatgtagattttagtgtcaaaagtcaaaacaatgttgaaatttactcccaaatttagcataaagctaattacacctgactaatatatatatatatatatatatttttttttttgagataaaaaaaaaatgtatgctacacatgactaacatacttgataagtaaattgaagttgttaataacggccactctattagtaatttttttttataaataaacttttttattgaaaacgacaactaacccaaactagttactacaaaaggagctacttctcttagacaactaacaatgttagccttagcaattctagcccacccagctagagtacacaaagacactttaacaaactcaaaaaaaaaaaatgaaaaagattaatacaagagaaaagaggaaaggtacactaccaaaaggtaacgacccaactttgaaggccaaagcaaccacctttgagtccatttcaatacgaagattagtagtacctttgtcccgagccacctgcaaagccaaagctatataccatgcagcttaccttcgagcacactagagacagattaaaagccaacaacaacccaagcctcatccagtacttgaaaattcttataaaaaatcgcaaaacgagctttcgagttgacaacagaggcatcaacttgaagacaccacacatcctcaaaaataggggagaatgagctggattaaatgttaggactttatgccctaaataaaacgtattttaacataattagatttactaattactaaaagatcataaaccattttaggatgtatggttcatatgattactttcatgattatatgtnnnntatataaattctattaaattccaaacataaagttattcatgattatattgttgtccacacagtagaaaataagcatgattatatgcttcaaactatatagtctcacgatttatcaatgcacaggatttacactgacgtgataatcagcgatatggtttacttatacttgtataagtagaatatcctttctaggtcattagcaaagtaaattagtattagatgtattgactatacatcagaccagaccgatattgacaatggaaaagatatcataaacttatcgtaatgtcttttctaagtcaatctcacttagttgatcttaggtcaat

SEQ ID NO: 128441 - DNA, 2185 bp, Cannabis sativa
ataaaatacaatactacgacctaatacaacgttccaaacgagcctttagttaattagtatatttaattttagttatttattcgttaactatgtagaaatgtagttacttttttttttttttaaaagttatttttaattttggtcatcttttttttaatgatagcaaaaaaatatatgcttttagttttcacatactaaaataattaccttaaagaatataacaaataattattaatatggctcgaaaaattattaaaattattgagagagaaagagggaatttagcattttacctttatttattaaaaaaaaaaaataaaaaaatagcaagcaataatagatagtttacctttttttttaaaagaaaaaataatatatatttatatacatattttttaattttggatggaaaacttaaaaaaaaaatagatggaaaaagatttttttttaattaattacctctcacaacaacaaaaaatgcatttgttcaaagaaaaaaaaaggcatgcaagtagaattaaatagtttttggtttatataagatatgggtgctagatacctacatttataatattaaaacatctgctgctagttttgtcaataatttataatattaaaacatctgctccttttataagttttaaaaaatttggtgtgcccgtgtggggtctgtggaagttatggaattttaactattttttctccttaactgctttcctcttttcttttttttcaaatccttttaagataactgctcccgcctaccttgctcctccacccttcatcggtgtttcaccttctctttcacaatcctatctctcctttccttcaatgcattctgtgatggacaatctcaactctgctctttcactcactgatgaggaaagatctactcttacattgcctgacattgctgctctggacgcaccatcatcacagccagtttttgctcttttagcaagagttttaactactcaaaatgtctacaaaccaggtttcatagatcaaatgtcggggcactggcagggacgataccccgtcatgatcactgaatataaaaatgaggagggtctctttcatatccgctttggctgtgagggcgataaacgacgggttcttaacaaagaaccatggcactttcaaaaccatttgataatccttttggcgccagatgttctaaaaaatgtcacaaaggagaatatggttcatactcctttttgggtgcaaatatattgcctgccattccttagtaagtcacggtcccttgctgaagcactagggaatatcattggggaatttttggaagttcatgatgattctacaaatgagggatggggtccttttctgcggatccgagtcaaacttctagtcactaaaccacttatgagaggccaaatgatcaaacttctgaaaattaaagatgaattttgggtagactttcgatatgagcgtttgcctgaattttgttttgaatgtggctgccttggccatccttttgaacgatgtgtggcgttcatggagcgaatggatagcggtaatgatgatgactttcagtacgggccatggatgaaaggttcaaagctaccaacaaatggttatgacagatatcgtacagacttttccaaagccaatgcttggcctcttctcactcggttggctagaaactccatttcaccttccataccaacaactcaaactcgtggccagcctcagccaagacttctacttcctggggagtcttcatcctcacctttggccttaaactcacgttcaaacccccccacttctcatcatcaccaacctgtgtcgacagcaactaacacattactacgcacatctggtttgggactccatgtttctggtgcaaatacatctccttcttcacataagccatccccatccttccctcccactcctgtttcaatcccctcacccattctctctactcccactatgatttccacccaaactactccatcaatcaactaatcaattcctttctctacactaaaacaacaaacaaacccctccctttctactgctgatctttccaatatatatatacctgatatatagattacaattcctttccaaatcattctaccgccaatgtctttgctacctatccacctacacactccttccacttatattcaccagtaacttcctgttggaatttatttta

SEQ ID NO: 128442 - DNA, 999 bp, Cannabis sativa
  modified_base (923)..(932): a, c, t, g, unknown or other
gggagtgtatttgctaacggaccagtggtttaggtagtattaccaccaaaattttagatttgggggttatgtgcaaaaacctctctactttagggggttttgccgcaaataaccttttttttaaatgaaatacaaaacatgattagttctaaaaataatcaagtatcaaattctaaaaacactcctcagaagaaaaaaaaatctaaaagaaattttgtattttagtagtgtaaaaaaaaacataatcaaattattaatagtattcatttaacaaataatcaaattctattttatttatgaaaaaattcaaatttataaaaagagttaattaaattctattaaatattataaaataatattttttttcttttacttttgacataatatatattaggttgatgttatgcatgtatatttagattttctcttttaattcggtaacgtatttaatttttagttgttatattaaataaaattatatataatttatttaaataaataatattattatattagaaaattacatgtttgatataaatgtttaaataaagaaacatataatagcaacaatttttttttaattctacttgtttgttgactaaaattaaatgaacttcataattaataactctataatcattgtttgtttattactttcaaacatttgttctaaagacgtaagatgttttacttttgtgtaatgtgaactttaatttataaaataaacctcatcataaatatcgttaaggttattgaatttttatcattgaacacgtgaagttcgttattgattcattctatatagaaactaatattgcattattattaaattcattctatgaaaactaaatgtaaccacaaacaaattctgtattgcgtaaataaaaatatagggatatgattttgtcccgtgatgtactttnnnnnnnnnnattccgtggtacattagataggtcttagggtacattaaatgagtgttagggtacgtttctacttttt

SEQ ID NO: 128443 - DNA, 1847 bp, Cannabis sativa
caactttttgaccttgtaacaataatttagtcgtcatattaagtttttattctgaagggaagaccaactaaatcttcaccgatgcagttgtcacctcccctaatagtcactcaggatcagctgcgcataaaagacaaggggaggtgagcaacctgacaaagcaacaaggtttagacaaggctctggtgaaccgtacccaagggtacttgactgacaatgtcatcgtacaaggttgggtatcagcaaagtacagtctcaagtgttacaacttggacagatgttgagtcttaacttgagcattcgactacacagtttctaagggaaccacgtatgagactaaggttgtatatgcccacaaggccatgataggattattgccgaggttaaaagacgacagaaaactggccacccgcttaggaccaaggcctaggctagccacggtcccatgacccaaccaagaatcggttagggccactagacccaggtatgaaccgcccagccttctaggcccatgaaaaaaccccagggtcggccaggtcttaaacaagacccctagggtcgcccagtgttagttttggatcaaaatatttgtttttcaaaacttgaacgtgttcttcgtgactcaaggagtcaagaatcacaacgaaggctaaaactaaatctttttcatcatgaaatcacacattatgaactattatgtggatcaaaataccaaaaagactacaatctaacatgagaatcaaagaatgttaaaggcttggaaaagtttgaatacaacaatggcaaatcaaaataaacaagagagaacaggatttgaaagcttacccactagtaaagaccttcaagaaagaaagtagaaagcttggatcgtcaaaacaaagcaagaatcttgggttttagaggagttggatgcgtcggcctcaatgggaagtgaagagctttctttggtttacttttttgaagagagagaatgagagggagttacaccaaccaagcttatatagcttttggtgggtccctctctcatttaccatgcaacatgcaaaaatattatcagttttctcctaaggaatgtgatcagataagcaagagcaaatatttcaagactgaatatattgcaagatcggcctagtttaggctccgtcagtccaaactaaacttggaaagtccttatccgtacagacgtccctacagagacttgaagggtaaatgttatcccaatttttacacacatgatgtggcatgtccaagtgggcaaggttaatgacacgtggagtacaacttgtcaacaagaaggccaagtcatcttactcaacatattaattgacgggaagtccaaatacttaagcaagacaaagagacaataaattggccaccttaagaggtctagccagacccccctggccggtcctatggccagcataagccagccaacctctagcaaaggaaggaccgaccagcctatatcctggcaggcacttggtcggccagcttgcaccctggcaggcacttggtatgcaacctcgaccctggcaagcacttgatgtgcaacttgcatttgagacagcaatccaagttgtgaattgagcttcaacaacccacaaaaataggagataaatatcaactatttacctattcttgggggtcaattaacctatttattatttattattttatcatgtaacaaatatgttatattttctatttttagggatattaggttattattcgcttgtaagatctcctatataaagagcatcaacctaaacctaatttgcctaagtctcaagcaccctaaagctcttaagctccaagtctaaaaccctagatctctctctctctctctc

SEQ ID NO: 128444 - DNA, 831 bp, Cannabis sativa
tgtggagcactttcaggttagatccgacctgaccatacaggtttttaattttttggctttttttggtagcgggtcggggcaggtggttgggtttttgggtttgcgggtctaaattttcaaccctacctttttatgttttacgttcttttgcatgcatggctgatctatttttatttaacgcatacgattgacacgcgtctttagtttctttttgttatctctgattgacacttgtccttgctagttgtgttccatcatttattgatatctaaattttgtttatttcgtttttaggccatgttttgtcttatttgatgtagtttttgttcagtattttagaatggcattatgtctacagtttcttaatattagtctgtctaaggcggccttttctctagtgggatgtcttatctcggcgaagggttaggtttgcctttctttgatctgagattgtcctcggcctgttccgaaataaggttttgagcccaacctatctcggctttgagcagtagtgtctttactcgagcttgagtgttgtctagggtacacgtcattccttgggtccgactcatacttcttccattggaaaactttttagctatctctgatgattatggtcttggtttatctcgaatttaagctattttggcctatctcggaatgcgttgcctcgagtttatctcggcacgaaacgtcttagtccttccttggcaagagtgcctagttaaggcgtacgacaaactaagttggcaatttattgaccacgttatgcgtagtttcaaggcccctgacaagttctgccactgggtatgccaatgtatcacaacttct

SEQ ID NO: 128445 - DNA, 878 bp, Cannabis sativa
tatagttaaatttgtttagtaaccattcatagataataattattaagaagtgttccatatatatatataaaaaaaaacctaatatttttttaattttgaggagcaagcctctcttgtattacatttgtgtatgatttatgtatgcatacatattattactttatatagaatgacctaaaatataaaacaaattattaaacagtaccataataatttttttttttttgaataacagtactgtgataatttgaaaacgtgtttgtatttatatttataatttttgttgtgagaatccaaaaagtatatatgagttaacttctagattacttcacaaacacccaatcttcataaaagataaacatatttagtaaaaaaaagacaaaatttcattggactaccaaagaaactttaacgaaagatcaaaaaagaaaatggataaactgatcaattttccaaattaaagtaaaaaaattaattatcattatctttttgtatactcatgaatatttaggaataaactcttttttatccttaactatatatgttgaataagacattagaggcataattaactttcactttctttaacttcttatctttggaaggaatctaattttcttaatcctttttcttatctgttatgattggaaggactccttgaaagtatttaaggtacgaagaaatgctatattcaccttaaagtgaaaaattgtgtattcaaaatatgcattcaaatattgtgttattttttattattagttttgttatgactctttcttcattttaatttggaaaacttacaaaaatattaaaatttagattaatttttacaaaaatactgttacacgaatttgctttcaaaaatactgtatttttat

SEQ ID NO: 128446 - DNA, 1466 bp, Cannabis sativa
  modified_base (1417)..(1424): a, c, t, g, unknown or other
aatgaaaggttaacatggaacccatgagaaagaaataatatatacctgtagcattgggggtcttaatgctattctttcttgagtagcattttggggaccatccactgtgataagagctaattcaccatgctcagcaacagctcttgcttgtgcctctcgttgtttcatctcctctttcatcttttttgtttcaatatcaatagcggcaactcccgcatccacaaaaacacatctgcaaattagcaagaggcaattattgctagaaccttttctttttgataatttattgctagaactttagttcatctatctagtatcgtaccactaatgaatgaattgaggtttaaaatcagtaagctagatgagtcaaatctacttgtctaaattaaattagttaaaaacataatttcgaaaatttaatatgttcacaatatagcttgtaaaattgtaattattttccagcctagtaaactttctttgtggttatttatttgtacataaaaatcaataaaactacagaatttaattgttttaggttatattgtgagcatgagtgctccagatgctacatagataaagcactgcttactcaattgttgtaggtgtagcaacaaaaagttgtctgcgatgccaaactccaccagtggcaaagggaatcgcaacatcacccaggtatctatattgtggccgcaacgaagatatgacaatgtattgtggataggcaaaagcacaatactccacagtttgatcccatgctgtccactctggtcgaggaagaagtcctccaacaggctcagaagtttcccaactgcataataaacccaaaattaatttttgcagtgtcaatttacatcttactaccaacttgcataaacaatggcatctcaatagtttgatctcatgcagtacatttagcttattgctacctgattcctgaagcgcaatataaaatgagctataaacataaatataaagatgaatgaagtaactcacacccaaaacaaattaccaaaaactagatacgtataaagacattcataaaatacctgtatagctgaaagttaggtgctgcagcctcatttggggaactattagaagaaaatccatcatcgagagtggcaaaagaagaaagaccactgcttccaaatccagacaaaggcatagattgaattgttgaaatagctgtagcagcaacagggctgattcttcgagatgttcggtatgcaacaccaagtaatgcccctccatgcaagccaatgacctacaatgtgtgaatttcaaatattaatcaacccctattttttcttttttggtaaaatgaatagccccaaatgctacagtatttttttaccaggagcgactttaaaatttgttaaaatacagaatcatcattagaaaagagagagagagagagagnnnnnnnnagagagagagagagagaaaactatatattttctcacttgtat

SEQ ID NO: 128447 - DNA, 628 bp, Cannabis sativa
  modified_base (100)..(105): a, c, t, g, unknown or other
aaatgtacgttggtaaaactttgatctctttgccagcgcagtttgtgaaatgcgctggtaaaagttacttttaccatcgcagtagcgaactgtgctggtnnnnnngacatttcttgtagtgatatatataataactatatagatatatatcttcgttttcaatatatgaaaaaattataactttttttttttcttttacagtttagtcaagtttaattgcaagtttataaaaatagttttgtaaatgaatgtttgaactcaattttcatcaaaatttgcaaccttctcgctttgtcattaatcgcacactttttgagaaaatttccctggagatcacctatcttaaaatactctcggtcaagcatgtttaaccgtggagttcttccatgatgggctgttgaaaaaataagatgcaccttgctgatataagtagtaccaatcaatcaatttaaaacatcttcaattgtgtatacctacatgtacagtttcataatcatcccattaaccttctccagacggcactacaagaaatgtcacttttgccagcacatttttgtcctgaaaaaagttgatattgcgctggtaaaatagaattgacttgtgatgtgttggcaaaagggggttggca

SEQ ID NO: 128448 - DNA, 514 bp, Cannabis sativa
gagagagagagagagagaagtatagggataattaccaacagcgccgccaacagcaccaccgactgcgactccggcggccacacgagtcatacaactgtccctggccattgtagacaagaaaagcggttaatgggtttgagagtgagtttagggagatccctgggaacaagtgtttgggtatggcgaagagaagagttattatcgaatacaccgaacacggccgcaaattatttccactgtttacactttataattatatgtgtatatccctaacaaatattaccaatattagtatttttattggaaaatttgacatttcatgctaaaaaaagggaacatggtatttaattatacttaattataacacataggaaaaatataccaatctttctctattcttccaaaaatacccttcttatttcaaacttcccacattccctctaactacattctctctcttctttccctctcccaaactcacgaacccacgaacggacggacgcagaccaccaaa

SEQ ID NO: 128449 - DNA, 973 bp, Cannabis sativa
aacatgatctacaattatagaatcttgactttcctaacatatcgaatgttggttccctttaagtattaattttagaactgaaaagttgtacaaaaatttagataggatctgaattatactttcactatttaattaacggtactaaaagataatcaagaagtatatatatgatctaaattatactttcactagtgaattaacggtattaaaggataatcaagaagtatatgttcctttcttataatttatattttaatttaatgtatacacatctcgagatttattggggctgtggtacaataataatcaaatacaattcttttgttgtgtacctgatttagcaccataaaactaacaattggtatcaaagcagttccatgaatatatatatatatatatattaaatgttgtgtgagttttacacatttatatatatatatatatatgaatggatggttatattattgtgaatgtatgagaggcgatgaatcgctaattatatagtaaaattaggtgtagggttcgttattattttttcaagaaaataatgtaagctaatattgggacataagaatttttttatgtaattttattttatgaaattatttttatgtaaaaattttataatgtaatgtacatcgcatgtgagctcaatttctaaacttgaaactcgatcatgcacatcgaaatcacatgcatgcaagctcgataatattttacctgaccatgtatagccacccgagtggcttccactacaacaatagtcatcattagcggcgaaggggtccgacactaataattctttctgcggctattgactaatagcggtgggagtctgcctctaatgtcccgccactattagttgaccgctaatagttagtattagagttatttgcggcataacctccttaagtggtcaagtatttgcaactaacccccaattctaaaattttggaggtaaaacctcctaaac

SEQ ID NO: 128450 - DNA, 531 bp, Cannabis sativa
tttttttttaaaaaaataaacttacttagattaattttatttataaataatattaaatattttcattattatttatatatttatagattaaattatttttaagattattttttctattttacgtttctatatcttttaattttaaaaattacaaacaattttttaaaaactaattattttaagtaaatctataagtactttttctaaattttatttatccaaaagttaaaataattttttattttatttataaatattaatcaaataaaaatgaaaattaattaaatgaatataagtatatgtatgaaggtacaaggttatataagttatcataagtcatactaatatttgagcattctttaatttttttttaatgtttcaatctttattatttttttcttcattatttgaattttagaaaatataacatcactattttgacaaatttatttgtctatttaaacatttttattattattttaattttttataaatttagtttcaattttttaaatagttaaaattggggaa

SEQ ID NO: 128451 - DNA, 1147 bp, Cannabis sativa
gatccagaggaacaagcaccaggagccccagtgttgagaactgggaacagtggcttagcccgggaaggcgcctactctttagtagcttcaaccggaagagccctcctggcagcggcttaggccttgatgtaagctaactcttgttccatcctgaaaaggtactttttataccggtcttctgcaaaggcgataatgtccgggctgcgaatgttgggacaaaggacctaggataaattgaaatcatccactgattggctctctgtgattagcttagcccttctgtagtttgcagtagtgactaagtccccaacattcaagccgtccttgtcgtacgtggagaagacgttggcatgctagaggaaaatctgggtgggggcggtgcgatgcatcggaggtaccctgacccactccgtgagcagttctgagcgttcaacgacttgaaaactagaagaaaagaaaaccggtgacggtactccttgacattcttttgaaaaataaaaggaaccgtaccctcattagtaggatgggcccggagtgtgaaaaaatcgtctttaagtctatctcccttcttggggacagacacaagttcatgaaaatataaaattttggtcgggcttggcgaagcccagcctctggctacataaaaaataaacaagcctgaaagcaggtggtacgcttggggaatgagttgataaggcgcaaggccaacaaaaactagaaagttgatgaagtaatcctgaagtggtagcatgcccccggacataaggtgagtttggctccaagccccaaagccaccatagttataattgggcgtttcctcatctcggggcaggccattaaagactccagaggcgaaaggcttgatcccggccatagttacgatcttttccaactggtgggcacaggtcaaggtcgagtgtagctcgtccacctcccaaccgttggatcgacacgtgtacttctcttggacgacgggtcccttcatcacctcttccaaggtggccaaggaagcggctcctttgtaggaggatttagctccggatgtagagacagacatctcttgaaggtagtgagattctaaaaaaggaaaatccagcagttagccctcaaaccaaaccctaatgtgaaaagagggaatgggggtccc

SEQ ID NO: 128452 - DNA, 3824 bp, Cannabis sativa
tccaaggagcttcgaagacatcttgatgattacaacaagattattcttgatctgaataatcttggagtaaagattgaagaagaggaccaagcaattatcatacttagttcattgccaaaaatgtataaacactttgtaaacaccatcttgtatgggaaggacaacttgacaatgacagaagtcaaggttgcattgtgttcaaaagaaatttagaggaaggatgatcaagctaaaaatagtggtgatagcctgctcattgcaaagggaagatttcaaaagaaagactacaagggacacaagaattcctacagtaataacaaagacaagaatgacaagttcaaatcaaaagctacagtaggtaaacactgttattactgtaagaaagagggacattttcgtgatgattgtttagctcttaaggcaaaactgaaaagagagaaaaatcgtggaaagaatggagaagctgacatagcagatggctatgaatcagctgaagttcttgttgtgtctaattgcacatcagatggggcctagatcttagattcaagatgctctttccacatgacacccaacaaagagctatttagttctttttcagatgatcatggaggtactgttttacttggtaataacagagcttgtgaagtgaaggggattggctcagtagaaatgcagatgcatgatggtgtttccagggttgtgcaacatttgagatatgtgccagaattgaagagacaactattatccattggaatgtttgacaagaatggatgcagtcaagattgaagatggaatgctctaaatttttggaggttcaaaagttgtgattaaagggctcttgaacaatggactctattaccttgatggtaaaatagtggttggaaatgcatcacaagcagtgagtcaaagttctgaggtgagtacaaagttgtggcacttaaggttaggacatgttagtcaaaggggtttggatgagctcaacagacaaggtatattcaagggtggcttgaagagaaaacttgaattttgtgaagaatgtgttcttggtaagagttgcaaggttaagtttggaaaaggggaacatcacacaactgagaaactggcatatgttcactcagatttatggggtccttctaaggtggaaataattggaggggcaagttacttcataagcatcatagatgactatagtagaaaggtgtgggtctatctactcaaaagcaaagatcaagcatttgaaacctttgtcaattggaggacattacttgagaaccaaactggcaagaaattgaaggtgctaagaacagataatggcctagaatattcctcaaatttgttcaaagatttctgtgcctgagaagggataataagacacaaaaaagtgatcaaaaccccacaataaaatggcttggctgagaggatgaatacgacactacttgaaagagtgacgtgtttgctacttgatgcttgtttagaaagaaaattctggggtgaagcactcaaaactatttgctatcttgttaacagatgtccatcagttacaaacaagttcaaaactccacatgaaatgtggacatggcatgttcccaagattgatcatctcagagcctttggttgcactgcctatgcacgcataaaataggataagctgtaaccaagagctttgaaatgcatgttccttggttatcctgatggggttaaaggctataaattatggtgtttggaacctggtttcaagagatgcatcataagtagagatgttgtttttaaggaggatgaaatggcaatgaaaaccaaagctctcaatgatatacaacctgctataccagttcaaagtctacaacttgaggtggaccaacctgacactcaaattgtagaaaaaaattctgaaaccagtgcaaaaacggatacacatgaaggtgcaactgatttaagcacctatcaacttgctagagacagaatgagaagagaaaccagaccaccgagcaagtttggatatgctaattcatcgcatatgcattgatcattgcagaggaattagaatcttcaaaaccaactagctaccttgaggctactacaggcagaaataggttgaaatggttgaaagttattgataaagagatgacttcactttagaagaataaaacatggataatggtcaagaaacctgaaggaaagaaattggtaggctgcaaatggatttttaaagagaaggaaggcatccttggtgttgaaccaatcaagttcaaggcaagactagtagcaaaagggttcactcagcaggaaggagtggatttcaatgagaatttttctccagttgtcaagcaaacttcaattagggtcatgatggaaaaagctactaaagaagaactgcatattgagcaaatggatgtaaggactgctttcttacatgggaaccttgatgaggaaatctacatgcaacttccagaagggtatgaaagcaaggatcttaatcatgtttatttacttaagaaatctctctatggtttaaaacaagcacctaggcaatggaatttaagatttgatgaatacatgaagaaaatagggtatatgaaaagcagctatgatccatgcatctatcataatgatcaaatttacctattgctatatgttgatgatattctgatatttggtaaagaaaaattagagataaacaagcttaaattgtaactcaatcaagagtttgaaatgaaagatcttggtaatgcaaagaaaatacatggaattgacattcaaagaccctcatcaaatgttataattctgtctcaaaaggactacctccagaaagtgttaaataagttaggaatggacagctccaaaatagtctcaacacctcttgctcagcatttcctaggcaccaacaacagatgcagagaaagagaaaatgagtaaaattccctatgctagctgtgtagggagtttgatgtactcaatggtttgtacaaggcctgatttagctcatgccatgagcatgacaagcaggtttgttgctaatccaagaaatgttcactggactgctttgaaatgggtgatgaggtatataaaaggtacactgaacactggtttaacctatgatgggactagcaaattcaaggaattggtgactggttatgttgattcagattatgtaggttgtttagacactagaaagtcattaacagggtttgtattcactgtctatgggggctgtgttagttggaaatctaacctacaaaaggttgttgcactatcttctacagaggcagaatacatggctgcaatagaggccattaaagaagcaatttggctcaagggattgacatgtgagctcaacattaactcagaggatgtaactgtgcactatgataatcaaagtgcactacatctcatgaaaaatcccatgtttcatgagaggactaaacatattgacatcaagatgcactttattagagatgtgatttaatccaaaattgtctctgtaaggaagatcaatactcatgataaccttgctgatgcttatacaaagagtttgactaaagacaagtttagactttgtcttgacttgctcaacatcaactcaaactagagtctcatattgagattcatattcattggacattggattcagttctattggttactattatggcttgaattaccatgttgttaaagtgtactaaaccaggtggatattgtggggtttagaacacttaaacaactaaccaaatgtttggatagttggtagttatttcggttagtgtgtgtcctaactaacctactgttataaatagaaactttgcaacaaacagagagagagagagaga

SEQ ID NO: 128453 - DNA, 503 bp, Cannabis sativa
ggatccattcttctattgatgttagatatgtttattacgaaataatgacagatatcatatagctatcgaataattttaaatagtctttttttaatatatatattttaaatttaattaaagcatattatatatatctataaatggatgtccactaaaaacaaaaaaaagacttgtttttgtcttgatatgtatatatgttatttgtggttggagtgatatagagtatagtatatgacccaagttacttgttttcttattttgtggtgttaaatgttgattgagtgaatttacaacctaatgttatagtattaaattattttttatttttgaataaaatttccaaatgcttctttggtcataatacaagtgtcataatttcttaaaactaagtaattttgttttataatttaagtagagactcatttattttgtattttacatagaagaattcatatatcatttatatttttcttttattatttttttatcactttcaaaaaatt

SEQ ID NO: 128454 - DNA, 2091 bp, Cannabis sativa
cagtacaaccattggaagctagaatttcaattgacaacaagtttattattagatcaggtacaaatctcacatttatatttgttctagcaacaccatcatgcatcctgatgacaacagaaccaatgccttgcaccttacaggccttgttgtttcccaacagaaatgattcccctgaaatttcttcaaagctactgaaaagatctttatttggacacatgtggaaggagcatccaaaatctaatattcaatctccattggacacattatttgtaactaccagtacatcacaagattcatatccatttgacactaaaccaacttctccaacatcaggttttccttctttattagctttattcttgagaagataacactctgatttataatgcccttcccttttacagtaattgcagaatttacctcgtttgaatttggattttcctctgtgatgattgttgttcttgtggccatgagagttcttgaagttgtaggaatcttttttgtcaaatcttcctcgagccaggagtccttctccactagtttctcctttttcttctaatttcttttgaatctccttcgagttgagagccattttaacttttgccatggttagagtatccttcccatacaatatagtatcaacaaaatggtcataagatttagggagagagctgagaagaattataccttgatcttcctcatcaatcttcacaccaatattggacatttcaagaatgattctgttgactcatccaggcactttctaagctcctttgtctcttccattctaagggtgtatagctttttcttgagatacagtttatcggccaaagatttcttgaggtagatcaatgcaaatttattccaaagtgcagctgcagtctcctcatgtgagacttctgtcaaaacttcatctccaaggcttaagatgattgcactatgtgctttgctcactgtgtccttcttgattttctcatctttgatgttgttcaagtcatctgcattcaaagctttagagatccatggatgagcaagatcgtgccttcattttgattctccacaaactaaaatcatttttactattgaacttgtccgactcgaatcttgcaaatgatcacatggctgcagttcttgatcttcaaaaataggttcttgatgtctttgatctccctcagctctgataccacttgtagtgaatgaataactctcaagaacacaatacaacaatataaaagaaccaacatcacaaacacagtttgatcacaaactgtgatgataaaaccagcaacttaatgaacaaaacaaagagaaaaataacaccaagagtagataaacgtagaccttttattgatgttgaaatcagtacaagagtgtattgaatacaatggagaatggatgagaagaaattataaagaacctcaccaatggggaaccaagatcaaataaacgtggttcccttatacatccttcctttttacggaagcggatcctctgtctagagaatgtgtctaattctctgtctaacatatagtattgggacatgtgtcaatataattaatgtgctataaaacattatttgatgaaaataaatttaaataactttgaaaggataaaaaaagtctgaattaaaagaaaaaaaaaacaatccatcaaaatatttatgtaaacaaaacaattcataacatatatataaatattgctataaaaaaaaaatatattatatatatacgaaaggatgcaatataactattttactaataaatggacatgaaaattaattaaaataatgaattattttaaaaaataaaataatacctattttttagattttttttttgaatttttttgaattatatatgatttaaaataatccatcaccatttagattcattttgttcatttcaatattttttaaaagaaaaaaataaaaacaaaaccatttagattactagtgacgcattgtttttccattaaagaaaataattttgcagtattcttctttttttccctcagaaaagtctaggttaaaaataagagttttttttttaaaaaaaaaaaaaaatcaaaataaaaggcagcattattcatcta

SEQ ID NO: 128455 - DNA, 936 bp, Cannabis sativa
caggcaaaaaagttatgctgaccctaagtgtaaaggcatataatttcacataggagaccatgtcttcctaagggtcttatcattgaagggtgtaaagcactttaggaagaggggcatgttaagccctaggttcatagggccattcgagatacttgagaaggtcaggcagggagcgtattggctagccttaccacctgcattatcggttgtgcataatgtatttcatacctctatcttgaggaaatatgtgtaagacccgactcatgtcttgagttacaaagccctagaactccaattagatttctcctatgaggaacaaccgattcagatccttgataggaaggaaaaggttctctgaaataagatcatagggttggtcaagatactcaggaggaacattaaggtggaggaagccacctgggagttagagtccgacatgagggcttaatatccttagttgttcaagttaaattttaaggacaaaatccttttaactaggataattgtaatgaccacgtacttagaatatagatttgagagaaaattagcattaattatttatattataggattatatgtgattattttattgcgggccctactttaaataataggaaataggataataatttctcaatttgagagattttattaaactctaagtgtattatttatggtatatgtgaaaactaatatttttatgattttcgctgggtattgatagaaactcaacgtgtaatgaccgcatgttaaattatggattagtaaaggcaatgagcgttaattaatagtattttataattatatatgattttacatttgttgtggggcccatttttaaaaatgtgcattagagttataatttctcaattctgaagattttattaaactctaagcgtattatttagcttatatgtgaaatatgttaattttgta

SEQ ID NO: 128456 - DNA, 1545 bp, Cannabis sativa
ttttcaaaaaacaattttttgtttttgaaaacaaaaaacagttttttaattatgatgccaaacatgcacttatattttttatttttaaaatattgtataatatttaccaccccaagtgttatcctatatatatatagttaatttaaggtgtacttacactcttcaattcgagaattgaatatgtatcgtggaacttaaaaaaatcgttcaatttaaatagtaaatttaaacaacattaattttatgtgtaaattgtcattacttactattttatcaaacaacaaataataatttatatataattaccattttaattatatccaaaacgtaatcatataattacagtaccgaccttttaattacacttacttactttttaagcaaaacctaacgatgtgctcaaatatttttcaacaaaacctatacatttcattgttcataatattccaactacttcaatttttttattttgaaatagataactactcaattgactatatatatatatatatatatatatatacattttccatcaaaaaactgactatatacatattctagatgatttttacatagcacgaaaaaatgattattgtgtactgtaacttactaattataaaaaaatgaaacaaagtttcctctcacaagtaaaactatacagctccttgtttttgactttgaatttttaataggataaagattaatttgaaaggatttcattctcttcttattaattatttacaaaaaaaaaaaataaattaaattaaatattataagtttataaaatttagaaccattataaaattgtaaaacaaaaatattaaaaatattttattaaacgtatgaattatattctcagaaaaaactatgacatcatcacactgaataaacaaacaatccagaacaatacatacacaaaataataatttatccatccaatcacaatatatttatcacagaacctacttcaatacggatgaatatctaagttctaatttttttatattatacataaacatattaattaatagtagtatacaattttaaatactactaatatggaaaaaaattacaaatttttaaaataatgcaagaaaaaacaaaaactttggtgggcactaacgagacagtaatacatgaactaattcacacaaaaaaaaaatcaaattaaaaagataaacatacatatctttatatattaaaagtacttatctaaagacatttcttagtttaacagaatatactttaaaaataaaagaatattctgttaaatttaacgataggtttaatctcccgttaactttcaaaaatatataaataattaaaccaaaaaattaaacaattttttaaaccaaataattaaatttaaaaaattaaacaatctttttttaaattaaaaaaaatcatcctagctacatatctctaacataacaaaccgtatagctccaatgtttgatatttttttattagttaaacgttaacaaataaataaaaaattaacaaatattaatattgttacacgattagcttaacagattaggctta

SEQ ID NO: 128457 - DNA, 511 bp, Cannabis sativa
tgaatactcgcacttgttcttcacgtaaatttcttcttgttactaataatatcatataatctggtgttgcaaaattcactcgacaacataaaactattggaggttttgccacaattaacccttagtttaattgaatataatgttaatataagctaccaatgggtgaaggagggatggaaaaagggagaaatcatgggttcgaactcaagaccattaaattattaagctattaaagagattgcaataccattatgctatactcaaaaaaatagaatataatgttaatataatagtaatataatataataagaaattaagaatggtaatgagaattgattacgacttttagtttattgttagaataaatgttaaaatacgtgataaattaataaaattattctctctttaatttttattcgggtaaatactattttagaccctgtgttttgcaaaagttaacaatttgaccctctgttttgttaaatgacaaaatggactctgtattttctaa

SEQ ID NO: 128458 - DNA, 3095 bp, Cannabis sativa
gttgacaagttctaatcttcatgttgttatgatcgtcgactatggttatgtgaattgcaacaaaaatattaataatgataatatacaaaaatctgaaaaattgtgtaggcacatagatcaattatgcaataacattttctcaaaagaacaaaaaaaaaaaatgtatatttatgaaaaagacaaacataggacacgacccgccaaaataggaagggaaacgtcctttctatgacttataatatccatgttggacttgagctatccaagttaatggaagaattcttgctcttgcccttttctccggtgttacttgctccaagaaacttcttgtctttcttttgaagaacttaataatgaagctaaagaagtaggtagataataaacatttcgactattttaacgttgtttcctgttgttggtgcaaaatttgctaaggaaaggatttgagaattaatggaaaacttcacatcaagattttggtagagtttatatgggtagacaaaaattgtgtttttaaaaataagaatagaaaataattttttgtcattttaaaaataatttaatagtgtttggtataagttttttaaaattatttttaatttttttcttactaaaaaattaatatattttaatattataccataatatgaatccatttaagtttgagttatgttagatagaaaaaaattatttttgaaaattgaaaataatattttgatattttctgttttttaatcttttaaaattgtttttaaaaaattttgtcaaataatttttattactttttaaaaattattttttttcaaaaaaattaaaaataatttttaatttatgaaatcaaacaacgccttaaagtttattataacattggattattcaaatttttggtaaagtaccaatcaactaatggagatcatctatctactgagataattgataaaattaaagtttagatattctcagttaagaatagttgggaaagttattttgatccaaaacaacataaatttagttagagatatagtttttttttttttatatatatttcacttaatgaaaggagtaaaatattttgataagaaaaaaaaaattaaggtctaagtttattggtctttttaaaatttttgagaggataagaataagtgttgtacaggttggttataccttcaatgctagtagttgtacatattttatgttttaatgattcagaaatatgtgttaattaaattcgtctcatatttacagaattttggaatttcagccaaacttttcatatgaagaacaatcagttgaaatgtttgatagaaaagagtaagtcttgaaaaggaagatactattagaaaagagtaagtcttgaaaaggaaatgaaaatataatggagaaacaataacgtcgaagaggcgacttgagagttggaatcggatgtgaaacaaaaatatcataaattgttgtgttaaattttgggacaaaatatttataaggagtgaataattataatattttaaaatttaaaaatgaattagtaattttaatgaactcaattaagaataaatgtaaaattatttgagaatatttaaaattaaaattttatttgtgtgtttgggatatttttaaaattttaacctcaaaggataaaatgataattttattttgtgcgaatggattacattattatgtagtataaatttcgataagttagtacagtatagttataatttaatatttttgtatagttataatttaatatttttgtttgcactggattcggaatccaaaatttgtaagtaatatgattagggtaataatattaaacatctaatattatatgaatttgtgtgtgtggaatgagaattgtccttatgtgtgaaatatgatgaatttttgtcctaaggcgaaaatggttatttgacaaaaaaaaaaaaagttaataatttgaactatacttgatatttctaaaaaataaaaataaaaattttatttttggctttaaaaccctcttccaccaacctcctctatctgttattccctctttaaaattattgtaatcttgagaatgaagtgtagtaatttgaaaagaattttggttgtgggttgtatttagctttagaagaatcatttgaggtagttttaatctcctttttattaatttaatttcgaaatttttaactttgttttggagctagcatattgtgttatgttgttcttgacttggatgtaaagtatttttgttatggatattaagttagtgatgttgtgttgcttgagttcagcaaaatctaaattttgggtcattttgtagttgtgttttttagcatgaattttgaacatttaagctgtgttggttgtgtgttggttgctttgaaaatgatgaatattgaacataaatttatatatagttagattccaagccttcattatgtgagctttgggaatttttgagcttgaatgtgtgaattagctatgtgatatttgttttcttttgaactttccaacactctaaattggtattagtaaccaataggatattatgtttgaagtttggtatgaatttgtgcatgtttggagctaaaatttaggttttttctcggttgtcaagtcttatcactgcgaccagacttaaggtggatgcggagaggttttacccaaaacaagggatagcctttgccaaggttggttcgaaattctcatcatacattcgaactcaggtaatatagaaaactaagaacatagagtatagtgcaatggcacatttttatgtgttgacctcagatttggccaaccgacaagggagtcgaatttattattgatgcttgccacgtgttacacaattagaacaataaagtataaatagacacaggattttatagaagttcgacccctttagttaacggctaatgacctactctccttttagttgtattgatacttagggataatactactaatatcactatagtaatgggatttgaaatagctctcttaggattataatgtgaaaaccagagtttgcaaatctcaagtgagaatagagcactggacgtgtgagagagagatgagttattagacttagagagagatgagttatcaaacttaga

SEQ ID NO: 128459 - DNA, 1905 bp, Cannabis sativa
agagagagagagagagaattttctaatttctttctcaatccttcgagcaggctttttttaggtccgtgaagtcagcacattcttcatgttctgtttggctttgggaccagcacaagatttgctagccaaataaaatatagagcttcacagaggaactctatataacttaacttctcgactttcgccttccccctaattggatccaacaatcttatttttttggtaaactggggtcatattttcatccatgtttaaggcgtagtagaagacgtttaggctaattccactcatgtctgcatggctccacgctggccagtatgtcctggatctttttaactgtggatacaatatgctccttcaccgctggagacaaattacgttccactttgataactttggtgggttctgtttcactgatgttgatttgctcaaaatcctctacaggttcaatcatcctttctatcccaactcagggatctaatttatcgtcctctcaaattagcccctgctcgggctggacaggtgctttgggagctacttcaacttcttccctaaccataaagactgagtgttgtaggtaatccacatctacgaacatacaatgcttaaaagggaaggcatttatacttttgactataccccattcaaagaaactgggagctggatcctccccattggcagtagagaatctgcataaaagccttgaatagggcatggcattagatcagcttttaattaaccaaattgcttgaaagacaaacttgaacagtatgttgattgagcttccattgtctacaaaaactctagacactcttttgttggcaatatgggcttcaatcaccagtgaatcattgtatgggaagtgtacgtgctagctaggcgtcctcttctgtgaagatcatgggaaaattgatcatccgaggatgttgtgctaaggattgcactagggcacacacttcaccctcatgatctaactcgttcaaatatctcttctaggcattgcaagtactttcgacaatgtgcggacctctatattgccacatagccatccacgggtggcagtaacaaccctggtgggtatgggttctcaggtctaggagcaaggacagtcattgtaacctatgcattaggtacccctaaggggtctgaatggttggggcttgcatcatcagaacgggtagagctggaggttgtattctaagagcttaagggaggcccttcgtacggaggatttacagctcttaactatccgggaataggagctatttgtgcgcaataccttgtccgagatatattatggagatccagacccaatgactaagatggccatcttaggccaaagtttttatcttgtcttttaaataatcgcactcattggtagtgttgccaatatcactgtggtacttgcacctcttattttagtctcttttctctcctttaaacatctgaggtgattttttgtaatatatcatattgtaggtagccttatagacattctcttaagtgtcgattaggctagtgtattgaatatatttttgttcatactaacttcttcctttcttcaaagcctcactccgactttgacttttcccacatctcttgctctacaaatagctcacattcaattatagggcttccatttttgattgtctaggagtagcactacatccagtttgtaccgtcccatagccagaaaaattagtttatgtaggcgcataccctaaggcaatgggtccgtagactgtaagagttgtgtactggctgccaaccactggcactgctggagctaagaattgtggggtaaaggttgtgtgactagatggagtttgtactggagaaactccaaaagcttaaatataagtgtcttctaaattaataattccttgggccatggacatgaattta

SEQ ID NO: 128460 - DNA, 649 bp, Cannabis sativa
  modified_base (553)..(560): a, c, t, g, unknown or other
gtctcaaatttgcaactggttgaagagtagcagctggccgactagttatctcagctggcagaagtggctctgtttgaacaacgaggataagaagcaacgaattcatgtagcgatcttggcagccatgatttatagcttatggagcaatagaaacaattgcatcttcaacaattactctaatactgctgtaaagattacaaaagacatcaaaaatataatgtattttagacttcaaatagcaaagaaaggtagtttaaaagactatgaaagaagatacataaagtgtaatgtaaagctggttttttatttgctttggctggtttgatataatttgtttgtgattaatgaagattgttccttcttgataaaaaaaaaagtattataataacttaaatgaaaatggttataaacataaaaggaaacaaaaagtagcacaaatagaaagttttgttcctgcattgtggcatttaaattaaaaacccagtcactaggcccaatcccaaagagtgtgcatgctagggatttatagagctaggggtgaaaatcggtcggnnnnnnnnggtttttaaaattttataaccgaccggtcggttacggtttttattttacgaaaactgtaactgaacgtttagaaattataaccgtataa

SEQ ID NO: 128461 - DNA, 531 bp, Cannabis sativa
aataattcaaaaagaagaacttatttctaagaaagaattaaataaataatatttagagagagagtttatcggatcaccattcagcgatggaagcgggttaaagagaagaagtttgtattgcatgcatgaaagggagtattcagtcctcacgccatttatagttaccaacgatccaacacttgaaaacaaaatttcacattatcataatcacacctctcactttcacgtcccctttttccttagattagatatttatttatagttaaattatatatcatgtattatttattcatttttagatttttttgtttttgttttttttttaatgacattgagatttttattttttttttgttacgtgtattttgggttacctacctaccttaatgttatttaaagaaaaacatttgaatctgattttgaatttaactcgattaattaatggttattctttgtgataactgaatttttgtggatatatttaattttattaatcataagtaacaaaattataagagtttactttttatg

SEQ ID NO: 128462 - DNA, 776 bp, Cannabis sativa
cagcaaaagttaatcatggggccactttggatcaaatgaaggatactgaaggttattggaaacaagatataatagatcaaaccttccacccggatgatgttccccttattctaggtatggccccttgctttaataacgctaatgatgatttagtttggcactacaccctgaacggtatatacacggtgagtagttgttataaagtggtagccttcggtgagataaaagtagtcccgtcctcggatgagagcactaggaaatggtggactgagatttagaagttggaagtccctcctaaagttcgaaattttgtttggcgtatttgtaatggctggctaccggttaacatggttcttaggtctcggggcatgaagatagaactgatgtgttgctggtgtggggctaaggaaaaaacaatcgaacacgggctatggttttgcccgtcagttactgatatatggcagcattttttgatgtggaaagtcatcaaaaggtggagaggtgaaacaaaggacatgctcatgactataaagaaacaaacaactcaagcagattttttaatgttcatcattctctcttggctcatttggaataggaggaacaaaaaaagactcaaccttcatcttcttcctaacaattttcggtgcaggtgggctaaattggagatggatcttatgcttcataacaattctaaaagggacaatcagctgaagctgactcccacatcagatggtgggtgggaacctcctcaccccgggacatattgcattaacagt

SEQ ID NO: 128463 - DNA, 1219 bp, Cannabis sativa
aaatacttctatttatttattgatatttaaagaataaagattacattgaaatggagttgtatttagggcataaaacccaacatcctcctcctctccacacaaagggcaagtctcgcatcaatatggattcttctagccagggtcttttggaccggtagagcatttgagaggatactccaccaatgtattttgtgcctctcaagaactttagaattccaaagtttgttccacaatgtcggtgccaccacaaagttaggggctctctcatatgcctgaataagataagcagacttggtggtgaatttaccgcatccctctttagtccaaatccacttatctctcccctatccgctaggtctacctccttttcggatgttcgtaattgtgtcaaagtcaaacagagaccttagcaaggagatgtcccagtccccatcattcaacaacagctccgaaaccttctctaccctcccaggacatgagcaaatgggtttcgggtagaaatcattcccatgtaccacccaaggatctaacaaaacgttcgtgtcttccccatttgagataagtttacaagcgccttttttgaggatagctttagtcttgaccacatttttccaaaaccaagagtctgaattattataggtagcatccaagaaaggcttacttttttaggtatttggctctcaacaccctgcagtagagcgactgatcctcagtaagaagggcccatcgccatttttgcaaaagagtctggtttaattctggagtctttaggaatccaagaccacctcgagctttaggaaggaacagttggtcccacgactttaggtaaagccacgttaccgtgctcacagccccaccaaaaatccctaaccataccgtcaatttttgaagcaagtttcttagagagcttcatagtttgcattgtgtagactggcagagccggacccacagacttgataagcgtggcccgaccagctttagacagcaattttaacttctatccatgtaacttagaaacaaagctgtctagaataaagttaaagtctacatccttatggttagatcttgacagcgcaacacctaagtaattgatgttcgtggtagttaagttgagtcccaactccaccatgataccccatttcatcccgtcagtggtattattgctaaagaatatagaggttttgggcttatttgttgggttttatgccctaaataaaac

SEQ ID NO: 128464 - DNA, 981 bp, Cannabis sativa
tgaacacaaggtccaaaataatatttccccatatatacatattcatatacttgctgtatacacttatattttttacccatatttgtttatataaacttttcattcaatcaatgattttattgcatgtaatagtttagaatatcatattcaatatatttcacatagttttgagcaatataatcattatatgtgattatatatatgcattgattattgttagtaatatacgaaacttttagctttaatttgtttggtgtttatttcgaatctcttatgcattattatattcatataatgctataaatcgatttaagcatggattttttcaaaaaaaaaaatattgaaatttgaaaaaaaaaataaaattatgtgactactcacaagtgaaaatataattttaaataattaggaagtatccacaataattttaattatataaaaattatgtatttataaaaattcaccttaattgagataactgtaattaattatgtaggtataataacattatcccacacaaattttattatatttatataattaattaagataatatgttaaattaatcttcttaatttacccacatgagttaagctaattaatttaattgtattatcacaaatttaatcaagatagataacaaactttcatttctcataaactaaatgtttgattaaatttatcataaaatttatctgattcattaaagttaaaatttagccgacacacaatttttagattgagtattttcatcttcagcatgtttatactttggtgtctagtaaatcatataattttaaataattaaggagtagctacaaccagtgacggacccaaaatataattttagggtggactaactaaaatttatactaaaaattttaagtaataatttttaaatacaatatatattatatttttttacttaaatcttagataaagatattatatagattagaataaattttagcatctaaataa

SEQ ID NO: 128465 - DNA, 591 bp, Cannabis sativa
  modified_base (34)..(63): a, c, t, g, unknown or other
  modified_base (565)..(566): a, c, t, g, unknown or other
acaccccattagtagtggaagggctatcatatcnnnnnnnnnnnnnnnnnnnnnnnnnnnnnnagtctttccttaaaccttagcgaaaggatttaaggaaaactgtcttttagtttgtcccccttttcaggatggatagaagttcataaaaatacaataccttagccggactgggcggagcccagttgctggtaacgtaaaaaatgtacaagcctgagagtaggcaataagcttgggggatgagctgataaggcgcaagaccaacaaaaactaaaaaatctataaaataatcttgaagcggtagcatggctctggacatcaaataggtttgactccacgccccgaagtcgccatagttatggttgggcgtttcttcgtctctcgggaggcgatgaaaaaccccggtcgtggaaggcttgatctcagtaacaatgatgatcttctccagttggtgggcacatgtcggtcgagtgcagctcatccgcctcctagccattggactggcaggtgtattttgttgggttttgtgccctaaataaaaccctttacaatctgattagttatnnatataagaaatttgaagtgatttat

SEQ ID NO: 128466 - DNA, 985 bp, Cannabis sativa
aatatctctatatttagtttgtaaacaaattaatttttagtagttattaacttattatcttcacgttattattatttaacagcttaaggttccaacgcaacaaatgtggtttctaaaaatatatatatattttaaattataaaatatgtgaatttaatattaattgtatcaatagggattataagttaaattttactataaagtattgttattaaacacttctaaacatgtccctttgtgaatgactaagaatacttcttaaaagttattacattaaattatatgagactcaataattatttgactcaatagcgacatatatagaaaagtattagccactgctattttttagcatttctttcattataacacatcataaaaatctcattttcttatattaacatccaaatttcaataatattttattaaaataaatatatatctaaaagaaattgtcataattttccaattaattttaatttctgtatataaatttaaaatagtacctgagagtgctaattttggtggcatcttcataagctctcaagaactcataacccatgacacttccttcaccctcaagacaaccaagttcgaacccgaaagccactttgaacacattatcaaatccaaatctctccaaaacatgttcaaagtcgaatacttcacccgttttggaaagtgtttccaaaaggggaaccaacttggtttcgagctcaagagctacgttgtccatcatgaaatttctataagacttggtgttgagcgcatggttggcaacctttcggttgaccttccagacttctccgtcagaggtaaacagtcctccgccgaagaagtccaagaagtaggtgttgaaaacatcccctttcgggtagttttcaaagttttccttcaatatgtgctccacacaagaagggttggccgtcatgacaccctgaagtcctccaggaaggcggaggacaacagtgttggtgggcgagct

SEQ ID NO: 128467 - DNA, 1329 bp, Cannabis sativa
  modified_base (435)..(440): a, c, t, g, unknown or other
aaaaaaaaaaaactagggcaagcttcttcaaaagtgtctcaaactcaaattatgtatcaagtaggataatttcatattcatatgtacaaaaaaaaaaaaaattataaaaatattgctatatagaattttaaatatttttacacagtttttaagatttcatttaccgaaaatacaagttttttaatttatttttatgttatacttttaatatttattatatatattatttttttaatgttattttcatgttatttatatatgttttttctgttatttttataatatgaaagtatgaagaggaatgctaccgtcaacttcctattataactttttagttaaactctacactcaaaaacacatgtcgaaataattttttttttaatttattttcacagtggtgttcgttatgcttacaatattatccctgtaaatttnnnnnnaatttcgaatagtttacagtgtcgaaaatacatttgaagttttgaacacacgtggtaaactggaagattaggaactctgttttcgacactgtaaactattcagaatttttcaaaaatttataaaaatgatattataactataacgaatattattatataaaaaatttgaaaaaaaatattttaacatatgatttgaggttgtaattaacactcctcaagtataagtttttactaattaattttttttatataaggtattaaaaattgaaaattaatagcattgttattggagctattttggaatatgcatactctcgtaattatggcgataagaatgttggcacatgtacgtattaatgataaaacctaagaaaattacacaagtatgaagtatggcataggaatcatagatatttacacaagtatatatcatatattttattttattattatatgttgggcatttatatgcttcacatattccgtatgagcatctttaatttgatatattttagttactttataatatttaagatattatattgagttttataaaattttaaataatttataatattgacattggcttaaattttttttattttactcatgcataaaatagtcaatgctcttttttggtaagaaattagaattcgtattttttttctggccaagagtgccattcttttttgggcttaggtacagtattggtttggattgtattttgttactgcaatttgatttttgctactgcaattagtcttgtctctgtgacataattttatagtgttttagtcttgtttctataatatagttttgagtgttttacagtagaacctttatttaagaatactctattaaagaataatttctaatttgttataaaaaa

SEQ ID NO: 128468 - DNA, 610 bp, Cannabis sativa
agagagagagagagagaaaacccactaaccaggctccagtagtggttgcatgagagccaagaatgacgaggttttcagctgggccaaaggaacatgatgagtaacaatatttatgcccgttttaacctgaaacgatgccgtttcacttggtgcagcagtgcacaaatcgaatgtttctattatttattgattattttaaattactttatattttggaatataattctaataatgggtagtttggggtgggccatgaatgggtatataccacaaagatatattttacaattaacaattaaatacaaaatgtttataatatgggatattgacggtaaaattatattaattttagaatgggtaaatatcattttagatcaggtaaaggtattattggtgtgttttttactttcggtaaaaaagtcacattggtgaatgtgctttatgtacccgacatgtataaaaacttaattagtggtgacttatttgaaaaactctgtattaaggccgtttataagtctggtaagctcatacttattaagtttaatgtatttttgggcaaggagtattcttgtgagggattggtgaaattgtgcaccaatgatgtaacttt

SEQ ID NO: 128469 - DNA, 800 bp, Cannabis sativa
  modified_base (585)..(585): a, c, t, g, unknown or other
gattcatgatctaattacactgaatggattcaattacaacgaactaatccaatccagttcaattacaaaaaattagacatccaattacagtgaagggcgttcacggtgcgggcggtgtgatttttacctaatttttcaaaccaaaccgcacatctaatttgcataattttccaaaccgcaactgcactgcaaaatttcaaaaccataaaaaccacttaatattagtttggataattaaaaaattttatacaacaattatacgtgattaaaaaatttaattttgtgacaattaaaaatgaaaatcaataaacttatttatattatataggacaacataaaaaatggttccgcaatatgagattatctctaaaacacttatcatcaaattttcttcacaaaatgacaaagcttcataaattaaaaaaaaaaatcatataaaataccacttaatttatttattgtcgtcctttacataaatatatacatagatagatagataggttagttaaattttgatttatatattgaggttcgcaaaataaaatataattaatggtacactgagtctaattgtaatcaaatatnttttaccttaactttagatatagagtttaggcatatttacgtgatttataacttaattgtgcagctcgttcctaatcaacgagtttattaaaaatcgtgtttaattaaaattttatataactaattgaaaatacaaaaataacatacttatgttataccggcatcccgttacaaaatgtttacataagttttacagtgcataatacaaaagtttg

SEQ ID NO: 128470 - DNA, 1327 bp, Cannabis sativa
aatcatatccctatatatataagtaatacaaatgtatcttgatcaataatataatataacttaaaaataaaattatagttttgaaagtaactaattcctatataaacaacaatatgatattaaaagtaattaattggtaggtaacaaaaatgtaaatgagataatactatctcaaagtaaaacttgttaaaaagaaatcaattagtatcgtagtaccttattttttaataacatctagtaacttttaaatatagaatttatcttttttggataaattagtcacaatataaaatacttttattatggtacattttaaattttgtttgagtttaaaaattttgttatttttttgaacaatttataaaagaaacaaaataattaattttgatttcaaatatattctttggtgatgataagaaaaatatacgtttctcacatatcaagatgatcaacttgaggagtagattgcaataatattattttttattcaaaataattaacgatataattgctattttgtttttaaattataaataatagaaatagatatagatgcaaaagaaaataataaaaaaaataaattaaaaattttagtcaccataaaaaaaaaaaaatgagaatgatgaaaaaaaaaatgtgccactcaacactatcgatagaaagtgaatatcatatatttttttatatatgcggtacaagtaccatttattgtaccatttaaataattgatggtatatttgataattattttataattaagtatataattaaaaattcccagcactttaagtaggacacaccacttttgttatagcaacttaatttattgtctctcatatggagaaatgataattcaatttttttcttttattgcaacgtatattaatttatttttaattattcaaaaaaatttaaaaacatgtgagatatatgttataattataatatataattttataaaataaattaaaataaaatttctctaggtaccgaaaaaaaatcttacaataataatgcccctgcctaaaaaaattctctagatatattatatacttgtttgtctcgtgtgtaagtgtgatcatagacatatatatagattatagtgggctttattaatatataaattaataaaaataaacagaaaataaaaaatgagtatccacgatcatcatcttatatggactttgatcgatattgtagttgtagacatgtgctcgattagtacatagatatataacatatttaattttattagggaaatttgattttctatgcttagaaaatcaaaaaatttgatttttaaaccaaaaatttaaaacctaaaaaa

SEQ ID NO: 128471 - DNA, 2793 bp, Cannabis sativa
atactaatcccaaggcctaacatggccactcctcaaatgagcagaatacgattctccgctaccccaggatataatcaaagcctcgccctggctcccgcatcatcacactttgggtcccctatgggaaatccctcgggaatgagtgtccaaaccccatcccaatctgcgcctgctgccagcctggcaggacctccttagagctcccgaagcaaaaggtcctcaaagggcagcacccggactgaggacaaacgacagcggaggggatacacccattaatacactcaatatatggagcttacggacatgcaggagcgtgtatactttgccaccaggaaaaatacacattatcggaaaacaccctcccctgtatagggatagcttccggagggatcccaacaaaaggtgtgaatatcataacaacattggccacagcaccaatgaatgcaagaacctgaaagacaaaattgagaacctaatctaattagatcatttgtatgaatggatcaagaactgattactccatctaaacccagctccagcaggaggccctttacctcagggaggaccagggggtatgcctagagaacaagtacctggtgtaccccccggaggagcactccctcaacaggcacctagattgccaccatggccaaatgggagagtggccatcatcttcggtgggcctcatatcgaaggaaccaccaaaaacgagctacagcgttacgctggggccataaaatacgatgaagtatgcaaagtcactcaactcccagcacaaaggccccggctcatggaccaacccatcactttcacaaaaggcgatgcaaaataggtgtgtttccctcaccacgatcctctagttatagagactcccatcgccaataaagttgtggcaagaatagtagtagataacagacaaaggactcacagacagggatctatcgcccagcggctcccaacttataggatttaacggaacaacgcttataccaatggggaaagtgcagcttcctgtcaccctgtgcccagacacccccataaagcacttttagatactgcaccttcatggtagtagattgcctgacagcgtacaataccatccttggccggccggccttggtcgtctttagagcaatcacctccatccgacacttatgccttgaattccttacccgagaagccaaagtgggaacggtgaagggaaaccaaggggaagcaaggcaatgctacaatgtcgcaatgcacttttcggtgttggtggtgcacaggggtgaggagccaagatggatggaacatgacgagttggatcaccgcgtgagatccgaaacaactgtagaacctatggaggacacggagggagtaagtgtgtgtgacctcaactccaccaaggttatccgtctaggaaaaaacctagagccggagtaaagaagtaagattatcgaaacattaaaggctgccacagatgttttcgtgtggtgccaagggattatgaccggcataagcccccatgtgatcacccatgtcttaaatgttaacccagacatgcctgcggtacaacaaaagcaacgtcctcttgatccggtaatagcagacgccttagagaaagaggtggataagctgttaaccaatggcctaatcctggatgtatactacccgaaatagctggctaatccggtgttggtacccaaaccaaatgggacgtggcgtgtttgtatagacttcactgatctcaacaaagtctacccgaaagattatttccctttgcctcgaattgatcaaatggtggacgccacctcaggattcaagctgctgtccttcatggacgccaacttcagatacaactagatcaagatgcatgtcgcgaatcaagaatgtactagcttcaggatcgacaagggggtatactgttacctggttatgccctttgaattaaaaaacgtcggtgcaacttatcaaagaatggctaaccgaatgtttaaaggcctccttggaagaaatatggaggtatacgtagacgacatgctagttaaatctaagacatgcatgggctatgcagacgacctcacaaaatgcttcgaagtggtccggaggtatgggatgaagcttaatccaaagaagtgtacctttggcgtcaaatgaggaaagtttctgggatttatcgtcagccaacgaggaatagaggcaaaccctaaaaaaatccaagccttactaagcattccatcccccaagaaacacaaagatgtgcaaagcttgattggaaaggttgccgccctaagccgattcatttcccggtcaactgacaagtgcatcctattcttcaatattttgaagaaatgtcaaaaattcgagtggactgaagaatgcgaggaggaattcaaaaaactaaaagagcacatggccaaaccaccggtactgtcaaaacaagttcatggagaggacttgttattatacttgcccgtctctgagaatgttgttagtgcgaccctggtccgagaagaggataaggtccagcatccagtgtactatgtcaacaagcgcatgataggagccgagacgcagtatcccttaatcgataaattagttttttttttcctccaaatggcttcaaggaaattgagaccctacttctaggcccatcccattaaggtacttacaaatcatccgcttcggcaagtcttgaagaagcctgaagcctcaggaagactccttaaatgggccatggaattgagccagtttgacttacactacctcccgcgcatttccctaaataaaactctttacaatctgattagt

SEQ ID NO: 128472 - DNA, 607 bp, Cannabis sativa
ccttgtagtccatggtgcatagatccagtaggatacttgggatccttgtagtccatggttcattgatcgttgccgagaagaccacgtgacttaaaattatattcatgcaacaaaaagtacttagcagctcacaacctatggggaagattcacccagatctcgtgcctcctttggacctcgggtgttgggattggtttctttgcagtagctaaaaatgtggaagaaagaatagaattagcataagtataaaatcataaaaaatctaaaaactcaaaaccaagattttgagaataaattgtacttacgtaaaattctaaatttggtggtattaattgggtggaacttgtcgtccagaagaagttttctttaaacttctttttatttggaagcctgacaatgatcctgtgattatttgtgtgggtcccctaacaaaagcatctcacaccatgctttctcgcgggacaagctttaatggcttaaaaacaaagaataatcttgagaggtgtgaggcactccaatcctaaaatgtggtatagtgacttcagactgttgggttttatgccctaaataaaactttttacaatttgattagtaatcaatataagaa

SEQ ID NO: 128473 - DNA, 526 bp, Cannabis sativa
tcattgtcattgacatactttctacgaatttccacacattcgatctccaatcttggatgttcctagatttcatctcgtcgctcgtctcaaacccagatacagagctctccccttcataagcatacttctttaaccagtaagtatttattctcttccttcttggtatatttttagtcataatcaattgcatcatcattttgctttactgggttttggcaaaaatttatttttctggttaacttttagggtttagatggagttaaaacttaggtttaccatatttataagtatctggttttaacaaatttcctcaaggaattaggattgctctttctatagaaatgtcctaatttggttctgaaatttgttctccagaattcttagaaatagagtgtccccaaaatttcaaatcaccatatctccttcatttttttttatcaaaatcgagttccgtaataactaaaattgcttaaattttcacaaggaatccaaataaattatttttagaatgaaaataaaattattt

SEQ ID NO: 128474 - DNA, 1111 bp, Cannabis sativa
aaaacatttttggacagtatggccaagtttatggcaaagttgacattgaatcttttgaccccatgctgagtattgtccacgaccttgagtgatacctcctctttgggattgcacttgaccacggccaatattgggtacacgagagtgagacatctgagagttaaagccagggggaggatgtgtagcataatagtgacctctggacatagcagcattaggagtgaaagaatgagtaggatagtagggacctttgttacctgaaaagggctttgtgtgagtcagattagcctcaaccttggctatgtcaagatctgaagaatctttttccaaccgtacttcttgagccatgagaagtgcctcgatttctgctactgaatagtcatcaagtctggtgtttactgaggtaacaaagacattatattcactgggcaaaccattgaatatggcttcaatgtggtcttgggcagtcattgaatgaccaatcgaagcaagagtgtcgacaagacttttaatctttaaaagaaagtcactgagggagccttgcattttggaatttctgagttgagtcttgtatttgccgatgttggctctgttcaaagcagtgtagtagacacgaagtgtgtcccagatttgggcagcagtctcacaaccaaccatgcgagtgagaatcttctcagccatggaggacaacagccaagaaacaaggatgctgtcctgttgatcccaagcatcatactctggtgaggttttgttgttcaaccgatcatcattagtaacaaattttgggggaatgcgagctggatcaaggtgattttgaaggcgatttccttttatagcagcaaagacttgatgacgccaaggaagatagttatgttcatctaaacgaactgaaagattgtgcgaaaatgtgacaggagctgaacgcggaagattaaggcttgaactttgagacgaacctccattgttggccattaacgaaagcttgaagaaaagaaacgaactggacagaaagaaaagaaagagagagctctgataccatgtaaagtaaaacgatttgagagaaagactgaaattgtttcattgaattaaaatgcactaaggcaagagttta

SEQ ID NO: 128475 - DNA, 1433 bp, Cannabis sativa
  modified_base (1140)..(1141): a, c, t, g, unknown or other
actgaactactataactcttcgcgttcattattttattaattttttcaatttttctgtgtagtctcagttgaatactcaccattctaggttgagtacttgctctcttttattaaataataatatttttattttcatttggtgttgtcaaaattcctccaacaacaattattgtggttattatgtttgtgattatgaactaaacactctttctagagtgttgatgaaactattttaggttatgaattaaagtttttagattattcccatatttattcttattatttgtgtaatatcccgatatgcctaatggtaaataattaagatttataattatattatgggttaattaggtaataagtagaattatgatcctactaatctagttcaacataaattttaaatttgctataagtagataaataagcataatttataaattacggagattcatatggtacatgtgaatgtaatatgagttatcagcgtaataaaaatatttacaggtttgtcgaccttagagactcgatcaggggccagaaatatgataatgggtttaattgatagaattgatgggaatattatgataagttgataatataagtattggggtaattaggagtatgtgagatttgacttagcgcactagaagtataatttcttagaggctaagaaatgataagataattatgaatgataaattattaatatattaataatattattattatattattataatattatatttttttatataaacttatcagttacgataaatttattatagatatatatattatattataagtttataacagtaaacgtaaaagaaaagaaaccctcgtcctctgtcaaaactttctccttttcaaatccattttcttcgatttcaatccaaaacttagcgatctaagctccgatagtagcgagatagcaaattctcagagcgaaaaagattaaggtaagatttaattctgttttaagttaaaaacaattagttttgtataggagttttgcaaattagaatagttatgaaagttttgacgttatagaattgttctcgggtagtcatgggactagttctgatattttcttgctaaaattgagctgattttgagttagaaattgagtttagaacnntttataacttaagtccgaacactagtggcatttgcaaattacaggctcgattttagattctattacgtaagtctggtagtatgtatggtatatatgtgccctataaagtttggggtggtttgtacaggtttcagtagcgtttttgagtgcgtaaactttgaaaatcacatttttatctctgaatatccagtcaaacggttttgaaatcggtcaacctctaggcaattggttttaactcgagtgtccgttttggacgttctatatatcgtttcgaagcttgcgatgagctcta

SEQ ID NO: 128476 - DNA, 1033 bp, Cannabis sativa
acgaacgatttgtggtttttttttgggtaaaaaatcgaattttggagaattttttttttctgtgatttttgtatatggtccgctaggagacgatagtaagtacgatagtagtgtaatctggaggttagagatgaaggtctgatagtggtacaatggttgataaaatgtccgatggtgatatgatggtggtctgataatagtctcatagtgtacttaaaatttatgtcatagaagaaagagagaagagtgagtggggttgttgatgtaagagaagtaaattggggagatatgagaaatagacttacattaccaatagtgatttaactttagtttagattgttattttttacctaatataagcatgttttatcgaatttctcttataaatattattttattaaattaagtttcaaattttaggatggatttttttaaagcaattaccaatttcattgataaactaaaaatgttaatttattcatgagaaaaacatttacaactaatctattgtagtcacttaattggtcatctaatgtaagaacactccttaaaatcaaataatcatttgatcacatctttcaatagtgaattaatattcatgatagtttaaaatgtattgcattggtcttaatgaagaaaacctataaattgagaatgtcattctctaggaaaatcaaatgacttttttcgataactcaaattaataaccgtactcctctaactatatagcctattagatttgtatgattgcttgtaatccttggactactgttggacaacccggccggttgctaagccctaagataaaatgggtcataaataaaaaaaataataattaaatttttactatataaagataaatagtattttttaaaaaaaaatattaaaaaaatatatatattttttaaaatgtatttttttttatttgggtctgaaccttaagcacaggcagggacggagggactttagcccatgtgtgggctaaagccctcactcaaatatatacatcaaattttttatatgtagatatata

SEQ ID NO: 128477 - DNA, 1271 bp, Cannabis sativa
  modified_base (56)..(60): a, c, t, g, unknown or other
tttttataaatatgtgtggattgaattggattggttacttttacatgtcaatcaannnnnaatccgcacaagtgcggatatccgtataatttgcggattggattggattagatagtgcagattgaattgaatcgattattttatgaacacccctaaaagaaattttaaaaaaaaaataaaaaaactgtgacttaatatccaatatctcgagctaacttctttatcaattaattatatattacatactaattaacttattttagctatagtattatatataagtatcattatatataaactgatattatgataatttttaattattagcatgttggatttgaatatatatataaaccaacaataataataatgtggatttttcatgaaattaaagggaaataattttcaaaatggcggtgagataatattttcaattatatagtttctatgctaagtagtatagttggtaaattttaaaagagcaatcaattaattagggttttttttttaatgtactcaattatattcgaaagaaaataaataatctgaaaatacatatgtacatgtaataagtttttgggtaattgtaaaatacaatacttaaaaaaaatatgtaccgatataaactttatcagtattaaaaaaataatttaattttttttaataatatgaagtatttatgtatacaatctattataacattcaagtttaatttaaatttgatattaacttacattttaaaaacatatatactctccaataattatcaccatttatttattatcatatcatgtaaaaacaagacatgtgattattatttttttaggaagcatgtgcttaaattttatttctttttgagtaattaattaatgtagagtatatatgctagctagagatgagatttttcttttaatattaaccactaaaactctcatcactataataatttttttctacttttttatataatgtaaatatatatagaacaagttagtgtttgaattgatgctaataaaagggggcataaccctagagaaatggatcacttgcaattgtggtgggtccaatattagctttcattgaaaatgaagttccaatgctagtaataataataatataaatgaaaactaatttataataaatattaaagtaaaaatatgtactacacttctaaaggccgttttggtaattttttaatttaatttttgttatgattgtatatgttgtaattttataagatcaagtattagtaaatatttttttaaaatttt

SEQ ID NO: 128478 - DNA, 1005 bp, Cannabis sativa
gggtactaggcaccactgatgccctttagcatttctcatatataatttaacattaatcattacaccaaacctactattatgtctataaatattatcttttattacaaatatatgttataactaactaaaatatatatttttttccaattttttttcaggagcgattgcccccctcgctacaatgtgagtctgcccctacagatactaatttttaaaaaaaattggtcaaacgactcgtattagtttttaaaaaatattttctgtttttaaaaattgaaaataatttttaaattatgaagccaaacaacaacttcgttgtttttaagtttttattttattttattgaaacacaatatttttgtaattttaaaacttcaacacaatatttttaaaaatttgatacattaaaaatgtaaaaaaaaaaaaaaaaagtgcgacagtaaaaatgaccaaaaaaaattgacattttgtaagattctttttttttttttttcatataagaacacttcttatgtttacaaatctcgagtcatacaatttaatttaagggaacatcataaaaattattctcatttcttatttatttatacttctcatattgttaatatattattattgataagttatatataatttttcagaaacaatttagtacaatgatttaattagtgacgttaaaagtttaatacattttttttatattgttaaatttttattaaattaattttattttttttataatgtttaataataataataataatataaacctcctaaactatatttatttttacagttttaatgtctttcagtgcgattataatttgagaacttacatataaaaaagtacctttaagcggtataaatgcaaaaagaaatataccttcaaattattaaatgtatatctatttttttattttttcatacttgttaaaaaataattgtttatacttattttggtactgacattttttcaatttctttttaaaaaaaaaattacaaaaa

SEQ ID NO: 128479 - DNA, 547 bp, Cannabis sativa
  modified_base (512)..(518): a, c, t, g, unknown or other
atcaattctttggaaggcttaaactattatactatttatttatatatgtggaatgattgatatgttcaatatttgtcactaattttttttaatattgctattttttttggcgggttagactaactatgccaagataatgatgaaatttaattattaaattaaaatatataaaattatataagttaaaattcttatagtttatagtgtgattgttcttattatgatttgtggcttacttatttttttttttaattttagaatgaataattttagtgttgttattgttcaatttttattagaaaatatttagttgatagtaattgataggtacagtttaatacatgttcatttaaattagagatttatacttctttaatgttttaacattagcgatttatatgtattttaattgaatgtgcttttaagatttttattcttatttttgtaaatgttataatttatctatcttgttaatttagggaattagcccatatactatttttttaactttnnnnnnnaaaaaaaaatttacggtttggtttctaaa

SEQ ID NO: 128480 - DNA, 707 bp, Cannabis sativa
aaaaaaaaaaaaaacatatgtacattttttgttctattagaagtatcgttatactttaacaatgcactataatctacaaccttttaaataaaaaatatcaatgaaaatttaacataatttgtaaaacttaagtgacaaaatcaatatttttttactaaattttgaaatgtatcaaattatgccctcgaatttttcaagtcgttaaaaattctccttgaactattattagacttaatgatttttgtctaattccattcaagttcactaatgcatcgattttttatatactaattagtctcattaaaagtacgaatcgtgtctcttaaactttaatatgtattgattcttaaagtttcattcacgttaaattagacataattggtgtctagcactctccttagtgttatatcgtcattagtataattaagtatcagggctcatataactatgtgtcgctccaaatttttcataatatatgtggcagctgttgtatgcgggagctggcaggtatatacgcgtcacccggagacgagttgaaggacttgacaaaacatctttgagaaagtataagtacgatttgacgggttagctcccggaaaagactaagtcagtctttcttcatctctgagagtccagacacggataggcttctccagtccagtaaggctggagttgaatagtcactcctaggggtgggcatcatccaa

SEQ ID NO: 128481 - DNA, 1055 bp, Cannabis sativa
gttataagcctaacaaatgggttaagaggctcgtgtgggtagagtactggtacaacacttcttaccatgtttcaatgggcatgacacctttcaaaattcaaactagccagaactaaagtctttgaagttgagcaacaactttaagcttgagatgtcattctaatgttgctgaaagaaaatctcaactgcactcaatagaaaatgaagtctcaagtctataagaaatgacgagagttgccatttgaggttggggattcggtctatgtcaaacttaggccatagcgccaaattcatagtagccaagccccacaacgagaagttgtctccacttttttgggctctttcaagtcttggctcgcattggtatatcggcttaccatttccatctgcctccaaaagcctctatccacaccattttccatctcttactgttgcgagctacattggggccacaccaacaaccatctgagctaccttttaatcccactactgaattagaatggctactagaactagcagaggtgttggtccaacctagcacacataaatcatctctaaggagctcaataaataggtggtgttaccaccatcttaggatactaggaaggactttgcagtcattaaattcccacactttcaccttaacgacaaggtgagactcgtacggggggtattgatagaccaaccatcacatatgtgtacacccacaagactaggaaggggacactggtcaatatcacagaggattaattggggagcttgcagtaagtggttatggggttttgttagggtgtgggtcttttgagcacactctgtaattgggagtaaagggagtgaggcaattttatttttgtgttggaagatgttgagcttattgtaaccgttagggagagaaccatcctctcaaaatcctaggcaaactaatacaaatgctttttccattcttacaacctctgttgtcttattcttccacatttcttcttctattaatacaatttgaacaggtagttcctatcagtatcgttacaaaatgtgaatttatttaacttagttaa

SEQ ID NO: 128482 - DNA, 1073 bp, Cannabis sativa
  modified_base (26)..(34): a, c, t, g, unknown or other
ggtgttaaataacatacttgtgagtnnnnnnnnnatcttggtaaaataaattccaactgcaatgtaattgctggtttttcaaaggtaatctggggctgttttacacctaaggaaatggaagctgcagcaatgttctatagtgttaaatgggctcttgaaaaccagctgacaataaatactgttgaaaccgattgccttttagttgctaatgctgttaatgtctcatctcctactaaatttaaaacacattttcatgatttagtagatgatattgtttatcttttatccttttttccttgagcaaaggtatctcatgtaaagcgggatgccaataaagcggcatgccaataaagcggctcacgctctatcgaaatttgctcttggactagataaaaatatctcttggttggggaaaataccttccccaatttattctgttgttattgatgactgtcattattaataatagcagtttttcctaaaaaaaaaaaattgtgctaaatttaacacaaaataaagcatgagctaaattttacactataataaatattatttttttttattttggctatttacaaaaatatgagaattttatatatatatatatgacatgcaaacttaattgcattaaatatgatattttttattttacaaaaacggaattctacatagaaatccttattgcaactagtggagcaacttaaatcgcaaccaaaaattgtatagtaacccacatagaaaccaatgtagaaattattttaaaaatccaaaccgtaaattaaaaaaaattaaaaaaatagtatacgagataattctctattaatttttgagtggaacccatactaatgaacctgttcaaacaaaataaagagaaaaagagagaaaaatcaaaagaagaaaaaatggaaaaaagacaaaaaaaaaataaataaagacgaagaagaaaaaattgaaaataattaaagaaacaaaagtaagggaaaaaaaaaagtatggaggaaaaaaaatgaaaatagaagaagacaataatttttttttttttttttaaaaaaaaagaataaaaaggaagaaga

SEQ ID NO: 128483 - DNA, 555 bp, Cannabis sativa
ctagcaccgacgacgcctcaaccataaagatcccaccaccgtcgacaaaaatattgttactctctagcatcgacggcacccaaccttaactgcctaaccaccaccgaaggtcccatctctttttttttccttgccatgtttttctcttcgtgttttctcttaccggtttacttttgttgtttgcatgtggttcttgtagctaactaaatttgtagtgaatttttttttttaaaaaaagtgtcactttacgtttagatctatgatttcttggtaaaatcgaattctctagctctatttatcattctccgtcgttaaaactgcatgtcattaaagtaataatataaaaaaaaaaaaatacccatggtggtggttatttgtaaataaccgccaccatagggtccctttacaaaaaatctcacattagtcactacaaaacttgtaaccaaaagtaaaaaagtttggactaattataaacaataattcgtatgttgtaactaaaaagtctgtgactaaatatattagtcacaaaaatcacaatttgttgtgactaaatgt

SEQ ID NO: 128484 - DNA, 825 bp, Cannabis sativa
tacatgtggcaaatatcactccatgagcaaccccttataccttagggtagggtgacaattagtgttcgtttggtgttgtgtcgaggctttggtattataagtaaatgccaaactcaaacctgacccatttattaattgtgtcaaattattaaagacttaaaactaaactcaattcgtttatataaataatcatgcttaattttagtaaacttaccaattcattaacatgtttataacaagtttaaaacatgtttacaatcttgttatgacacacttgtgagcaatctaacatgtttacatcatttaactaaaaaaatataatttaatgtaataaatataatacaattaagaatgaatactgttacataggttattattgtgtatcaacccgaaaatgatcgggtcgtttaataaactggtcaaccaacccaaatccgtttatattgtgcatgtttcaagtcgtattattgtgcctgacccagattgccacccgtacttagagtgctcctagcatttcttaccattaaagaattttactcttaatttttctttcgattttatttataagagcattactatttgacaccttaaagtgtccaacaccataccgatgtggcaggttgtgagtggttataacgatttctattgttatttattaaatcaaaatgtgtgagatctgatataaattgtatgttatgtggtgtttaactccttaagtgttgattaacatttctcataattacaaatgccttaattcacttacattttgttcatttattcaagaacataaataaaaggttaattatgatttttgccccctgaact

SEQ ID NO: 128485 - DNA, 677 bp, Cannabis sativa
agaaaaccaatcaaggggtttgaattttattcagagattatctatagctagtgatgtagcctctgcaatatgctatcttcatgatcattgtgaccatccaatcattcattgtgatttgaaaccaagcaatgtcctccttgacaacgagatggtggctcatgttagtgattttggattagcaaggctgatccttaacaccaatcaagtgtctgaaactcaaagcagcacaattggaatgaaaggcaccattggttatgtccctccaggtaacaactgaactttaactttacacaattttatttttgcgaaaagatagataagtgaattgagattagtatcaaagagtcaaactagcttgaaatataaagttttatttttgggaaaaatatggatgactgagttgatattagtattagagagttaaactagctaaaatatacacaaagtttgacgtgttatctatttttagtgtatgccatatgaatcacctcattgatttattattctttttgacatttgccaatgttggaaatacatttgcagagtatgtcatgggaggtgagccctcaaagcaaggggacatgtacagttatggaattttagtgatggagatgtttacaggaaggagcccaactgatgaatcattcaaggatgatctgaatctccataactttgtt

SEQ ID NO: 128486 - DNA, 1826 bp, Cannabis sativa
  modified_base (1075)..(1076): a, c, t, g, unknown or other
atatgtgacataaaaatgcattctaaattaaaataagtcatcataaataattttcataattaaaccctaattatctactaatttccaaattaaaactaggcggtctttacaaatatacttttcttgtctcaagtctcgatttatgtatgttggccaacctatatggagaatgatcaatgatctcgggccctatgtcacaataacggtaaaccgataagtgtctattccaaaatactatctaatactcgcattaaacaatctagggttctaccaaacctcatggtaataacaccctaaaataaaatacatattttggctctaaaacatagaccatattttagagctcgttgcaagctttgaaatggcatataaaacgtctaaaatagacacccaaataaaaagttaccgtcaaaataccaaatttggcatttcccaaaaactgaacaaacggaattctagttggtaccattcgaaattcctgttctgaacagtctgaaacatgattttcctcaactttaaaccctccaaaataactctaaacctaaccaaatcattacaaacttcacaggacacgtatatatcattcatataacagtttcaatgtaatataaataaaaaatgagtccttaaacaaaaaaagtcattaaagctcgagctttgagcttttaaactcgatttccgcctcaaaactaccacaacttcagcaaataaacatcgaaatcaatctcgcagcaacttaaaaataaaaccattaagtcatagatcccacaactactctaaaacacagtcaatatatagaactaaactttttcaacttaaaataaaaatcgatccttacctcaaactctccctcttcaatggttcactacccagaaactaacaaggcttgagtcactagatttttggttgaaaatatgaagaaaaaggattatgagggtggtggttcgtcaagcacgaagggaagtaggggaaggatttcgttctttcctttgtttcttttgttttaaactttatatatatatatatatataaattgataagtttaaactttttaacttaataataataataatannaataataataataataaatttattataattaaaagttattttactatttcttagccactaagaaatctctactcttaggacattaggttaaattccaagtacctctaactaccccaataaatataatgtcaacttatcataatactcccactaaagtcactaatttaagttgttataacattttggccaccaaaaaagtcttcaaggtcgctaaacctgaaaatatttttattccacaagcaacttatattatattcatacatgctacataaatttttataattaataaattatgttatttatccacttatgacaaaatttataatttatgctgaaatagattagtagaatcatcatcccactcattacctaattagtccataatatatataaccatctgatcagaccttaaaagtattttccatcatcattatttgtcaaacagacacttataacttcttccactatggcacataatttgtagcatgttatgaggcatcaaatcagggaatatggctgataaactttttactaggttgcgtattttagagaatgtagaaagaccactcaagttattttgtgacaataagtcaacagtgttgtattccaataataataggagcttatccaagtcaaagtattttgacataaagtttctagttgtgaaagaaagagtgcagagtggacagatttccatagagcatattgggacaaactccatgatagcggatccgctcataaaaggattac

SEQ ID NO: 128487 - DNA, 1065 bp, Cannabis sativa
aaaaagtcaaaacataaaagttttggatctctcttttatcttttcagaacatcttgaatcgtccaattccgagcaatatcaagagagttatggccaaaatactattagtcaatacagcagaaaaaatactatgttcgttaatacagcagaaaaaaatatccttactacttatacataagtagttattggtttgaatttgaactaattatgcttgttaatttgaattaatgactaatttgtgaagactacttttctcaacacttcatcactaagactaagcaaagcaaaagtaataatcatgattttactgaatgagcagtgacattttcataattacaatttgccaaagtagcaatatcaaaattgcatgtacgataaaggctctaacatttatcttgtttttccaatagtaattaagattttacctgaaaaaactttggcctatattcattgtttcacttaataaggatcaacgagttgtcttatgttatagggattaggtaggtaaagaattcaccaaagtagcacttcaaatatggtattgttcaaaatggttaagagagtattggtatatttgactgctttgaaacaaacttttagttgcagcagcaaaaaaaaaaattatagttgtgtaaaaaacttagtaaaagcatattttattgggaatgctttatgacatgtttatatttttgaaaaaaaatattaaaagcactagtggtgcgtagcatcttcttcagtatcatattgttattggtgtaattaaatatcgtatctcatataacttaagataataatttttagagaatattgctaactaattgcaagacactaactttaagtggtcctagacactaatggtgcctaatagtaatattcatacttttagttagtatcttttaatgggtgttaaccattggagtgaaaaaaaatacttaatgtttaccgagattttcagattctgattataaaataaataagcttaagaaagaaataaattaaagaagaagaaataaggatttttacgtagttggggcattaataaaccttattccacgagttaatatt

SEQ ID NO: 128488 - DNA, 823 bp, Cannabis sativa
tccaagtctcagatgccaaagtctgatttggcttgttgcaggattgtgtacagcaggtgctgcacttccagtaatggttttactatataaaaaattaagaccattattcagtttacctgtaatgagatcctgtgatccatggccaattttcatcacccctccttcaatcttgacagagtagccagacttgtcaaacatcctaatagatagcaggtttcttttgagttcagaaacaaacctgacttgttgtagagtctgcaattttccagcatggttttctattctgacagtgccaattccttgaattgcacatgcctttttattgcctaggagtactgtaccactgtgttcttctgagaaagagttgagcaatttcttgtttggtgtcatgtggaatgaacaacctgagtcaagcacccattctccacctgaatgagaacttgatgcaaccagaacatcaattgtctcacatccatgtgcaagatctgcttcaccatgatttctggttcttgattgttgactgtccctttttagtttaggtttcaaggctaggcattcatctttaaaatgtcattctttcttgcaatagaagcactgttttccagtgtttcccctcgaatttgatccccctgcagagccctttgtaccagttttgaactggtttggcttgtgatggctctgatttcccttgtgattcttgggaaattttcctttgacaatcaacagcccctccccattgctatctcctccttcatcacctttcttttgagtttagtgctgccttcacttcagtcatggtgagagtgtccttaccatacaagat

SEQ ID NO: 128489 - DNA, 660 bp, Cannabis sativa
tggtttcaattttataccaaagtgtaccgttttgggtaccgtttttaatttaattcaattttttttttttgaaaaagctgactgagacatgtgtgatgtatgctgacgtcatcataccacgtccatcacgtcttcttttgttgcaggtttcaactgttcacacgcctatttttttgcaattgtaattcaaattgcaatcggtttttaaaggtttgtattcattattttcttttatttttatatattaattaccaattttatgggtattaggtgtttgtataaataggtaaagtttctttataaataaacattttcagtttgtatttgctctgttttcctttttcttcagagtatatgggtacgggttagggtttcatcttctttggtggtttattttcgtgttattaagagtgttttgagtgcatcattttcgtttatcgtctttggtgttgtgtttctatttgattgttgagggttcttattatctgtaaacctaaaaaaatggttaaaactcgttcttcaatttctccttctcattctataaagttagctgctgataaaaaaaatagaaaatgtatctgatgatgaagattgtgatgattctgatcgttctggtggatcatctgatggtagccgtggctctgcattgcaaaccaagag

SEQ ID NO: 128490 - DNA, 1243 bp, Cannabis sativa
  modified_base (595)..(602): a, c, t, g, unknown or other
gagcttggatgatgagaatggtcgacttattaatgcgaagtggaacaattgaaacagtatagggtggaacggtataaaaccctattaattaaaacaacgtcaaattcttaattaaaatgaaaataacggttcctgatgcaaataactcttttttatagtgataataagccgtttaaattattatattttgatattctatatatatatataactacaagcagaaacaataacatataaaaaaattatgactataataacttcaatatatataaataaaaaatttgtaatggacttctttaaaatggatgcatcgatacatctctatctattttactatccgaataaatttttattttaattttttctcatgctcatgtaaattatagttatttgagacatcctgtaaaattttaagaaatttggaaatgtttcacatgccaaaaactacgttcaaacaatgtaatgcacgcatgacttttattttatactcatgtaaaatagactatttgaatattattttctatattgtaaattatttataattttttaaaattttgtaggatatcttaaatagctataatgtacatgaatatgnnnnnnnnaatagactaaaaaattcttctaaatgatgaaacaagtagaaagtgaatcaatatattcattttaagggggtgcattatagaaggaaaatttgaaattttatgcttacattaggggaaatttttcccttaaaccctaaattatttcgaattttttaaaattttgtaagatatcttaaatagttgtaatatacataaatatagaaaaaaaaattagactaaatttttttttgaatgccgaaacaagtagaaggtacattagtacattctttttaaatgagtatatgtagaatcaccctaaattttaaaattagagtataatttgcggtcaaacttcttaaattttaaagtttagcacgatcaactcttatatttataaaaaaaaaaataagattaaattctctaatctccacaattgtttttttgggtacttcttctctccattagttaagtgtctaaataaactgccataatataatacacatggtaaaatttcattggtggcaatctaattatattaataattaaaaatttcattggtaccataattatattaataatgtaatatttctttttcttcttctttcttttccttattttgtgtccaccaccaccaccaccaccaccaccaccactactactac

SEQ ID NO: 128491 - DNA, 1091 bp, Cannabis sativa
tcttagacattattactctgaacttcattttaacaacaattagcccaaagtcaatgtaccttttgaccttatagagttcatgttgttactaaaatgcaacttgattaatttattatcacaacatatatctttaatagcttttaataccattcctaattttgcagccatatgtgacaaaaaaatctcacaactaaattctttataagatcagaatcagaaatcttaatgatctccaaaattttctgttttctgatttctaataagtgaacatatagtattttgttctccttaaattctttatagctctttatagcttatttggctgcataacgaaagtccttatatggttacttaaatatctatccaacattcttaatatgtatattacaaatacatacatgcttgaacatatattatattctaatacaaattaagaatcttttatattttttgaattctaaggttgcttttaagacaatgacttagacaaaaattttgagatctcggtagggtgggggccctagatatagacttattctgcctactcttaaaactagtcttgtgtgggtctaagtcaaaattctaaataaggtcttttttaggcctgtccttaaggcagagtggatggacgaggcctaggctcttagtgagttattataagtcataactactaattatgtgaattacacatcatgatacgtgttaaattaaataaaaatgtagaaatttttttgtcttctaaaattgtggagctttgggcctagacccgtccactccaccctaatgtaatgtttggtagaagggagggagaataataaatggaaaattttaaaaggataggaagtaaaaataatgaataggatagttgctctctttcgtattgtttgatattatgagcagaactgaaagaataaaaaataaaataaatattaaaattactattttatcatttttaaaataataatatttcttattaaaatatataaaatttgatattaaattacatttctaccttttttttatactagatagctggctagagatatgaaatactcaaaaaaaaaaaaaaaaaaatacaaaaacaaaaaaaa

SEQ ID NO: 128492 - DNA, 1072 bp, Cannabis sativa
gccctgtttctctcgtcaatgacgccaatgacgcactgcacgtacatacgtatgtgtatccaacccattatttattaaaattatatgtatatatatcacatttttttttgttgatccaatatgtaaataattaatatattttattaatataaaatgttcactgggtcaatttaatattaatttttagaggaatgctaattataatctcttattataattttttagttaatttttacccttaaaattaccagtcgatttttttttttttttaaacagtattcaatatagttacggtaaaaaaaaattctgaataatttataagccaaaaatagagttcctgatattttaatttaacacagggctaaaaaagcttcaaatggattttcggtattgaaaattatttaaaaatttacagagatgatgttgtaagcatatcaaacaccgttgtgaaaaaaatttgaaatacaaaattacaatatatattttcaaacaagaaaaattataataggagattcacaatataatcctaattttctttattaatattctaataatatttttctcttcatagctttcaaaaacttatcactaaattgtggatagcttttatattgaatgattatttttaattttcaaaaactagtataacgtttaaaaacaaagctagtggagtataaaaaattactttttattagtcgttttgctcaaatggattaataataaatatacatacatagatttcttttatatatagtttatattatttaattttagaaattttttatatatgaaaaaaatctattccaatacatcttgacttttagctccatcaactattttttttttttttggaatggactccatcaactttttaaggaagaggttattgaaaagctgctaaatgtcaaaatcctataaaaacaagttctatattaattataataataataattaaaaaataaaatattgggtgattctacagtgcactcccttaaaagggatgtattgatgcacccctacttgtttcgtcatctagaaaaaaatttagtttaattttttttttcatattcat

SEQ ID NO: 128493 - DNA, 734 bp, Cannabis sativa
  modified_base (675)..(705): a, c, t, g, unknown or other
cagccacacctacttatttttcttttgggccttaggctttaggcccaaaaccaattcaataagtgttaactcaaaaattcgttagtattaattgagacttaataattaatactttgaatgtctattgacaataaatgcaatgaatttaaatgctggataataaaagaaagagaaagactttttgtgtggtttttaaattagctctacatactccacgggtcaatgttatttgtaaaattttatgaatgaagatacaatttggcataaatttctctaagttggaaatttggctgtcttttgtacattgttgttactgttatttataggagtatgatcgcagttattttttatcttatctagttaacagttatgaaacataggcattctttacgtttcatatacattttttcaacaggaggaaagtagatataactgcctctacttaaaatgacagaaataactgttattgattactaggtttttaacatgttatggtcgagcatgtccataacaatactcttccttgaagaaaatgctacaggagaatgtatgttgaacataggcttcttgataactctaagatttaagagttatttttatatctttaagcgtgaattttaagctgaattgtggagaacttagtgtctatattatgtaattgtgtttagtttgttnnnnnnnnnnnnnnnnnnnnnnnnnnnnnnntagtaagtgttaaatagacttatgttgtt

SEQ ID NO: 128494 - DNA, 1377 bp, Cannabis sativa
agggatattaggttatgatcttcatgtaagctctcctatataaagagcattagcctagccctaatttctctaactcttaagctcactaaagctctcaagctctaagtctaaaatcctaactcactcttcccttctctcttatacacccaagacttctctctcacttgagattgtcaactttattctcatattataatcttaagagagccacttcagattccacaacccttattaatctaaggggtattatctccggtattaatacaactaaaagggaagtaggtcattacccgctaactaagggggtcgaacctctattaaaatattgtgtctcttttactttcttgttcttattgtgtacatgttgtaagcatcaataatgaatacgactctgctatcgattgacgaaatctgaggtctatgataactctatgaaagtagagttatttagctctttttgtgcattaaattagctttgttcttaagtatttttagtttattttagtgacttttatttggttttacataattttgcatgaatattagttttagttattttttgtaatattttatcaattttattatgtttcacattttaaaaatattattatcagtattgtgtatgtttgataagagattaaatgtaaaatttagacttattaagtgtcaaaatggtcaaaatagagaataatttacattatgtggttgacgtagttgattaatttaccaaagtccaattgaagcccatatatattttcaaagcctttattatttattagtggactgatgtgtttatagtgtgataagggctcaacaaaaaaaatacaataaaaataaatgacaaataaaaaaatgggcttgatcattgttttcttttgtaaaagggctttcattgaagggttcgttgtcatgggatgtcattgcatatctttatatattaaaagtgcctatctaacgacttggtttaacgttttcttctcctcttccgttagttttaatagaacatttaaattatatatttcttttgaatcgttatcgttaacatcaaaaataaataaagaaataaaatattatgtacaaatttcccactgcctacaaaccagcaaagtcgttaacataaaaaagaagaaataatatgtataaattctcgattgcctacaaacctgcaaagtggttcagtcgacgattgaaggcataaattcagtcgcttcagtcacttggaaaatgtttttctgatctacaattggagatgaatgcaccccagcaccctgcccctgtagatgtgactccacatttcttctttggtatattcgacatgagaatcggttagtatgttgaatttatttatttgagtaataataacttatttttgggaat

SEQ ID NO: 128495 - DNA, 1312 bp, Cannabis sativa
  modified_base (1281)..(1286): a, c, t, g, unknown or other
actttgattcgatttcactctagtattacaatagtgccactgtgtttgatatacaatagaattttttcggttcaatcctctcaattatcatttcacctgtacttaacttttaagtttaaattttggtagtaaaaatttcgaaattattaaactgttagtaaatttaaattctcatttattttccacacttaactgctaacatgaactacttatgcgtacactcttgtcaacctaggcacctagagtttcacctagcacccaggttaatatcctcaactagagtgtcagtttttgaaaccgtcttagtacaaatgagtcaaactttacattgaaacatgaactagacataccactgatatatttgaggcatcaaaatcatattcattcgaagaaagttcatttttgagcacccactgcccaggttgagaatctgtcaatctgggcgacgtacaagtatcaattcggcaatccgacttttgcatcttctttgtattcataaaaaatgagaaagtaggtatttttaaggaagcaacaacatttcctgggtgctagaagtaaggcccagtgccaaggttaacacttggggctggcctagtgccgaggttatattttgtcaaactgggccaatttcgaggatgttttttgagagctcttctgcttttgtaaactccttcagttgctgtggaagtccctatcgcccacaggagagaaagcgacatattcttatttttcatcaaagattaagagtcaactatttctgggaaataaacggaacttccaggaagccaaaattgggacccaacgcgcatgttgacacctggcactgggtccagcgcccaagttgatgtcaacatgggctaggtccaatcagtttcttgaaaaagtgttccaattttttttcctgtcattagaaataatgaagatgcaagcaaacttaagggcctcaaagctgagcccagctctcaagttgacaatcaacctggtgcgctagtatgaatataaaaatgaatatgagtttggtttgtttatcataagtttaagaaagaaggaagtcgagttgttttgctgaatattttgagacaaatgaatgaacgtataaactaaaactaaacacaatgagaacaatggcgataagaacgctgataagaacaatgggaggttgaaggcaaactcaaagcggaagtcgaagacgaaaccgaggttagtcgaagtcgaaacagaggagagccaaagcagatttcagcggaagtcgaagcagaggttgttaggttttatgccctnnnnnnaactccatttcaatgtaatctatttt

SEQ ID NO: 128496 - DNA, 635 bp, Cannabis sativa
acataataaatatgagactaactctaataggtagtttagaaagtttgtaacttaattttcctaagaagtcaacatctctttatcatacactacatagaaaaattgataattctactatttctttaattttctcgcatctcttaaaagcttcctagtgtatcataaatctagttcttagatcttagtctttctaactaatattctagaagagagacaacaaagacctttttctactaacaataaaataaagatagtatctttatcttcatattaattgttacactagtatttttatttttattattattattattatagtataattcctaatttattatttctttatttttctttaagtaaatggtttttccttcattgtatataatgaatcatgtatgatgtttccatatttcaaaaattcaaatagtttgggccatacatatctaatcaaattagaagataacataatataaacaaaatgaataaataccaaagtcattgagtttggaaaaggctacaaataaatgaatatggatatgattttgtcccgtgatgtattgtggtacattagatgtgtctcagggtacattaaatgagtgtcagggtacgttcctactttttaaccctaattaccc

SEQ ID NO: 128497 - DNA, 671 bp, Cannabis sativa
aaaaattaaaagacataaacttaataaatactaaaaagcaaaaaaaaaaaaaaaacaaggttttttttatttataggcagaggagtcgtagccgtcttgctaggaaagaacgaaaacaattcaattcttttaacagcagaagaattggaacaaataagtaagggagaaagttagtttgtaaatctctttaattaactatacaaatagttatacatatatatatatgaataatctaatagcaacaaaacaaacatagatgttcttttgaaattaataatttcatactgaacactaataaagtaatatgaaagcattcttctattaagaaacgattaaaaatgttgaaagcaaatccagaaatttttcatttcaaataagaagaagaaagagaccaaaaacctggttaatgaaaaactcagataaaatcaaggacctttagaacgaatacggtagggataattagttaaatgaccttaaaaagtgtttttattaactaagtaaccttcattttaaaattttagttacactcgccttctcttttaataaaatttttatatctcaatagtaccatttattattttatatttatttttaattaaaaatagaaaagtcatatcattaaaaataaaaaaaaaaataaaaaaaataaaaaagacctcccccctcacatg

SEQ ID NO: 128498 - DNA, 1022 bp, Cannabis sativa
  modified_base (974)..(974): a, c, t, g, unknown or other
ataatgttatgagctatgaatcttatttttacaaacccaccttgattctgagcaatcaaatctggtaatataactttcaacctattgcagagaagcttggtaacaattttataaagaacattacaacaagctataggcctaaaatcacttacagcattcgggcatttgatctttggaacaagggtgagtactgttgaattaagctctttgaggaggtgacccgtttgcaagatttctttgacagctagatacacatcttcttccactaattcccaattttcttgtaaaaaggagctactatatccatcaggacccggagctttattttttgggatgttgaacacaatcttcttgatttcctcttttgtgcaatctgaatttagtatgtcttcatgagtcttagtaatgacagctccttgtctcagcatctttttgttaactggctttctactttgcattttcgatccaagcagaccttggtaatacttcaggaaagcttctgtgatggcagctgggtcttctattctttgtccatctccatcttctattgacagaatcttgttttgcctccttctttctcttaaacagctatgaaagaatgctgaattttgatctccctcttttatccaagaaactttggatttctgttgtaaaaaggagatataagctttatgagtcatagcatagtggtctctcgcctctttttcctcttgctgaaaaacaacatttagtggttcggtctggaggatttcttgtttatgattgaggtcttctcgagctttaatatctgaggcttgaatatcattgaagcttttgttgtttagctctttaaagacacctttcagaagtttctgtttagagacaatctggaacattttggagccccttacttcttgctgccacacttgcttcactgctgccttgtactctggatgcattgcccacatgctattttcaaatcttataatttaatnaaattaaaataataaaataaactattttaaaatagatgtggttagata

SEQ ID NO: 128499 - DNA, 1282 bp, Cannabis sativa
  modified_base (38)..(59): a, c, t, g, unknown or other
  modified_base (1127)..(1131): a, c, t, g, unknown or other
ttaacgggagatcaaacctaatcgttaaatttaacagnnnnnnnnnnnnnnnnnnnnnntattctgttaaaccaagaattgctatatatatatgcagaattagttctccaataaaattaaattatacataatttctttttaattaaatatgtaataagtttgttatcattcaatcaaaaggtgatttttaccgatcataacacaaagtataaatcttctaaaattataatggtaattatccaaataatccgttggggttgttcaaaaaaataaaaagttcattaaagacttatcactttgtttccaatacatctaaaatcattgtccctgaatcaaaagggagagaatcctttaatagtcttctacttccatcacaattcacatactcatcagaagtatattaatgaacaaaaaataaaagagcacatcataagaagtaaaaaatatttctcttaatttaaaggtaatacaaaatcaatagtagttaagctgaaaaatagaataccatctaccaataaaaccacaaagatatgtatctatatctaagtcaattaaccaaactaatacaaaagtatatgtatagttgataataatatatcatgagtaaaattaaaataaaaacacttaaaaagcattacaaacttgcatataataataactatagatattagataatttcatcataatattaagactattacttatattattgctttactgatttttgaaattgagaatgaagtttaagtgtttttttacacgcttatttggtatatagtgatttttgctttacagacactttttggtatatatacatggttattttctattttttaattaatattttatttaaaaagtaaaaaaaaaatgagaaaactaagaaaaaaataaatagatgtatttggagtgattttttaattaatattaatatttttttttgaatgaaaataatttttattagatagaaacatctgctaatataacgggctgaagagcaagaggaacatcgctctcagtaaaacgacgacttgaccaataacaagcaccacgtgccatacagtgcgcggctttgtttgcagaccgtttaacatgaccagtagaaacattacttaaagaagataaaatannnnnacaatcttgaacaaatagaccaaaaatagaaggcatagataccgaactaagaataacttgaacaactaaaatgatatccgactttaaaatgacatttgacttgttattcttctttatccaactaagtgcctctttgacacttagaatctct

SEQ ID NO: 128500 - DNA, 605 bp, Cannabis sativa
tgttatatttcatcagttaaacttcttgattggagaaaagtctgtcagagggccattatgttctatttttcttttacaaaaagtaaatttatttaatatgtgtagatatgtttagcttacttgattggggtaagactattgactattaagaaatacttatattttgtgctttaagatcatgtgtggaggattcctctacaatcattttacaatgcttcatcttgttttgtttcttttttgtgtgttcagaattttcggacaactctgatgagacgctggagattatggtcaaaatagagtagtattaattttaacatatgcttgagattttctattattctagattttagaatatagttaccattatatatcttttattctcatcagagagtatagttctttaaacatttctaggttgcaagttcaaaacacagtcattatttttttgggtattactcaaagatttaaatttataaatgacataaaaatatttaatgttttttttttttttgaaaataaagcgtatatatattagaaggaaacaaatagtcacacctcacggtcattacagaaaatattactcggaatagtagagacttctacca

SEQ ID NO: 128501 - DNA, 1292 bp, Cannabis sativa
gttacaaagggctattggacaaaaagcagacataagctttgggttcttcttctttgtgataagaacaacatttgcctcactacaaccatcctctaaaacacactattcaaagaatcgttgtagagttcaatttttgggctccaacttctttggccaattaaaagcctgcaatcaattcttcatgttttgcttctttgttggaggcagtgaattaaaacttaagggcatttagatttgatgcccctacagagcaatcaatatgatttttgctccataacctttctcatttgatgctccatcaataaaaatcttctagacttctattttcaatatgcgttccttcatattgttattgattcaagtacattccacaatgaaatctgctagaacttggcctttgattgagactatgggtcagtttctcattgccatattcacactcggtagtccattcaaacttattacttctgctcaaaacatttaagaaaggaatgcatttgtcagtggactttgaaacaaacccactgagcactgaatccttctagtcagactttgtacatctttgtgttttcagggggaatgcatatttagaatggcttgaatcttctccgaattggcttcaatccctctaaagctgtcaatgaatcctaggaacttccttgaggaaactgtaaaggtatattttttgggatttggcttcattctgtacttttggatgatagaaaaagcctttttttagatcatcactatgctctttggaagtctttcatttgactagcatgtcatccacatagactttcatgttcttccttaaaacttccttaaacattttgttcaccagacgttgacatgttggtctagcattcttgaacacaaatgacatcataacatataattacatacctttatccatctggaagttggtatgttcttgatccattatgtacatcttgatttgattatagtcggagcatgcatccatgaagcttaaaagtttatatctagataagtcatccaccatctgatcgatccagggaagtggtacaaaatcttttggacaagccttgtttaaatctgtgaagttgttaggttgtttttagtattatttttaggttaatttttagtgcatttttaatttagttctattcttattttgaggaattttacaatttttatcttttatttttgcagatttaaaaatagacgaagattaaaaaatatcaaaggaataagatggaaaaaagataaaaagatctcacaaaaagatgaactataaaatagagaaaattgtg

SEQ ID NO: 128502 - DNA, 1600 bp, Cannabis sativa
catttcaaccttcctgcaacaccaatcatctggtgcgacaacatgagcgctaaggccttagcctctaatcccgtttatcacgcacgtacaaaacatatagaacttgacattcaattcataagagacaaggttgtacagaagaaaattgagatcagatacatccccagtcaagagcagattgcagattgctttaccaaaagcctcactcatccaaaatttcagtactttgtggacaaacttggtgtgacaagctcacccttgcatttgaggggtggtgtcaagacagggtagtatttcacctaatgcttgtttatcactaattgtaatcttagcctaattactccagctgcctaggagattttatttcctgttattctattttgtcctttgtttgttttatctttcttttccctttatgttattttggtgtagtgcgagctggcacattattttctgtgtaatgattggagccgttatgctcccctgctctataaaagaatcctctgccctcagtctctaattgagctgagcatcatatctgccattcttcactgatggcccgaatgaggtctggttctcctcccccgacgaccccaaacaacgacgaggacgtctcttccccgagggttttgtcatttctctctgtttctatccccaaaggctcatattctctctctatcgacggtcacgagaaggacgatgatgccctcatgctctctcttgtctgaactacgacaatgccctgatggtaagagaaaaacctagaaattgagtttgtgtttcatttcatctgtgattttcttctactaattagtttagctttgttaatttgacacacttgctacattactagtttagtttttaattgtgaactcttttctataatggtgagctaattgcaagaatccaatagtggttctatttcttgttctatatctatgcatttacaatgagaaattaggaattaggttaggtttttgattaattgatgcattgtcctttttttctgcagtactccgtgtactactgagtcgtttttaatgatgatgatggtgttgttttggaagaaattgtaaagctctatatgttgttattccatttgattgaaaagccttaatcaaggtaattctttttcaaggtttttttttatcaagaattttgtagtaattgatttctatttgtgtgtatttacaatgtaattttagcattttttatttaatttatttcattttatttgagaaagtttggagattaggaatcttagattgcttatatttttattgttttgggaaaatataaaattagtaattacttttttttttatgtcactcttgtttaagaaattgtgtgagtattgcttttgtttttggtattttgattttatgttgttattcttgtttggtgttttgtaaatgtgaacctaatatacatttagatatatttatatatgtatgtatcttttgtgtgagagtgggttatatggttggattcataagagtattgagtgagaaaagaagtgggttgtgttgtatggttatagtgtgagtgtttgctattttattgtacatgctgcagcccaaaaattaaattttggtctcat

SEQ ID NO: 128503 - DNA, 548 bp, Cannabis sativa
atcccacttattacctgattaactcataatataaatataaactctaattattcaccattagacttattgggatattacatttggagtccgtggctcttcgtactggttcgatgtgtcatcagcggttgggttctcactaccttggttggtcggagcattggtgtcagctgcctcgtattcttctttgtatttttgggcctcacaaaaactaagatacgcctctttattttgattgaggtaatcaaatgggtttgccttccaaaattcataaaagacatctagggcgatcgtcttcaagctttccacctccttatggagcatctccccctcggtaccaaactttgtccgctcagagtcgagagtttcctctaaaacattcttctccttggtcaaatgggaaagaagagtctgaaggcctaccctcacatcgtttagagtattgacatccttcgctagagtatcattgtccgcttaaagctgagcagtggatggcattgttggaaatattttacaaggatcttatatttactaacaagtatgttatttaa

SEQ ID NO: 128504 - DNA, 956 bp, Cannabis sativa
ggtttaaacaattaatgttaatgtgttatgggtttaatttaaattaacaataatacatttatttgacaaatggttagtgtttagtactctccttgtatcatataccatgcattattagtgggtatcacgtttttatagatggcaccaaacccaattttacgatttagtgttatagaaaagaaaatattttttttagctattatttagaaatttttttaatattttttaaaattagtaaaaaaatatacttttttaaaagaggataatttttttaagtccctgagttaggtgggtcctaggcacagtcctagtctgcctatactcagggtcgggcctggatggcgctctgattagttatattctttaaaagctattttcttaagttataaaggactcgatatttaattacacaaataatagtatgacaccgagaagaatattaaacacgagtgatgctttttaacaattctctataattgtaaaataacagtgctaaacactacgtactaatacataataatattttttagaaaaactattaaaatctcctcatgttaaaataaattttttgagttaaaaattgaaatttactagttatcccattatctatttttactgatttaaaagtttagaaacagtttttacaaacacaacaaaccaaaacctatatagtatataggtagtagataatgaatgactacaactatatgtttattcttcttttgaaaaaagtgatgttaaattattggtacaaattggtttttatgtaaggtcaaaattgtataactaaattcactttgaaattgaatgccaaagcttaaaaaaaaaatttacttatgtaataaaatatttgtattttatttttttattgtaaattatttagaatttttttaaaatttacaaataattttacataattataatatacattattattataaaaaaaaccaattaaa

SEQ ID NO: 128505 - DNA, 1071 bp, Cannabis sativa
gtttgatccgtcacaaaaaatgttgaacttaaattaataaatcttatgctatataaatttaacatagctgaaattacattttgcatttatttttaatatatatttttgataaaatcacactaaacacaatatttatttaattaccaaaaccctaatgagattatgacttagtaactactaagtgtaatataaataccacaaattattcacacataaacaatatgagacaaacacacaattttctttttccatgagattatgatttgatagctactaagtataatataatttaaaattataatgcataataaaaaaatatgctaccaatatttttctttccaaattaaagaaaaaaaaaatgagtaattttttttacaatatatatctacagcaaactacttagaaactcttcttgcaagaaaaagaaatattagctcttattttaaattaaaaataagaccaaacacaataacattaaaaatgaagtgtaaccaaacttacacagataaagaatatgaatgtcttgaagtacaagtttattaacaatttcaatataataagttaaaatttcattaggccatatagctctatctgcagaatctgttgtgataaactaaaatctgttaatttcagaagcaatatgacattttaaaaacctcaacaaaaacttcatcccctcttttatttcataccatactgtgatgctcgttagttgttacgaggtgtttgtttccagcagaccgaaatactgttttcttcttctcctacaaacttctgtttcatccttactttctctgtttattttataatcattattttgtttttgataaaatggtggtgaggatgaaaaagtattagactattagacataaaataaaaatatgagatatgaagagagaagataagacgggtgtgaatcaagaaataaagaaaaacaatgcaatttattggcgtgtactccacaaccagctaataagcataaattttttttcactaatctattgagacatcataaagcacctggtgccgattagcaaaactctaattattatagcagcaaaagacctgatt

SEQ ID NO: 128506 - DNA, 2069 bp, Cannabis sativa
gagaggaagagagaggaggcggtttgggtttggaatttcaaatgagaggggtattatggagaatatggtaatgtggtcatatatgggaaatatgggatgttatggatttagagaaaatatttagggtattttatgcatattttttcaaatttcccacccaaaatttgtattgtttacgtggcaataaatattaggcaggtagaaagctgaacaagggaagactaccaatttgttgaatgaagatcccttatcaaaaaactagaaaacgatccgcgcttcgcgttcggttgtcaaacaactcttcaaagattaaaaaaaaatctcaatacatatatggtgcgtttagtaatactttcttaattagttttttatttttaaaattagaaaagtgaaaatattttccaaaattttgttctataaaactttttttacttttcaatttttcaattaaaaatttaaatttaaaaacaaaacaaaaaatcactttcaatattttcttaaatagttttttttattaatattttggactccgattctaatttactttagaaactgtatctgaccccggtcctagacttagacccgccctccgtctcgatctcggacccggctccgaactcgacttaaataaaatcaacaaataaaaatgaaaatgaaatttacaaaatacactttttttttattattttaaaattgaaaaacaaaaatggttatagaacacctttttgtttttcaaaataaaaattttacttttatttttgtgattaaatttttttaaacaaaagtattactaaacgccaccataataaatttgttaagaaaaatataaaagtaataaagaacaaattaatcaataaaattgaatgttgatttaactttaaatataagaaaatagagagaaaaattaattagaatataagttaaaaattctaatccgaatatgaagatcggattcaataatgtatgatgaattttagttgttaattaattaattaattaattaatatttagaaattaaatttagtagctaaaacaaaatatctataaatcttatttgataatttttttcagttggtatctaaatcgtttaagagaattcatataagaaggttgaattttattatgtatgaaaatttttaatcgttaattaattaatattaagaaaatataatttagtagctaaaataaaatatctattaattaattagatactttttttgaaactaattaattagatatttcctttcaaaaaaaaattaattagatatttagaaatataatttagttgaattcaaaatatttttttagtttgttaactaaatataatatttagattttaaatttagtagaacaaaatatataagatgtttgtagttaatcgtatataaagaatttttagttaaataataaattcatattcaaaaattaagtttaatagaataagaaaataattatagaaagaataaataaataaattagtttggagatattttagtttgtcatgtttcttttacttatatcaatattatgtaaattatttcatttacataaaatatataattagttttgattttgtattatataaatttacaagttgatacttgttctactttattttaggaattataattcatgtaaattttaatttggccctttaaacaataattgagagtttggaatttttatggtagatttgattaaaatttagagtttgtaaaaattttgatagaagatcggtgaaatagattttttatattaaatgtttttttttttttttgaacaattatattagatgtttttgttatatataattaaaaaaacaataaaattaaactaatttatatttattgttactggttatagatttttttttgctgagaatttttagggtgtaagccgtatgaagtatattagttttttttagattaattaatgtaaaaaaatggagaaaaagaaaaaagttgaataaatttattttaaagtaccacataaatatatgggtaaataccattttggacctgtgttttgcaaaagttaccgattggaccctgtgttttgttaaatgacaa

SEQ ID NO: 128507 - DNA, 671 bp, Cannabis sativa
  modified_base (85)..(91): a, c, t, g, unknown or other
tggtaaaataattcccaacaatgacttactttcatgtaatatggatttgaaacgaatttttttttgtgttgatttggatgtgttnnnnnnngtttatgtgttatttgatgattgaatgtgttttatgaaaattttctaaaaaataattttattttcattgtgaaaaaattttatttggattccttgagagaaattaagcaatttttgtttttacgtaattcaattctgatgaaatacgaagaagttatgattttttgaagtttcagattgaattggtgtcaatggtgctcaatcgcacgaacaaagcactcggacaaggtgctcgtgtgcacgcatgtgcctaggacatcatgttgtttgaagcgcacgctgatgcgcatctgccaacgtgaccttgcatcccgcgcacatcctctcctacagctgatcgaggtttctcaaccagcgaggctgcaaatccctctgctctgtgcgcgcatgggctgcttgcagccttcttgggctacacgtgcaacctcttgggcaaccacacctatttctgatttttgtgagattttttcattttcgatttttcccaatttcaaacccaaaaattcaaaataaaatattattttaaatatattttaacttaaatatcaattttaaattaataatatttaatttttaataga

SEQ ID NO: 128508 - DNA, 4208 bp, Cannabis sativa
ttgatggatcagtagagatccctgcctgaagggctgtaagttgtgtactatcatccaaattcctaactctacccgcagccgtgctgaaacgacttaagtatgccttaagagtctcgtcgggctgctactttatattggttagcaaggccgcttcgagtcgtctatccctagcggcctggaactgtttcttgaaatccctggacagctagtcccaggaagttattgaatggtgagtaaacttgttaaactagctgctcgctgctccaacaagcgaggtggagaacaagatacaacgtaaattgttcgtcacattgctccctcgcattattgtattaaagttgtccaaatggacgaccagatcagtagttctgtcatacgacgagacatgcgggtttttgaatcccgaaggaaaaggggtactcatgatatctggatgatacagctcaagctcctcgtctgagtcgtatccagattgtctccctagttcccccacttgatatctcctgaacttgtcctccagtttgtttattcgcaattggatgggatcctcttactttggaccgagttgttggcaaaggtcaggtttctttcgatccaagtgctcgcccagatccagttgggagtaattactgaaagacctcgtcttactcacagatcatgtcctactcatagactttgtcctactcaaagacttcgtcttttagtgactcgccgatttactgcttccaatgatttctcaatcattaactcgttaagtactttctcctcttcgagttgatcgactgtgggtccttgactgcctcgaggtcacacttgcttcttcacgctctattctttctccctgagtgtggtttgtcttatttcccccattagggtccgtatgagtcctcgctctatgtgttcgggaaaaatgctagtgatttcttacaagtgacctacgttctccaggttgagtcctaagatcatcctcattgtcatgaggaatttcttgttcatcaattttcggttgcctcccatcctcatttcagtgagggggttctggctgatcattctgattttcagggggtatctcatcttcactgggttgttcttcccaggcattttcatatttcctggttcgcaagccacgaggcctacctcgtggtctcctcactccaagtttagattgattttgagcattcgtcccctgtgccgccctggctgcggctgtatcacattctaattcatcgttctgccgctgctcctcttccagacagtgtcttaggcggcagttttccatttcataagtaccttctaccatagactgggtacctccacgattgggctcttcatccctcgtcccagggttctggccactaccacgctgagttctcctcgagcgtgttgttcgcgtactaggaccaacgttaggttgggtcctccaggaacgtgtggtccgtgtgctggggcgaccctcatgtttagtcctcctggaacgggtggtccgtgtagactacgggttggtagaccttctggagcccatgggccctttcccaagacgatgatgagtttcctcatgtggggtattaacattttctgggttttgagccatgaaggaggttatttttcttcaaaagaaaggaggatttttttttctgagccttttcacagaggctcttaatgaaagcaccaaactgttaatgcaaattttcgttaaccaaatttgagccaaacagttacaatctcacacagaaaaaatgaaagcaatgaagtaagagatatgaacacaagggatttttttacatagttttgcagctaaaattctgcatagtccacgagtcaaacttattcagatttctgatagttttttcagggcctcttttgtatgattttttcgtcccctttttgatcttacttaccactatttataattacatagtaggcagttaattataaagttgactgtaatctttttataataattatctgctaaaatcatggggtttgttacatatcatgtagtgtaaatgcggttattatttgaaaatcatatagctgtgattttttggcttttattaggtcaatatgattgtgtgtcttaacacgtctttaattgttacgtccaaaaatatcttgacagggacttggttccagtgaccgtaatagcgagctagagcctttttctttatccttctgaggtcaacgaagtatgccttgttgcttctttgtgacgatcacagatcttattaacaaagagttcttcgaggcttgtttgaatgttagcttctgactcgtcaggattgtaagcctcactgagaagatgtctgaaaataactgggggaagttacaggaatgaaccttcccatagcgagatagacacctcgcttatcggatctcgagccaacccacttgttatacttagtttgtacgttatgtactagtgttttcgcagtctatatgcgtcgcttttgtctttccagatgtaacgtacttgatgcctcgctatattccttcaatgacatatggtttctcgttaatatactaagcaacaatttgtatatcttttccccgcataaaactttacagtcaacgggtttgaatatactctgctacttacgcaattaatgagttattgcacaaaaagtgacctcatcgatttgtattccctttatcttgacacgtgtcttccactgagatggtagccaaattttgggtacaacaatatccctctcatattgttgttgatgattatagtattgtctgtacagtggaaaattatcattattatataattcaaaaatttagtcccatgccatatcagtgcactagatttacactaatgtgataatcaacgatatggtttacttaaacttatataagtggaatgtctttttcagagcattagtaaagtgagcttatataagatgtatttgctatacattggactagaccgatgttaacgcagatttttattaaccaaaatttgagcctaacagtgataatttcaaaaagaaaaaatgaaagcaatgaagtaagagatatgaacacaaagggatttcttacgtggttttgcagttaaaattctgcatagtccatgagtcaatcttattagattgctgatagtttttcaggacctttttttgtatgatttttcgtcgtctgtttttttatcttacttgccactatttatagtcacatagtaggcaattaattacaaagttgactataatttttacaacatttttcccctaaaatcatggggtttgattacatatcacgcaatataattgcagttattatttgaaaatcacacagctgtgattttcctgcttttactgggtcaaaatgatctagcaattaaacacgtctttaattgtagaattctgggatatctcgattggattttcgttccaatggccttgatagcaagctgaagcttttctcttttatcttcctgaggtcgatgaagtacgccttgctgtctctttgtttgtagacttaatgcttccttccggtaactgcaattcttattagcagatagttccccagtagacatttaaatgttagcttgtgactcgtcagattgtaagtcacactgaaaagatgtctgaagtaaactgggggaagttataggaatgagccttcctttagcgagataggcattttgtttattatgtctggagtccacttgactattgtacttaatttgtacattttatattgttatcccaattttttcactctgacgtggcatcacacaatgatgacacttggaatcaactctgggtacctgctcgcaagacacatgccgaacagggcacctcatacatttgttcgggcgaagtcccctagaccgagcaatgagcagtccgcgcaaaaccccaacactaagcaaattcagctttcgcatcgtgagtcatcaaaaaaatccctataactttaggatcagattacagagatatggcaagctgtccaaatcccacggttagtgtattctatattaactacacaatctttctgcttatattaattataactagaagggaaatacttcctctccaagcttatagtcctataaatagtgattcatattcagtgggcaaagggtcgagaaattttttctacgaattcatattcaaagatactgttgtaagagctctaagaaaaggaaccatttttcttgttcttatgtcaatacaaataaggaggattgggctattaccgaactg

SEQ ID NO: 128509 - DNA, 1778 bp, Cannabis sativa
aaactctctttttctgattttgatcgggcaaataatcgttggaagacaagaaaaggtacgtttattacttgtcttatttaatttttttagtgttatttaaagtttatattattaatttataattgacactaatacattacatttctttaattctatacatgaaggctcttatcttcccagagaagttgaagaggctatgttgttcacctttggttgactggaaaaatcttacattttttactagatatgaactgaagagggaatcaaacttaaaagatgctctgcaatggatttctcctacattatctttgaagaaagggcgtcatttttacaaaagttcttttaaagtttttgaaaattttcaaaagaataaagaagcgtttttttgattatattatattttcaataccttgttacttggctgactggaaattctatattatattttcattaggaaaggtgatgaaaaattggtttctcaaatgtttggacattttttagctgtataatataaagattctaaagtgattttctgctattaattcttttttgatgatattattagtaactgaaaaggggcatccattcaaaactattgaatgtgtaacctataattggttcttttgagattgtatttactttataggtagtttaaaactaaaaaatttgatgcttacaaaacttgatctcacaccaatatttctgtcaaggattgcttcaatgcccaatctctcattgtaacaagttatctatggtttcatgatgttttattgtgcatattccaagttcaatggcaactataattcacctgttctgttcatgttggtttataatatgctcaaaacaggaccataccagaccaaccaaccaaccaagactcataattaacatgaaaaattggtttgagtttggtctgtgaaatgttctgttcttcttagctgtatagaataagatcccatgttaatttatgttctcttattgcatctgaatttgaagttgcttaattctaacagcataatcaaccaactgcaaagaagacaccagctcatcctaagtactactacaccagtagtaggattggccattataaggtacccttagaatagtagagctgttgtgagccacagctccatctgttgataaacataacagtctcattcacacagttgaccactatgatgaattcatatggaggccttattagaacaaaaagcctttggataatgggactacatttccaaaataagtacatttgcagtatgcctcagagtaggtgaaagtaaaaactaaaaaccgtcaaactgtaaacgaccataaaactggcgttaaaaaaccgaaaatttggtgtcacatcatcactaaatttggcagtcggcttttacagttttaaaaaatgaaagttgcataatatatatttgttgacattatgctactttcctaaaatatatatgtaaaagaataaaagatgactgatgacaatgtaataatagtaatcatctaatattttaaaaccataaataatgataactatataaataatatatgcacggtataatattgattatgcaattaggaccataaggaccataatgggatgatcgattttattaagtgcatttaagacatataataacaccttaatgactatatattggcccattaaccgatagtccaccatcagtgatgtaggcctaataacccacttattttactccttagagtagagtgtttatgtgtatatatatactagcaaaaactacgtgcgaggcacgtatact

SEQ ID NO: 128510 - DNA, 3085 bp, Cannabis sativa
  modified_base (2126)..(2130): a, c, t, g, unknown or other
  modified_base (2920)..(2924): a, c, t, g, unknown or other
atttatatgcaaaagaattacaagacagttggaaaacagttaaacaaagtaactgaattacaacagactgattcagttgatagcaggtaagtgtatgttaaataattttttttcgaagcataatcattttttttattttgtggaaaccaatttctatgttttttatttgttattaaataacacctattttctatcattgttgtttgtaattgtaacgaaatgcatgaaatttattatatgttttatataaaaatttaaaattttagcttgaatttagatgaaacgaaatcaatttttttgatactgtaccttatctatcttcgaatgtttcccttagttttgtgaagaaccattcccaagagcagtcatatcctgagtttcctatcccaaatgctagattgaatatgctgttgtttgcatccatagtagaagtagtgaatagagttcctccaaatgatgtgtttaaaaatatttcgtcggctacaatgactggcttgtaatgtttccaacctactattgagtttgaaaatgctagatacaaatatttgaaacgatctttcttatctgtttccaattgtgcaattattttaggatttgctacttttagcatgtgtaggtattttggtagttgttgataagattcatctttccttcctcttactaactccaaagttttttctcttgctctccatgctttttgatagctcattgcaactccaaaatcaccaatcatatctatcataatgtcatttggtctatgatctcttttgattgacagaattttttttatcatttctgcaatcatgttgcagtttgcctgcttgtggtctcccattacaatatccaatgagcagttgtgatattggacatatttttttactttgaatgttgaggtacttttgaactttgaagctcttagaaactagttacagtgttcatccacacaagtcaccacatactctcttggttcagatcttttggttttaaattggaaattattcatcatagcaaaaaaaaaacccatagcagtcttgaatattttcttgtccttgtaaatctgtcctttttcaattttaaaaaccgtatgatctgttattatttctctttcttcttccatccttttccttttgttttcttgtgttttcctaatgatacaatcggcaacactatcagctacttgaaatatatttagtaatactagttgttaacccaaattttcgttaaccgaattttagccacacgatgataattcaacacagaaaaaaataaaagctatggaaaaataatatatgaacacatggttttttacgtggttttgcagttaaaattctgcatactccacgagtcaatcttattcacatttttgagtattttttctagggcgtctttcataagagttttctcctcccttttttgagattgtttaccactatttataattgcatagtgacagttaattacaaagctgaccaaaatatgattaaagttattatccctaaaatcgtgggatctgattacacatcacaaaatgtaaatgcagtgaatgattttgaaaatcatatagctgtgattttcccgcttttactgggtcataaatattgtgtattaaacatgtctttaattgttgattctggagatgtctcgacagaaacttgattgtagtgatctcaatggcgagctggaaccattcttctttccgaggtcgacaagatatgtcttacgtcgatcgcgggtatacaaaaatcttttgacttgccaaggttatgagtctcgctttcgttagttggatgaaactataggaagttttctcgtagcgagatggtcatctcacattcttgtcttcgagccgatctgacttttacacttagtttgcttattgtcagctaaggtatgtgttactcttctctagtgcctcgctattctcctttagcgacatatagtttctcgttaatacactaagtaccagttcgtacattgatttctcgcctaagaccttacagtaagcgagttacaaatatactctaatacttacacaattaatgagttattacataaaaagatattgcactgattcacattcctttttccttgacacgtgtcctctagctgaattttgggtataacannnnncccttaaaaagttcttttttagtaaaaagagctttttaataattacggagggtattttcaacaaaatgctttcttgaaaaggacacctcctttgattctggcggttgtatggttttaaagatcattatgaattgcctattcatattctacacgattcccagccgttagatttctcaatcattggctttctcgtcactaaacttcgtgtataaatgtgcggctcaagcttgtcatttttgacaatccttctggctctttagtgaaatctattttcagaatgatttacttccttcttgtcaaaatgtcttttttgagtttagaagtttacccttctagactcataatacccagatgcaccaaccattttccatttgttcctacagacttcaggcctcaaccggagccagaatgatggattccagggctgaagaacttccgaccaatccaaaccaggggaactctgtagcctgccatggccgatcctcacaagtgatcccagagggtattgatcttgtgagcaatctcaaatatcctcctcaggctgatgaagaattccagaggaagattggcatggtttcaggtggatctgggaaggaagttagcgtggtttctatcacagaatccagtcaacccaagatcataacctgtgccaggagatctttacgtcagcctctctccagtgttgagaaatttcctgaggctgggacatagatctcggcttcaggaaatgggatcttgtgatgatgaggggaatgaggccagtgtagagatcaaggctctcttcgtgtannnnntctttctcaagctatgtgtagttgatctttttctgagctacgtgcagatggtctttccaagctatatgcagacggtctttctcgagtttatcggcttcccctctcatcctttgtttaggagaatgacttaatggtttcccctagcggcatttttgtaaaga

SEQ ID NO: 128511 - DNA, 1670 bp, Cannabis sativa
  modified_base (33)..(60): a, c, t, g, unknown or other
aaagaccatattttatgtaaataaaatcaaaannnnnnnnnnnnnnnnnnnnnnnnnnnnaaaccgtatttttgttgtttttgtacatttatgaaattaacccttataaaaatgagaatggttgtgggcttctattatgtaaactacacagttaaccttctctagatattaaattaaagttttttattattacttttatgaacaacaaagtatattaacattttgttatctaaataaaagtgcatgcaatggtggtttcgacctcaccataaggttcataaccataaggacacctttacacaatatcattttggtcaataatcctagtaaatataaaaattagattttttggtacaaaattttgaaaaactaaaaatatgtacaattaagaaacaattatgaacagaacaaaaaaaaagctcaaaatccagtttcaataaaaacttgaaacatacattagcttttcgtggaaatttctttgtttgtactttaacgggattttcttcttcaacagtagcagccttaaaaaacatataaaaattggtttcaaaaaaattaatagataaaggaaaaaaaaacaataaagctcaaaaaccagattcaataaaaccttagaacatactttaattttttggggagattttcttgtttgaactttaacagtatttttcattttcaacagaaacatcctataaaaatatatagaaattagtttcattaaaatcaattaagagagtaaaaaaaacaataaagctcaaaaactagtttcataaaaagcttaaaacatactttagcttgtcgtgcagatttccttgatcgtactttagcctttttacaagggttaaccttgttagtaagagatagaactttaaaatctgatgccctttccatctgacaaaagaatgagtaaaaaataaaaattagaccaaaaaaacttctcaatcatgaaaacaaacataaaaaaaaaattgcaaaacaactaaaaaaaatatcaaaaaccaatatatagaatatttaataattacaaggagaaaacatactaaaaaccagtttctatcaaaattacaaagaaataaaaatcaacaaacaaaaaaattttaaagaaaaaaaacacaacaatgttgattaacaaccaaagacaaatgagtattatttgctatagacaacaaaaatggtaacaatgatgagatggacaaaaaaatatcatacaattcaaaagaaaaccaacaatataatactaaagacacatccaaaccaataaaaaaaaaaatacaaaatccattaacaaaaaagaaaagatataaactctaataaaaaatgggataagagaccaagagggaaaataaggacatcaataaattagggccaaacatggtttctaacaataggagatacacaataataatgtctaaaaatgacacttgaatcatacatacataataataaattcaacaatgcaacactaagctctttcatttttaacattggctcccaaactaagaaacatagaacacaaaaaaaaaaaaaagaaaacccctaaaatgtgaaactccataaaacaacaaaaaaacccatattaaaaaaagggaaatttgacattttatgctaaaaggttacacatggttttaaaatattcccctcactacacattttttaactatacttttaat

SEQ ID NO: 128512 - DNA, 613 bp, Cannabis sativa
tatatatatgaatgatttcttaatgggtaatacccattaatgggtactaaaattataatgatgtggcaattggtgacttattataacaagtcaccaacaagttaatttccttttttaatagatttatatttttatttttttatggctatccaataaaattagatatcctcaaataattataagagtccattaaggaaaaaaaatatccctaaataattttcttgaagcacgtaaaagcttcaaagaaaaaaacctctaaactaagaatatcttgaggttacaagctaataatcagcaaggttaccatcttccttcttcaattctttgattttttagcatttctttgatgggattgaaagcttgggacataattaaagatagtagctaggacatgaaatttatctgcgaatagtgggcttaactacgtagaatagaggttcaatgtggactaatcaatatctaatatacatacatgtacagccttgacaaacaacatggcgcttaaataataagatggggaatttcataaataatatctacaaagccaaaatggagatcaatggaagaattattaattcttcgtgtttgacattaatgtcctttatcatttaag

SEQ ID NO: 128513 - DNA, 533 bp, Cannabis sativa
aaggaacatgtttgctacttccttaacatatatgcacccgtcaatcgagatcaggattttagcatcctcttgcagcatttttgaaataagaacccgagcatgtgaatcattgtagtctttgcagtgaactttgattggaccctcatgttcgtacagataagctttggccacaatgttgtgaatattgtcagagcagagatatactaactgattaagggccttctattcatcgaaattgtacatgagaggtggctcatttaggaaaacaaactcatgagcataattttgtgatcgatcgactctcatcctcatgagcgtattgctgtgtaacatacgcgtgatgagccacctctttttcttcctcaaaaagtcaggccaccatgcacatgcaaaacaacaatgttaataatataaaacaatccaaaaaaaaattcataaaaacaaaaagtaaaataatgtacattacagaaatgaataaaaactatatttataccttaatggatgttgagattcaacgttttctcaacaaatat

SEQ ID NO: 128514 - DNA, 736 bp, Cannabis sativa
cctccgtctctcgtcctccatctcccattttccatagaagcccaaacgtctgctacactacattttaattgaaagttggagctcgttaataggtaagtttatttttaaaatatttgttaaatgattgtaaaagtatagtctattttcggtagatctatgtagttgttgtttgaatttgtttgattttgatatattttgcggtgaaatcgtgagatatcatttttagagtattctgtgtgttcgtatttttctcgacgctttttcaatacattctcgatgggttcttgacgcaaatgtctcaaggtcagggaagaccttcctcgacagtttttcgataggttctcgattatttatcaaaatggcaaataattttaaatttgcaaccattcttgacctgttatctacgtgttctcgattgtttgtcagatagtttttgaatagtgtgtatagttgtctttttaaacttccttgtctcatgttatcagtaatttctcaactggttatcaactattttttgatgattcattatttgttattttcaacagttatagattgctttctgacaggttctcaattggttgtcaacaatgtttcttattattgtaattttttgttatttttgttattctgattcagttgtttttagtttgtattaaattacaaaatcgtctgtgtttatggttgtattgtatgatggtgtttggagtgttgagggatttaattgggtgtataaaag

SEQ ID NO: 128515 - DNA, 871 bp, Cannabis sativa
taaataaaatcataccccattcacttgatatgactctaattaataaagtttatttttatttatttatttttctaaataatgcataatcttttttatcatttttttaagagctatatatatattttagacttgacttgccttcaaagcaagagattttgcatgtacaaaaaattatatatatgaggtgattttaatttggaattttagcatgaatactcatctgagttttgttctatatgataatttcaattattaagattttttttttgagttctcaagtttcatataaatagtagcatggaatttttattgtttaatttttcacaaaaatcctaatttttaaatgaatttttcttttatgtgtaaaactatttgaaggtgtataatatttataaacaataccaaagttattcataaaatcttataaaggacttaattaatagtgtttttgaataagctcaagtagtagttgattataatatagggattattttttaaaaaaaaaacatgaaaaaaatggaaaaattacaaaaatatagttgtatagtttttttcaatctttttacaatttttaagattttatttacataaaatacagtcttttgatgtatttttatgttgtactcttattattttgctgttgattttattattatttgtatattattttttatgttgttttaatattgtttggatgtaattattttgtcgtttttgtgttatttttatgaacacaataaaaatatatttaaaaaaaaaatctttaaacgtaaaagtgtaaaaatctacctaaaataataataggtaaataccattgtggaccctatgttttgcaaaagttacagattaaaccctctattttgttaaatga

SEQ ID NO: 128516 - DNA, 1031 bp, Cannabis sativa
  modified_base (545)..(548): a, c, t, g, unknown or other
gttagttgtgttttttttattgataaatattattttagattttatattttataaaaattattttttttgactttttattttatattaaatgataaatcggacattgtaattttataaaatggtacaaaatatcactttaagctccattttttttatccaaatagaacataatgttataacttaatattaaggtattgtgaccaagtgagttactttttttttgcatctatttatattagaaattagtttcaaatttgttatattaaaaaaattacaaaaattgagttcaagtattattttgtaaatttaaaaaatgcaaaatttaatttatcatctaataaaatagaagatccattcggtaatttttacaaaacataaggttatttatccttttataaatatatataattatggaataattatataagacactattttttataaaaaaaaaaaaaaaaaacttacacttttacgtttacagaattttttttacatttttacggtttttcataaaagcaatacaaaaacaacaagaaaactacatnnnngtaacataaaaataacatctaaatgacattaaaacaacaactaaaaatagcatacaaataacaaaatatcaacaataaattaacaactatacaacataagactgtattttctgtaaataaaatcaaaaaattcgtaaaaatatttaaaattctgtgaaattgtatttttgtaatttttttattatttttgtgatttgtcaaataatccctataattatatgttgaaacccaatattgcacaatgggctctatgtagaatattatgcattgaaaattgataaataaagaggaaattataaaaattaacatactgcggttcgtattcacgctattttaaattactctttgttatttttatacatatttctttaattatgtatatattaaaaaaaaaaaaaaaattacactccataccatttttatattgtcctcttttatttttatcctcttttttaaagtctgtcatttttacctcttttttta

SEQ ID NO: 128517 - DNA, 638 bp, Cannabis sativa
tttcgttggttgaagaaataagcatgtgctgctgtgaagaagagagggagctgctgtgagataggaagaagatagaactagggttttatttttaagttttatttgggcccacttaagtattttagtgggctttttaaaagttttttaagtcttttaagttaggcagcaaaaaaataaatttacaatagtaatttgggcctttttttagggctcaaatagcccattttactttcaaaatttgaggcgcacgcctcttacgcctcacgcctcacttctcctcagcaaggcgcacgctttgatgcactattcaaatgcctcagcttgaggcgcgcctcaaaaattccttaataaacattgctagaagcttaggatgtgtgagatattattgagaatgatcataaaaaacaaaacgacattgctcttttccaaactcaacaagatgccttaagagattcaagaaagctctctaccttatctatcaagcaatggatgaaaatgtgttcgaaaagatattgaatgcatctacagccaaagaagtgtaggagaagcttcaaacttgcaacaaaggagtggagcaagtgaaaaagattcgtctttacacactcttagaggtaagtttgaaactttatttatggaag

SEQ ID NO: 128518 - DNA, 569 bp, Cannabis sativa
  modified_base (31)..(35): a, c, t, g, unknown or other
  modified_base (461)..(464): a, c, t, g, unknown or other
gatatcctacaaaattttgagaaattcagannnnnttacaatatagaaaacaatattcaaatagtctatttagtcacgcgtgcaacagatagagatgtatcgatgtatcccttctaagggagtgcattataaattttcctatataacaaaattaatatttattagtaatatatatgtgttgattttaaaaacagtatacgttccaaggaaaagaaaaaaaaaagtaaaaaacaacaaaatagatagaatttttttatgtttaaaccctcgcaactatcattttacttgcaattaactctctaagttctaattttggtgttaaaactctctaaatttttgaactgttagtaaatttaaattgtcataaatagctaactgccaacataaacagcttatgtgtacactcttgtatacgtgacacgtttatatattggtacactcagtgacggacccagaatttnnnntttgtgggggcttatttatcataaaaaaatatttataactacattataatcacttttattaaatttatctaattttatgggggctattctactattttggtttat

SEQ ID NO: 128519 - DNA, 546 bp, Cannabis sativa
ctggtaaaataatttctaacagctctcccaaccaatattaaatcatctgcaaagaaaatatgggacagagtaggaccaccccaggaaagacgaatgcctcggatactaccattacatttggcctcttgaaacagactggacaaaatctcagtcgcccaaataaaaaggtacagagagagtggattccgttggcatagaccacatgacagatgaattgtgccaacctgaccccatttaggcacacattaagagaagtaatggatatacattaagaaacccaatttctgaacatgacaagcaaaccaaagcaagtgagaacatgctcaatgaactgccatctaatcttatcataagcttttaccatatcaattttgatagcaaaaaaaccttttgaataaaagcagcctgggtggggcaaaaaaggcttaatcctattggcaatgattttcaatacagaaatttgattatatatgcatactaatgggggaaattatttccctaaacttatgcatttcaaaattaaaaaaatatgaccactttacatta

SEQ ID NO: 128520 - DNA, 848 bp, Cannabis sativa
agctacttgaactcaattgagttggtctccccattcctagtttctgggttttgatcattatcacgttggcttctccttgagcgtgttgatcgtgttaaatgtgttgttcgtaatttaggttgcctcagtgagcccattcgctcttttccaggacgacgattagtctcttcagggtgagtgttgtcattttccccattatcaactatggagaagaaattccttctttggttaggagggatttttctgagcttttatcatgtaggctctcaatgaaagcaccaaactattaacacagatttttgttaacgattatgagcctatttttgtaatagatttgacacaaaaattataaaagatctaagaaaaataatagaaacaaaaataacaccaggtttttacgtggttttgcaattaacgctgcatagtccatgagtctatcttattcagatatttctggatacagaattaggatttttacaatcagtacactcatttttctctctaagattttccgtccctttttctgcataatctgtccctatttatagtaatataggcaggtagttaattacattcaaattcaaatcccataacgatattccccgaaattgtgggctttaattatgctccacgtaaataaatgtagttaatatctgaaaatcacacagctgtgatttaaaccattttaaaggaagtcaacgctaacgtggattgtgacatgctgccaaacgcatctcccttaggcgtcttgcctagtacatgaacaacttggtttattcataagccttccagcaatggcatgagcaccagtgtattgagcaaatttaagaactgctctttgaccataa

SEQ ID NO: 128521 - DNA, 3482 bp, Cannabis sativa
  modified_base (2892)..(2896): a, c, t, g, unknown or other
  modified_base (3434)..(3439): a, c, t, g, unknown or other
actgaaattacattcaggatataaactagaagctttcgcaaaggaatgagctactaagtttgttgaacgcttaacaaaagagatagaaacatgttttaaagtgacaagcaaatttttacaatctttaatcacttgaccaaataaagagatcatgtcaacagtgcttcgaattgcttgtattacaactaggcagtcggttttaaggatcacggattgccattgtttttgcttgatccaacttagcgcctccctaacaccgatcgcctctggaagctctggtctaaccgctccaacacgagcccttatcacaccctctaccagaagaccattgtcatttctggctacaataccaaagccataaccttgattaccaccctaaattgatgcatccacattcaccttgattttgttagtattaggggcactccaccgctcggcaccatcacctgataatgaaccagtttgtgaagtctcctaactaggagcttgagcggccttccattgtgcaaggtagctaactgggaatgcataaagataagagacattggttgacttatttgccataccttgtcatttctcgctccccaaatcacccagcagagagttgcaatgaggtaagatttaaaaaaaaatcaagaggtaaaagatttttaaaaaaaaaaaaatcaagaggtaaaagattttaaaaaaaaatcaagaggtaaaagccaaaattataaatcaatctcgcgctcggctaagtttaaagataaggaaaccagattttttctcccaaattttttcctgaattagtgatattaaaggcttttaagtgagaataaattgaagcaaagctcaaggtatatcgataagacttttttctttgtttttgatggagggaaagatagattttatatgtgattttagagtttttagttctgttagtatgttatttagttaggaagtagtttcttgaagttttggaccagaattcatgtttgaattggtgttcttcagttgttgccctagtttgaagcaaagtttgagttttggaagtcaagctttgttcaataatagtaaatttgtaattcttggattaaattgtgttctgatctatgggataggtttaaaactctttaataagttggtctagaagttttgaaatggtttgggcaggtatgaaaggaaagaactcaaaaatttctgagttggattttctgttgtagaattggttgataagttctatgaaccgattaaccagttgacccaaaaaattggtggactagttggtcagtcatggggtatctcaattttcatgttttcttgatatttagggtattgccaccttatttatcaatagagaaactttgaattatgaatttaagtcctagaaagttttttagggagacacttaccaatttaccgttaatgtgacttaaggcctttgattgtcgagtaattttttcctctcaagttaattgggaaacttgatttcaaaattgaggtaagattagtattcagatgcatatatgagcatgttttagatttacatattttatgatactgtttacttagtatagtagaaataacaatatggatgtacatatgtttgcatttagatactgatatctaatgatactatagagtgttggatagtatgtattgccaattagattaacatatcataaatggcattatggtctgggataccgacaaatatatgttaggcaatattgaatgtacgaatcaatgccacgactagagtagtgagtgcattttggtattatggtaaactgtacttagttaagaacgtttgagactcagttatacgcattggacgcagataatagacttgtggtaattgggtgtatggacacctgtttacaggttagatatatgttgtatgtgttatacttttcttattgagtttgtcaactcacaattatgattctatatgtaggtaaaggcaaagcgaaaattgaacagcagtgagtgatgagcttggtaaagatttgtacatatccggacggttagacctggagggttgcgatcttcgagacaacgcatgcttagttttgttaagtccttagatgacacttttgttgttatacaaattatgtatctttgaaatagatttcagtatcccaaactatgaataatttttttttttaaaatatattgtatgtttagtaaagttttaattattataaatttttttattaagcaatacactttatgataaaaaaattttgattagcaaaagttagtacagtacttaaaaaaaatactgtaatgcctaagtaagtagggcattacattatggtggcgtttggttgggagaaatgaaaacatgtataagaataggaataggaatagaattgaataaaattttaaaatgcataaaaaaaattgataaaaaatcataacattttttctcatattacattagaatgatctttccttccttttcaaaataaaattgtctttccaccaaaatagtaaaaagtaggggtgttcataaaatactcaatccaatcaaatccacacgatccaatttaatccaatccacaaagtgtggatatccgcacttgtgcagattagattggattgaaaaattcaaaatttgcacttaagcagattgaatgttgtttgacatataaaagtaactaatccagtccaatccacatttttttttaaaaaattacatatacaattaatattttgatttaaaaaaataataatttaaaacttaatatatatgatataaatatatattcttatatgtgaggagaatataatttaaaataaaattatacatatttttttacatacaattttttcttcttcttttaaaattattatttgttattttatttattttattttgttaaaataacaataatttattttatnnnnntgttagttatgtgaaaaaaaaatttaataaatattaaataattcaatattaaaaagtaatcgatccaatccgtacttttgtggattggattggatttgagctattgtgcgaattgaaatggatccaaaatataaaatccgcacttattagtgcggatcagatgcactataagcaaaatagtgtggattggattggattagataaacacccctagtagaaagagcattctattgtaacgatattaatactttgaaatgtaactaaataaaaaaaatagaataaaaattatttcttttatatctattttattttattacctccaaccaaacgccacctataagtcttaaaaatataactgtgattttatatatgtttatatatactagatgagagttacgtggcaagtcacgtaaatattagttttattttaagttcttgtggtttttgtttaagaatttagtgactaattgtaaattatgctatagacgatatgttttataaaactaattgttaagaatgtcataattgtgtatataannnnnnaatatacacattgttattcaaatgttttatgttataaacgatt

SEQ ID NO: 128522 - DNA, 946 bp, Cannabis sativa
ggcctattaataagaaaagaaaagcccgccccatttcaatcctagcaacttcatcttcttcttcatttgtccttagcaaagactagtcgcacgaacaaccaacactaatcacacttcttcttcttcttcttcgttcatcctcatccccaactgcacgagcgagaccaaccatctttttctcttccgttcatcctcgtccccagctgcacacgaccagcaacaacagttgcacgagaacaccaactagagtgccctaatcgtccggtcctcctctggcccatccccaaccgtcctcttctccacaagctcatcctatccccaatcttgaaaaaatagcaataagaacttatgatttgttcgatttgatgatggtactaaaatttgttcttcttttgaattttatatttgttgtttatttattgagaaaagaaagccccctaataatatttgacttttagatataacatttgagacctttaatattctccatatatttggttgataagtaaatacaatcaaaaatggtgatgaattttttagattttgacctcaaatttctatttaaacaagaaataaattaacaaaattaattttccattatttgatttttttcaaaattgagaattttttttttattttgaaataaatttaaatttttttttataatttttaaataattatattaggtgggccaatacaaatgtgtcacgtgtacatgatggtatacgtaggcaatccatgtcagcagttaattatttaccgagttttttggaaactaagtatatttagagcttaaagaagataaaagataataaacaatgatcaaacatatttttacgtggttcagacgttatagatccttagtccatgagtctatagtattggcctcactaggcaaatatttatgagattacaagatggttacagtaaagactactctacttct

SEQ ID NO: 128523 - DNA, 676 bp, Cannabis sativa
atatataaaaaaataaaaataaaacctgtagtgaatctacaacaaactcatcaatctacaataatgaattgaaccattattttcctgcaacttttttttttggttacacactcaaaattctactcttactaatccccttaacttgctacatcaaaacatttgagttaactatggaattatttcacaacaattcatttctggcacgctacacattatagaccaaggttgtaatgacagtcgaaaataccatcttcctgaatttggagagctttaatctccctacccactttaataagactggcagcgaatgaggagtgattctccattgcagtcaatctttatcctattgcaaatattcttgggcaaaagaacattcaaagaataaatgtaacattgtttcattatctcttttgcaaaagagatagtaggcattaggtactatattgtgtctatgtaatcttttcctcgtattcaatttatcttggacagctatccaaagtgcaattgttgcaagctaacatttgacaaaattgccctaattttattttttttttataaacaatgccctaaaaaaatttaaaattttaagtacatatgtaataccccggaattaagaaatggattagcaaaaaccctaactagataattatgtataattgaggaattatattattat

SEQ ID NO: 128524 - DNA, 1345 bp, Cannabis sativa
agatatttagtagatatttagtagatatttagtctcctaactttgtatataaatatgtattattctatgaaatcaacacacaattcgactcactattttctacagttgccaagcaacatattattttttgatgcaaaaaagttctttttcgtctattttcaaatgacaataacaaactattgcgtcagttgagaattggtgaaaatgagtttttaaacctatttttacattttttgtatcattttcatagagatcacaaacgattaaaaaaattaaaaaaaatatttcaactttgcaaaaaccagatctaaatctcatatgcagttcttcaatactaccaaaacaaaaataaaaatataaacactgttgatctcacttttagccaacgactgtgagtcattttgcagcaagatggtcagatgtctatacatgatttgtccggacatcccatcttctatttacgacttcaagtatcataactgtctgtacgagtaatactactccaaatgagccacacagaaagttataatactgaaagtcgtaaataaaagatgagatgtccagacagatcattgtatagacatcctactagcttctatcaagcaggtagcttgcatgcaccgaccaggatgtgagttggtaattttagagataaatcttatatatctctaagcttgcaagtcacgacacgatctctacattcatggaatagattcgtatcatcagagaaaaaagaaaacctgcctcagtttcctaatttatttattgtaattatagaaataaattagttttttatttaatttattattgatttaggaaaattaatttcaggtaattgatcccataaatagtaaactcatctcactattcaggagcagagaatgttaagaacattgtaaaacttaatttagccctaattaattcatgagaatcaaacaataagattaaagaatagcggaagcgtaccggtgtccatagaatcgatctttaatggtttgatcttccaatttgcatcaaaacttttctctgaaacttttctcttggtgatggagatacaagagtgaaaagatacgatacaaattggggaccattaccgtttatattaccaacagacaaaactgttggtaatatttattgactatttctatttggcccctcatcaaattaaaaattgtccttatggtatccacatattaaaatcatgacaatcatgcacttaagtgataaactttattccaaaatagaccatataaatttgacttatttatttgatgactcaacacacattttatatatacaattgtgaccccaataatttttaacagagaacactcaagagagaaac

SEQ ID NO: 128525 - DNA, 932 bp, Cannabis sativa
tcgttgattagcagcgagctgcacagtatgtttaaaaatcacgtaatacgtctatgctagttagggtgttacactcctgctggttttcttacatgcgggacccacgagcagctgccagccttccctccagctgccatgagatcggccaatcagctccatcagcgaaccgcgtgcaccacacgtcaagtcttcagcttccaagccaaccagcacccgccatgtgtccctgctaagaagaaaattaatggaaaaatatgcaaacaaaacccaattcatttcagccaaaaattacacataaaaataccaaaaaaatcttcattttctcccacactttacacttaaatatccattttactcttccaaatttatttcacctaaataaacattcctattttatttttaccctatcttttcactacttttccatcctaacaaatatttattttttccaatactcttacgcatactctatttatctcttctcttcccaacactaattaaattaatcaatttatttattttattttgattaatttaattctccaattttgcatataaatagagtgctgtaagaccattttcaaatacatcttttcaccccctaaacatcttttcatctcttcatctcaaacacacttcactctccattccacactcttcatatttccaccattttattcttaccatttttacattttgaagaacatgtcaagcatgccattttgtaatttttacttcaatctagttatgagcttctaatcttttttcaagattattaagataatgatgaagcaaaatataactagataggatttatttttgtgtgttgattttccaattgtgctataaagttcatggattttctataaaaaatatgtctttttcatcttcaatatcatgtattttttattgttagagcatatttccactta

SEQ ID NO: 128526 - DNA, 1167 bp, Cannabis sativa
actaatcagattgtaaagagttttatttagggcataaaacccaacgtagacttccctcaattttctcacctttaacgcttttagatttcttattagtagaagccttcctctgtttaggtagcggcacaaataaatcatcataaaaaaatcatctttatctaactttcttttctcttttccttttttttttctcaaccaattgacacccatatatggagctttagaatgtttaacaaatattttatttatttatttatttatttgctgtaggggatggagaaaatgatgaaggagttatttccattatatagaaaattgtagaagaaaaaaataaagaataaatcgtggggaagaaattgagatgatggaaaaatcgtctgcaaaaatgtaggggagaaactaaatatgatcatgggtattcagttcaaaattaaaacttaaaatgaacaaaaaaagtaaggaaaagaaagggaaaactttgagtgagatagttacagaatgacatcaccttgcatgtatgatgtgtgagcaagagataattttgtaattaaaactttattagaagtgttaacgtagattttcgttaaccaaattaaatagcattttcgtaataaatacactacagaaataattaagtaataaatgataagataagaccagatatttttacgtgaaataattaagtaataaatgataagataagaccagatatttttacgtagttttgtagttaaaatctacatacttcacaagtccttattattaggatatttattgagtacataatacaatatcaaaatttgagttataaagaccgtcagacaccatctatttctccattattatgatattttttgcttttggcctaagccctcacggatttatttgtgggcaccttcctaaaaggcctcatagtgttcatccttatatacccaagatccttcctatttctagctaatgtgggactttggatgtacacccaacaatcctcccctcaaactaaggaccaccttgcctcccctcagtcgattacagatctaaacttgaatcccttaattccaacaatcaagatccccttgagtaagctagatggattccttcaccagctaaattcgaaatcccttcgaatacatgaatccctcgattcaaccactcaagatccccttg

SEQ ID NO: 128527 - DNA, 1112 bp, Cannabis sativa
ttttgtaaatgggataccggtttatataattattttattttaaatgtatttaattaattaagaaaaattttaattaatcaagattttcaaaaaaactcgttgattagcaacgagctacacagtcagttaaaaatcacgttaacatgcctaatataagttagggtgttatataaaccattagaaactataacttcaaagaatgtcctcgactttgttgataaaaacatcatatgttagtttggactcccttataaaattgtactagacaatgggaaaaaatttgacggctacatgttcactaacttttgcaatagacacgacattattattagcttctctgtagttgcacaccatcaagcaaatgggcaggtgtaggttgtaaacaagaccctcaatgacactatgcaaaagcatctagaagaggcaaaaggtagttggcccatcctcctcctaaaggtactttggtcacacaggactactaagaagacaaccactagacatacaccttttgaattagcctatggctatgaagcaattctgcctgttgaatttgaaccgccgtctcataggaggataacctatgaccaaggaacaaacagcaccttgttggaagaatctcttgatgaaatagaaggaagaagagaccattactttttactgagttgttgacgtaagtcaagttttttctggttcaattgctcacggtgatccgaccgttgtggatcatagttacttacagagctcgtccttgagtaactttcagttttggttgtgcttgtactctctcgattagtactgtgacaagttctatcccctcgcgtaaatcgactatgggtccttgtacgtctcgagcatgaacttgcctcatcacgtactagccttctcctttgggaacatgttgatacatgctccctgctaggatttgtatgcgccccttccctatcagctcgagaagggcgttggcagtgcctcggtggcaacccacctgctctaggttgagtcccaggatctctctcgttactcttaacgcaaatttttgttaaccaaatttaagcctcatgatgataattcaacatagaaaaaataaaagctatagaaaaatgatatatgaa

SEQ ID NO: 128528 - DNA, 790 bp, Cannabis sativa
agtagtagctcacttagcaccaaggtgccaggggtggtaaagagctaacaccacatactccccccttaaagagtaatctaagcttttagcattttaccaagaacatatatgatttttgctctgtagacatatggtcatcaccatatactaaatcatagactttctcaaatctgattgtaccattgtatttatagacctaaataaatggaaaataccaggtcccatcccgatctagataatattaaagatatttacaaaaatgttattaccgtacaaattaagcatcagcatgtacaccaacatgcgccaccacttggccaccttttgggcatcacctagcttgtagtgtgccatcttggctcgcaagttatattcctccacttcaacatgtcgatgccctcatcgacggatcgcatgaaaatctttgatcttgattcctaagcttacccctagcttcatctgaatcctaagtctacacttgtccctctatctctatagaatgacccttttggtgacgatattactcgcccactcttggactgatcaaataacctatgcctccgtcgtatttagaatcacccatggagtagtaccttcgtacttgaatacttcatccaacatgaattcctctgagtccatcacaatgcctctctagtcaaccaagtatcccttacaacattgactctgaagctaacacatcctctaatagtagctcactcgccaattatccaatgcatactccttttaataaggactaagtatggtgcaccccttggggtgaggttcgcaa

SEQ ID NO: 128529 - DNA, 1767 bp, Cannabis sativa
  modified_base (739)..(746): a, c, t, g, unknown or other
tttctcataaaccaagaatttagttatataagcacactttatatagaatagatatttatatataatatataaatatatatttatataatagcacataggtaaagtatttgccagtcgaaggtgaaagggatgctctggtaggaatcaacatccctaataaaaattagtattttatactgtgtgagacatcaattaatctaatttatattaattttattaattatttttgttaattttattagaagattaattttttattaattaacgtgtcaaattttaattaatttaacatagtatgagatatcactttttaaccggatatcttaactcttgtagtaaagcttatttctataagaaaagttttctaaattagttttttttttttttaataatagtatatgttcttactatttagaattatttttatatatatatttttttaaattttaaataatttatagtatttaaatattttacacataattattttatatatagtaaataaatatttgaattatatttttaataatgtatagaattatgaaaacaaaaaattaaaaaactctcttaaataatataaataagagaatttatagaaataatttttcgcagtctatttatcactactaaaaaaagaatttttcaactgtcggatatgatatggttgtctgttattataactaacgccgactgtcacagaagacaggaataggaatggaataaaataaaatttaaaatnnnnnnnnaaattgataaaaaaataattaaatttttttcttgttatattggaatagtcattcctttctttttaaaatagaatagtcattccaccaaaatagtagaaagagcattccccattctaatattttaaaatgcaaccaaacaaatgaatgaaataaaaattatttcctttctattttacttcattttattacctccaaccaaacgccattttactgtaatttaacgggcattagtaaaaaattatcaggtaaggatcgtaatttattgtcgacatttagaacaatcgcctagctatatatactataattaagtggaccaacaaacacacatttatatgattatacgtcacgtgcaatattacctcatcatgagttgactatttataattttttactagtgttgatgttgatgaattcaataatattaacaattaatatcaattcaggtaaagattcattcatatggattggaccgactccaagagtaaacatcacaaacccagaacacgtcaaagatattttgatgaaattaggtgattttccaaaaccacgtgtcaatccaattgtatatttgttagctactggtctatcagattatgagggggagaaatgggtcaaacatcgaaggattatcaatcaagctttccatctggagaaattaaaggtataaaatatagtattataatatagaaaaaatctggggtatagtgtggtctcctacacttaaccagttttgtcaaataattactagaagaaatgattaagatttttactttttttaaataaataatattggttcattttttaaaaaaaaaaaattattttatgtagtagacattttagtagattgtttttttttccaaattcaaatacaatgtagctatttaaaatttttagtaaatttttaaaagactaattaataattttttcccccgaattttgacatatactaaatcatactctctaaattttttttggccgttaaaaattccccctgaactattaaatttaaggacttttgtct

SEQ ID NO: 128530 - DNA, 852 bp, Cannabis sativa
tcacttctatgtccagatagaagttatagattacatatctatgattatcgctcccaccaaattgtactatcatgttcccaagctgtacgtgtgtctcgaacaaaatgataggctttaactaacaactttaagaacacaaattacactattgagatcgaacataaccatgtcaggattaatttttattcaagatcaaacagtgatattgacttagaatgatacaatggtaagattataatatcttcaccaagatcattatcagtccagtccaatgtatactccataaatctgatactagcatactttgtcaatttccaggaaagaacataatacttatccacggtgtaagtaagctttatcgctgactatcatatcagtgtaagtaagctttatcggtgacttctaatcttctattgataacaaatcagattatattgaattgggttttatatagggcataaaatctaaacaagaacaagacaaagatttttttttctgcttttgttagagcatgacaaggtggaggtaagaacattcgtcgaccaacaacttgtgggtgtaaatattgactcgaatccctaactctttcaaatctaggcgggattttattctatctttgctttccccaggaatattgaataaggtataaagcaagtcgtctaacatatttttctcaatgtatatcatatccagattatgaagtcacaacaaatgcttctgttgacttcgcttttagccaatgacaatgtgtctattttaaaagtgataaacgatatgtagtaacagatatatgataaagaaataataagacacagaaattttatagaggtttagccccgagcagttcggtaa

SEQ ID NO: 128531 - DNA, 738 bp, Cannabis sativa
agattccaaacaaaaatggaagaaagaaaaatggaaaaatacttattaggtatcaagccataataaatagcaccagattttgattagggcgcctctttgatattttaataagaaaaagtgtttcgatattaccaaaatagcctctgccttagtggggactggggcacagtgtgtaccaacaactgtcattaactcgcagcgggcctctcgacttggacaatgcaagctttttgtggaaagcgacggttttggtgaatagtcgattatacccttgccattaacggttggtctacggcgttgtaggggtaatttggtgttttcgtagtaatttgtgtgattaaattaattttcttctgtggtttgttgtacgtggagaaaggagtggctgaggtgtgaaattgtggttgtggtcgcaggaggagtgctcgtatcagaaaaagacagaggggaattagagaataaagaatctgacgggtgagtggtggtgctgagctggctgatgacgttagcattatcggctcggcttctgataaaaaatgacacacgactcagctcctgttatcttatcggcttagttttatatggtaatttgttaacggctcaggctcaggaggacctttggcacagcttttaagctttatgatagctacagtgtttgaaaaagtttttataaaaatgatagtaaatgatttaaaaatatataatttttgggtaaatattattttaaattctgtattt

SEQ ID NO: 128532 - DNA, 662 bp, Cannabis sativa
aaatacttcaataaagcactttttaaaaatactataattataatttcacacattattatttaatatatatcttaatttttagctacaatgattttttagcttaaattttttattatacactaatgaatagcattgatgctaaaacatagcatccatgcaaatttctaaaatgacatcctcttatctctagtagtataatattttaatattttaccacataatatgtccacctcaccaaatattctctaaaattttactattagagatgtttttagaggtctaattttttgacatagtacaatttgagaggcacgaacacgattagaagcaaaaaaaaaaaaaagtttaagtaagatacggtacaatgttataaattcttgtgatacggcacgaaaaatatggacacagtacgataagccttgcctaaaaccgagtctgaggtaaggcgaattaggcccactcttagcgtccacccagtccaatggcccaaaaatgtattttctttttaagaatatatttatgtattttagtagttttcaaaaatattacatatattttaatgggattttttcattaatgtacaacaaaaattaatatattacaaaaaatgtgtaaaaaaacttaattataaaaactcatacattttaataacatatttacta

SEQ ID NO: 128533 - DNA, 1773 bp, Cannabis sativa
caatggtcgaactctctgtcacgagcaatgaaacaaagtcctggctagagggaagaaatccaaaacaaccaaaagttgaagccttccatcaccttactgaagaggatgctgcccatgttagattccctcataatgaccctttggtcatgaccactcaaataaggaatatgacggtagcccattctatgatggatgatggagcctcttccagtatcatcttcaagattgcatacaagaagataaggcttcatttgaaagacctaacaccctgtacacagctcatgtacgggttctcgagccaaggacgggctcctctagggcacatccaatttccattgataataagtgaaagtcctgcacagaaaacaatcatgacttaattcatatttgttgatgtggcatttgcattcaatatcatgatagaggaccaaccctgtatgacctaaaagcagtcacttcaatttaccacctatgcatcaagtttacaacaaagtatggtgtcgggtgcctatagggagaccaacagtctgctcggcaatgttacaacatcgctctttccaaaacaaaaaaggaagaccttctcaccaagagctcaaacaacgagtccagccaagggcattaaggatctgcccaaggcgagaagactagcatagatccttatttttggaatcctgcaaacagctttggaccattggcagaattagaagaagcagggatcgacctctccagctgaccaagaaacttaaaattggtcaagatttatcaccagaaataaaatctgaattaatcaaatttctaagggcaaacctcaacacttttgcttggtcgcgtgaagacatggtaggaatcgatctatcaataatttctcacgcccttaatatagatccaaacttccatctagtacaacaaaaacagaagctactggataaaaagcgagcacaagcattcaaagatgaagctaaaaagttgtgtgcaaataacttcatcattgaggcattcgaccttgattgggtttctaaccccgtactggtacccaagccaaacaagaattggtgagtttgcatcgatttcactaacctcaataaagcatgtccaaaggattgtttcccacttccagggatcgaccaacttgtagatgctacaagtggtcatgagatcctaagttttatggatacctattcaggttacaatcatatcaagatgtacctgcttgaccaagaagtaaaccacactctcctaatagaattcctagacaaaattgaagaaaaaagagatcaggtcaacttgaagttacaaacctacgaagaaaaggtgtctagatacattaacaagcacgtcaaggacaaaaagttctttgttggagatatgatacttcgaaaagtatatttaaataccaaagaccctgcaagaggagtacttggcctaaattaggaaggaccatatcaagttatagatatcacaagttcaggcgcatataaacttggtcggtataataagtaaatagaattgatcctattaacaagatattgaaatacggaacatctcaaaaaagattaccaataagcttacttataaaaaaaaaatactactcttaagtagtggttcctggacggtatgtcatctagaggttcgataattatttataatacatcactcttaagtgtgacaaaatctctaaagcacgatcaaataaaaatcaaaatgagcccaacaataaaaaaaaaaagaagaagagaaatacaaaattgggaaatatgagagagagagagagag

SEQ ID NO: 128534 - DNA, 1025 bp, Cannabis sativa
attctcaaaggcaaacttggaaagaaattggggttctgtgaagagtgtgtgtatggtaagtgcagtagagtgaagttcactccaggtttacacaaccaaggggaaactggattatgtgcactcagatctctggggtgcttcaaggactaagaccattgggggtgctagttatttcatgagcattattgatgactacaccagaagggtttgagtgtttctactcaaaacaaaagatgaagcattcgaaacctttgtcacttggaaaagattgatagaaaaccaaactggtaagaggattaagaagctaagaacagataatggtttagagttttgctcagattagttcacaaaactttgccaagacaatggcatagcaagacacaagacagtgatcaagactccacatcagaattggattgaagaaagaatgaatagaactttgcttagaagggtgagatgtatgttaaggggtgctggcttagacaagaagttttgggaagaagctttgcaaactgcaagctatctcatcaatagatgtccctcaacaactctcaaatttaagactcctcaaattaggcctaatctctttggattgtctttgaatttactgtcgtcacttatttcttctggtcgtgttttaagtctgtcgttagttattattttgagttatggactcctattttatcctttcatattttgtccttttatgctttattttgtcttcttgtgacttctcaggctttttggtattttatctagtagtgggttgctttgctttttatctaagtgttggactttaacattggaggtatgtctgattgggcatttgtatctttttcatgttcttttccatttttttcccccaaacatttgtgagtgatttttgaagagtaaaggtgtgagacagtgagagtgagtaatatcatctagtgggattattttgctcatttaccaaacccactagaagatatctatgccgctattgaaaattgtctttttcccaacatttttttttcttttttttt

SEQ ID NO: 128535 - DNA, 892 bp, Cannabis sativa
agaaaacggctaaggaattggatacaatacttgaagggtgggttgaggagcatcgtaagaagagggcttctcttagtaaggccaccaaggaagaagaagaggaggatttcattgatgttatgctctctcttcaagaccaaggagccttatcaaattttcagtatgatccctctactagtatcaagtctacctgtctggtacgtataacgtttcttaattttacagaaattttaaaattaaaaatatgatgggccacgttgcatgctatttattaaagaagcatcatgtttcatgctagctatttaatgttaacattgtttaattaatatatatatctttattataaaaaataatttgtttttttagtcttcgtataagtgattatttataagtttgcgtttatcttttgtttttattatttttataaaaaaaacatagggtgattctataatacaccatatcaaaatgggtgtacgaatgcaaccggtcgtgactgtttcagtatctataagaattttttagtctaaatttttttatactcgtgtactttcagaaatttaaaataatttacaatattgaaattattgtttaaaccgtctatttcacacgcatataaaataaaaaagtcatgcgtccaataaactctttgaatactatattcgacgtgttaaatttttctgaatttctcaaaatttaattagatatatcttaaataaatataatacatacgtacgactataaaaaaaaatgaaccaaagtaattttttagatatcgaaatagataaaggtaaatcaacactcatttttaggggatgtattgtagaattttccaaaaatatatattattttttaggggcgttcatccaatccaatccgcactattttgctcata

SEQ ID NO: 128536 - DNA, 1323 bp, Cannabis sativa
ctttattccaaaatagaccacataaatttgacttatttatttgatgacccaacacacattttatatatacaattgtgaccctaataaatttcgaacaaagtcttcaaaatcaccatcctcaaatgaagaatttggtgagtcattgtgtgattgcgatcgagaactattcatttctctcataaatttttcaaacattagttgcattgccttccatttcgcttgcaaagcatcacatttggcttcatactatgctgttattttacttaatttttcatccatttcagacttcatttcttctttcattttatgcatctcttgtttcttggctgccttttgagttgagccaaatcgttgtaaaccggaaagtttttttgaacctaaaatagatgagaaaattcatcttcatttgttgaagtagctccatactatgctgttataacctcatcattatattttgcctaaaaagattaaataacacatgactttatcaatattattagaaaattactagttcaattaaggtgagttccaatcattcttaaagaataccaacttaagtaaaaaagagaaaccaaacttgtcgtgacaccagaagtaatatgaaaattgtacttattcaatcaataagaacaccatttaaaaacagtctaaaaatatacacttaacaatccccacaaagctacaacaaattttttttacaacatcaagaaaaagttcttatttttcaatgtaatcttgagaaagaaattataaagtaaaaacaaattcaagaagattacttcattaaaattaaaaagaaaaaagaagaagataattatgcttaaaaggtaaatcacctgaccaacaaaaaaactaaattttgtgaaccaaaacatgtttcaaaaaacccacaaattttgatgaacatttacatagactatcaacatactaagtaaataaacaacctaaacattcagatacatatatataattccaaattaaaattatatttttaagaatgctatggttctggatctgcaatttaacaagacttgactaaaaatttgtacaaacacaaacccatgtactattacttctcaacatgtatgagtaaaaataaagtcatatcatgatattttctgaagtagaatcaacccaagatccatcatttttcttgtgagttataataaaaaaatttctagcagaaagctctccatcttttaatttttcctataataataataaagataatgttagagatattattacaatggaagataaatcaagacatatacaactcaattgtaaaaatagtacaaggataataaaagagattgattaaat

SEQ ID NO: 128537 - DNA, 764 bp, Cannabis sativa
tccctgaccaagagcgtctctcaagaaaaagactagtcttcgtgatgataaaataaaataatttaaattaagtgacttatacagatatgtaaagatatttaaatgtatatacatgcaagaacaaataagcaacctggttgatgagctataaaagacgaaatggggaccagaaggaatcatctttatccctttaaaagaaggcccaactgtaaacacctgcaagacagtgacgaatgaaatgctgactgaaaacgatgaagtacttaattttccttggcttttctaagcagccaatcaagtgatgatcttacctgagtatctattccaacaagggtgtattgaggaacatcgaggagaaaaaatgtggcaccgtgtttcacaagttctagtgccacttcaggatccattgtagttggacagataaaagacagcttcctcacagagtttattagtgagagaaagtgatcaccaatatgaacggtcggagctgttgtcggaggagccgagggaggagcgatcggagccggttgactggaagagacgggagccgtcgtgagcggagcaacgggatccgcgggaggaacaaccggagccgtggaaggagcagtcgcagccgaagtagccgtctaaaattgggatttttacacttaggtgccactttttgccaactttttacatttttgtcaatgttcggttacttaaatttaaacatttataaaagttttatttttcaattttagattttcaaaagtttcataattaca

SEQ ID NO: 128538 - DNA, 858 bp, Cannabis sativa
ttaaatttaacagaatatttttttatttttaaaatatattctgttaaaccaaaaaatgacgttaaataaacacttttaatatataaaaatattcgaagatttgaaattttttccatttatatgagataatgatttatagaattaatgtgagaaaagaaaagagaaatcactttaaaagaaatagtttatttaaacttagcaaaaattaaagaaaaagaataagaagagaaatataaattttcttttttctgaaaaaaaaaagaggtaatatttaaaatactcaaatattagagtgtgttaccatacattgctttatactcaaacggcattttgttatatgccaatgcgtttttcacaaacttatttactaatcataattctataataatagtgggatgaataaaataaaatattatagactctaaatttaaaaactaaattaataagtgttcttttttaaaagaaattaagaaaatggttaaatataataaattaactaataaaaattataaaaatatatttactacatattatttttttaaaaaaaaaataatatataatagttaaattaagttatataatttttttagtatgacatattattatattgtaaaaaaaatgaataaatatattagattattaattatatacagaagcatttgatatattatatcactgaaaattaatataccgtagtaataaaattatatactacaaagaaattataacaatactaaattaagactcaaaaattaaatgtatcatactaaccaaattatatataccattattaaattatgtatacatactaaaaaatttatatataataaaataaaaaataaatatcatcttaaataa

SEQ ID NO: 128539 - DNA, 897 bp, Cannabis sativa
aaaaaaaaaaaaaaaactgatctaaaaaaaaaaaagctctaaaaaaattagtacttaatttttaaaataaaaagttttaagtaattaaatagtataattacactcaaattttatagagttttagaattaaagagtgtaaggagacttttcaattacttctaagtatattattttagtgtaattacatagtcatatacatacgcaaataatgtgtttaaaaagtcttggaaaattagatttaggtgtaatttgagataattatactatttgtcatatttgtttgaccatataattatactgtaacagtataattagaagtaattgagaaattctaattattatgagatccataagaataatgtgtaattactaaaatcctttcattttattattaactactaaaataattattttttttatataattactaattattttatcaaaagaagacattaaaaatttatatattattactatcttatatccaaacacaatttctattttaaaatagagtataattactaacatatataattactagttataataattacataactgagaaattacacaattatttttaaaaatctttaaaaaaatttaatatatattagtgaatacaaacaatattatgtactaccaaagatttctatattatatatatatatatatgtgaataccttaatataagctagatgatctaacaaacaatattatgcaatgctactaacaaagatatctatctagaaagtatatggttgtgccctgttttgggtctgtgtgtgttatttctttttaactatctcttgtgatttttaactgttttttcttcaaatccttcctttgattttgaatatacctctgattacaactgttcccgccttgtctctcctcccc

SEQ ID NO: 128540 - DNA, 534 bp, Cannabis sativa
  modified_base (473)..(476): a, c, t, g, unknown or other
  modified_base (503)..(506): a, c, t, g, unknown or other
tagttttggaccattttacccctatgcttaatattacttaagttgtaagtacaagggtattatggtaattatgcttttgggattaggtggctttgtctatggttggcagctggccatttaaatttaattcagcctaatttgttgaattattggcattagtcaattaagaaaaagcaagaacaattaggaattttcactttctctctctctttttcgaaccaagaagaagccaaggacctagggttctttttattgctctgaataattcttgctagaattcagagtgttgtgcaaaaatttgtggaagtttttttcaaggtaaatcctagaattctagtttgtatgttgtttaagctttaagtttggtttggctatgcgattttgagaatttgtggctgtttagggtaggctttgttctagtatgatttttgaggttattgtgagtagaattaagtgttgggttttgtgccctnnnnaaaactcatttcaaaataatcagattnnnnaattaataaagatcagaaactgcatttt

SEQ ID NO: 128541 - DNA, 770 bp, Cannabis sativa
aaaattatctcgtgaggcttttgaattgatgatgattaccttatggttgctttggtatgattaaaactcaatattgtttggtaatatgcagtcaagattagatgttgttccaaattttttccataatcacttgtcaaaatttaaagagcatgtttggcagggtcttcatttaggattgtgcctttcaaaccaagctgaaaaacgaccttcttggtggatgtcaccgcctcctaattcctttgctcttgcgactgatgcttcagtggttcctgggaggggctttgtcagattgggttgaatgatacgggatgttgcggtgtggtttggttggcttggtcatctggtgttttaagttatttttttgttaatgtgacggagcttcttataattagacggggcctgacttttgcaaattaatttggtttcagtatttctattattactagtgattctactgtgacaattagttggattaataatctttactcaaattttatttttcaatctactatattagatattaattcttattagcttctattgatggtagtttttgcagtgccgttttgcgatttacgaatggtgttgcccacaccattgcaacctctattacaagtttagtagagtgtgtatgaacggatgtttgtccacaaattttgaattcttctgtagcaaatgttagactttttatttggccttacattaaattttattgattttattaaaacttgggttgattggaaatttctttgctgtgttagcccatgttg

SEQ ID NO: 128542 - DNA, 3309 bp, Cannabis sativa
  modified_base (3270)..(3283): a, c, t, g, unknown or other
agatctgaacctggatcttctctctttcagtttggttaaccaccgtcttccacactatgattgagtacttgacttactatgagtgggcatggtactcgtcactaaaggctcgaattgatgaagaacaataagaaggattcgaaatcactatggaaggagactctcatttactagttgtctgacaaagaatgaaaactaggtttttggtaggttgagaatgagagcatcttatttctttgtttttggtaggattgaatgttggttccctttaagtttcattctggaactgaaaagttgtgcacaaatttagattggatctaaattatacttttatcagtgaattaatggtactaaaagataaaaaagtaattagaaggataaaatagtaattttaccaaaactaattacgaactgactaaaggaggggtaatcactagatttgattatatcaatggacattggagtaaaactcattaatataattctataattaacaagatttcaattctatatttatagtggagtggtcatggaattaatgaacaagattatttgattgatgagattcaataaaataatttaatttattggagcttagaattataggtccatgatccatggtccccaaatcgccaccttgaagcactatcaagggtaggaataaaagttgtagatggaagtttgaaaaatctattttgatttgtcaaaatagtaattatttattttgtactgaataatttattttttaaatttattaattaaataaattggagaaaagataaaagttatctggacaaaagataccaccaatatcttgttaagacataggtggcgccatactgtgtcttgacacagtgatgggagcctatcatatagggttgtccccactatatttgtttttaggttaattaattcaaaagataaatatttatttaaatttaaatttaaaaagtagttatagatatttttgttggttgagatattctctcaaggtcgttgagagactccctcaagtggttgagagattccctcaatcggtcattaaatatttagtttaaattaaatatttaaatttgaaataaatatctatagtaaaattcgattatattatttattcaaataattaaatatgatttaataaatgatttgaataattaattaaataaaatttttattggatttatttaaatataacgtataaattaaattttgatataaaattataatgtaaccttttggaaagcctaaaaaggattaatctaatttagtcttttctctcaaacactctaaaattattcttgctcatgtgttgagaatctaataatagctttatatacattttattctactagcccacactagtcaatgtgtgtggtgaaagatctggaagattaaggtgtgagtttaatgtcgccgttccaaggatacaacatacgaaaagactcaaggataccctaataggcttcgagaggtaatttatcttttcatctattttactcttagatttaatatatatatacatatagtgattctgaggatgtggcacaatgataatcataaacttttatttcgctgcatacttgatttggtaccactaaaaccaatagatagctccttgtagtctgggaatgatcacttgtccctgaactactctttgtcccggaaagatgattgggacccttacccactcatgaaggtgactgacttgatcaaactctccatttcatctctcaagtagtcgcattcgttagtggtgtgtcccacattgccatggtattcaccccttttactctgatcttgcctaatttttacccccttgaatattgaaggtggcttcatgtaataaacagtattgcatgtggatctgtagatattctcatgagtatttacgagattggtgtactccgtatattggggctcataccatttcttttctttctttggaggctcattatagatttgagtcttgcttcttctcttgctccaaaattgacttactcccgattccaaaacttccatttgttaacttgcttgcatttctctaggagtgaaactgcatctggtttgtgccacttcatatttgagaaaagcggtctatgaaggcgcctaccctgaggttgtaggtccatagaccgtaggcattgtatattgagttttgggaggaattataactagattcagaagttgagtgacatatcccgaagtaccaacactccctaatggtgtcagagctactcaaaatactttagtgtaagcatctttcaagttgataaatccttgggccctcaacaagaagttggatagggtgtcgatcctttttctttttgtatatctccccaacgaagggatccaggtgataaccttgcctgtagggccactaatttttggtcgtcattgacctttgtccttgctgcctccatcatccgatgaatgtaggctttaggctttcattcaattattgcttgacgttggccaaggagctaacttcgatgtcaaaatcttaagcatccacaaactgcttcttaaacatggactgtaggtcacgccagttccacactgatctggagggtaacctcttccactaatcttcaatagatttggctaaagtgaaggagaaacacaaacacttcatgacatcactaacatgtgccacttgcattagcttgttatactaggatagatgaaccctagggtccgtcctaccctcgtacatgtccataagaggcatctggaagcgttccaatataggtgtttccagaatcctcctaacacacggctccaggtcttcatcttccgagttagacacgactccactttttttgcagactagttgctctatgatcttggttaaggctgctatttgatcttccagccttttggcattatcatccgagagctcgcgcccacgagttcagtcattaatgttatttctaagatctcctccttaaggccttgctctttctcatcttactttctcccgcttaacatttaaacagtccctgaggtccgtcgttgacatgttgtcatcggggtctaagtctttccacgttaacactttggctaacaaaaatgttgggttaatttttcctttgtcgaatggtaggtctcggtgcctgagcatgtggcttatcatcctacacgacctttctctacggatcgattgggcgacctaaccctagagtttagttaaccctttctttccagaagagtcgatcagtcacgtttctattgtccctgggagcttcatcttgttggaattattttaccagnnnnnnnnnnnnnnaccaagtatgtttgattaacatccta

SEQ ID NO: 128543 - DNA, 1007 bp, Cannabis sativa
aaacccctcttttggattaacattaatgaaacccacacatcctgaaccaccctggacaatgattagctctacaatcgtagaggacactatcccaattctaggagccactgtcaattctgcaggtataatcgatacacctcctgacatgaagaagttaattgttgctgatattcttttgccagagtacatactcgaccagttctgcctttatatatcccttctctttttgtttctttctgcacactgtcctcttcagcataatttcctaatatatctttgcatctatatcaatctttccttttctatttatccccaaatcttcacccctgttccaaaaatggacgacttgtccaataccttcaatgccacctcacggctcttgaaacacaaatccattcctttaccgaagcacctgaccatccagaggatgatggacgcgaagaaccatttgctttcttagccgtcaagcttttgaccactcgtcatttcaattccgaagcgttcaagaaccgcctcaagcagatgtggcccgaacgtttttcaatcaatgttcttgaaaaagaacccaacttctacactgttgaatttggctgtttcggggatagacgcagagttctcattggccaaccttggcattttgactataagcttatagtcatgactccattggaagctggctctgtcgttactgctgaagcccttactaccaccccctttttgatttaagtctctggtataccattcctgaaacggtcccgtgctcttgcacaaagacttggtgaagtcttggggcgatttatcgaagtcgatactgcatccctcaaagaaacttggggcccatatctccgagttcgtattgaaatggatgaaactcagccactcccgcgtggaacgggcttccattttcatggtatggctgccccggtttggctcaaattccgctttgaaaacttacctgatttttgtcattactgtggtcgacttagtcacattgtgaatcactgcca

SEQ ID NO: 128544 - DNA, 800 bp, Cannabis sativa
  modified_base (758)..(764): a, c, t, g, unknown or other
aaaacaaaaaaaaaagtcactttcaatatcttttcaaacagttttttttcttaatcaatattttagattccgaccagatccggacccaaatctccctcccacggccttggcgctaaactcggcctctgacccgaacccaaatctgaccccggacctagacctgacttaactaaaatcaaaaataaaaatgaaaataaactttacagagcatacttttgttttctgttttgaaaattgaaaacaaaagtggttacagaacacatttttttttcaaaaacaaaatttttaaaaacaaaaattttaccttgattttatgattaaaaaattagaaaacaaaagtattactaaacagcaccttagttattctattaagttttgtcacacataataaacaaaataatgatatgagtacttagtcagttgtcacattaataccatacttattatttaaaattaaaaaaaaaataaaaatgatatatttttaaaaaattattaaactaaaaattaattaatgattaagaaaattatgtaaaattaaactaaagaaaaattaaattatttttttattcaaattaattacacatgtggtattgacatggtattgatgtgatttgccacatgtaagaaaatttgacaacatgactaatttataatactgtgaataattcactacctatttttaataggttgaaaagtttaagaaatacaataatgcatttgttatagtatagaagcaaaaatcaaaaaaaaaaaaaaannnnnnnaaaaaaaaaaaaaaccccttaaaaaaaaaaaaaaaa

SEQ ID NO: 128545 - DNA, 572 bp, Cannabis sativa
ggaataggtgtaggccaacttcaagttgagctatacaaagaaaagtcaaaacctgcacgggtaaaagaatgagataaaaaccaaaggaaaagtacttacttgggtatccaccttcagtagcccacccataagcagctccacggaaatatcctcctctggccagctgatcgtttaccttggagagcaaacggtcctggttgaattggagcatttccttacccttcttactttcagggtttagcatgacaaaagtacttgaagatttgggcaatcctgcttccccttttggcacccttggatggggtagccgtcacctgagactttgatttcttcctcgctggcaggtcaacctccgacaccgcctcctcaaaaaactcaattggagacttagtcaaactcttctctttgggtggaacttcatcgaccgttggtcgtttggctggagccatcgcctgacctcttcttcaaagcttgtagcaccttctgagacacagccgcacgtgaataaaatgagaaggtcaaaataagtacgatataaggaaatgcaaatgaaatttgaatacaagttaaag

SEQ ID NO: 128546 - DNA, 1016 bp, Cannabis sativa
gggcataaaacccaacagttaggtggctggtgtttctttggacaactggccatgtttagtttcaacaagaatatctattttctttttggattttatcaattagaggaaataagaaattcctttctctctcttctctttgcttgaccaccacaaggaccagcaagatcaaccctaaccctcaccattttttggatttcagttggaaattgtagtgtttccaagtggaggtaagccctagcaccttgattctcttgttacttaagcttgaactttagctttagcatacaattttgagttgttatggctgttagggtttgaatgaattgtatttggatttctaagttcattttgagttaggtttgagttcttgctgctggtttgggggtttggtgtggtggatgcaaaagtttaaccgaaataggagaagtttcccgaattattcgattcgtcgattcatgttatttttcagagctttggttggttaattccttgttaattagggtattattaaattagttacctatagaagaacccttagttgggggtttgggttttccaaattagggttttggcgtgttgtttactcgtttatgtaatgtgactagggcatccatccagcaccaggttttttgtccaggccgaccaactcacttgaatttgaaaatgagataagaatagcatagaacacattgtatatatgtgaatgtatgtatgtgtgatatatatgcattcttgttgtgacttgtacactaccaacagtagtatggtagcggtacagagtgcattggtatagtgtacaatgtttaaagagtacgttatggtgttaccagcactagtaccgaaaggtacgaggtgtctatggtacaacacttagtggtactcagggtacgaaacaaaccctactaacacttgtacaatagtggtacgtactgtatgtggtatagtggttgtaccctagtaaagaacgttcttacttatctattaagccttgtggataggtgtatgagtgcctagat

SEQ ID NO: 128547 - DNA, 717 bp, Cannabis sativa
cgcacatcaatgtgtttggttctttcatggtacatctgatttttggataagtgtagagcactttgactgtcacaatgtacctcaatgtgcctctgttctagactcagttctctgataattcctttcaaccatatagcttatttaactgcttcagtgcagacaatgttaactgcctcagtggtggataaagcaataatgttttgtaggtttgctttccaatggattgtgcaatttcctagttgaaaaacccagccagtttgtgatctcctagtgtccatatcacttgcatagtcagaatctacatagcccttaacttatggtgcttgagagtttgagttgtatagaagtcccatgtcagattttccttttaagtacctatcacccaccttgctgtgttccagtgttctatccctggatttcccatgaacctgcttatgactctcataacttggcttaggtcaggtctggtacaaaccatgatgtacattaggcttcccaccaagttagagtagggtatatttttcatgtagttgagataagactgagatatgggagcttgtgagtgagacaattttgtttggtgagtcaaaggtgtgctgaccatggttttacttctgaaaagctaaatttatgtagtacctttgaaatgtaatctttctgagatagcattagtctctttccctgcctatctctgagtatctcaatgcccaaaatctt

SEQ ID NO: 128548 - DNA, 1400 bp, Cannabis sativa
aattgactgccttttctattcaaaaggatccattaagtttatgttttaaaagaaaaaagatctatgaattttagagctatttatagtctgcctgaaactgaattgttcaggggaaaccttctatgaataagtgggacttgagcactcaaaagtaggatagtgaatcacgaatcaggatcaccccaattaatctagaattgaacacaatggcaacccatcttatatctaatagtgaggtcaaaacgcattccattttccaagcccagacaaaatacccagtattatcttccctataaagattgaaacaatacaaatttctctcttggaccaactaaaacaaatctcaccaaaatcactatcaattcaaagcatcaacattgccaacttaaaatctaaaaaaagcatcattcaagactttggattggataagtccacaaatactccaatcgacactaactaaacactaccattgttaagggcaatcgatgttggcagaaagcgtgatcaatttacaataatcaatttcatatgtaatggtggaattaaatacaaaattagattggggatgaattaaggttacccgtcgcctgaaggtgttgaagctgcatttgcagacatcgcagcgcgctgcttcttggaaagttggaggctccatatcgattatcacatatacagctatagagatgtacgagtatataaatatatgcgatgtgtgccaaaatatgtaatatgtatggataatggatggattggggtgtagggcaaaagagatggaagcaaagaagatccaagatgaggagagaggagggttagaatgatttaagagtgttgtgttaattttgcagattgaagtatagtatgtgatgatgaatgatgatcatcaattcatcatgtcaacacagtcacccaactctttctttcttcttcatcctcgaaggctccaatgccatacccgtttgggttcggttcgggtgacccgtatatcaacgcccaaggtactgaattaataacaaattatactagtttttctaaaaagttttctttttttttcttaaatttgaaataaaataaagaagtgttaccgtaaactttctgttacaatctcttagtcagggttggccctaggcataccatctatatttatagtaacggcccaaattttttttttgcctatggcccatttcaactcagggctggtcctgctcttagttaacctctgcgcctgaaaatatatgttgtaatattttttttataaaatttttttcacgacggtgtttgttatgcttacatcatcatccctgtaaatttttgaaaattttcgaatagtttacagtgccgaaaatacgtttgaaggtttttgaacaagcgtggtaaattggaatatcagaaactctattttc

SEQ ID NO: 128549 - DNA, 1249 bp, Cannabis sativa
atatatatatatatattaaattggtatttttattttttaaaaaaacaaaaataattaatgctcattaaagagcacgtacagtgcaattttcaaagaaaaaaatatattaattttgatactcaaacaactcaatagaaaactctaaatttctctttttcctctcctctctatttttcactttagcaaaagacatccctaaattttcagagtctaacccgaccatttctcctcccttcacttcaatctcttacgtgcagttgtttaacccagctccgatggagctctctccatcgttaaccgcatcatcctcctctctcaatcgccatctctctctttacgcacgagcctccgctccagatggaaattttcgtccccgaagacccagatgaagaccaacaacaatcccttcatcttctttgagatccatctgttggtttttgtgcttattcgtttcatctttttttatcacaatctatctttccttttatgtgcaggttgtagccgttggggttcaggcttgcatcgggcttgcgccatcggggttcgggttcatctgggatggttgcgtcgtcgacagttgaggtttgtattgggattccgtttgggtgtgggctttcacagatgcaatggaattgcaataagcaatccaagatatggtcggagcttgtcgatggaattgggatttgactgcattttctaagtttcattttagtttcacatttatttctttacttcattttgaattttttttgtggatttttttctctgtaaaatgtacaatattgttgtttatataatttttcttacttaaatcaatattttttttgagatatatattaatgcttatatagcattgttgtaattatcttattatgaaaaaaattgtttagacttttatagctccagatatatatttttttttttgagcaaatcattaagtatgtatatatatatatttctagtgtacaaataccaatatcaagaaccaattaacattattcgactcaaaaatattattcagctcaaaaaaaaaaaccatttatattatttatttggccaaaataataataataataaaagaaataatgtacatatagtgactggaagggtcactattatttttatagtctgacaaagtttgactctacagttattagtcggaataaaaggattattttggttaaggtatgttttaaagaatatttttaattgaaataatgtttaagagtgtttactttaaacgctaatt

SEQ ID NO: 128550 - DNA, 856 bp, Cannabis sativa
  modified_base (815)..(815): a, c, t, g, unknown or other
ctctctctctctctctcattattatagtttttcttttttggaatttttattacaaatggcttaaaaattaattgtgtaagaacaaactaagcatacttaattgttgctactttcactttgtttgttcacttaatctataaaaaatctacttacaaaattaaattgtccaagaaaataaacaattgtcctattcaaaattgttcatctacattttttacgtattttttaagtgttgtctatagatatatcgttaattaattaattaagatgtaattagtgaggtttgataaaaaagtattaatgatataagtcaaagtttattactaattagaattgatcaagtagtttgttttctgttttttccttctattaaatctgttatgaattggttagttagagctgacaacaagttagttatttcaactaacttggtcatctcttccttgcctatataaactgattttttaattgtacatatcaattcagtagatataatatacacgatttctctctttctctcaaaatctctcatggtatcaaaagataattcccacaattcttccatggctagaccttcgactagatctcaagatgaagctcttccatcaaattctgatcaagttcagtcccaacctgaagccattcctgatatcgcctcagctccaattcagcctcctttggctgcagctcatcctcgatctacaagacctcgatcacagattggaccagattcatgagctccttcttcttctccggctgatactctcgctcctcgttctctccaagatcgtggctgtaaagaccgcttagtttantttagaaattagcagttaattatgtttaattatggaaaatt

SEQ ID NO: 128551 - DNA, 929 bp, Cannabis sativa
ggggtcccccttaaccccctacttattctcatttttgaaaaaaaaactcatgcaacttaaaacatattatttcatattaaaaaattcattttatgacttacattttgaaagacaattatatgtattttgttttttttaaacaaaaaataagataaatactaaaggcaaccttatagtgatacattaatattggtataaattaaaattggatctcacacaattttaattaatagataatataaaaaaccatcaatcacaactcactatatattagtatgatattggatactatataatgcctaattagagtgctaaaaaaataataatactttgtcattattcataaataagactttttgttatagatctaaaaatatttggatagtttgttatatttttttatgtaatattttctaaattaaagattgctcatatgtcatattttatattatttttatatatttatttctaagaataaatcatatgtatataattagaattatataaattttataaatctataatcatataatcttatcacatcgataaaaaattatacaataaaaatttaataataacgcaaaattactgaagaaatataattcaaacattttctttaaaataatttaatatatattttctaaaaataaataaataaattcacacgaattatataaacaaaataaaaatataattttgctttatcaaagaaagattaattaaaattatacatatattacttttaaatgatttaaacatccacataaataatattttataacaatacatttattatcaacatctcttcacacaccacattacaaattcacacaccactctttttcttctctctcatatgattacacgtgtattttattctacacaaacatgcatggatttcttttcatgcataataataataataataa

SEQ ID NO: 128552 - DNA, 1866 bp, Cannabis sativa
acctgtcattgccacgtgggcaaaattaggacttaacgaggttggacagacgacacctgaaaaatgtaaaaggaacagtactttggagggtcttcccaccaaaaatgaggttggatgattttttgcaagtaaattgatagttgagggagttttaccgcaaattactctaatatttaagtgatcaaaactagtgcaccaggttgattgtcaacttgggcgctggggtcagtttttattcccttaggattatggtttctccccaagtttgcttgtatctttgttatttctaatgatgaaaaaaaggccagaaacactttgttggaaaaatgatttgaaatgacccaggggttgataatatgtcaacctgggcactgggccaagtgtcaggtgttctagcacccaggatgtgatgtttcttccccgaaagtgcttttttccccattttttatgaagactaagaagatacatgattcagatttttgatctaatgcttggaagtggcccaagttgacagattgtcaacctaggtgctggggtgccgggcatcgggtgtttgggtgctgaaaaataaacgttctccaaatctgattctaatgcctaaaatatgttcgtggtatgtctagttcatgtcccaatgaaaagttagacctattttcactaagacggtcatggaaactaaaaccgtagttgaggttgtcaacttgggcgctgggtgaaaccttaggttcccaggttgacttttgaggtgttggttcatgtatttttagctcatggggcctggatttggctgctctatgtcttcatggtactgaatacttaaagattgtgagttagaagtaacttgtcgaaatccaaacttccattctagagttccaggagtcaacctgggtgcagggctagagacccctcccaggccgactgctatgactcgagactactcaactccgagatgttatttttcttgccacatgtcaaatatttatgtccacgtcaccaagaaaagttttcgggttaacattaatggttaatagggctgagcatgaaatctagaaaactgaaaaaatcgttcaaaccgacctaccgaacaccgttagaatcgaaactggcggaaccaaaaactgaaaaaatcgctaacagttaaaatcgccattgagaggtcaatgtttttctgggtaataaaccgaccgaaaaaaccgaaaccgaccatcatacatatatattaatttattaaaatttttttactttatgtagtaactcattatatataataatatataattattttattaatattaaagttaaaaagaataagacaattagtttttgaacaattaatttgtatggttgtagttgtagaatgtaaaataatgtgcttatagaataaattggatcatattttaaagaaaaaaagaagttcggtttgagcggtttaaactgaccaaaccgaggttcaaaatggtcggttttaaggtaggttctagattggtcggtcagttttcgaattgcaccaatttaaacctaaaatcgaattctgggattttatataggaaaaaacgaccaaactggctgatgctcaaccctaatgattaatgacaaaagtgtaattaaaaaagtagtacttattgtgtgccaaattcgacacaacttgtagcataccattggagaagttttttattgaaatgtgctaataaaatagcaatacaccacttatttagctctctattgaagatgctctaagacaatatgttatcgtgttgctaagtgcaaacactaatttataatgtaatatctgctaactccgaaagggtatttttgtaattttatttagttgagagtatttttttttattattttacatatttatgg

SEQ ID NO: 128553 - DNA, 783 bp, Cannabis sativa
  modified_base (720)..(725): a, c, t, g, unknown or other
tcttccttatcccaccaatcatccaacttatcaacatcatcaaactattaactacatatccacctattctaaacaaaaccaatacaaatttattctcaaaccatcacatttatttaaacacaaagccgtctggtctggtaagaagtttgacgacaaaaagtatggttttttcatgattttttagaaccccatttgcgaatcaaacccatgaatcatcttccatgacgttgtttatatgatatgaagaaatgaaactataaaaactgcataaaatcttttgtttgaatgaagaagaaacgaaagaaaggaaaaaactcagactcctacgagttcagaagaaatacatttttcttatctcatccaacattgatacttgtacttcagaaatagaaagaatatggagtacagaaatcaatagacaaagcagatgaagcttcttcaagctatgtccagaagcaaaaatagttgaggaacgcttattcttgattgataaaatagttaataattaatttttagtacataatatttatgatagaaattttgtttagtaattacaccaaattcttatcagtgtgttataaaaattggagagtataactaaagcccctcaattacttctaattacacaattacagaataattatgtgatcagacaaacacacaatactgtataattactttcatttagggctcgtttggaacgccgtattaagtcgtatnnnnnngtattgtattatattgaattgagttatatatcatatttttatataatactatgttaaa

SEQ ID NO: 128554 - DNA, 693 bp, Cannabis sativa
tttgtatctaggaaataattttctctaaactgcttatataataatttggttgtgttttcttctctttgaagcatccattttgtttttctatccctttctactttcatggccatgaagtttttaatattttattaaacaattttaatttagtacaaattataattaattgaaatccaatgtgtgcttaagaatcctccatttagcttaaccacaataagtcaataataattgcacttgaaatatctaaaaccaaaggagaaaaaataattaaataaagtgaagagaatcattcagttcagttgtattggtataaatcataagttccattctaattaagtactttaattttttatctgttttcattcttgctaatttagaaagtagaagctaatttattttatttttgtattaaaattttaaatatataaaaaatgaaatattacatagtttggagaatctatatataaaaaatttaggagagatgaaataattatatgtatagagattaaaaagaagattaggagaaggttagactaaggttctttgtgaatttttggagtgtaacagcttgagaatcaaaattcatatcctttttcagttatataatgaccttggtggttatgcaaatgggctggaataccaggcctaatatgatgctaaacattgttaaaagtgttaatttcacaaatgcac

SEQ ID NO: 128555 - DNA, 807 bp, Cannabis sativa
ctttgttgtatccaagtggatacccatgtatcttgtaacatttctcgatggtgtgtccatgcatgctacaatgagtgcaaaaaggcctgccacgttttggttgatgatttttgggtggtccttgtgtttcaccttttcctgaagtcttttctccttggaaggcaaaagccatattagagtttggatccgaggtgttgttttgtccttttctttggttctcctcttgagtaactagatgaaagaccctatttatttcagggagaggatccataactaggatattacctcttacttgagcataaagatcgtataggcccatgagaaaggacatgatatattccatgttatggtgttcttgtaatttcttgactcctccacaagaacacccattgcaagaacaatttggcctgaaattggacaattgttcccaaacagttttcagcttagtaaaatatatacttactgtttgattttcttgtctgagattcatcaaatccttccttagattgtagatatgtgctccatttttctactggaaacgtaccctcaaatcgttccatatggcagcagcagactcatcatataatatgctagatgaaatttcctttgaaacagagttaataatccaggaaataacaatattgttattacgaatccaagcattgtaaagaatgtgatcagtgatagggggtttagagatagaaccattcaagaaccctaatttgtttttgacagatatagccagctccatagctctgcaccaagcaatgtaattgtcctgcccagtcaacaattgagacaccaaaa

SEQ ID NO: 128556 - DNA, 897 bp, Cannabis sativa
actaattagtgacatttgaattttttagtcatattagcatagcttacattttataaaaataccactaaaatataaaatgtcactaaatattaggaacaatgacattttaaaaatgtcactaattagagtttttggtgtagtgagataagaaaagtttttcgtcgacatcctgatccgtttcgtcagctttgaacaaacctagaatgttttacagccaagttcaatctaagaatttaccttggcaaataatagaataaattatatagataaatatcaattataaggaaatgttgtatctagatataatatttatttcattaatataaactattttattctttccttataaaagcaaatcaaaccctaaaaattgatcaggctatttcacaataaatgataagaaaatcagacaataatcaaatataaataaatcaaattaattgtaaaatgtttgtctaataaattagcagactttacatgggaaaagactcggatggcgattgtcacaattgcatggaatcactgtgttgaaatcatttaggttgagactcgaagccttcctttttttttaatctgattgttaaggaggtcttggcttgttgttagtcagtgcatacttctcataattttattattaccattgagagtgactctttaattgttgttaagactcttgctggtattcaacttcgatgtgatattggtaactttattttaatcttaggcttgattggtatgaaatttgaaaataattttatatttttgaaaacatgaaaatgtggagtctacataaaatattttggtagaatattttcaaaaattaaatctaaataagtattcgagttttaagctaaaaaaaaagggaaaaaaacaggaaaatacaaaaaaagaaaaaaa

SEQ ID NO: 128557 - DNA, 522 bp, Cannabis sativa
tagaatatgtttttgaaaaatattttcactttttcaattttaaaaacagaaaactaattaaaaaagtgtttccaaacgacacttatatgtttatgtttttcataatggtcattgtgaagtaattttcacaatgtcttgatatttagacgagggtaattttaaaacgtaaaatatttcaatctccaatttataagcatgaaaaaaaaaattacgaggaaaaaaaatagaaagaacttaggagagaaaacatttctcctaaagtttatttgtatatattttttaattaattatcttattaaatatatatatcttgctttgaagtttataaaattttattaaatttaacacaaattatgttttctaagtttttgtacattccaaactgaagaaaatatttattttttgaaattctttctttttttcttactaaaatttttgtttgctacagctgaactttaatcaacgtcatgttaaataaattaacaattaacccaagatctatttgtatataacatagaacac

SEQ ID NO: 128558 - DNA, 621 bp, Cannabis sativa
taaattttaatttattgggaagttagatctgtttttttttttatataaaagatgtgtggtccctcaaagaaataatttttaagatgctgacaatttttatgctatctaaaaatataatattttattttattctttttaagaattataatcccacgcgcatcattatttaatatattaattattttaatttaatttaaaatataaaaagaaggatagcatcaatatcaaaaattggcatttactttttagcttgtttagcttgttttttatgagcactcaaccacatcaaaaaataagaaataagttgagaattgtctctttttattacgcattaaataaatataattataaaataatttcaattgataaatatttttttaattaaatataacctcacataatttatcaaaattagatatgacctataaaattgtatataaattaaagagtaataaaaaaaaggtaaaaattaaaataaaaaataaaaagtagatatacattgtaatttcctcaacaaataacctttgttcaggctcaaccctagtataagcgggctaggcttgtgcctagggctcacctagcctaggggcccaaaatcttttgaggaaattacactctata

SEQ ID NO: 128559 - DNA, 914 bp, Cannabis sativa
  modified_base (856)..(883): a, c, t, g, unknown or other
cttaagtggttcctaaggtcacccccatgtggcttgctttttcaccattacacttctcatacttggtatctaatcgatgtcagaggtctgtggtagaccagctatcctaatgtcccacgcttgtccttttgtcctgcttgaaaggatcactgggatggttccttcgccctttaggcataggcactcttgtattttgtcccattgccatggttttgcatctaggatcaaaagggcatctaggctcgaaagtactggtggccttctgtgtcctcgagggttggccaactagattcgtatatttttgagtaggtttagggaaaaaattttgtgggggctcacctacttttcctttacctttatccttgtgataatttgaggtttcagcttccatctgtttatgatcacgctcttcagccatcacctttaccaaaggttcgttgtcggactttgccaagtcatcaaacatattttgaaggtgttccatcattcttttcatttttgtggtgagattcttctatttttcaaactccgtctgattagattttatctctttggtcactcacaacaggttcaggtcgtgatcataataatgaccatatttgtagcacccatctttcacgtagttattgccatcatattcttccttcctgccttcaaggttctagtcatcatgaaggccgtcaaacactttctcagtgtcgtcccttcaattttcaacattggtcgtgtcttcctctattatgatgcccgactgggggccagaggcaagggagtctacctcctccataacagtgcccaatagagttttcttgcttacattctttcaggcattcacctgttggaatttattttaccnnnnnnnnnnnnnnnnnnnnnnnnnnnnttattaacatcctaaataagaactttctaaa

SEQ ID NO: 128560 - DNA, 1066 bp, Cannabis sativa
agtacgattttttgttagtgttataagatgaattttttacttaacacaatctcatatataattgatatgcggatttggtttttcaattaaaaaagaatgacatgtctataacagctccagtagagctattctcatataattgaaattcatgaaaaggtacaactgtgacaatatctaaccgcacattgtgcatagcataatatggtaaaagcaagacaaagagaagttaacataagttgcacatatactaattatatgcgaccacaaaatattttccctgcgcccaatgagaagaccacatatttacgagcgtctagtctgaatgactaatacgtgattggggaaagtcgccgcattctatttcgtaaagaatcctgagaggtttacaaacccctcatatgagagtaacatcatagaacccctaagttcgtgttactctaaatatgaacggtcaatgtatgagttcaatagtcacacatgtttgaatattaaataagaacggtcaaaattattttattatttattttttaaatatttgcatttggattaaatgtaattaatgtaataaaaactttgtctcaccgatataaatgagtgatcctattcgaattttaaaagtagattaagcaaattaaactctcactagtccactataactttcttatttttttttacatatccattatttacacatgactactagttattttagttttaatattcacatatctatttgtaagtatttaagctttgctcgaatacttacaatttttagtttcatctaatttcctcccacaacatatagtaaaccaataattctcttacattattattcataatttatttaaaattgttttcttttagtataggaaagtattataatggtatatagaaacaagtactgaaaaacaaagtattaaaaattaagaaaataaatacaacaacagacccactactctactactacaacaatcttattttaattaataaatatatatatatttttatttagaggaaattatgtagaatatggacttttttcttaaagtttgataaatatggagaa

SEQ ID NO: 128561 - DNA, 1795 bp, Cannabis sativa
  modified_base (1717)..(1730): a, c, t, g, unknown or other
aagaagcagtacgaccaagcggtctctgactatatctacacaactctttccaagattccagacttcgacttctcgatccttggggcggaggtggctgagatgcctgaggcttttcgagctatgtcactcacgcagactcaaggaggtgggggaaatctttttcccgaggacgctgatgctgcaaacactgaagaagtcgtggacggggctgctagtaaagtcgcagacgaatctaccactccaactgcccctattgctcccaatgcttagctttttattgttacttttgccaaaactttttaagcggtacacgggtactcgcaatttgtacttagacaaatttatatttattgcccttttgaacaacatatatcccttcggggatatttacttatgttattatataatattatcgcagtacacgggtactcgcattttttgttaatcatctcgattgtggtttaattacagcttggtgtaataaatactaaagtagaaaaattttaaaagcttgagaaaattccataactctttataagaaatagattaatcaatagtacaaagtgagtgggttacataccccctatacttagattttttatgtagataaattgactaagtataaatacataatgagtacaaccgatacaatgtgagtactattgataataaaatttcaagctttcgccattccaagctcttcggattacagttccatcgagttcttcaagtcgatatcttgcattaccaaccttctcggcgataaggtatggtccttcccaattatctccgaaaaccccatgcgctgggtttttcgtgtttggcattacttttcgaagaaccaaatctcctactcgcagaattctctctttgaccttagagttgaaataccgcgcggttcgctgctgataagccgcattttttaggtgagcctgatcgcgcttttcttctaaaaggtcgaggtgaagcaattgtttttcttcgttctacacaatgttgaaaacatctcttcgtagggaacctaccccaaccttgactggtatcatggcctcgcatccataagagagtgagaaaggagtttcaccaatcgtggatctgggggttgggttgtatgaccataaaacttgcgaaagttcttctggccatacccccttacgatcttcgagttttcctttgatggtatgtttgattatcttgttgacagcttctgtttgcccattgctctgcgggtaagcgactgctgagaatgcttttttaattcctgactcatcgcacaattgtcgcatttccttacaatcaaattgctttccgttgtgtgagatgaccttgtaaggaatgccaaatcgacagattatggaattatagtcgtgcatggttgctgtgatagttaatagtgcctttgcttcggcacaattggtaaagtagtcaaccgcgactacggcgtatttgactccgccttttccttttggtaactcccctatcaggtcgatgccccaaaccacaaagggccaagggctcgtgatagaatgcaagtgactcggaggttggttaacatacgtggctattcgctgacacttgtcgcatttcttttcgaagttgaaggtgtcttgtagcagtgtcaaccagtaatacccttgccgcatgatttttaaggcaagagaattaccgccagtatgattttcgcagataccaccatgtacctcgcggagtatataannnnnnnnnnnnnngtcaatacatttgagtagcggctggctgaagtttttatgatatagtcttccctcgtagatgacat

SEQ ID NO: 128562 - DNA, 1508 bp, Cannabis sativa
aagagagggtcggtaaatctcgagtagatggccgagggaagccgaaacaagttctgccaattgctccgttcgtttaaggaacggggtattgaagacttgcacccaaagtgagattttgagcaagctatccccgttaaggacttccaccgaggtagggatgtccatgaggatagcttggttgaggtaggtccaaggttgttgaagcaaaacccggcgcctatctccatcacaaccaaactcgatgagaaagaggccatttgaacgatctgtgatagtgataggggaacgagatatgtggttccagttgtttgtcatttagtcgatgaagttcttacgattaaatgatttaaccgtgagaacttttgcaaccaaatagatgggggcttgattgagttcagattcggctaagttagggagggttggctcatgcaaagtttggatagtgctttctgtctttgtgagattgagtgcaatagaaagtgagttggttaagtcatccattgtgaagaaactgtgtgtgcagaatataggtatattatagataagacagatgtagtataatcctagaacaagaagaagatgatatataaagtaagattgcagaatatggtaagaatttagggggagcagtttaatgcctaaaaggggtggtgtcgaaggtgaatagatgagaggctggtttcctaatatgactaagtacctaaagatggctaaactgaggatgtatggggaacaattacttctgttcttaaatagaaaaactatacatgagctatagcaaacaaggactatagcatttaaggggaagagagtgtcctccagagagacaagaccctttgtgccaggcagagttacttcagtacagaaactatttaatgtaagcagcaaattccttttgatacatatataatattctcggataagcagagaacaaccagggttctcattactccaaaatgtcaagaggggtgtttggtcaaggattaatttaatgggtataccaaacttaaatcgaaaaaagcatttctaaacttgattttgcaggtgcgatttgacactgaacagaaaagagagaggaggagattgaatacctgtgggtttgccattaatgttcgtactggacggagatccgaagggattgccggagtaaatgctgacgggacaggggtggttgggtcgacttcgcgccgtacttctgggccggcttgggtgagtcgaacttccttgagtctcgtttgaggaggagccggagccatggagatcgcaaaacctgggcttggtcatgggtttcacaatgtggaaacggtttggagacgagtgtgaaaacgcaaagatggtactcaaagctttgttctgctgcatggaagagagagagagaacgaagagtctagaaggagatttatgtgtttttcaacaaacaactttataacatctttattataatatgtaaattaaataagcatcaaaacaactttacaggttgcatcaactctaagaaataaaaaaaa

SEQ ID NO: 128563 - DNA, 797 bp, Cannabis sativa
aacggggcggggacggggatgacactccccgccctgacggggacccgtttaatttattaattattttttattaatattttatattttataaatgcttttttttttagtgtattaatatcatttttacaatttttaaagttgtatttttgtataataattactatattgaatagtaaataatatgtaatattttatcttttatgtaatttaataatttatatatttaatttttaaaaataaattttatttttacaattggggatttcccgccccgtccctgatggggaataagtggggatggggcggagatgggaattaaaaagcactcttcgctaattccccgccccgtgtgcatccctagtcgggacagagctatgttagagttcattaacaattcaattgtgtttggttgtaaagtgctagtttgggtaatgaaattctttttttgataaaaaaatataaatcatatagagaattaggcagaatgctactacaagaaatatttacaacaacttttgtagttcatgaagaatttttgcaaatgagaaaaacaataataataaattttatatattcttttgaacaaaatggaaatattgtaccttggcctatgatgttgtgacgtgtaattttaaataccaaattgtgaaatagcctccataataagatgattaaaatgaagggaagcttcttttccatgtgtgcccaaaagtcaatattccagtctatgaaaaaaaaaaacaaatatattaaatctcatttgaataagtttaattataatttttactctcccaaat

SEQ ID NO: 128564 - DNA, 973 bp, Cannabis sativa
accttgagtttaattaaatgcggtctagggttattaccctagaatattatgaaggtaagaaagcgatgatgtatggtaatattgttaatccactaaagagaggagttagggttattaaccttaattgatgttattttgaccatattataatatgttatattagtgattatttagtatgtaagtcagggttattaccctgagattctatatgttatagtataaattgtgggcatgcatttatgttaagaattatgtgtataagacataactgggttagacctggtatatgtaattaggataaaccactgaaagaacataatgtatggattacgtatatatataaataagattatgcgagcaaggcataagtgaattagactcgataactataactgagataaactctactaaggccttattgtaaatagatgtgtgagcgtaacacgtaggtctatgccacattgacataaatagacgtgtgagcgttacacgtaggtctatgccacatagaaataaatagacgtctgagcgtaacacgtaggtatatgccagacataaataggcgtgtgagtgtaacacgtaggtttttgtcgtacagacaagtgtgacatggcattaatatttttgtgatgtgatatttatgattattgattaatatactgtcttgctgggcttggctcacaggtgctccactgtacaggaaagggtaaatctatctcggattagccatgagtgcgagaactattggtgcattgaggatggtgcttatcccaccagtcactcggacaagaagcagaacacgcgcccgcatcttcagatggtacacccgccgatgtcaaatcctacaaatgccgcggattcccgcacgtcctcccttcatccatctacctatgcgcgcgtaggaggctgcatgcagcctcctcgtgggcagtaggtgctcaggcacaaaattttcgatttttgtgggattttt

SEQ ID NO: 128565 - DNA, 925 bp, Cannabis sativa
gcctctcttcccatctcacttcaaggagttattttccaagatgaatgttacaaacttgtacactccatcttgagggggtatattaaatattaaatattgtatatttacttttagtgtttgggtatagtaataagggcattcctaattgggtttggtgtattctagggttagatattctccccctatataaactaattctgtacactttatttcattcaatacaataaaatcaattttctaatacttaaagctcaaaagttgcttgagatcaaagcaaacaggccaatacatgaatatatatatatatttatatatatagctcacatatataattatattcctagccataactatatttatgtgtatatatgtctataaacacattctcacacaccattatacattaaaatacattaataactcgtgcgattccatttatacattaaaatacattacattactagttcgtgtgattccactatatattttttattatgatcatgatggtatattacaatttctttctttacgtgatggtatcagttatcataatatgatcaacttgtgcatctattaattcatcatcatgatattatatgctattgtccacgagggaataacttcaagaaattctcaattatataaatgttatatatatatatatatagattccgaaggataatatgaaatacgagagtttatatttatatgaaattttatagtggtgaaacacacacaaatcacaaaacacactcatttattatccatttaaatgtcgtatgtacttttggataatatatctttatatatatatatactagtgggagacacacgtgcggagcacgtgtatcaaattaaatgtaaatttatatataaattttaataattttaaagatttataagtttgttttttttttttttataa

SEQ ID NO: 128566 - DNA, 730 bp, Cannabis sativa
tttttttagctaataaagcaattcaagctcataggaaagatttgtttgatataaaaaattttctaataccactcattcatgcataatactcattaaaagagaacctatatatatatatacatatttgaaatgagcattaaatgatatgggtagtacgatgcaccctcaaaaaaacatattgatgcattgtctactatttttgtattcaagaaatttttttagtatattttatgatcgtgtacattatatagttatttaaaatgttttgtaaaatttttcaaaaattcaaaacaatttataatataaaaaagaaaatttaaatagtctattttatacccatataaaatgaaagaatcgtgtgtgcaataatctatttgaaccatatttttaacgaaataatattttttttataaaatagcttaaataactaaaacatcaaccacaataaaaaaaaaattgtagtaaaaaattaaatggtaaaacagaaagagaatgcatgaaatgcgtgatatattatacatgtataaatgtattttcattgttgatatagtatacatgtataaattgtaccctaactttattcgaaaaatatatttgatacttttatgtttttaataatacttatttggtaccttatattttgaagttatacatatttagtactctaagggcttgtttggaacgtcgtattaggtcgtaatattgtattgttttgtattatattgaattg

SEQ ID NO: 128567 - DNA, 1182 bp, Cannabis sativa
actataatctcgattggcaatttataatataatgccttttttccatcatcgagtgatcataaatcgatcacaggctaccccagttgtgattgattaattcagctacgctgttattaattaattctaatcaaattttattatgaagggcaccacgtttattaggagtgtgcataaattaatttaatttaatgataattaatcgatctaattataattaatcgttaaatattaaatgtctaattatgatcgcattagattagatgttatttttgaatatttaattggattcattaccacaaatattagaattcgcgacggtcttaaaatcgattcttttcggggactattataaaaaaaaattaaataactatttaaaactgtgtcgggaaaaatttagtattcctgacggtttaaaatcgtagtaaacaaaatagacgatattttttaataaaattcgattttttaatggacccttataacgacattattaaaaaatcgtcacctacttctcgccacatttttcacgtgcccacctattttttttttttttatatatttcttacatgtccgcctatttcttctctatttcccacaccctaaaacaaaaaaattctctccaaaactccacacacgcctccgcaccatcgccctcctctctcgccgtcttcgtctctctctcgatctctctttcttctcgtctctctcgtctatcgatctcgcccatctaatatattaataaaaaaaattcgaataaacttaaaaatattgaatgtggtacaataaacatatctaatgtttatggttatggttaatagaaaaataataattattaaaagcttcaaatattttttattgatcattttatgttctccaattatttcattcttttctattttgttttttcttcctttcatatatatttgaaattttaaccccaaaaggccactatattatatataatataaatcaaatataattatatatataaatattaaatataataaaacacaaggaaatataattaatttcaacacacatggggcagtcatattataattgtttttttttggtaaattttattttggatcccgtgttttgtaaaagttattaattggacattctattttgttaaatgacaaaatagatattttattttctaaaattatacaaataagacattga

SEQ ID NO: 128568 - DNA, 593 bp, Cannabis sativa
ttgactaaggtgattgaccgcataggtgatgtcgggtcttgataatgttaagtagagtaatcttccatttaattgacgatatggagaaggatcatcaagtggttcgccttgttcatcatcaagtcgtaatcttggattcataggtgtttttgtgggtttgttattgatgtatctagtatcttcaagaagttgaatagtttactttctttgagataagaaaagtccttcagctgatcgagctatctcaaaaccaaggaaatattttagggggccgagagctttcagcctgaatttattattgagtgactcttgtaattggtgtaggagcgatagactaggtccagtgataatgatatcatctacgtaaacaagtagagcaatgaaatcatcatgagatccttttgtaaaaagagtataatatgcttttgactgttgaaaaccatcttcgattagagcatctaaaagtttgcgataccattgccttgacgattgtttaagaccatatattgatttaaacattttgattgagaaatattgttcttttctaataggactatacttttcattgtggctgccatttctacttttaattg

SEQ ID NO: 128569 - DNA, 1465 bp, Cannabis sativa
cacagggtgagcaagtagagcctgtgttgaccaaaccaatccactgatactgcctgtgcctccgtagaatttgggggatgatgcgggggttaataatgctaatccgcctacttatttgcagcatatgtttcaagaaatgcaagtatcatacttcatcaagaagatgaattgcgtcagttgaggcaactggcaacgacaactcctgtagaacaagtgttaccaccagctcctgtgccagtggtgggttaccagggatttatgctgtcgcacagagattcagtatttgaatgctttgtggagctggaaccttcaacaatgggaggtactgacataattaaggctaaacagtggatgagcaccatcacccgaatccttgataatatgggggtgacgggaacaaatagagaaaattgtgctacatttatgctacaagatcatgcccatgtctggtggacattgtgggccagacccgagatgttagtactatgacttgggatgagtttaagagtctgtttgaggaaaaattttataacatcgttgtaagaacttcacatatggaagattttgtgaagtttactcaggggaaaatgactatggtcgagtacactttggagtttgatcggctatctaaatttgtaggtgatttggtaccaacaaatttcacccagaaacaaaaatatgtgagaggactgaataccataataagtcaagacttgaaaattaccaccgctcatgacactttatataaaaaattggtcaaattagccttgatagctgaagaggcagagcagcatgtgattaaagagcagactacaaaggatgccgccacggcatcgaatcctcatgtgggtggtaatgtcagtaaggggaccaacggtggtaacccaaatcataaatggaaggctgaggctttcaaaacatcggggattaatagaaagtttcaaggaagcataggtggctgatagggccgcgagtcctcattcagatcatatccatagtgtctgaaatgtaagaaacaccatgagggtgagtgccgggccaagaattgtttttagtgtggcatggtgggccactttatcagagattgtccagaacccgggacgtctattcactatgactcaggctgacgctgatgctagtccatcagtggtgacaggtcagttatctataaatggttgttcgtatactatgttatttgattcggaagctacccactcttatatgtcgagtagagtaattgaaagtttccataaaccatgtgatgtgtatgctttggggtttagaaccctattacctttgagagacttaattgtatccactcggtggattcggtccttgtctttttggattgccagttatgagttaactgccaatctaattgagttacaagtgtttgattttgacattaggggtgagcataaaatccagagaagcgaaaaacccgttcaaatcgacctatcgaaca

SEQ ID NO: 128570 - DNA, 1255 bp, Cannabis sativa
  modified_base (39)..(45): a, c, t, g, unknown or other
taatagaatttatacatcaaatataatcatgaaataaannnnnnnaaccatgcaacataaaattatttctgatctttaataattagtaaatttgattaaattgaaatcgattttatttagggcataaaacccaacaagaaagtctcgacatcttctcaatgagtcttggtaaggaaaagacattgcttttactatcacttcccacaaacaacgcctaattgttaacggtcagaactcgttaatgatataattagacttttaaactaacacttaaaagaaaacttaattcaaaaatgttagaatatggatctcataaactttttatatctcaagatgttgctatttcattcctttcagaaaactcaaaaatcctccctttacaatgaactgaagggtcatatttatagtgagcccttctccctttacacccccaccaaatcccaatacatactgtgtgatgtcacttttatctataacaacactgtatcctaagtgatctgacacatctgacatcctaagttacactaaaaataccaatttcattttgtacctcaatcgaaatgaactttgtcctcattatttatactcattgtgtcgtcattatatcatctgatatcttcttatatggtctgctggtgtcaaaagggaaaggaagatcggtgaagtgtaagaggccaagtgtggggatataggtgcagggcgcgggctgcgagcgggctacgagcgggatgcgagcgaggtgcgggttgcaagtggggggcgcgggcgcatgctacgagtggggagaaagcacatccagtgagtagggaacgtgggctgcgagcaaggagcatgggctgcgagtgggagcgcgagcgtggggatgcgcaggtatcaaggggtagcccaatgttacaaaaagaagatttgaggacaaaagaggcggcgaccatcctttgtcctcttatgcttgtattgggcatcttaactatttcatccacacatccgcttttcgtaagagtactttgcttcttagatttttgcggttgacaacaaccctaatctttactatttcctattacacgtttttatcatagcccttaattcaatttcatctgatggttaaaaaaattgtaaaaaatttagtgaaaatttgtatccaccaaacttatccatatatatgtatgggtgcactcttaatggatattacccataaatgggtaaaattataaaattttgagtttttatgcttaatttttcaatctaattaaaaaaa

SEQ ID NO: 128571 - DNA, 665 bp, Cannabis sativa
tccacacaatagaatagatactacaaatcccatatgtaaataactctaccagtaccacatcgttcaaaaatgaggttgtcttcctttttaccaagtatagttttccttccaaatcaatgtcaaattaaaacttcaattgcttttgtgttttgtcctctatgcgggacactcacacaacaacaaagaaacaaagataattgaagtatcaattgcatttcatgtaatatttttatgtaaaaattaaacgtggttttgacttttatgaaatttaaatgtatgatattttagtataaattaaaatttaacatagtattatataaaaatatgatatataatctaatttaatataatacaacacaatacaatacgacttaatacaacgtactaaacgagcccttaatcgtatattattgtggacattgtctcacatggaataaatagtagagaagtaagtcatatataagaacatgggccactccactcattgccaattgattttaagatggaaccccataatcctcaacatatgtagtttacagctcaaaatctaattagacatttagacaactaaactttttagttttagatgttaataaatttcaaaagatacctcattattaattaatgttctaacaaatttaatttatattatatcttggtatgtt

SEQ ID NO: 128572 - DNA, 1265 bp, Cannabis sativa
  modified_base (257)..(259): a, c, t, g, unknown or other
  modified_base (1216)..(1225): a, c, t, g, unknown or other
ttagtcacaaattttttgaaaagtaaatttttttgtagtgtacgttagaataacaaatgtctactactataaatatttttttttaaaaagtatgaaaaataaattcattatttttcgtaaggattaaattcatcattttaaataaataataaaataatattaattaacaattctgttatagtattgttaaagttatgagaaatatatatcaaaaacaaagttgaattttttttttttaaaaaaaaagtcacccaatnnnttctcataaaccaagaattcggttatataatcacattttatatagaatagatataaaagaaagtccaagaagagtccaagtggcatcctattcttttttcctcgtatttttccctttttctaacacactcttactttctttcaaaaatacactacatatgcaaactaaaagtcacacattgaataaaaactttttaggtgctatccatgtaagttataaataatagttttattattttacttacttttgtctaagaaatatatatatatatatatattttttttttgtggttgattaatatcttacccaataagtttgttatatatgtataagtagttatttatttttcaataattaactttataataataatttttaattttatatatatttatgaaattaattttagtttatgaattttattttactattctagattattatattgtcatttgttcgagttaaaaatatttttttacaattaaaatattttctcttatattttttattttttccaaagtcaaaaatttatctgtaagaggtgaccatacttatatgactatttgagaattgttgattatatatatatattataattttttgttacctttttttatttaaattttagaatatagaaaatatttatttctacaagttgttttttgtagaatagcatttttcttattatatttttttttttaaatttagtttaaattatttaaatggctaaaattagagataaaaattgatgtttttacctaaaaaattatttttttagttttacattaaaaattaaaaaaaatatatatgaaatttaaaatgatttatgtggcatccctcatatattttagttgtcattctttgttttatctatttatgtggcatcaatatctatctatataattgtgttgttactgtgtatgacatagcattctatcatttattattattattatnnnnnnnnnnattattattattattatctttctaataataataataataa

SEQ ID NO: 128573 - DNA, 1943 bp, Cannabis sativa
gttcaaaattttatacagaaccttcaaacttgcgaggattctatatcaaatgtggattcaattgaaatggggcaagcccgagatggtttaggaagtccttaaaatagtcctgcagggggataatagctccagccctgatgtccttgaggctccaagcgcctattcccgtcgagccactcgtactggccttactgctgaccccttcaggtgcttcgcgagtaagtcgtactggtggataacaactgaactcgctagaaaccaccgatctaatctggtagtctcgcttatattcaataccacaagccctcagggtattacctacgtaatcaccgatggctcgcaccttcgactctattaatttagtctcaaaggtgacattaggatcctggggagtcttcaatttttgaggcttggagatcatgatttcaaagtctaggtcacttagttcaaaagcaattgagactctgggtaaaaataaaggcttggccagaggaatagacaataaattaggggattcaagccaagcatcatctcgcaagaaacaacgatttcttgcaagaagtgtttgtagcgactgtcaatgtcatcttgataggtttttagtaagtgttccctaatttttgcatcatttatctctaatttggatttgggttctaaaattctgggtttgtatggaatggcaagttcggtgagacactctatttttaaatattctggatgataaacttctgaaccagatggggacattgttgcaaggagaaacttggataaaatttatcaaaccagaagttactaaattggagaaattcgaaaacctacgttctacgtgaaccctaacatttacccatatacaattcaaccttaaaattgctaaaacaaaatgaggtaacaaaggtgctcactaagaaattagtaatcaaacctagaaacacaaaattaaaagcatataagaaaataaagagagaaattacttactgttcaaagttgggttttgggacgatgaatggtcctgaaatcgatggaacagtgaacggcgtgatgatccctctgaatgtttgaggtcaaaaatcaaatcggatgaaactcgcaggaaaaatgtcaatgataaggatggcatgcaaggttttgaaatattttgggtatggttttctgcagtatagcttaaaaaattcccaaaatttctgaaatggcaaaggtagtgcaaaggttttcgttttatactcatgggttgatctccattagatcatggagacaattgatcaaacgagtaaaatttgaaaaaagaagtagaaaagatggttattaaatgctaatgtgcatcgaaaccacaaaactgccaaaatcagaggacatgcattttttcaaaagagattatgacaaaaataccctctgtaatcatttaaaaagcacttttcattaaaaagaactttttaaacggcaattattacacctgaaattcggctgacacttcagaggaggacacgtgtcatccttggagaatatgaatcaacgcatataatgataattattttagaagatattaaaatggaataacacattaaatgcggagctgatagagtatatctataactagttgactataaagtcttaagcgagacacagatgtacaaactattaatttacatattgacgagaaaccattttgtatatgaagacacgatcataaggacaacattagtaatacaaagtgaggcaccaacctcactacgtatgaagagatgtagacgagacatgttgactgttaaaacagttagcatataatatacattatacaaactaagcataacagttgaatgaatctaaacaacgaatagtgaggcatctatctcgctataagaagacataatcgtggtaccttcactaatcagcatcagacatctttcaatgagatccactgctccgtcgagtcagctctctcagat

SEQ ID NO: 128574 - DNA, 989 bp, Cannabis sativa
  modified_base (94)..(108): a, c, t, g, unknown or other
  modified_base (242)..(242): a, c, t, g, unknown or other
gctagacaacttccttccaagtttgaatacacaacataggaaaccatattaaacacataccagccaaaatatacaataaataataaaatatttnnnnnnnnnnnnnnngccaaaaatggaattaacaacatatacatgttgaatatgtaatgaactacgagtatgtatactatgttgtgatgagaatacttgcattttcaatgcttacgatctagtaacttttcttgctgagtcattgtgantcacgggtgcttcgtggtgcaggtaagaaggatagcagttatgttcggacatgagtctgaggtctcctagcgatgtacatatcagtcgtggtgtcttggcttccgagaagcaggatcaacccttttttttctatgtttgaaaatgtaaccttgtaatagcggttttgtgacttgttgtaaaagaattttataaataggggatccccgtattatgacagtattttgtatgaaagttttatattaaaattaattataaactaatagattagttagaaataattttgtaaaagcacatacgtggtgatcctgtggatcagggcgttgcagtataactttaacaagttggtactacctattttctatcaatggatccaaactgtatgttaaatgtatggattatgagttttatattctgtaatcagaatccacttgaactattctaagagctcttttttgtaactaaacctagggatcataaaaagacctcacccataataataatacatctacgtcatttgcatcttgttcatagtggttttgacaagatgattctttacaaaaagaaaataggccaatatccaattggaagtatatttatctgtattagaatatatggatgtacattcaggggtggatatgagttatcattaaattcttagacgatcactctggtatatgcaaagaaattagaaatatttgagaaatttcatgaatttcgagtaatggtgaaaaaccattaaggtaagt

SEQ ID NO: 128575 - DNA, 888 bp, Cannabis sativa
  modified_base (34)..(50): a, c, t, g, unknown or other
aagttcatgtttaggatgttaataacatacttgnnnnnnnnnnnnnnnnntggtaaaataattccaacagataggattcatcaaaagtaagtatgatgcccgtgtctatttcaaagatcacatttacttattactatatgttgatgatatcctaataaaaaggagaaatcaaagttaaatgatctcaagataaaactaaacgaagactttgaattgaaagaccttggaaaggccaaaagaattctaagaattaaacatacacagacctactcaaacatgtatcactttatcacaaagaaactacctgcaaaaggtcctagacaaatttggtatgaacaaatgcaagccagttgctagtcgcattgctcagcatttcaaactatcagcatctcagtctctaaacaatgaaactgagagaaccaagatgaccaaaatcccatatgcaaactgtgttgggagcctcatgtactccatggtatgcaccagaccagatttggcacatgccatgaatgttcttagtagatacatctcaaatctaggtacagaatattgggaagcattaaaatggattatgaggtatgtgaaaggtacactaaacacatgcattttgttcaactgtgaataccaacacaaagaagaagtcactgtctatattgactcagactttgctgcaaatatagacactagaagaagttgtacaggctatgtgttcactgtgctgcgaggatgtgtaagttgaaagtctaacctgtagaaagttgttgcattgtcatccacgaaatttgaatatatggctgcaactcaagctgttaagtgttaggttataattaacctatatttcgggtctttaaagttagcattatctcgtctattggtgtcttttggagc

SEQ ID NO: 128576 - DNA, 1593 bp, Cannabis sativa
  modified_base (1032)..(1033): a, c, t, g, unknown or other
aacaaacataactttataaattccaaaaattatttaattaaaaaaaataaacacgacacaattaataaacaaagaaaaagataaatataaacaatatatatattatttatttgatacaattggtttattaaaaaaaataataaatacaatatcaaattaaacaattgtttgtatttttaattacgcgatataaaaaattatttattttttttaaatttaataaataataaatatcaaattgcatgtcttttagattttcttattgaattatattaaaggtaaagtttaattgataaaaatagtttaggaaaatgcttaggtagagtcacaaaaaatgtctctacatacagacattttttttcattatgtgtcactttattatttaatactaataattaattaattccttttatattatttttatttctttttttttttaataatttagtgacccctaataaggaaagttagctatattcaaaattgtggatcctaaagcctcatttactaaaaaatattcaaataaggtgtcttacatgcattttttttattgaaatacttgtgcaatatttttgttttgatatatagtgaaatttagagattaaatattatgaacacattagacatataaaactaaggttttaaatatatttaattgtacaattaattaatcaaataatactaattttttttatcacagttcatatgactttattagtatgactttctataaatattaattaacaactttccttattaggggttactaaattattcaaaaaaagaaataaaaataatctaaaaggaattaattaattattagtataaaataatagtttaacacataatgaaaaaaaaaatgtctctatatacaggtgttttttgtgactctacttaagcattatccaatagtttaaatagttaaaaaaataaaaaataaaatagaaaaaactacaaagtataaggaaataggtgaaatgaagacatctcacctctctttgtttcaagattatatatataaatatatatatnnatatatatatatatataaatggatatagaaagatagtttaaaaaataagatatacaatttgattgctcttaagacttattatagatttataaaaattttatgaatattattagtattttttttttttttggtgttatcactattttgttataaatatatgatatttcatgtgcttaataaataaaaataatatatatatatatttttgtaagaaatactattagtttttaaatattataaattaatgtgcatataaatataaattttttaattaatgcattcacatgcttttattagatttttgttggagaatgtggtgagagctcttaaaaattagaaaaaataaaatgaaaaatataaaggatgccacttttgatgttttcctatatatatatatactagcgaaaagttacgtgcgaggcacgtatacaaaattttatgttagtttttttctatgttatttgaaaatgatacaattaaaaattaaagaaaaaaatattataagttaggtgagattattattatgtatatctaaatattatagtttataatgttgtcaa

SEQ ID NO: 128577 - DNA, 1200 bp, Cannabis sativa
ggctgccaatataacaatcaacaacctcccaatcaagttagaatggcccaaccgaagccagttgttccagctcccaaagtcagcagaccaacaattgaataccacccaagcaaagactgcttcaagaaccatctttgagacctgcaagtgaagaatagatgctgatggtttttaaaatgtattaatttcatttttcttaccaatgaagtctttttatctaaattttatgtgatataaattgcaatattttttaaataaacttaaatgttgttcgttaaggttttttttttttaatcgataaatgaagtataatttttatttttgaaaataagaaatgtattgtgtaattatttttgtttattaattttgaaaatataaaatataatatatttttattataataattattttatttttcaattttaaaaaaagatagttaagatataagtgtttaaaattttgtgtttgtaaccgatataaatttaatgaattttttagtggtgtaagtattcaatgtttgttcagacgtaactcatagtcttatattacatattttcatccagacttaataatttagaatctgcgccttataagtattgaaaactctcaatgaaaacatcaaactgttaattcaaaaattcgttaacgttaattgaggcttgataattaatacttcaaaacaatatttataatgaatgcaatgcatttaaatactagatagtgaagaaaagacataaatttgcacttggttttataatttattctacatactccatgagtcaatattatttttgagatttgataaatgagaataaaatttgacaaaatttctttaaattggaaattggtcgttcccttttacaatgtttgctttgttatttataagagtaggataaaagttatttttgatccaatccattcaacaattatgaagcgtgaacattcatcacgtttcatatatttcaattaatagagggaaatatcatgcaatcactttcataataaataaaattaggagtgtaaatgggtcaggtcagatctgatctgactatgatctgacctaatccagatcatataaggatctgcctcgccccaccccgctagatcagatactcggatcggattagatcttacctgacttattcggatcggatctaatccgactggactctttttttttttcttaagaattttaatatt

SEQ ID NO: 128578 - DNA, 669 bp, Cannabis sativa
aagcataaccaggggtaaaagatcttttgtccccagtttttttttcaattttttttccttttccaaacgcaaacagccacgaccaaccctctcttagaccactaatttcaccatttttctccattctaccactaattccttccacaaatctccaccgttatcacctataaacataacccaaccaccaatttcatcaaaaaccacctacattactctaaatcaacccaaattttcagaaaaaaaaaacctaaaccccaatattcatggtgttcatcatctttggggaatccttggtgcaacaaagcttctattcttcaagtaagtgtttttctcttcactaaagtttggtgttttaagagtaattgattgtgaattgtgtgatattggattattattgtgtgtggagactggatattggctgtttttagtggtagaatttttttttttggaattgagtttctgctgtaaaagttaatttgaggaaagaggaaaatacaagtaaggtgctgcccaaattttttaaataccagaactaaaatttttggctagttaattggtatggcaaccaaaagaatcaacattatagctaaccgcgacatgcaaggttcatcctcacatactcctgatctccaagaagatcaatctcaacaactcactaggtttgtgaat

SEQ ID NO: 128579 - DNA, 688 bp, Cannabis sativa
aagttacttttaccagcacagtaaaagtgatatttcttgtagagaaatgcaagtgttagaggtatataaatcaatagaatagattatatcaaaaatacaactttatagcaaaaatattacaagtaaaatagactgattaaatatagttacaagcacaataaaattacaactaaatggaataaagaaaagtaaagaagattgaggggaaaacttgcaccaacttagaatttttttgttatgtgagagcttaattatcataattaaaaataagagtttgttcattcatacattttaaaatattttttttcttctatttatataataaacttgtataaattaaaaatatatggcgctttacaatgctttaatcgcaacttacgcaacaatttaaattgtaatccaaatctcacaactcaagttacaaccaaattacaactcaactcaatttgtaatccatatcacaacccacacattaaatattaaggatggaatggatatgatagttgcacagtgttatgagttaaaagattggaaagtaaaagaaagagtaatttgtggtataaatatctaagtttaattcctattgcaaataaatacctaagtttaatttttggtggtaatgatatctaagttatatttttggaactctaggtacctgaccgttaatattaaatcattatccacgtgt

SEQ ID NO: 128580 - DNA, 578 bp, Cannabis sativa
tccatcacgagcagatacaacagtataatccgcacaagcgcagattttaaattttttacttcaattcaatataatccgtgcaagtatgaaaatccgtattttacagattagattgaattgaattgtctattttgaggtctaacataacatggtccatgtgcacaatatttacgtcaagctcaagttagttttgtatttcgaggggctgaaatacaagtttgttttattcaagtttaaatttgtgcttgttttagtaatatttttcaaataaatttgttcaacttaaatatttttttaaagtaaaaatgatcagtgtaaagttttttttatataatatataaaaaagtgacaataatagtccttttattattttgttgccacggtgcccttttaattattaaatgattaaatgtaagctaaatttgttaaatactaactaaaatatttcgttgtaagggtgcctttttagttgttaaatgccacctaaattcattaagcgtttggaaagccacaatgtaattagatttgtgtgtaattgaagataattacacaatttgacatgtttgtctgaccatgta

SEQ ID NO: 128581 - DNA, 710 bp, Cannabis sativa
ctcgtggactaaggcccattaacgccccaaccacgtaaaaatccttctcttaatttcttacagctctttaatcttttattattttattggttgccgaaaacctcggtcaacacctgtgaattgaattctccacttacattagaatttaggtaagaaagtagaccatgtacttagagtttagagctttggcgcctttatatattaatcatgtgtagttagctaattagaaacacgtgttagagttaaaacaataaagtttctatgtatgagaatgtgttaaatgagttgtatatatatatatatatatattaagatttatgtgtatgaaacaagatataactgggttaggcctgataaacaacatcaggataaaaccctatgagagcataatgtatggattatgcacatatgttaagagttgtatgtatcagacatagctaggttggacttgataattagaactaagataaaccttaataagatcttatatattaaattgacatgtaaacgtaacacgtggtgtctatacaaaatagactgaagatgcggtggcatcatcataaaatgttgtggcgtgttatattagtgcagtggcacaattattatcacaatgatgtattaaatgtgataattatgcaatgtgattttattgtggatttgatcatgctttcttgttgggcattggctcacgggtgctctactgtgcagga

SEQ ID NO: 128582 - DNA, 1137 bp, Cannabis sativa
gagagagagagagagaataggttttctagttttttctcttatcttttttctaatataaataaaactcattttattttattaaaatcagcctaatattcagcctataatgtccacaaaagataaaaaagggtttccaacataatgacccttttgcccttaaatataattcaaatgtttaaaaccatccaagggtagtttagttatttaccactctcgacaaatccccaatacttccaatgcctaacaatggtaccctgctaataatattctaaatcatacaaaacgtgactctctaatggcccaacgtcactttccactgctaccaaacacaatcacagaaaaacgagaaattcacatgtatagcataattaatacatgttgaaattaaataaattttcataaatatgcaaatcataattaataattaaatctaataaataagccctaattatttgataatccaatatatcaacataggtggtttttacaattatcccacgttaaaaaaaattcgtccttgaaatctaacctgaatagctctggatattgagtcctcatatcagactccaactccaaagtggcctcttccactttgttattcctccaaagtaccttaaccaatgctatagttttgtttcgaaaaactttcttcttcatgtcgaggacttgcactggttgctcatcaaaagacagatccagttgtaactccaatgcctcataactcagaatatgcattaaatcagatacatacttcctcaacattgagacatgaaatacgttgtgcacaggtgacaatgctggtggcaaggctaatcggtatgcaacttgttcaatcttttcaagtatctcgaaaggtcctataaatctaggacttcatttgcctttcttcccaaaacgcctgattcccttcattggtcacacacatgcaggaaaacatgatctcttggttgaaatgtaatgtctcggcgcttgagatctatgtaacttttctgcataactaattttcttacctaaagcaaaataactaaattaacataactaattaaattttacataacacacacatattagactttttatttgggtttacattaacttttattggttttattaaaacttgggttgattggatagttc

SEQ ID NO: 128583 - DNA, 1003 bp, Cannabis sativa
ttttattaaagctagattggagacttgctgatgagactataggcgaggacgccagtgaagaggagaaagttttagattatagaagctctgtgagatgtaaagtctttctgggctttacttcaaatttggtttcatctggtgttagggatacaattcgttatctagttgagcatcacatggtggatgttttagttacaacagctggtggtattgaagaggaccttataaaatgtcttgcaccaacttacaaaggtgattttgctctaccaggagcttatttgcgctccaaagggttgaatcgaattggtaacttattggttcccaatgataattattgcaagtttgaggattggatcattcctatttttgaccagatgttgaaggagcaaattgacaatgtgagtatcgtgttttgttatgcatgtttcattgtttgagtatttggagtatttgctaaacctacaattgatgagcagaacttgttatggacaccatctaagttaatcgctcgcttggggaaggagataaatgacaagagctctttcctctattgggcttataaggcaagtatttactttttcaatatatcttgcatataggctgtgaagattatgaatatattcttagtcatattatcgtttttgttaaacatttggctttgtttacttttattggcaataatcctattcagcttgttaatctcattcttggtgtgttgatcaattttaaagattttttttttttttaaaaaaatcaagctttgaagaaattagtatcaccacaatccattacactatatcatcaaatacaagatttttaattttcacattataaattgtgttaaaaatataaattacaaagatgatattttataatataataccttcaactgttgaaagcagtatttgtttgttttattgagtttagtgaatgagtgatttggtttttttttttttttttttttttttttttggggggaatttttttttttttttttaaaata

SEQ ID NO: 128584 - DNA, 525 bp, Cannabis sativa
tgttcaacctacagaagaacaaaatgtatcatcagaacaaagtaaatgttattttgaataatttaaaacaataaaaatagattaaataaaaacaagacaacatacttacatagatgaacctataatatattgaaaaaagataaaacttttcatagctttagagatcaacataaaataaaaggtttaataagtaaaattttaaaatgaaaaaaaatagttacgttctaagttttttaattctttttattaaacacttgattaaagcatataaataacaacacaataaagacatgttctaagagtgtatggacaaagatcctcagataacctaacaatctaacaaagccaaacactatatgtgattagtagtttttatgaatgaactgatagttacataacaagcatgctcacactaatttaataagaaaaatatcatagctagccaacttaggaatgtcagtcgggcccggcccgacatcactttggcccggcccggcccggcccgactccttcttttggcctagc

SEQ ID NO: 128585 - DNA, 1592 bp, Cannabis sativa
atgttgatttctttctaaaaatcacaaattcgtaaaaaaaataaataaacaaatccgtaaaaataataaaaaaatgtgattttaagtactttgtgtaaaaaaatttaagaaaacaaaccaccaaatactctttccctcttagccattatctcgcctaatttctctctccacccaatttctctcttagtttctctctcttaaatattttgtcagttgtttctctttctcgcctatttttccattcattttctctcttttggcattattattatatttgattatcagaaccttcttcttcttttgttcttgttcatatgttgtttcagccaattttttctgtttgcctttttcttttgccgtcggtgaggcttggtctcagttgtgcattgcggtggtgtgttgctctaaaagcaagtatttaatgtgtttacctcgcttttagccaacgactctgagtcacttaagcgattaatgaacaataataattgaacaatgttgaacaataagaacacagagttgttatagaggttcagccccgtgatagtggtaatagcctacttcccttttgcttgtattacttgtgagaaaagaagcaagaagtttttgacctctcttgaaaacttacaatttttacagtataagagctctcttgaataattgatttcggacccctgaatagtgaaatggttccactatttatagagaagaactacatcaattaggtttcccaaagcacataagaaataaaataggaaacttgtttactttcctaaaacaaataacactaaaagggaaactaggaaggtttctcttatttttttctcggtgtgaatctatcccacgaaattaagaaagtggtcgagatttgaatgcttaaacatttatggaaagtatctctgaggatctttttatgttgaactactctgctcggaagactcagcattcctggatgatatggatctgtgcaggcaatcacgcaaaggttctaccggataatccatgttgaagatataaccttgatagttttaagtagaaaaattttctggtcggaccatagaggttaaattactcgtccagatttctcaatgttctccacatgtcaccatgctaaatgtcacgtcaccttgtgcggaattttggataatatttgcaccccaagtacacgtgggaactttttgcttgcacgtggacttatttggccattaagctggtcagatgggtgacacgtgttggtcttcgtgccatatctttgtctgatatgacttgatggaaggagtgaagatatggttgtctcttcagtatctggacatttaatgccttgtcttggaaaacggacctcgattagcacaatgacatttattgagtactgcgtgcctgatgtgtgtactccttaatatgtaattgcaatccatgtttttggggaagaaacatgtggcgtaactgaaaggtaatcaccatccaacaatgggcctaagccttcccacttgcagaagcccaagcccagacttggaacgaacccaagcccagtgttgtgaaaattatatacgcaagtatacgcagtcaaacaagtaataaagtgataagtaagatcg

SEQ ID NO: 128586 - DNA, 1163 bp, Cannabis sativa
  modified_base (247)..(249): a, c, t, g, unknown or other
gaaacgacaagctgaatttttggatttccctgctgcaaaatccgggtaaccagttttacaagcattgtaaaactagttagccggttttaccgagaaaaaccaaaaaaattcaaaccctaaccaattcgtttccaaacacaaccaaactttccagaactgcatattatacccccaataaactatttccaagcaataaaaaaacaatcaaacctcagaattgaatttcaccattaaagctccaagtttnnnttctaaaactcaaagcttggttaaaacttcaaacaaccactaattcatgctcaaattaacatagtaaatcatattttgactacagaaatcaatatctaacaactacagcaaccacaacagcaaaaacaccatttcatgcaaaaatctctaacttaaaattcaagaaaacatgaggagaagagctaaaacctttaccttgattaaaatcacctaaaaaccagctgaatctccctggataattgaagagcaaaacaaaccctagctgctgtagggtgggtcgaagtttgagagagaaaggcttccttttttgtctattttgatctttatgaaaatgactaaaataaaaaggttttgtttaattaattttcagccaaaatatagtaaataaatcaaattattagcttaaattaaaaaccactaaagacaaaaacataaatgggcaaaatgaccatttttcccttctcccacaaaataacaaaaaagggcacttaggggtattttgggaaattcaaaatcccgactacttctgacattcccaatactaggatgtgattctactagccaaacactgggttccaatgtcgctgggcacaaaacatgcaaaaatatgaattttctatatataacataaaaaatacattctgaattcaaataaatcatcataaattaataattcaaaattaataaataattttcataattaagtcctaattatttggtaacttccaaattaaagctaagcggtctttacataatcaatcgaacactacttaaaaatgatgatggctcttttgctcaaaaatgaaatgtttcaattgttcctgtaaattcttactcccattggaccatttgtatctatatgcattaagatcccgattgatggatctcttggttcgagaaataaaaataagagg

SEQ ID NO: 128587 - DNA, 1259 bp, Cannabis sativa
cttgtttagcaagcagagcctgattaaaatgaatgagggaacgaaagccaagatctccatcttttttggatttatagagcttctgccaactctgctagtgagtcttatgatgattgttctcattgaaaccccagccgaaattggccataatagaatcaagagagtgactagtggcaatcggaagacgaaaacaagtcatggtgtaggtgggaatcgcctggatgacagacttaaggagcgtttctttaccctctttagaaaaaactttgtgcttccaattgttaaggtgaccccacaccttatcaatgaggtagtgaaaaacttgtttcttcgttctaccaatatgctgcgggagacccaagtatttttcgaaagaggttctcaccagaatatgcacgtagtttgaaatcagggtttgatcatgaaggccaacattaggagaaaaatatgatgaagatgtttgaaagttcacttgttgaccagtggctctttcgtaacgactaagcacctctttaataatgttacatgaattaatggaagtctgacataagaggatgctgtcatcaacgaaaaagagatgagaaattgcaagagcagtgcgagccactttgaaaccaataagagcctgagttgtttcctgttgccgaaggagagaagaaaagcccttagcacaaagcaaaaaaggtaaggagagagagaggatcaccttgtcgaatgcccttagaagggacgacatggccagaaactttaccgttgatattaaattggaaggtggccgacaaaatgcaatcgattatgagttgggtaaaataaaaagggaaattgaattttcttaagttggcattgataaagggccattccactctatcgaaagctttagccatgtcaagcgtgatagccatccaccctttcttccctttcgatttaagcttaattgagtgagcaacttcctgcgcaatgatgatattatccgatatgagtctttcaggaaggaaagcactctgattgggagaaatcaggttgttaagaactaactttagcctattggcaatagatttggatataattttatagatgatattgtagaggcttataggcctaaagtctttgacaaaaatcagctgcttgactttgggaataagagtgatgagggtggtgttgagaggagaagtgtccccattaccattaagaaaaccaagcacagcagacaacacatcttttgtaacaccctaacgagcataggcgtattacgtgatttt

SEQ ID NO: 128588 - DNA, 570 bp, Cannabis sativa
  modified_base (517)..(524): a, c, t, g, unknown or other
ttttcccaccaaaatatgagattggataattttttgcaagtaaattgatagttgaggaggttttgccgcaaattactctataataataatagtagaggagggcaatatggtccatgaatgaatatatatttatgtaagggtggtggtgagtagtgggtgatgttcaagtgtgttggtgatggtggtaaaagcaagggcgagttccatcattagtctcaattgcacgccaaagtgattaatgaatgagacatttctatgacatgaatgcatcctatgatatatgctagaaagagatgcgttaaaagatatcgatggtgtatgtttaccacatgttatattattatttatgcaatttatataatttaatgtaataatttttataaagtatttttatttaattgttagacgtcacttttaggtggtgttagacactaaggtggcgtttggttgaaataaatgaaaatataaggataggaatggaaatgggaaggaatataatggaataaaatttaaaatnnnnnnnnaaaattgataaaaaaaattattaatttttttttcaaatcttgcatt

SEQ ID NO: 128589 - DNA, 716 bp, Cannabis sativa
  modified_base (386)..(402): a, c, t, g, unknown or other
aatattaaacttacaactcatcaaaacaaaaggtcatagctataaaagtatatttcaaactcaaatccagccaacttgtcgacttagaaatttagtctagacttctaagctactataataccctaaggtttaaggaattagattagcaactctaactagtttaattatatattaatgtggaattatattattatataattaaatatgtgaaactatactgataaattgtattttaagaccccattggtgtactaggagcatttttcgtaattttgacccgagaaggtaaaatcataatttaatgatatatcgtgcttatgggctatattattatatagtatatgtattctgtctatctgcatgtattttttgacaagtcggcacgnnnnnnnnnnnnnnnnntattttgggccaaactgggttcggggtccaaaatacatttttgggatttaatttggcattaatatgtcaattttgaaaatctgaattaatatgctatgtgtgtgcgtgtggaatgtctatagtacccttgattatattgttatatttatgtttggccctaggggcattttgatcatctgaccaactaaaatccaatttttgagaaaattgaaattcattttctggttacttcttgccctaatcgacctccccctctctctctattcttttttcattttcaaatcaattttgaaaaaaaaggctaattagtaatt

SEQ ID NO: 128590 - DNA, 850 bp, Cannabis sativa
aatcacgtaatacgcctaaaatagttagggtgttacagttagggtccgagttcgggtcccaagtttgggtctaggtccgggtccaggtcgggtcctgggtcctgatcctggtccttgtcccaggtcccggttcgggtcttggtcccggtcccggtctgactctgggtcccgggtccaggtccaggtccaaaccaggttcgagtttagggtttgggtttgggtcccgggtcccgaatccgggtcagggtcctgggtcttgggtctctggtcccggtcctggtcttgggtcccgggtttagttctggtcttgggtcccaggtctggtcccggtcctgatccaagttcggggtcggatctgggtttaggtccgggtctaggtcccagtcctggtcccaagtccaaggtccaggtacgggtgtgggtcccgggtcacgggtcccggtcctggttcggggtctagactaggttcgggtccaaggtcccagttcgggtctgagtctcgggtcagggtctgggtttgggtctcgatctgggtctgggtccaggtcccaagggatccgagtctggggtctgagtcttgaattaagtttttatttttaaataaattgaaatcgagtcagatctgatccgatccagaaaaaaaattaggcgggtggagcggatctgatccaagatccaataagtatccgaatgtttcggatcagaggtgattcgtcggatcggagctccaacccgctccaactaaatggatctttttgacttgcctattagtaaaatgtttatcctggtgtatttttgttatttttcaaatttctaatggtgaatttgttcatattaaatcataaagaga

SEQ ID NO: 128591 - DNA, 2717 bp, Cannabis sativa
  modified_base (1622)..(1627): a, c, t, g, unknown or other
caacccgaacattagattaggttaaaaaatatagggtttattgaaaaatatctcttttatttatcaattaaccaaatctatctctaattttatatttatttgaaacatatctttttttatatgtattgcaccaaaaatacactgacataaagaaatcacatagagagtatattaaggtgacatgggtaaaatcggtaaagtgttaaaaaaaaagtaaaatgataaactttagaaaagaaggtaaaaataaaagaggacaatataaaaaatgtataaagtctaattttcccaaaaatatataagataatccgtccaaccgttgtacaacccgctttactcattgaaatcccaaactgagtaaaaaataggaagaacaaagaacaaactacatacacgttatgaaccaatgttggaagaagtaagtggatttggggcctgaggcccaaaccaacttaattcaaaattgagcccttccttttcgatctgcccctattccatagcatggtgacgattttgccacatctggctttgagcttccatccaaaattgaccatcaatttctctgtactcaaatatagtcacatattaactctggtttataagttgttgaacttttgtatggagagaagtacgaatgaagcttcacctatagattcatgtacgtagtctatacaatgccagaagagaattttgatcaaaatatgaatagtttagttagaacgttcaacttgtactcctaagaatactatatattacaaacacacgtaaacatgggcaagcattataccaaaatgaaaataaatatgatttttgcctctccaagattgtgctttttgatttttttggattgttaaaaattttatctgaactgtgggacttttgttattttttctcctatatgacaaatagatacatggtagatctaaagaaaatataaaaaagaaaaaaaaaaggagagagagaaagattgatcaaaaactactaaacaatgagaataatgagtggtgatgatagatcttttgataaattttgtggtggtcatttatagaaattaggagtgttcattaaattcaacgtgtagtattttgttcatagtgcattcgatatgcactaagtgaaaatttcataaatatttaattttgttttaaattatattttttttatatataagaataaaatatacatttgatctactcaagttttaaaatatatttatatcgtatacattcgattttgaaattattattcttttacattctaaaagattaattgtattggattagatcaattacttttacatgtcaactaacatcttgtgcggattttagattttccaatccaatccaatctgcacaagtgcagatatttacactttgtggattggatgcaattgtagaaattgaattggattggattggatattttatgaacacgcctaatagaaatggtgaatgagagaggagagaaagaaataagatgattacataaggaattattttttgtaaaaaaattacatttttacgtttaaatattttttttacatttttacggttttccatagaaataaaacgaaaataacaagaaaactacataaaagtaacatcaaaataataacaaaaaannnnnnacaaataacaaaaaatcaacaacagattaacaagagtacaacataaaaagatcgtttttctgtaaataaaatcaaaaaaatcataacaatatttaaaattctataaaaccgtatttttgtaatttttttgttgtttttaataatctcaagaaataaaagaaagagaaggtttaggcctaagtataggcaagttaggcctgtgcttaggtcccatctagctgagaggcgaaaacaaaatgttttcttttaaatttatacatttatttttattaattttaaaaaatatcatattttttactaaataaggtctagaaattatattttttgttaaattttaggccgacttagagttgagttgggctgagtaattttagaaaagattgaaaatattaagggatttttacattaatatgcatagttttcaaattatttatattaataaccttacataaacgatcatcacaaactgatgttccacgtcagcaaaataacgtaccagagaaatttttgcctttttttatttttttttttaaaatcaaatttttgcctattatcacttattagtagttgaaagtcaaattttaaaaaaacatgtgcagtcgttgcacgttcttttttttattattatttttctttttaacaaaattaggtgtattcctttctattttcctttaaagaaaaatattaatttctctctcttaatagattttttaaaaaagaattctaattatgctgctaattatttttatttagaaaaaataccatcgtaatttattctttaagatgatcattttaatatatgagaagcatatatataaaaaaaaatgaaaacatcattttaatttcttttatatttagctaaccatatagtattttttttttggcttaatataaaaaagagtaacttttttctttaggagatatggaaagtgtaattaaatggctttaaacaaaatatattagaccaagtagtttcaaaagttattaaaaagtattttattattttagatttaaaagttacaatataatattttaaataagtctgttttatagattaaccttgataaattattaaaagataggaaactta

SEQ ID NO: 128592 - DNA, 1483 bp, Cannabis sativa
tgtgggtgtaaggacccaatagagacttgaaatggggacgttacaatcaaataattaatggcctaactaaaactatctaaagcaccgaattctcattattcagaatcaaactgacaattgaaattggctcaattgtcagtttgagagagcctggtagagtgtgttagttttatcatattagagtgttagagttgttggtagttggtcaattctgctatttgtccaactgccttctcttacaaacttgtattcggttttctgttatcttgagcttgagctcactattgtatatacagtttgatgacttgattgagtaatgaaaagcttcattctcttacaaatcttttcctctctttctctctttctcaatgtctttctttctgtccaaacatgtctagaagatttaatactcatacaatagaaggcattcgaatccaacccaaataaattaaagaaggatgtccctatatcttttcttgtcttcctttttaatcatgctaacattttcctaaaattaattaagcgttttatgattaactaatttataaatttaacactcaatgatgatgcctatacaatactagcttagatgtatataaaactatgcacaacaatacccaattcctcaatttgcaaaccttcatatataattgtaatcataattattaagtacgtcttcttgaacaatagcaagacaaagacaagaagagctttacatatgcatgcatggagctttcatagaggtatttcatctatatattgacaattaatttgatttttaactcatagtacacttattcatattatcactatatcatgttgttaacctcattataacacatttacacattaaaactcaattgtccattccatgatctaaaatttatacatttgaacctctgcctcagtctctaacttcatcatctaaaagttcttacttttactcagtcatcatggtatacacttggtaactaattaagagggataagttgaatctttttttcttttttcaagtgatgttttggattaattacaataatattaattgatgataaaatatttgttgttgttgagtagaaccaaattaatcccaactgatcttcctctttcggaggctaatgaagtgtcatttagggttttgtttcaaaaatgtaggaagccatagagcagattgtttgggatatcgtgtaagattatgagtgtaatcaacaaagtataatccatatctatttgtatatccacttccccattcaaagttgtctaatagtgaccaataaaagtaacctttcacattaacaccattcctgaaccaaacaaaaaataaaatcacattattagtcaattatatcattagttcagtatatatattagagaaatatttgtacaaaaacatttaaaggggaattctcattttatgcttttttgggaaaaagttagccaaaatgtgtgtgcgtgtgtgtgtgttttttttttttttaaaaaa

SEQ ID NO: 128593 - DNA, 709 bp, Cannabis sativa
gtatgatcgcttaccatatatgtgctttaactgtggttgtattggtcatgaattgaaggtttgcttgaacccattcgacgaatggaggaggaatcgaattctctcagataggggtatggaacatggctaaagcttgatgagaagaaggatatacttgacatttttgggaaggggaagataggctcctattcgaatcattactctggaaattctttctgtaagaataattttaattcacctcctgcaagagtaaacttgggaactggttctgtgaatttcaagaattcggatatattgtctaatgctaataaggttgtggcttccaatttccctgtttcttgtgttgaggacatggaactgattgtgaatcatgatacatcatctatgggtaagtccttgggttgggaggaaggccaaattaattgtgatactcatcttattgagagagaaagagtgttaaatcttaagagaaatggtgattggcgtgaagagctcaaagagaaaacaccatccatcttcaaatccccagatactttcaatccccgtttagtgtcttcaattcaaaaggcttgtaatccagcacctttccaactttttgaagtgccggttgaatatgaaaatactattaataattattgtattggggatggaaagactaaaagaaggaagataaccccgagacgccccaagagtggtggaagttcgaaaa

SEQ ID NO: 128594 - DNA, 699 bp, Cannabis sativa
  modified_base (593)..(609): a, c, t, g, unknown or other
aagtagggccatgccagtacgactgaatatgcgtagaaaagtcaatcccttccctacggcaccaaaaaaaatggggccgaacttttccccgcccgctaaaggacaataatacaaaaagaaagtgagattttttcaaataataaaatttaagtctgacctaaagtataggcgaactaggtctatacttagagccggataaaaaaatttctatttaataatatacatttttttttattaattttcaaaataccacatttcttttaaaataagggcccaaatattttattttttttatgacccactaaaattcaaggccaatcttgcttattgtctatcctatagggatgcaaatgatagaatttacatataaattgtgaaacaaaaagacaaagacctattacatatggtaatttttttatcatttaaaataattttaactaaagtatgaacaagaagtttatcatctttaagttcacaacattataattgcaacaaagagaacaaaaagaataaagttttacaaaatatcattcatatcaacacaaaaattgctcagtaacaatagagtaataaattgtgacagtcagtagtcnnnnnnnnnnnnnnnnnaaataccgggtaagctgtgcaatctcacaccggctggggaaggttaagtgggatgattttgagactgtgtaggtatgggactacacagtt

SEQ ID NO: 128595 - DNA, 651 bp, Cannabis sativa
ggatcggatgaggaaaaaaaggttggattggatcggatgcccacccctagtttcgtgttcaaatttgatgggctttgggccgattcaacccaacaagaaagtctaggactcagctttaataaagttcctatattttgtgaggtagcttaaaaaatactagaatttgagttgatttttacaaaaatactgttacacgaatttttttttctatcaaaaatgctgtatttttataaaacaacagtagaatacaaaacagaacaactaaaaacaaccataaaataatagtaaaaacttaacaaagtatacaatataaaatttacactttatttttgaaaaaaaaaacacagtacttttgaaaaaaattccgtcctacagtaaaaaaaaaagtaaaaaagttaaaaattttagtatgtggtgtaaatatagactaagtttttacttttgccgataacttcaatataatgaccttttttaatgaaaaattcttttaagatatcgatattaataaaaaaaattataactaaattttgaattatgtaaattaatctcatttaataaatagtttcttaaaattctttcggttaaaattatgttaaacaacttataatcttttcaaaaattaccttatatgctatgttttttttttttttt

SEQ ID NO: 128596 - DNA, 1124 bp, Cannabis sativa
atgttcttatttagttgttataaattatttataatgattatgaatagctggactttttattagattgttaatggagattatttcacactttattttggttttaatatgatttagttctttttttttcaattttgtatgtgtatctatttcattcatacttatcttcttttaattgcctaattactaattaattgtttaatgatttcaatgtgaaatttgagaagtgagtgttattttatgatatagtgaaatagacatatattattatggtttctatttagtttttaattattgatggtttctattacaattctgccttattatgtactgactttgaaactaacagagaaaaaacaaagagttgttaagtgtggagaaaggagaagagaactgtgttgttgtagtcttttccttgatcttttgattatcttatgagtaccatggagcgttatgagattgtgaatccatccaagtgagtaacctttatgatcaaatttccacgttgtgataaattctgtatgttacttgcatttttaagtttgttgtttaaccgttcttcgtaaccattctatttgactggtctcgatcttcttccttggcgaggaccttattacccagagttttggagagtctaatagatgataagagggtttgtgattcacttgcaactaaaatatattctctttttttccttaaatttctcttgaactttgctttttgctattttcttttagttattagttcagcaagctccgtaatattttctgctatgtcgcaggtacctcaaacgtcacagatatcacagatgatgtcgatgccacaaatgtaacaaccatcacagatcccaaaagtacaacttataccttcgcaatagacttgtgggaatgagaatggtggtgatgataatgagtccacatcttagatgtttaatttattacttttgttagtatgaatatttatgaactcttttaaatatataaacaatgtttagtattacatattaaaacaatgtaagaactcttttagtgttaaatataaaaataattattttttaaagaaattatttaatagaaaaaagtgaaattaaaaaaatatttaatttaatttaaataaatttaattatt

SEQ ID NO: 128597 - DNA, 1225 bp, Cannabis sativa
  modified_base (37)..(44): a, c, t, g, unknown or other
tggactaaagcttattaatgccccaaccacgtaaaannnnnnnncttaattccttatagctctctttattattattattattatattggttgccgaaaacctcggtcaacagaagcaattattacaaaattactactaaataaactaatagaaaattaaatttttaaaataaattttaaaatttatacatataatatataaataaaattagagatttaaaaaatatataagctttatttatatgctatattaagcattataaataatctttaaataatgtgggacttatgtttaaaataatatgtaaataatgtaaaaattttatttaattacatgtgaagaaaataagtgatgtatatatatatatattttataaaagataaaattctcttaaaattagcaaaatagattaagaatattatagaattccacatcattactctaagattaagctttatatagatatataggtagatatagatatagattggtcaaaaaatttaacatttttgccattatttagaaatgcaaaaatatatattgcattcataaaaaaaatgtactataagcaagctaaattctttaatcacccatggaaaataatgtaacattaattttgggattttttttttcaataaaacttactaatgaatcaaattattatatgatatacaaaattaaaaagaaaataaaaaaaaaaagttaagaaaattgaaatgattaaaaaaaatgtcatgtgtaaaaaaatatattgcattcattaaaaaatatattataactaatcaagcaagactaaattctttagttatacccatagaaataatgcaacactaatttctggacaaacgaaagtagagcaaataatttactatatatatcttataacacaacacttacaatggtttttaaaccaagtgggattttgtttttaataaaatttactaatgaattaaataaattaaataattgtatgattgtatgatatatagaattaatagaattaaaaaattaaaaaaaataaaaaaattgataaaatagaaactataaaagaaagctcttatgtaataccgcatcagctatcaataattttctatatatatagatatagatatgttgtccctaattttgcctaatatacgtggaccaactggaaaatgacacgtggaggggaagagtttagcatttcaattaaatagctaactctttataaagcaaaggattattt

SEQ ID NO: 128598 - DNA, 1098 bp, Cannabis sativa
tattttaatactaaatatatataactatttacttttttcttctttaaagtattatttaattattaaaaactttttttaaaaaaatagtgtagtttatagtatcctattaaatttggtaggacactgtagacaaagccatttataaggataggtttagtgttccattggagtaaatatagtgtgaaactacattatatttggtgttttagtgtcccattggagatggcctaaaaggaatataccgatatatttctatttgttttggtattcgaaataattttttagctaaattttttctcatggtcatgaaaattatacttatttaaaacatcctgcaaaattttaagaaatttgaaaaagtttaacacgccgaaaattacgttcaaatagtgtgttgcacgtgtgattattttattttataagtgtgtaaaatagactgattaaacattattttctatattgtaaattatttcaaatttttcaatttgtatagtaaaattgtaaaagatctaatgtgcgtactctaactatactaaaattgtataatttaaggtaattaatagatttttaattatattttccaatttttattgtcatctataaaaattgagtctaattattaaaaaaaaaaatcattttaaatagtacttaataaattctatataattaggggaatcattttactaaataagatattggaatttcatttataattactattttatattcaaatatgtttatatattaaaacatagtataattattattttaataattttacgattcaataattaaataattttcaaatacgcttattacaattgtaaaaaattattacattgataaaacgactataaatttacactgtacatatattcaatatagttattttttgaaatttttttatttttacattttaaaacagttttttttacatttttacgaaattctacatagaaattcctattacaactagcgctgcaatctaaattgcaacaaaaaatcgtataaaaacccttattgcaactaacattgtaatcactttagaaactaaaaccataaattaaaaaaaaaaaaaaaaaaaaagtagaaaaaaaa

SEQ ID NO: 128599 - DNA, 1178 bp, Cannabis sativa
  modified_base (144)..(144): a, c, t, g, unknown or other
ctaaaatgttagaccaacacaataatttggtcaaatattttagaatggtgagggataaatacaaagaacaaccagaagctacattacgcttacaacttctacaaaacagagctagcgatggtcgtcaatacaatatgccaacantttctgaagtagcagggttaatagtgggcgatttcagtgaagcaaactacgaacgtgatgtcattgtagagcaccgaactaatggacttcaaataataaaagatttacattcaagcttcatgtcaatgacatacccattgacacacccttatggtgaagatggctatagactttgaatacctttcagaggtgtaacaaaaataattccaaaacaaaacagttgacaatgttacaatattattcgtttaggtttcaacaaagattaaacgagggacacactcttcttcgagcagggagactattgaaacaatatatagttgattcttacatgggaattaaagaagaaagatttcgctttgtacgaaagtaccaaaataaactaagaactcacatttactctagtataatggacgcaattcatcgaggtgattcagattgtaaaaaagttgggaaatcaattatattgccttcatcacatacagggggaccacggtatagagcataaaattatcaagatgccatggccatttgtaaataggcaggatatcccgatttgttcttgactttcacttgcaatccaaaatgacaagaaataaaggatattctcaatttaattggacaaaaagatgatgagatcgggttgatatcatatgcagagtctttcatataaagttataccagctaatgcaagacctcaaatgagaacaaccatttggaaaaataattacatgtaagttctctttgttatcatatccactattgtgataaaatatgtatatgacaacacttatctaaaaacttttaacaaaatcaataaacaaccaattttgttacatgttgtcacaggtgtctacacaattgagtttcagaaaaaaggtttgcctcatgcgcacatactatttttcttgcacccaacaatgaaaaatccttcagcaacacatattgataaaataataagtgcagaaattccaaacatcaatgttgaccctgatggctataatgcagtaaaaaaatttatgattcatggaccatgt

SEQ ID NO: 128600 - DNA, 1912 bp, Cannabis sativa
gatccatcttttgttcacctctaggagttgggtagcacccaacccctctagacttaggatactagagatgcactattaattggcatttaatacagcatggaggaaacgtctacggacgaatatgaaaatatatgttagacgcattaaacccattctttagcaagtacatgctaatcaaagatgtaagtgacggctacataatgtactatcacatcaatcaaggaaggataagggcttgtctcacctaaaccctacacatcctactaggtagggccgcataccctacttcatcaatttaggaacttgtgcatgaccaaggtggacacttatgacaatagaggccttccttcctctccaatgaactgctataaatacccccaaccatatttataatagggatcgaaaaaaagagagcagaacattctctgtaagaaatacctacatattaatatcagagacttgtggactaaagcttcattaatgccccaaccacataaaaatacttgcatttattctcttctaatcattcttagagcattaatgatttcgttgccaaaaatatcagtcatcaacaacatattgatatcttattttactatctgagaaagaagattaagtatgacgaatctatcaagcttaaaatcaatacaactgattatttttttgcaactcaaatttttgagttgtttggaaactatctgagaaaaggggagttgggttcctaagaattctaaggctgttggctatattaaggggttccacatgcttgttttaaagtcatggctgttgcttgattatgttttgattccagtgaatgttgcttcattgacacattaaattgtgaacatatttgacattaggtgtagctgtttgaaagtatgtaattccttgtctgttggtaaattcaaaaacttgaagaactttgtgactgtgatgatcccaattttgttggcacaagttggttttatggttgtcggaatgtgttatccaattttttgcataatgacatcgcagaatactgaagtgacacgtgtactgcatttctcgcagctgggcggaagtgaatgtcccgaaaagactccatgtcgtacatctacatgtataaacttttgagtacccgagaaggatgaaaggtaggaagacataaatctggctttccgaactacttatcaggagttaactacttcagaatgatcttgtgaagttcagacacttagggaatccctaaaatcatggatcgaatcagagaaatatggcaacctgttctagtttcttgttttgtggatcataattatgtaataaatgtactttcctattttatacattgtaagaaaaaaggaaaccttccctcatgcattaaggccctataaatagtgacttagcctcactatgaaagagatggaaagaattgcttcatagagagagatataagagaattactcagagattcattgtaagagcttttagagagaaaaacacttcgttctttctctcaagttaatataactcaaggggtataggtattaccgcactcacgaagccgaacctctttaaaatctggtgttctttaatactttgttgtttttgctctattttaattatactcttaatcgcttattaattgactcacagtcgttggctaaaagtgaggtcaacattttggtgctctcattgagagcaaaaacccaagttttttatttttcttaagtttcaacaggcgtacaggatggtggtgcaaacccgtagaggcctggctgatcaatgtgactcgatggtgatagatcctaacgtgtagacccctgagaccatgagaggaccaccatggacaaaccccaaacatgcaattacacagccacctactgtgggccatggtgtgactttccctctggctgggatcacaccaggagtgcaa

SEQ ID NO: 128601 - DNA, 1114 bp, Cannabis sativa
ttcattccgtgggtgtaaggactcaatggaggcttgaagcggggtcgttacatataagattcgatatttaattatactaatagcaatatgatacttttgaagatgctaatcaccattagtgccatttagcattaatcatatatcttttagaataaataatatttatcccccaaaccgaactatatgacccttgtagagttttgtcgtctaatttttttttttgttgcaatcctgaactttaaaaactgccgcaagtatctcctgcagttgcattctactcatttctttaaactatttattgatatagcactaacgtgatgttaatctagccctgatcatgagtccaaacaaaaattaaatgcataaataacaatctaatgatgaattatgagaatatgtatatgcattattagagctaatgtttgtatgtttaatgttaataaattaaattttggataacttacagttaaagttgttaatacgtcgttgtactcaattatacttgtaactcaagctatataagtacatattttaaaaaaaataagtaaaatgtaattggatgggaatatttacaacattttgtatagtttgagggagtttttgtaacaaaacaaaaatttaaggaacaaaactccacaaaagttataattttaggagcaaaaattttaattatacatatttttataatgaaattttggtttatagagaaaatttgagcttataggagaaatgttaatgggatacaaatagtcaaatactaatacgagatgttataatattattaattttattagctattgtatcaagttgtatatactttaatttgattattatgatataaagtaattatctatttgaaaagtatcatattgtgatattattgttgaataccattgatacttattattctctttttctttttgttttaccataaacttattattcaaaacacgaatatattagcatatgttgcatttatttagagggaatatcttttaaataggtacatattgtatacattaggtgaatgttcgtgccgagccacgtattgttagtttcatttaagattttggtctttttaagattttgaatgtattttatttttaaagattac

SEQ ID NO: 128602 - DNA, 1298 bp, Cannabis sativa
tcttaaatagaggttctattgtattaatgtctatatagcatagacccacgtgttaattatgtctaaattgtgtatataaatatttaatattgttgtctacttgatttttaattgagcatattttatattaattactttattttaaaattattattttggggtaattttcatattttttttagtttatgtgtctcaaaaatttttatatttattgtaatgaatttgtaaatattttttatatgttcaattagtagttcttgtacggtgttgttgtattatttataaattttaattgtgttaatgcaatatgttaacatttaataaatttgttttgaagtttgattgttgttaagttatttttgcataattgttgcattaagaaaaaataaccctacacgcccaagctcactttgaccaaactgccacatgacagccgcaaagtcactgccacattctaacactgtagttctgtgcacgtcaataaatggctttactctccccactcgcgtgtgagtctcactcgcctgtcctatccacatgtgtatctcactctcccactttacacttagaatttatctctccattatatttttttaataaagaaactttataaatattatttttgtaattagtaaatagtataaatatttatttttccttcaaatggtataaatatttattttgggtaattttaacctaaaatataaaaaacctcttcactataaccatcatttcttacaatttattagccacgagattataaatacatatattggataatttagatttatgaaaggccaagttttgccttcatgcggggtgtcacgggctcaccttttaatgcagcggaacacctgtgcagcaccttgaattctttaagccaaggtcagccttccaaccatccgagtaacaatgggtttatttttcgcgcgatcgtgtgccacgtgtacactttcgtctctcgaacaagtcctgtcgagtcatgcttgcaagcatccatgagtgcatccccgcatcgaggctctctagccaagatactcgcactgtccataggttcgcactataataaggcaaccgtggctcacctagtcactcatgtccaaggtagcatgtgtgacaagatgccaacactcagctgacatgtcgacgcttctaatcatgccccattcgaaactgtccgaatcgtctccctcatcgcccaaggactccccaacgtccatggtccgatcctcatggcagtatgcctccacgcatgttggcaggccctcgagacaagccaccaaactagttgcatacat

SEQ ID NO: 128603 - DNA, 863 bp, Cannabis sativa
cagtatttttgtaagaaaataacaaaagttagtataccatgcaaatttccctactcataatcagggccggccttcagcataggcgggctacgttgtgcttagggcccacctagctcagggggtcaaaaaaaatttgtccatttttaaatttacacatttttttttattaattttgaaaaatactatattttttttctaaatgagggtttaaaaatatttttttttcttatggcccactaaatttcagggccggccctgctcataatcatgatctttcaaataatctgaaatggatgaaaaactgtaaaagaactaaaagcggataagaagtttatgtggctgtcttggatatgctctagtttaataatgctctttggaatgcctatgtgtatagtgtaaaatttcttgtgtaaaattaagagaaagatttgttttaagttttctcattttaaaagggagaaaacttgtatagaagatattgattggttgtacaatttgagtataacttagatagtttactcatttggttgtaaaaagttataaaagttgattgtttttaataaaattcttatttattaaaaaaatacattgttgtatcatattttattattataatatcatacacgaatcaaataaatacagggtaaagtatttctatattcaacaatattattccatattattatatcctattatggtcatttatttatcgttagcatacaacatacaacatatacaaatcataacagtaatcataatatatacatatcgattcacataatttatattgtctccaaatttatacatccataataataaatcgtaaatcttattctcactatcataaattgtaacttaattag

SEQ ID NO: 128604 - DNA, 934 bp, Cannabis sativa
tatattaaattatatggaacccgatacttagttggatcaatagcgatattgacacataaaaaggtgataggcactactagcgccctttagtatttctctttctggtattatccatttcgttacaaatttaatgcacataataattcaaatctaatctgtaaaagtgcagattaaattgttgctttttaatattaatttatttaatagttattaaaatatatatttatcattgaatccagtccaaatgttaggtagtttggcatgtgtcttgaaaactttaatacgaaataactatggtttggcacaaaatctcacacatatttacctgactgaactttaattattagtattcttcgtgaaataaatattgtttggtataatattaatcaacacatttagcaaaataattctttaaatattttagatttcgtatctacgccttactaatccaatagaagttaacgtcaaaaaaagaaaaaatacaatagaagttaataattaataatatactaaaacaccagatcagcaacaataataataatatatgtatgatgaatccaaatctataatgacatggattcaaagatgtcattggtaaaaaaaatgtaatgccactatgtaaaatgatccaacaactaaaggtaaatataactatcgtagttatatatttgatataactattaaaacttctttcccatatgtttgcaattaattctatataatattaatgttaaaatgtaagttactagtgaaacttaagtgttatatggttatgtaaaattaaatatcatatgtacaaaatcctaatttaattaattaataatattataaaggctaattaacatttttgtttcttgaactttgacatgtactaaatattgtcccctgaatttttaaggtcgttaaaaatgctccataaactattgagattgtt

SEQ ID NO: 128605 - DNA, 692 bp, Cannabis sativa
ttattttgttaaataataaaaatacattttgtattttttatgataaacataattagttttgtaatatttaagttttagtttgacaaaaaaaatagtttaaaatactattcaatattattttaaaaaatataaaatttaatttatcatttgataatataaagtgttaaatcaattatttttacaaaatacataatttaaaataatattaatattctatcacgttcaaaataagtaataaaaaatagagaattgttaaaaaaatattattaatgcctaacactttttttaatgtttgctattagtataattaaatagaaaattctatataaataaaataatttgtatgaaatatattaattaatcatataattcaatttataaaaaatattgtacatcaaataacaatgtttataataataataattatagtaaagatgggtgggagaggaccaagacttgataacagctctctctctccttaagtcccggactcacatggagttacttaattgattggtattttacaaatgttaaattaataatgtgtactacaaacaaacataaataaataaatatcacaaaacatgacatgagtacctttttattaggtagaatttacgtggagtatgggttttttaaaccttttatgataaatatggcataattaactatggacactttatatggctttt

SEQ ID NO: 128606 - DNA, 1860 bp, Cannabis sativa
  modified_base (27)..(46): a, c, t, g, unknown or other
atgtttattaataagtaaatctgattnnnnnnnnnnnnnnnnnnnntagggcacaaaacccaacagagggagctactgagcttgagagagagaggaggcagctgggtactagggtttttttcagttaagagggagaggcggctggggtggatggatgagctagttttttttttttttttccagttcagaagaagaagtaaaagaaaaggaaaagaaaaaaaaaagaaaaaggaaaaaacatattttttatgatttttaaattaatttttataatattttaatatttaatattacgtgggctactaaaaatttgtcacgtgtacaagtgtgtacacgtgggtagtccactatggcaattaattgtgatttttggatagagggttatagagcaaatttaaatgggagtttaggtagttttcccccaaaaatttaaattttatggttaagtgttagaagatttaaaatttgggtggttttgttgctaatatccctttcttcggagctattagggtttttgtagtggctacatctcttgtaattgactagggctgatgtcatattcgtatttgtattatgtaacttgacatatttagttggtcaaccctaactggacttgtatatatttcttatcaagaaatcacaacatctgtcctgttgactcatttaaataatatacttattaaaaatatataaagttgcaatatatataagttgacacttttattactaatatatcttcacacggtttgactaacttatttaactttagtattattttatttacaaaaataccattacacacactctttgcatgcatgttgtcatttgacaagtttaacactcaaccaattttctctctttttgtaatcattttcctttttattttcagtttccattttattttctcatttttggtttctgtttgaaataatatctcacaatcaaaacaatcttttgattcaaaaaaaattgatctcctccatcacctctaacttctttcctccatcaactgcccatgttttttccgttattttcttctttaaattgttatatatagctattactcagtcttcatctttcccatcaccattgctgaaaaaaccttaaaaaataggtgttaaatctctcgccaacaaagctaaaggcaaacgccccactgttgaagatgatgattctgacttttctccgctagtgactaaacgcgatcgtcgacctgttaagaagaaattgaagagtaatgtagttgaaaatatttccctccatgaaatcaagaaagggaagaactaagcagatggaagtccgaaggtttccttttggttttatttttcgttttgccctaactttgaaattttatttctgttttgggttgtgtatattctattaatttaattctaggatttagattgtttatttgttttgatgtttttgtagtgttattttcttggttttgatggctaaaaacatttccctccatgaaattagcgtgtttttttgggtatttatttctaattttttgtttattattttatattaatcaattcatgtcattcttatttatttatttttgtttatgtatttttatgtttattgttggtattagcctgatttgtaacctatgttgttggtttgatattttgtggtatttttatagtttgttaatagttgcattctccatcttctaggattgtccttccaatatttccccatcttctagggttgtccactagttttgcatagtcaatgaagtcaaatattattttctcatcttccaaggttgtccctgttagaacttattttaccatgatctaaatttactaacatgtatgttgattatagaactataatctaacaccctaaata

SEQ ID NO: 128607 - DNA, 1759 bp, Cannabis sativa
  modified_base (26)..(49): a, c, t, g, unknown or other
  modified_base (1456)..(1456): a, c, t, g, unknown or other
ttcatattaggatgttaaacaacatnnnnnnnnnnnnnnnnnnnnnnnngtaaaataattccaacactagtcttgtcagaatataatatcagaataatagtatttctctctcaatttttctataacttttttcgtgtaatttgcgcctatttataggaatataggttcgtagttattctcttaggatcagtgtaaatgtaacttttcatgaaacgtggacaattcccacatttcatttaattgcttgtgggataatatttgatatcttctcaactaccttttgtttttatcctttagactgttaatgccgatttggacggttgtatcttgcttaagatgagttatcctccttgtccatcgtaggaaaaatactaagtgttggtaggtggtttgcctcgttatatctctttatttgtgtttagattgcgaggtgatcgtctcactatgtgaaacctgggattgtcgtgggtgattatatttattccacgaataagtatcttcttgttgactatgtacttcgaggaagaaatttatctcatcaatattagtttaataattttttacccttacctcacttaagactatatagttagcaagttgtgaatattttttattatactgttatataataaaaacaagttattttattctgcatttaatgatataaactttattttatcatttaaggtgatttatattccatttgtaggacacgtgtcagtttctgaagtgtagccgaatattgggtataacacttaaattaggatatttttcttaaaacataaattaaaatctataattaagttgatttcaatcaagatgcttaattatttatttctatttcaagaaatttaattaattagaaaatatatttaagttgaaaaattaatttattaattaattttagactaacttaaattagaatatattcttagatactaaattagaattaatatttaagttgattttatactagatacttaattatttctattttaatgaatttaattaaataaaaaattatatataagtgagaaattttttaatatcggaacaactaaaatgagaataatttttagaatatattttattttattttaataatcatttcccacataaattccgaaatacatttattttaaatgtagatattttgaaaattttcaattttaaaaattagattaaagttgaaaattaattttagttttagattaacttaaatcatgtaattttcataaatgatttaattaaaataaatagagtaatatatattgtatttaattagaaaataagtaattagtttatgaaatatcaagatagttattttctaggtacacttttagtattttttctagatatttttaatttaatagaaaattaatatttcagatgattttattcaagatactcaaatatttgatatttttctttggagatttaattaaataggaaaatnatatttatgttgaaaattaattaatttaattttagatcaacatatattagaatatttttccagttttatcttattttattttaataagatttcaacaatgtattactataataaattggattacgaattccatcatatagatatatattaatggaaaatttaatttgagttgaaaattatttttggacaaactaaaattaagtaattttcataatatttattggaaaattaatactaaagatggaatataaattattattttttagatattcctagggtataattttataaatattaaattaa

SEQ ID NO: 128608 - DNA, 675 bp, Cannabis sativa
ttgattttctaagtatagaaaatcaaatttcccttagaaatttatgctctaattttattattgtactgtttacttattgcttcagaactgctaatgaagcaacacatgctcttgttaaatatgctttacaagctatttctagtacagtttggtggcctgattagtgattattattcttatattcaaaatattattttggctgatgacaatcatcaatgaatcttttattcatcggtcccttagagtttttctccttagtagtattttctgaagctattttctcaaaacaaaaaaaccccataagtttcaaccaaattaatttaaacatttgatatattccattcttaaatagtgtacatagttttttagtttaccaccattaaaaaaaaaaaaaaattatatttacacccctataattattaagtgcacccccaaaattttgaatacattcttatccttttgtaaaatgacaaaaatagataattttaagtttaatttttttttttaaaaaaaatatttatttttagtaagtacactctcttactaaattaagtaacgttaaataaaaagaagagattttttctattttgagttaatattattttaaataaatatttatactgttacaagcaaaaataaacatttctattctttattaatttcaaatttactatt

SEQ ID NO: 128609 - DNA, 595 bp, Cannabis sativa
agcgcatccccttccaggccgataatggctgtttcaagcattaaagcatccgtgaatcgatggatcataaagtaacgttcggcccaatagatccatccttcgggatcggtaccggagaagagaggcaattccatccgaggaggtcgatgctcattcccttggaattgagcttgctggtacaggttaggatgaggaggtggctgtggtggaaaccgactttgaggaggcggagattggggaaaacgaacctcgggttcgatcggaactgaggaagatgacccgtcaccctgcactactggttggcgtgactcgtggccgacggtggtagcttctgcaggagccttgccggaggcgaaaaatcgggtaagctgggacatcatgttctccggcagcctctgaacctctgctcttgtatctgaaacctctttcccgagctgcaatcgaatctcagcgatctctctctgtacttccgatcgcaatgcttccaacctttcctcaacaaactccccactaacatccttcttaggccccatgagatctatgctctgataccaatttgataggatcttcctgtcaaattgaagctaactgcaga

SEQ ID NO: 128610 - DNA, 1225 bp, Cannabis sativa
tttaagttttatttgttaaaaaaaaaaattgatagaaattttctaatgagccagtcttcctcccaaaagcaacaagtggggtctatgatagtcaacaatacttctgacactgtataaatgaaaaaaaaaataaaaaacgtaaaaaagaaaaaaaaaaagcatgtcgcactaaatttgtaaataaaaaaagtttttagttactaagtgtaaatttcagtatattttttaagtaactaatttttgttgaaataactaatcaattcaaaattgctttgcataactgatttttctatgttagatgtttaattggttgtttactttgtggaaaaaataatttatttttatgtcttagaattttaattatatttttaattaattattattttttatttaattggataaattattatatatattattggataaatagtttttatgtctcaattttgtttattctttatttaattgaataactaatgtttatgtcttaattatttttattatttaggcgtctataagtaacttgttgatgtgtttaatagttttttttttttttgttgatgtgtttaatcaggcccgtcttaaatattttggaagccctgttctaattttaaaaattgggcccctacaaaaaaaatataatttataaataatatttttaaatattattgtaaacgatatatattttacagaacaccaaaaaattctaattaatttataaaaattattattgattgcaatacaacaaaaaaatgataggaaaaaataataataaataacaacaatgaatttttatttttttacttaaaagcaataatagaattgaaaatagattttgggaattgacatagaaattatcaatgataagttgttggctctttaaaaagttgggttcattaaaaaaaattgaaggacattaaaaaaataaatattaagccctttattctttggggccttttatttttttgggccttttattttatggggccctgtgcaatagcacatcttgcactctataagggccacctatgggctcgtttggcacagcttttgaaaaagttaaaagctgtgaaaaaaaatgtgtttggtaagcagttaaaaaataacttattgaagaatttatggaaaagctacagataaagctgggacaacccaacttttagaaaaagctattttgattaatagactctataataaattatttttactaaaaatttatttaatt

SEQ ID NO: 128611 - DNA, 1589 bp, Cannabis sativa
  modified_base (1534)..(1556): a, c, t, g, unknown or other
atatgctcaaaatgaatattcccagcatattcttgatacttgtaatattttatctttattttaagaaacctccactcctataaataggaggctcttctagttaattttgcacattatacattcacttcataagccaaagcttctctctcaagatccagagtttattttttttagaattctgagttctcaagcgctcttttgattctcatgctttttaagtctactcttgtaaagcttctagcttttttgtgattaatgaaagctcaagtagatgtagctccattaccgactattaacaccaaaaatcaacgaggctagtccctaagattagtcaagtaaaatacaccattaattaaatctcttcaataaatttagagtaatgtgtttgaatccacccgacctcgagcctcaaggttcaaggctcaagacttgaagtctcgaggctcaaggctcaagacttgaagtctcaaaacccaagctcaatagctcaaagagcttcaagactgtaacttcaagtctaaaaaatcacctctcaaagtcccaaccatcttagcatgcatctcagccaagcccttatggacaccatcttggccaatgacttttaggaccatctcagccaattcctcatggacaccatctcagcaaagcatgcttaaggatctcgataccaccattgtggtgagcatctcaacacctcaacaagggcaccatctcggcatgcctcaagaatgcatctcggctaagtccccatggatgccatcttggccaagtaccttaggaaccatctcgaccaagtacccatggacaccatctccaccaagcatgattgagttcttaacaccaccattgtggtgagcatcttggcacctcaccaagggaaaaatcttgacatgcctcaagtatgcatctcgatcaagtccctatggataccatattggccaagcatgcttgaggatcttggtaccaccaatgcggtgagcaacttgacacctcaccaagagcaccatctttacatgcgcctcaccaagagtatctcggcatgctcttctccaagggcatcttcgccaagcatgcacttcaacgagaataacatcccccatccattccatcaagtacttgcattccacaataacaccacaaatacttactgaatttttctaagtgttggaaaggaaaccattggaggtagaataaaaaaagacaagacaagcacatgactaaggacatgtcagggtacaaccacatcacccgcaagaccatcattttttctccacgagccatgtactccccgaagacttgatttaccaccaactatgaatcactacagacctcaatgtattcagcttgtacctcttgagcaagctttagtccagctatgagttctacatactatgcttcgctgttagaggctctaacccaaatttgattgctccgtatagaggtttcccccaggtgtgaagagagcaattcctgccccaaaaaattgatcgatggttgatccctccacatgtaatttctgttggaaattattttnnnnnnnnnnnnnnnnnnnnnnnaagtatgttgattaacacactaaatatgaactt

SEQ ID NO: 128612 - DNA, 520 bp, Cannabis sativa
  modified_base (193)..(208): a, c, t, g, unknown or other
ttttcatgttacttttatatagttatttttacgggaaaccgtaaaaattttaaaaatattcattaaacgtaaaaatgtaatttttttttacaaaaaataattgtcttatgtaattattatattgaatggtctcaaatcataaaattatgctagtaaatgctcccatttcaaaaggaaaacttacaaaaatacnnnnnnnnnnnnnnnnttttacaaaaatactgtcacacatatattcttttaaaaaaattgttgcctttgatttttctcaaaatacgtggacgcggataaggacgacacgtggatatgtaagaaccatcacttatgaaaatcaactaagtcttagacgaaaaagggaacatcttagagaaggtgcctcccggaggaaagcatgagaagtatctttaccctccgggaggccaaatgcgtgctaaggcagttccgggaggtatagagatctcttgaacagtcacttcgcatttaatgccgcatgggagaaaacgtattgaaacctccataa

SEQ ID NO: 128613 - DNA, 1606 bp, Cannabis sativa
caaacaaaggaatggaatgaaaatggtttcctttccattctattctatttcattacctccaaccaaatacaccttagttttgtaaaaaaaaataattgtaatatgatggcgaaattgacccttcattattaaagatgctctaaatatagtagtagtacacatcatttattttcttttcttttctttgtttttgattccattcattggttggcattatatctaaggaatcgccaatatctctcttctctacggcaactcagctctctctctctctctctctttcaattttaggtatatacagggatgttttatgattttccacgtgtgggttaaataactttgtttttgtaatatctaaataaagatcgaacaacaacttattagagccaaacgtgtacgtttaaatggaatcgacatgaaacactttcttttttcttttcttatcttttgcatggagctaataatgttgttggacatctcatattgatcaatattaataaccatttttgtacctaatgttgggtttcttctagtaattcatgtatacatatatagatatcaacatactaattaatatgatctaattagatttagtaagtaatacattaagtttgactaggcaaacactgcatgtccgccacttctttctcttgtctttagtggatacgtgtgcttagttctcatttgagaacctactaaaagttggaaaaagtaataagtgggaatatactaattgagaaatactaaacagagtactatagtgcttaatattaaaagttgtgatattgttattggtacaactaaatatcgagtctgactaaaattaaaagatcaatataaccattagttctcacttaaataaaaccaagactcaagggtaaaatggctgaatcccgcaacctcatttaaactcgatattctaaaatcaaacttttgattgacctactagaacaaaagttttaagttaacttgtgtgactttaatgattatttatcgcatttttcatcgttaccgaacaaaaattataaaaataaatttcacatatatcatatttgatacacttagagtttaataaaatctctgaaattaagaaattataactcaaatgctcattttctaaaaatgaagctcacaacatacatataccaatcaaatcatacattaaaagtaattaatgttaattgttctactaatccatattctattcatgtggtcattacaaatataattattgaaataagtactccaccatttaaacacgttcagccaagctctaaggaaactagggttgtaaaaaaaaattcgttaactgcctaaactgaataatccgcccaaaccaaacccaaaaaatcgataaaaattaaaaaccgaaataacccgaaaaaattacaaactgctcaatctgttaattgggcgggttgaaaataggtccaacccacccaattaaactgaatgactcgaccaacccgattttagatttaatttctcttttactttttagtttttattatatataacataaataattaaatatgtaataatataaagctatatacttaattgttagtttcaaagtcatatatattgtgttgtgctttggtggaat

SEQ ID NO: 128614 - DNA, 719 bp, Cannabis sativa
ctggtaaaatatattccaacacaggcccctaaatcacattattcgtaacactggtgagtgacacgttaaatcactttatgaggatttaaacttgaaactaaaagttttccctattgataaacaacatggcaataccctaaataatcaaggaatcaaccaaccaaagctctaaaagtaacataaatcgtcaacacgaaaaatttaggaaaccagcttctgatccggttaaccggtttacactaggtaacccaaaaatttaaaaatcttgaccaattcataaccaaaccaaaccaaaccttcaagacctgcttaatgtaccccaaagaacatattccaagcaacaaaacaactaaacaaactcaaaatcaaaatctaccattaaagagcaaaacttgagctcttaaactcaaaacttgctcgaatatcacaacagcccctaaatccacttcaaaatagcatgaataaccttaattcaactccagaaaacaaactcaaatactaacccaaaacagcaaaccctaatactcaaattcatgcataaaaccataactttaaacttaagaaatcaaagaagaagagtctaagagctttaccatggattggatcactaagaatttggtaaattactcaggaacaagctgaaaacacccaaacccttgttggtttctatagggctcgagagagaaagagagaattggagagagagagagagagggaga

SEQ ID NO: 128615 - DNA, 662 bp, Cannabis sativa
ccctaaccccgaaacccccaacccccccgatgccctaacccttttttttttttttcgtgatctcactattattctttttatatttgcagatcgttcttttgttttttgttttaataaaataattgttggtgttaatgttattctagactattattttttggtccaaactctcttctctatcttttttttctctatatatatacgtatatagtcatcattttttattggactgaaaataaatgaataatacataaaaaaaaaaaagacctatgatttcaattatatgttaataaccgaagttataaggattgagaatccacatatatgctctcccatggcttttgttagtcctaccaaattacaaattattttgactccttttcactttgcctgaaacgccttcgactccaaattttgtcaaaacgaaagctaacactactacaatctaagcctttagcttcccctttttcaatctaatttataaaaagggaagctaaagggggtgaaaatatctgcattgacatttaaagacggttttttggtcaaaaccgtagatatagagtgtatatatatctatgccgtcggttgggggttgggaaaaatcagggtttttttatataaccctatggcgtcggttattaggtattaaccgacgccatagg

SEQ ID NO: 128616 - DNA, 619 bp, Cannabis sativa
  modified_base (37)..(54): a, c, t, g, unknown or other
  modified_base (573)..(582): a, c, t, g, unknown or other
tgcaacataaaatgcagtttctgatctttattaattnnnnnnnnnnnnnnnnnngaaatgagttttatttagggcactaaacccaacaacttccacattcacaactctagttcttgtctatgtggaagacattcttgtgactggaagtgaacctactgttgtctcaaatctaatttctggggattgaaattcatcaaatgccatctggtttgcatctgtcacaatctaaatatgcccgtgatttacttgcaaaagcacaaatacaatacgccaagccattttccactccaatgaccaatggccttcgtctctcagcccatggaagtggaccaatgtctgatcctcaactatatcgctcaatagttggagcccttcagtatcttctcatcactagacctgacctgtcttttcgtgtcaataaggtctgtcaatttatgcataaacctctccctactcactggcttggtgtgaaacgcatactgagatatctgagtggcactctctctcacgggttgttgggattttttaccataaataaaacctattttaatataatctgatttgttatcaatnnnnnnnnnnaagtcatttatgtttacatatagttttcatgtttatg

SEQ ID NO: 128617 - DNA, 1367 bp, Cannabis sativa
  modified_base (1136)..(1149): a, c, t, g, unknown or other
  modified_base (1299)..(1310): a, c, t, g, unknown or other
aaaaaaaaaaaaaaggtaaaagcacagcaaataaagctgctaaaaaaaaaaaaaattaaaaattacattttaatcatacaacaaaatttcttattctttcatctaagaataagaatagcttcctattatttacatgaaataatctgaaaacatgttttatctctttgactatagcaccaacatattttgagaagccttcaaaaagatatttcttacggttagaccaaatgtgataaacacaagctagcagcgtggcaattataatagcagcaatcgcctctgatgtcttgctaaccagccaagtggtccaactcccatagtctcttagccaggcagaaaaacccagccacaaaaagttctcatttgtaattttcttaggtaagctacactcgaaaaataaatgggtatgactctcattagagagcccacaaacaacacatagaagagtcttcaaggaaatactaaagcgagttagttgatccctaatgagcaagtgagagtttaaagcttgtcataacataaatctatgtttaggcatattaacgctattccaaactgcacctgaatataacactagttgtcgaagaatgaaactgttataaagtaaggaagctttaaacttacccttatgaccatcagcaagaatttggcctttggaaaggacaaagcacaaatcttcctttaataccaactcaaatccaacttcataggagtttttcaaaagtcacattttctcagataagttgaatgaatccaacgaacccaaagcacatcatgcttttttgaaatagcccaactatactttgctatagtaacttgttccaagtaggctcgtcaagaaatctaaggcctccaaatttgttaattaagagactttgtatggtctgattaataaattacataaatggcattttatttagtaattaattatgattattaaataaatagttttagcatttataggattaaattggaaaatatggtattattgaaaaaagaataagtggttgaaataaagtggcaaaattgtaactagaaattggtccacttattgtgtacaaccatgaagtatttttgcccaatattatattctttttaatccatataaatcaaccctaagccctagttgaaacacnnnnnnnnnnnnnngatgctctcatctcatccactttaacatttgtcaacttgactattcaaccaaatctagatgagagagttccttccttagtgattcaaacctccttcaatgttcttcacctattttgacccgtagtgaatgagtgacatgcccacacatannnnnnnnnnnnctcaatcatagtgagtaagacagtggtaaccaaacccgaaagagagaaagagatcca

SEQ ID NO: 128618 - DNA, 1129 bp, Cannabis sativa
tgtatttataataataataaaaaatttcctatgaaaaaatgggtcttattaatcttgtacaatggcccaaggtgcggccttgtagagatcattaggagtttcatttacatattgttctgtatagtgacacctaactaataatattcttaactaatctcttttaaaatattttaactaatgtttgtttttttttttaaaattaaataaatatgtagtttcaaaatgtgtatataataatttttatttttaaaaattaagtgatcatgtagttttaaaaatatatatcaaaagttttttatttatttttaaatatcaaacatttttttttaaaatatcaaatgttttttaagaatttttttatttaatatatattaaagcctaatttattgtaatcctatccccatattctttagttttttttttctcttttcttttttcttatcaaacatttttgaaggaattttttttatttaatatataatacgttttttttttcctttcaaaatttaattccaataatgagtttttagtagtattgtgatgacagcgactgcaagtaaaagttttaaaatcatatgataaattttctatataaatttatcaattattttttttataaatttcttttttgtgtgaaaatttttaaattactaatattttcttagctataattattttgaatattgttgtggtgactaaaagtgacaaacaatgatgatatagttttaaaattacatgtcttgtgtttttttatacattaattatcaagtattttttatgaattggtaatgacttctgttttttaatatatatattttttaatatgattagctagatataattgtatctactctctcattattaattagtggaatttatttagtatatttgagtagttaattcattattttttttatatagagagagcgcaagcttatcttttcatgtgagagagcaagcttattgaaaagaaaagtgaggactatgagatacaatgattactattaggggtgcacaaaatatgggccaaaccattcaactcggtcaactcaacccgttttttatagtaaagggttatattaagagtaggtcatgactcattgggctgaaaagtgataggccatataat

SEQ ID NO: 128619 - DNA, 1302 bp, Cannabis sativa
acaacgagaaatgtgttacttgtgactctaaaacaatatatttttaacaaaagttgtcagtaatttagttttagtcacaacaagtattgtgactaatacctttagtaacgaacattttagtcataacatagaaatgataatttataattattcacatttttttttcacgtttagtcacaagttttgttgtgactaaaagtaagatttttagagtgaatacgctccataaaaagtgcatcaatacatcccttactgtttcatcatccaaaaaaaaattaatctaattcttttatgattgtgtacattattattatttaaaatatcatgcaaaattttgaaaaatttagaatagtttataatataaaaaataacgtttaactttcaacaatctattttacatgtatataaaataaaagaattacacggtgtaactaattgtttgaatctgttttcgatgtgtttatatttttaaatagatgtcataaattactgcaacgtacatagtcataaactgactaaacatgttttttcaaataacgaaacaaataaagcgagctcggtagaattttcttaaactttttcacatgtggtacttatttatgattttagttaagataaattttgggcgagatttttataataatatgtacgctgaatttataaagatataatataattttttgaaaggaggcgatttcaacgattatatcaaatatgtaactatcatggttacatttatttttaaccaaagtatcattgttgaatggttatgattaatttagaaaataaaagaaaaataaataataaataacttgtaacttaagactttatttccttataaaaacttaattattaattgattttctgtaatttgttaataagtaattaaagatcttttaacaattatttttttaaacttaaataattaaaataattgcaacaaaactccttataatttaaagttattacacatataaccttaattaataaaaaatagtatgaatgacctctaattagagttaattttactctcaaccttatttttaacacttttaagtgccaaattagtgtgtaagtccaaaattggttcaagttaaaaaaaaatgaaaaattaagtaaaaaatataataaaaattaaaaaattaatgattgttaattattttcgctattcgttgaaatcatctatatcaatctaaagattgtaaaaaggaattatcaacgtagattactaattaattgaaattgttacttctttttcacaaataaacataacagtagaaaaatcactactacaaaaacacc

SEQ ID NO: 128620 - DNA, 575 bp, Cannabis sativa
aaaggagaagtatgagacggtgacgtgacggtctaaaatttctttaattagctttatttgttctctccttaattcactcatctatttaatttttaattatattctattttataaactagattatatatatagatatagatatcaaagaatccaggtctgatcattcacatagtttggacatcaaagaatccatgaccaaattatatatatagatatagatatttatcaactcatactactttttttggttgctcaatttttcattttatctttctcaattttctttcttaatattacttatgtttcgagaaaatatttttataactattattagatttattatatatttataatacatttttgtgttgttatatattagatcaattagtggtatatttacataattcttttgaatatttgtaacttttttttcatgtactaaattattggtggttgattattttatatgattatatatatatatatagggtttatctatagtaggcccatttgtttctacctcatcacatgaggaaattttttgggccaataaaaatcaaatgtgtgaatggtac

SEQ ID NO: 128621 - DNA, 960 bp, Cannabis sativa
  modified_base (192)..(198): a, c, t, g, unknown or other
  modified_base (837)..(850): a, c, t, g, unknown or other
  modified_base (914)..(915): a, c, t, g, unknown or other
acaataaaaatgtaaccattgaaacctcttccatatttaccaaacacttaacagttttttctaacagcacagctacagctgctttttctcacagcacagctacagctgctttttaccacagcacagctgtgccaaactcgctcataatttgtgtaatcttttccttctgcttttcttatatatatatatatnnnnnnntatatatatgtgtgtgttatattaaatgtggctataaaatagaaagtgttgtttttttttattaaatattaaaattcaaatttgaagtcaatacacatatccaatttatcttttatcttatataaaatgtggttataatttttataatattgcaattcaaatttaaactcattgtatatttttcaaaaatattttttctttcatcgtttttttgcccaatccacatatctaaaatatatatctttgtattattattttcttttaaaacaataaaatagaaaaaatatttatgtttttaaagaattactattgtgatatcgttttgccgttactgaaaaatatctttttattattatttaaaaaaataaaaaaaaatatatgatatttctaaaataagaaaaatattataaaattaaaaatattaggattaaactgaaattataattaacaacaaattttaaatattgttatactttttatataaatagtgcttaaattaaagatcttttaataaaaaataataattatttattgaaaaaatagagaattatctcatatgctatttttttttaactttttttcaaatttactgtttgagtttctgaagtggttgcagcactagttgcaataggggtttcnnnnnnnnnnnnnnttgcaatttaggttgcagcgctagctacactaggaggtttctattaggggtgttcatccgatcnnatccgcacttttttggtcaaacaatatccaatccgcactaagtgc

SEQ ID NO: 128622 - DNA, 584 bp, Cannabis sativa
ggtaaaatatttccaacagtttgcatctaggtgaacatcaattactcacatcgtcgctggtttatagggcaactacacaccttgcaatgttttgtccatattatactcaatacaacttagattgacatgattccaagtgcattggaaatatattttgatgaccgttcgatgaatgtttcgcaagcatattaaaagtcgacttccatcatatcaaaaatggccttaaaatccagagtacgtaaagtattattagagcacctaaattcgatcaacggaccacatacaatctcttagatcaacggttatcattcaattaagaggagcaatctcagccatctaatatggtgtggtttcactatggtctcagatcggctagaatgacatattcctagaatatgtttttgtaattatttaaatattattagtttattcaattatcctcttccataaataggaggttcattcaattcattttattccttcacacattctgatcattagacactctctctctctcttgactcagatttttttctctaaaaaatttgattctctcactgttggaaattattttaccacgatct

SEQ ID NO: 128623 - DNA, 759 bp, Cannabis sativa
tggtggactttggaagctaggtttctttcgtagttagggaacaaatgtattaatacatatatcactattatttaaaatagtaaaacacaaaatacatcatcatggtcacccatgaatggctttcacacaaatctcttatccttatattttgaaaatcttgatttatcttctcttctattaaaaaatgaataagttttttattgttagagatttatatatatcaagaaaataaatcaagataaattacaactcattttaaaaataatacaagaactaaaataagagattaattacataaatgttacaacacatctatacaatatgtatatattatatataagaaaggcagaagagatgaattacaacacatgttatatacaacatatataatataatattaagaaggagatatatgtatacactcactcacaatcttgagtagtgtagattagtgaggatcacggtcatgacttaaacaaggtattaattacacatttgtccaaaaattatttccctctatctctaagcactaagggactctcataaaaataactttgggaattatcaaatcttttagagtttctagcaaagtgtttttttgattaaaaaaaataacttagtcatccaaatgagcacattagactcctttatgtagtttttaggtgatcacgcttaggattcacacactacctcatttatctcgtataaagtattaatataatttataacaactatatttcattacttttgaatcttatc

SEQ ID NO: 128624 - DNA, 1189 bp, Cannabis sativa
tccaagacagttttttagtttaattttctttcctttcatgatcaacaacaataaaatgctcaaccatctattttataatggctcatcgtggtcaaaaataaaaataaatcttacagtcataatattattaatttactatgtaaatatacatttttaaatacaaaaatccaaaacattttatttaagtgtgatttttaccatgtgtgtcatcctttcattaccttttttttttcctttaaaatataaaatgttcattagatcaaacattagacctcaaggtcattacaaaataagtttgttggaatttacaggcaagttattatattgtttatgggtaaaggctcactttactatattatggacaataaaattacaagaacggtaaatacaagaaaaaacacagccaaaaagatcagtggaaagcttaaggaaaaaagaggaatagttttcaatcttccagcacatctccttgcgattgagagagttaattactatccttgagttgctctccataatgatgaacctgtaacctttgagctttgccaaatcaatcgccaagtaacaagttgttgcctctccacaaagagcattcgaaaaatccaagtccatcgtgctcacccagatgacctcacccaaatggtttctagcaacaactgctatacacgagcgttctgatcccattttgacatcacagttcagtttgatccaattaggaggaagaggacgccaatcctccacccagataggagaaggagtggggattagagtagctcgtaattaagcataagaacatcaaatagagtcaaaacactgattcaagttaactatcttatgcttatgtaccttttcatttcaggctcactgtatagtatcaacaacaagagaagtatagataaagacctcgttaatgttgatgcccctgttattgagactccaaataaatttgaccaagtactagatacggattcctgaattgaccactgcaaagatacccacggtaaagatttccataaacagaaagccagattgcatttaagaaacaagtgctctagagattcctcttccacccaacggaaagggcatgtaacatccttaatctttaatcccttactaagaatagtcctgatcgaaagggccttggaaaaaatacaccgccaaaggatcttatgcctctctaagattttactat

SEQ ID NO: 128625 - DNA, 1227 bp, Cannabis sativa
tgtaggtcgatttttgagcttgggtcttcgactttctggcagatttcgtcggagtagaagacgaaccaggaactctagtcactggagcaagcggtgcaggtggggtgatcggagatgtaaaagtagagccacaagaggtcctcttggacgattgagcatttgttttttccatttctctttgaaaccatagaaagcaaacacactctcacacttgaaaaagattagacttttgagaaaaaaaatagaaagagaggagaaagtggtgatcgtgggtatgtgggtaagtgagtatatataacacttgaacataattacccaataatcataaaaaaatgaaaaaggaaagtaactttcttaccgtagacaccacgtggggagagaagaaaggaaaccatgaagctttttcaaaaattggtcaaggttaccttaaatggaaagaggaaacaacatatccctacaaaatctaagaattaaaaacccaaccaaatccgaaattgccaccaaaaacggaaaccacaaaaataattaattaattaagaacaagtttcctaaaacaccaaaaaaaaataagaccaaatctcccaaaataaaagaaacatattagataaaattaaatgaaaacatgtttccataaaagaaaaaaaaatagccaaagaatcgaaaattatgcccccctttttctttaatttttccaaaagatgccccccaaattaatttgtaaagaatgaacatgacagcactaaatgacacataaagcaccagtcaacacttaagagcaaaaatagtgtctaaaataatgaaacataacaagaaaaataacaagaatttttaagaaagctcaattgaaaaaatcggtcacagaagttatttatttaattttttttttatcaaaaaacagaaaaataaccttgatatttttgcaacaaaaagtacaccatgtccgcttgtctttgtccctgatgaaaaaatcaaactcataagaatagtcataaattattttatcaagctattgaagtagtagaatgaggttgtaccggttacgcaaaaaaaaaaaattgactcagtctccaagaatattaaagcaaatcaaacagtatgtaatagctttataacaccatttttgaggatatgtaaaatttaccacaaactgtgtcaagtataagtatgtgaaagtctaagcagggaatgcccaatttgtcaaaaagactttttctgataaattgtaac

SEQ ID NO: 128626 - DNA, 956 bp, Cannabis sativa
ataatactattatttgattaatcattgagtgagtttctactgacaactgtttactctaactagttttcttaaattccaatcttgggtgattttatgagcttttttaccaatgaaaacaacaatgatgcacactcttaaaaattactcataaagataagtgttcatatgataattttttagtcaacttccatgcttgaaattacatgcgtgaatattttttttttcggtaacggtattcgtgataattataatattatttcattaaattttaaaattttttttaaaaagttaacaacattaaaaacacaattttcgatatttcagtttattaaattttttttttaatattgtaaattatttgaattttttaaatgtttacaatgatgtaagtctaacgaatactattgtgaagaaagattgaaaaaaaatattttgacatatatttttagagatggaatttgactaaaaaatggtataagaaattttaatgcttagagcataatttcaataaaaatgactttttgcatttctcttaaaaatagttccttagtgctttattattatttttttatatatttaataaatttaagttataattattaaaataattaaatactaactaaataataaacgaaattaaagaaagaataataaaaataatatattttaactttttaattattttagttaaaaaaaattatttttagtatttttacagaaatttataaaacaattattaaacaaatagcaacctaaatttacataataattcatatacaaacaacacgaacggtaaaatttaaaaaaaaaataatatataaagtgatttcttaaaggggaattttatttgcaccctattaaataataaatacaccctattattaaaaaaatataaacttaaataatttttaaaacttactcctaatatattttttttaaatttttttcctcacatt

SEQ ID NO: 128627 - DNA, 1194 bp, Cannabis sativa
tctgtttctttattgatgttgaataaaatagattacattgaaatggagttttattttgggcataaaacctaacagtctgcaattagaggcgctggatttttgatgaggtggcacaatggtccgatggtagttcaaggcttggacatggctcctattcgtgttccgatcggtggtttaaggcatcatcaactactattttttttttctttttgtaataattatttttattttttagtggatatttgtataaatttatatttttgagtacttgttgtagacccttaaaaaacatattgtatgagagataattttttaaaataataatttttttatataaaagtttagatttatataactaatatattatgttatataaatatgtttatacactatatttataaatttgatgaatatatttgtcttgatttatataactaatatattatgttatgcagttagagtagtgagccgatatatgcagcaactaaagaagccatatttggaagtagtgcgataaatactaaggtatgttaaagatatagttgactatggtctcctttataagaaagatgctaagtgcaagattattggatactacgatgcgaattatgctgaagatcatgagacttgatgatcaactactaagtatgtattcaaacttatatctggagtagtgtctttgtgtatcaaaaggcaaccaaacaatgtcattgtcaaccacagaagtagaatacaaagcaacattaattgtcgttgaagagagtacatggttaatgcagttgatgaaggatctacgccaacatatagattttgcagtgccactttgttgtgataatcagtcagttattcgtttcgctgaaaacccagtgtttcatgcacgaacgaagcatgtggaggtacactatcactactacaaaataagcttttaaaggcacttttttaaccctaatcataaataaccgacaccatagggtaaaaaaattttggaaggaaattttacgctacttatggcgtcggttatttggaaataactgacgccatagggtctgccaaccaccacgaaatagggtgtgccccctatggtgtgtgcccccctatggcgtcggttatttcaaaataaccgacgccaaaagggtttataaccctagcccagcccttcatcttcctcattcgaccagccaacctagaaacccc

SEQ ID NO: 128628 - DNA, 1082 bp, Cannabis sativa
ctattgcagcttacctccaaaccaaagccttgtcagaagacaaaaacgaggaaagcaaactaagaagaaaatatgctaggtacctgaacttagacgggataatatacaggtagagtttctctatgcctctctcgaggtgtgtcaccaaacccaaagctaaatggcttctcatagaagtgcatgaaggcctttcctgaaattatatcgagggcaaatcttgtccaaaaagatactctgataggggtatttttggcaaaaaatgatcgaagactcagtggactatgttagaagatgtgacaagtgctaaagattcttgaagataccaatagctccacccaatgagctcacgatgatgcagtctacttggcccttcacggtatgggggattgacctaattggtcaactcccaaagggaaaaagagtggtatagtttgatgtcgtcgcagtagactacttcaccaaatggacaaaagttgaacccctggtgataatcacctccaagaaggtccttgactttgttgtcaagaacattatctaccagtttggccttcctcaaaagattgtgtcaaacaacgacaaatagtttgacagtgaaatgttcactaatttctgcaacagacatggcatcatcaagagcttctctgtcgtggcccatccacaagcaaatgggcaggtagaagctgtcaacaaaaccctgaatgacaccctgaggaagcaccttgaggaagcaataagaaactagcctaaactgctcccagaggtcctatgatcacataggacaagtgtgaagatgaccactaggaaaactccatttgctctagcttatggctatgaggcgatgttgcttgtagagctagtgccaccatcttacagaagaacaacctatgatcaataatcaaacagcaccctgttggaagagtcccttgacgaagtggaagaaagaacagaacaagcacacctaaagctgcaggccttccaatataaggtagcaaggcacttcaacaaacacgtcaagagcaaaaaattcttcataggtgacatggtgctccgaagagtgtttctaaacactaaagactcagcag

SEQ ID NO: 128629 - DNA, 1009 bp, Cannabis sativa
aaccaaacatcatcaatacgacttgaatttaagggaatactcaaaatgagttgagcatcccttgtattaaacagatcacgcaccaagtccacatcccaggttaaacatccagtaaccataagagcatcaacattttgatttaaaagagcaggatgactcgaactgattctcggattttcatcacatggaagccaaggatctaaaacaatattgatttcagacccattcccaacccgcctgcgagcccccattttaaccatgtctattgtttcaaagatactacgccatacaaaactgggattactacccaactctgcacacaaaaaattcttccccgcataatatcgtgcctgaaacaaacgaccaacaagtgtatgaggcctacaaagcaaacgccacccttgcttactcaaaagggaaagattaaaatcatgaagatctctaaatcccattcccccttttgatttgtgaaccgtcagcttatcccaactcttccaatgaatccctttattattctttgaagaggatttccaccagtatttgcacatcaattgctccatttcattaacagtcttcaaaggaagcaaaaagacattcatggcataactaggcaaggattgagcaacagtttttatcatcagctctttgcctgctttagacaaaaactttccttcccaactctgaatcttcttcctcatcttctcttttaagaaccccagtaaagcatttttatttctacccaagatgtttggaagacccaaataagtacttgtttcccctgcctcttgaaccttcaatacagaacaaattcttgcacgaacatatgtagggtattatttattaataagttattaataaaaagataactataaaaaaaatgagcaaacaaaaattaaagaaaaaaatatacacgagagaaaaatcttttatggaaaaagtaaaacaaaaaagagagagacacatcgaaaaaaaataaaataatgaaaaaataacttaaaaaaaaaaaaaa

SEQ ID NO: 128630 - DNA, 1244 bp, Cannabis sativa
ccccaacttcaacatgtccctcatcgacggaccgcatgcaaatcttcctgatctcgactcataagcttaccccaagcttttcctaaatcctaagtctgcacttgtccctctacctccgtagaaccaccctcttggtgacgatctcgttcgcccacccttggacttgatcaaagaccttgtgccactgtcgctattcagaaccacccatggagtagtgcctccgcactagaatacttttcccaacatgaactcctctgagtccaacacaacgtccctccagtcaaccaagtagcccttgaaacactgacccaaagaagctaccacatcctctgattgtagcttaattgcactaatagtgacatgacactgaggatggtgttatgcacgccttttagcatgttaattgtacctattaacttgagttttgctttaattaaataaataaataagatattttttttttgctaaaaatccaaaagatgaagatcaatagtaaataagtaaagaagaaaaaacacgacaacgcatgctgttgtggtactaacataatattccattcctatgactcctatctatgagaggggtgctcacagacccatttcgttacaaaaaaggctatgtttcttttgttccttttggcaatttgattgagtccttctaatggaccattctatgtaactctaaacgacactgtcccacccctaaaacccaccaccaccaccactagcaccctactacgacacttatatccatctattccaatagggccatgtactagtactaccatcagacaatgataattacaagtaacaagtccaactcaataatacattttgcttaattaatttctcttcacacacataacaataacaaagcataattcaaatcccttttgtacatattgtacaataacttccgttaaattatacttttatttagttttaatttgaaactaattatgtaataaattaataattaaatctataatataataattttttttaaaaaaaataatacataatagatgtacaaattaataatttctccactattcaaaataataaattacatagacatttgatgataaggtatggagaaatactaaatagtattagtggtgtataatcctactatcactactacaaaaatatcttatggtaacacttttttttaagtaagaaaaaataaaagacaacacttttacaagtgttgcctcctaaattgttgctaaaagatatgagttt

SEQ ID NO: 128631 - DNA, 724 bp, Cannabis sativa
tacgattgcgcttttcagaatctggtccaatttcaacttttgcactagatagtctactcgatcttttttttgacttgtcttgttcagtttctattgatcgagagctctcatgcttcctgcgtgattttaattcagagttttccttttgttcagaaaagggtttccagaaacgggagatggtccaacgttcaagccacaaggttgcagagttaggctctctagaaacatactggagatgcagtggaaccgcagtaggcaatgaatcaagaagctgaaataaaaaggagagtaaaaatcaccataactcacattatatacataagaactaaagcgataataaagccactggatgtaaaaaaacctcacattggaaacaaatgcatttttcgacagcctcgtgacctcagtagatgtaccaactcctttgaaatttgaatatatagcaccctgataagccatttgaaaatattgtaagatactaagatgcacaacaaggaggcacttcatgttaatcatcattaatccgacaccttgaattatatcttgtaggagacaaacacttatattaaatattactcatctaaaatttcagcatctcatacccgataatgctcattttaagttaattatcactcaatgtttataagcatttggagagagttggtacggcaaaaataagacactaagggcttgtttggaacgccgtattaggtcatattgtatt

SEQ ID NO: 128632 - DNA, 1207 bp, Cannabis sativa
tctaatttcatttaattttactatttcagtgattgtttatgtactaaaccatacttttcagactttgaaatctatcaaatcacgccccttgaatcttgacatatattaaatcaaattccttgaactttcatcaatgttagactttcaccaaagcataatttaatacatgttaaagatggagggagaaaaatcttaattagcttaataataataaaaaaaagaaagtaggatttgggaaagttgactgaccccatttgggtctttctcgctcgaaaaaagttaaaaagggtaggagagaactctacaattatttatttatttattttggtaaagagagaactctactattattactattttatatggagctagatatttgggagtagttcaaatgccactttcacaatagtttaatttgttggtcgtgaattaattatacatactaattttaatttgcaacaaattaaattaaaaatttatatatcatatatgggtgcatggtatgcttataataagtgttatatgaataaaaaaatgcaaaggtggccggtcatgatgacttgctctataatggactggacgtagatttttggcatcgagaccttaaattgaccatccggcaaaaactgaattttctgggccaacaagcaatattattaaattctaaaattatttttatattagtttttgctagaattatttttatatattattattaggacttgataatattatgaaacccaaccttaaacagacccttgttcccctcttgcatgtttattgggtcggtgacatgcaaaatgacctaatatgacctgtaaaaataaataaaacacactccaaatatatatttatatatattccttaattatactgattaattaattaattaattttaattactatatctatagcagtagcatgtagctcgaccgaaaatattacgtgcgtgcttgtcgattttgattgttgttaattgtgaactaacatacatatcttattaattattatcttaagagtatttcatcaaaattaaaattattatatatatatatatatatcaatgtccaatcgcgcgcatatagatgttaatatatgacaacatatttacacatatattatatttggatcctgtagtactactcaggtctcaggtatattatatatttttttttgattcaagcgtttatatattacatcatgtttt

SEQ ID NO: 128633 - DNA, 679 bp, Cannabis sativa
tttatgggaatgtaaggagagccatacagtttggaaactttatggattaaaactggaagttaagcgcattggacatgaagatgagcttgcttttttaatgcgcttggctaagctctcgaataaagaacgatttgaatttttcctagttgttacttggagcatatggaacaacaggaatgcaactgttcatggaggtgttcctctaaaaccagtggaattagtggactagtgcagtaattaatttgttgattttcaaagtgagagcagtaggaagaaatcaatggctcaacgggaacaagctaaatggaaagcacctgaggttaggacggtgaaaataaatgtccgcgttggggttaaattgggagatggatgttcgggtgtgggttgtgtgatcagaggagataagggagaggtacagtttgcatcatctataactctacaacacgagtttcagccactgcaattggaactcatggctattcttatgggattgcacatgggaataagccgcaacatacaatgatttagcatcaaatatgtctgtcatgaagttgttcaattaatctaaagaaaggaagatggttgccgagatattgattgcttggtagatcaaatcagaattcttttgttatttgaaaatgttgctggtatctcgtttgtatttcgcgaggccaactgt

SEQ ID NO: 128634 - DNA, 786 bp, Cannabis sativa
tcattctctgggtgtggtcccgtgaactaggagtgttcgaaagaacactgataccacatacaaatctcttgtgtcaagtgatttaattttctgcaattatttttatattctgtcccttctgttttgtcgctgcaaaacgaatttttgcagtaacagaattacattctgcttctgtagacttatacaattttatattttcgtatttattattggcatttgcaaaaactcaattttttcaacctgtgaagaagacccaacactaggagactgaaacagtggaatccaagccatttggggcatgttaaagccaggaacgacgccgaacaaataaatgaactgctcctgaaatgtgtttaggtattgactttaagtctgtatcatttgttgctgccactctttcagtgtttcatgctcttccaccattcgctttagggcctcatcttattcctcctagtgatagtaggttggccgaaaggacctgctttgggagttgccctcttaggccccttcctaagtctcgacaactagcccagtcccctcaagtaatgtgatctctcacccagcacctgtgtcataacatggatatctatgggaaattgggtggggttgatattgtactgcagaggaatattgatcggtattggttgagtttcacgaatctcaactattttgacctataaaaaatttaaacaaactgctagagttaaataaaaattaaatatagaataaatttctaaaaaatataaaaatacttatattgttataaatattaataattatgtggat

SEQ ID NO: 128635 - DNA, 690 bp, Cannabis sativa
atcataattatttgaataagttcaatttctacagggttttcagctcttctaagtaataattaacagatcatataaagaacgatgacacttctgaagtattcagagtttggtcgtttttataacagatgggatgatgccctcttattataattacatagagttactacttgagcttaattaacatcaaatagtctaacacaaaccaagcagaatgggatagagaaattaatagttaggagtattctttttatctaatccgtactattttttatagtgtattcgattcacattgtagagtttatatttttgatccaattcattgcacaaatacttaaatctaatccaattcaattcagaaaaatatggattagatcatatatttaagatgagttactttttaatattaaattatttaatatttataaaaaaaatttatataactaacaacaaaataaagtaaattagtgttgttttatgcttccaacaataatttaaaataaacaaaataacaaataacaaattcaaaagaagaaaaaaaaattgtattatgaagaaatatttaatgtaaaatatatatgaatggaatgtatatttgagttcacagacccagtagtgcttatatgggggctatagctcccactaacaaaaatattgcattttaaaaaattaaatgtatttttttttaatttg

SEQ ID NO: 128636 - DNA, 537 bp, Cannabis sativa
gggaaagctttaatccttagcaaattgagtagtttgcttttctgtacagccgtggaggtcagccacacttgctggttccatagagcttcattcctggtcttccatatgtgatacacttgataatacatggttctctctcctcaattctaagatccagaaaacaattcacaagaaaatcaataaacaaaaaagaaaaagaaagaaatgataaacatcttaccaaagccaaacaaaataccaaaacgagatttgggagctccgcattggggttggtttttggagtttggtggcttcggatgaacgggatttgagattttgaatctccttccagtgccggtgtgtacgcagatgagagagagagagagagagataaaaaagagtgagggtggggtttttgggtcaggttctcatcatggtgagcaaacggatttatatatggattgagaaatattaaatgtataaagtttgttcattagtgttgaagtcctgaagtacttcatatgcatcaagaattatagatatatgatcattttatat

SEQ ID NO: 128637 - DNA, 543 bp, Cannabis sativa
ttttttttttttttttttatcacatttagctaaaaatgaagagaattcctatagaagatgttgtgagagttcttagagaaacaaactcatattcaaaccaattaatggagcaaaaatgaaggttctgatgtgatatttcttgaatgattgggatgtggagaatgattgtgaatgatctattattataattattattattattttggctaatatttatgaaagtgaagaaattcataataacaaatgttttgcatctacaagtattgaagaataaaggaaatttttttaaaaaatattgtgtaaattttatattgtatactgtgttaagtttttattgttgttttacagttattttttagttgttttaattcttttgtgttattattttaggattattttataaaaaagaaagtatttttataaaaaaatgaaaaatttacaaaaatatcagaatttagattaatttttacaaaaatactgttacacgaaaatattttaaaaaatactgtgtttttataaaacaccagtagaacacaaaacaga

SEQ ID NO: 128638 - DNA, 527 bp, Cannabis sativa
cacgatctttctgtttatgcgcattttattttgcgacatgatttgttacggtagactgattagtgtaaagatagtgctagaaatgttaatagtggtcatgcttagacaatggagtgggcgtgctactagtttatagctgcttgtgtgaggacaacactttcaggaattatcttgggtgtgtataacccatgattataggatgccaccacagaacgactgagtgtgagtacagcgcaggcagggcaacgatgtctcgtgggaacggccgagtgtgagtataccgcaggctagactagatgccaccgtgggaatgccgagtgtgagtacagcgcaggcagggcatgttacatttcatgtcagatcaacatgacttgttaatatttgtgtgtatgtgtataacaagtattatgttggtgtgatacatatctcacaatgatagttatgttatatacttatttatgtatagttgaaaatttcatgattttttggtatggggggttatgtcctacatagctcttcttactggg

SEQ ID NO: 128639 - DNA, 1003 bp, Cannabis sativa
attagtaggatcataatcccacctattacctgattaattcataatatcaatataaaccctaattatttaccatttaacttatcgggatattacaaaaaatatagtcaatacaatgattaatgttacagatgtaattaatggtatgaatcttgacatttcgtgtttgccagatcgtatccactataattgatgcatacaagaagacctttttgacctctactcttttgtcctttaggccccataagaatttgacccaatcccacatcctgcctctagactcgggcacaggcatcacaccccaggggatgacctccaaaagtgggaggcaaagttacaatagaggaacatatgttccataatttcctcttcatctccacatagggggcaagaaacctcgtcaatgtgcattcttctagccagagtcgacctgattagtaaagcacttgataggatactccaccacaaaatcttatggcgctccaaaatcctagaattccaaagtttgttccaaagagtgggcgccaccgtaataggaggggctcttgataatgcccgaggaagacagacagatttcgtagaaagccaacaagttgaattaatagaccaaatccatttatcactgccttgtccccccagcctacctcctttaaggatattgttagtggttacttggtcaaatagggagttgagttaggaaacatcccaattcccatctttcgtaagtaaaactgccactttattccaaccctcaccattttttggaatgggataaaagttctgcccatgcaaaaagaaaagaaagaacgtggtactttgttgttgtccttaactttttaaggtaaaataaacctatatttgtcaaatttgggggaaatgtgtgaaagtcatatttagtgtgggtactgtagggtaaatactattttggaacttgtgttttgcaaaaattaccgattagactctctgttttgttaaatgacaaaatagacattgtatttttcaaaat

SEQ ID NO: 128640 - DNA, 1070 bp, Cannabis sativa
  modified_base (1040)..(1042): a, c, t, g, unknown or other
aaattctcttttaagcttggctttgatacttttgatcacatatttatctttgctcatgatgagcatatcatccatatagagcaataagaacacagttgtagattactcaagattcttgaaatataagtagttttcatatacatgttgtttgaacccgatttgatgcatgtacgtatcaaatatcttattccattgccttggggactgcttcaagccatatagagatcagtcaagcatccatactagttcaactcctttcccttctacttgaaacccaggtggttgcttcatgtatatctcttcatctaagaatccatttagaaaagcagtcttaatatcaagttgttcaacctcgaactccatttgagcaactaaagacaacatcaaccttattgtcttgtattttacaataagtgagaagatttttgtgtagtttatagcttccacctgagtaaatcccttagccattaatttggctttgaaccttactagttcattctcattgattccttcttttaacttaagaatctatttgcactctacaatcttcttaatctctagcttcagcacaactacccaaatcttgttctttcagagtgaatccatctccttatccatggcctgaagccatttagacttgtttccacttaaaattgccttttcatagcttttgggctcttcaatttcagtttgttggactaccaccagtgcaaatgctattatatctaattccacaaaccttactagaggatggatctctctccgggttctatcacaagccaacgaataaccttccagacctgtctgtttgaacccttttagcacctctgtttggtcttcgttatcctgttcttcctgctccataacagctttcgtctacgcattgtctttcagttctacactagcttccctctgtgaaccttcttttgggaacttcattttgcactccatttccacacctacagtgtctttgtttcctatttttcgtacatcacatggagacacactacctttccttgatctgtttattggaagctcgnnnatatagacccatggtcctcccactagtt

SEQ ID NO: 128641 - DNA, 996 bp, Cannabis sativa
gtttaggtggtgcgactgtggaagtggtgcgcttaagctttggatgagctttgaaagtggatggagttgctttggtagatggagctttgggtttaggtgttgtgatagaacgagtacgagtacgaggtggtgagtgtgtaggttcagaagtgggttgtattggagtggggaaggaaaggcaagggttggtggtattgtggtgattggctattgcgatttaggagcaggcgaggttttggctgaagctttacgcttacaaaattgagttttaccggcggccatgtctcaatgttacaaaaattggctcaaaatcctttaatgggaaataaaaatatcttttacataacctcaccaatatcctcaattagaacaaaaatcaaagagttgcactaagttcaacaattcacctcatttaggtgacaatgacaaccacccaaaatattgagtatccaccactaaaatcaaaatcagagttcatcacaaattgcatttaagtactcaaatattcaaccctctagatacaatatattcttaaagtgtaatctccaacactaggattatgacaatttaccaaaaatgggcagcacttacatgataactttcaaaaaatttaaaacagaaatctacgccaacattatcacaaaccaaaccttgagtagaaataaatatagaaagatctcacctcaaccaaaaaaccaataaatgcaatgcaaaagtcgtcaccgagatgttgtggaggatcacatggtgactggtttgtggctccggtgaagatgatgatggagacggtgagtggggtacatgtgcagttgggttacaaacggagaagctgctctgatggtgtctcgggtgttaggcagctatggggtagacgatggtggaggaggccaaattgattcacaacagtcgggttgctattcataaccgggtcgagttattggagggaaatgtgtggttttggggtttcaggtttggttcggctggcgcagggaaaaa

SEQ ID NO: 128642 - DNA, 1153 bp, Cannabis sativa
caagttacttttttacagaactcaatttcgatttaatttgaattattatgattttttgaagtttcgaaaaaatcgggttatgatcctggtaaaataatttccaacagttttttgggtcaaagcgactggactaccaaccccctaccttaaccggacaaacactcccacattgcagcaaaggcaggggattacaaaggatgtgatactgtggatcaaaaagttattgttcgacgagggtttctgaaattcgaggtggaaatctctacgaaacaccagctttcgccgagattctttcttgacacttacagaggtaggaaggaatggatgcaattccaatattttaagttgccgaaaatttgttacaactgtggttaactgggtcatgataagaagttctggataagatcaacgccttacgcttaccctccggagggcgatgcggttcctacgttcaggccatggatcaaagcggaatcggcggtaatcagttgtttcaataccaggaaccaactagcctttttccgggacaacacgagaggaaacactactccgactgcccatgctccaagcaaaggtacaacgttgcatgacaaaggaaaaggataacttcctagtaacgaggggaagcagcagggtcggcaggacactttggggaagttaagcaaaaaggaaataagggtgcagggagaaacaacagaagccatttcggggaaagttttgaaagttgtcaacaacaatcctacaggcaaagagattattcagtctcaaagtatgatagatggggagaaatcgagtaagaaggtttctgaaggaaggagagccaagtcagtctcacctcgttccttgagtaatcatcagaagggaaaaaatatagctgttgagactatggaggaaataataaaaaaatactcctctcgtcctttacctacagctagagatgcaggtgttattacaactatcatgggccatatgggacctacttacaatgaaatggttgaaaagcctcacgtggagctatgtgtttctaggaaaccccacaaacatccgaaccaactcattttccatggcccatctatgccaatgaaattgggccgactgaagagcttatgggccctgccccaatagataagttaaatgacaatattatttaata

SEQ ID NO: 128643 - DNA, 1006 bp, Cannabis sativa
aagagctttgaattcgttagatccatgatgaaatctatggaactgcgtatggagcaacgtttcaaggctcaattaaaggaattagatgccatgtttgaacgctactgtccatcgacagaggcactgccggattcctcatctcaggcgccatccacttctacggagaacgacgatcacgttcgcaactctgacgaactagtgagagtagccattccattggagattactcctgcagccacacacataatcggcgactccccaagcatcaacatcgttggtgactgataagggctcaaattgatacattttacgcccttatttatgaaaatataattaatataaattaaatattccttatttttaatggtaatattattttagttggaaatatttaatttattttaatttttgtgttatttttcaaatttaggtaaagtggtgaaaagaaattaaagatggcccaaagtaatccatctccatgcttttctttctccaatttaagcttgtttcaattatcttcaatgtccaagaattctttatccaattcaatatggaccgttatttaaagaatgggctaaaattcaagcctcatcaatgtttgtcaagcccaaaatgaaacagcaaggaattagcatctaccaaagccacgtacatatctcacgcataggaccaaccacaacttctactgcctttgactaaaagctccaatgctagacaagtggtcttacgaagccactttctccacatacgcctcccactctcttcagccattctcacatatgggccagtttaccacgattgaagcgatttttgcatatctttttaatttaccgactttgcagataaaattttctacgaataggatcaaattatattctctataaatagagaccaaaagttggtgaaaaaggcatcagattttagagagagtagaaattactttgttattttatttttctttcttattattattttatatatacttattttagtgacaaaaaagagt

SEQ ID NO: 128644 - DNA, 1164 bp, Cannabis sativa
ttgtaggctcagagacctagttagaaggcctttaggcgaggcttcaggttgccttagggctaaggtggtccggaccacctgctccggtgatgctataggatcttctcttcctccgcctcctcttgggcctacaccaactgggtagcccatgatcgttcaccctccattgatgaagacttagtctttgggaaaaggtgcccagaggcctagctgaggggcggattcagccatggggcagagagccatagaggcagctcgtaggcatatggacagagtcttacccaccgtcgatgatgagcttcggaagatcagtgatggtaaaccagattagctgtcttctagcggtctccaggacttggccttagtaagttgcacatttaactttgctcacttttttgtgttattgaaggttggctggccatagggagctgttgtgcagagttggccgaccagtgttgtgttcttgagaagctcgctgaccctataagcaccctagaggaactggctgactagacatttcttttggcaataacttgactttattttgtttcgtttttaggcctttctaaagtttagccttaccgattcagaggctcttgtccaacagaagctggacatgttttttgatttggagtgcatgctcaacactaggaactaagagaataacacatttgatgctgacgtctccaggctagaggtaaaactcaggagaagtaatgatgaactgaagctcagtagagaagaactgaagcttccccttgatggccagcaggccataaggaacgagtatgcttatctttggagatcatctatgagatcaagctgcacaatcctagggtttatatttcctacatgggagcctctttccttaagagcacgctggctcaggggaaaaagttgtatgagagcaggatgaagacagaccagaccatcgtctagctagaaggatcatcaccagggcaatataatgaggccatggtcgacacaccctttgaggaggtggctggccagcctgtagaggccatggtcggcccactctttggcaatctgaacactacagcttctgactcagctccacctgcacctacacgcgagtagcttcactttattagtattgggctttgtgccctaaataaaagtctatttcaatgtaatcttttctat

SEQ ID NO: 128645 - DNA, 787 bp, Cannabis sativa
tccatgtctcttactgatattcttccatttgcattctctcccaactattttgatatgattttcataatattaattggcgaaacattgtaagattagtttggtgacactgtcaaatggaggacaatgagaacactagctaacatttgttttgtttgaacttgagttgagattcagacatgcattattctctttactttaaattccatgatcatttcttaccagagctgattgtaaagattcgtattctatgacatcctggttgaagcttgagagcaaatttcatctccaaagatgagaacttacagtgctcttgaaggcttgatcaacatctcaggttgctcagacagagccattcttcatagcgaaccgtgatggtaggtagctcaacttctcgtggcgttaaatgtgaactaacaaggtatgtcatgacatatgatatagcataccaccatgatttgcattcaagttttattgtatcgtatggcatataatgatatgcgataggtgttacctgagcttcaacaaacaaacacatacatggtaagagaaactgttacttgcagataaaggctctcttcttcccatattagttttaagaaattagaatatctgacccttttagttatttgctattcaccattttcagcttacttattcaaagaacctccatttttctttttacaatggatacagaaagagaaatcagagaattgctaggtcaggagttagcagttaaggcatgaaaaagttactgtgaatggtatatcaccaaaaacatgagtcagta

SEQ ID NO: 128646 - DNA, 871 bp, Cannabis sativa
gcagataacccaaagcaggcatagcattatatccatttgttaactaaaggaaattaaaaaccatattctacttcaaatactcatttgctactatttaaagcaattcaattcagctactaaaaaaaacactaccaacaatttgataagttttcatgttttggctacatttgataagttttcaaatttccagataaacaaacactacaaaattttgacgagtaatgtatcacaagtgcaattcatacaatgaataattgttcatgctgtaaaaggcaattagacattacaaacaaacctggagacgttgaatggcttgctggaaagtaagaacagaggatttaggtggctccgaattcgaaagctgcggagcctcggcggtggcagaggaggtagtaattgcagatactggagttccggtgaagcggcgtgtagcggtgaaggggttggggaagcgagtagggaaggacttagcagcgtagaggtggaaggaaatgcgagatggttggggtttgagaaaggaaatgactaagggaaaggccagtatagccatggctggtaactcaaactgagaaaaccttagcctgaaaattttggtcctagattgagcgtgactcgtcatctagaatgcctatttatatggtttatgagttatgactatgtttatgctttctttactaaagtaatgttttgcaaaagttattggttggatttgtattttattaaataataaaatagactattttaaaatggtaaaaatagaatcttgaccttaattttatacaacttttttttttaatataactaacttgaagataatttctaactaacagatacagaaaatgtaaataattttgtcataacacttttagat

SEQ ID NO: 128647 - DNA, 1001 bp, Cannabis sativa
ctctccacaataatgaacatgcatattttttcctcggtcttgtctagggccaaacaacacgcagccgcctcaccacaaagggcatcaaaaaaatccaactttgccgtacttacccaagccacctcaccttcatggtacctagctactaccacaatactcatggtttctaattaaacccacttttacgtcgcagttcagtttaatccaataatgagggggaggacgacatgctttcaccaatataagagtaggagtaggaagaagggaagtttgatagtctgcataagagtgatgaatatagtcaatacaacgcttcacattatctaaattattattgtgtaccttatcattctggaccctctaaatagtatcaacaacaattgaagcatacaaaaagacctcatctgcatttactcctttagaatttagattctagataaatttgacccagtcccatgtgcagatacctgtacctaaaacagggaaaataccctatggcgaggatcgccacaaatgaaaagctaaatcacaattgaggaataaatattctatagattcttctttaaacccacgtatagggcaactcacatcatcaatatgaaactttttgtgaataatagatcaaattaggagggcattagatagaatgctctactaaaggaccttatggcgctccataattttactattctagagtttattccaaagggaatgagcaacttcacactgagggccctatgcaaagcttgcaagagataggtcaattcgcaagaaaaccacccaatactctctttagtctagacccatttatcctttccatgaccagcaggtcttccacttttcaggatggcagagatggtatcttttttaaacggacagttcaacttttgagtgtcccaatccccatcttctgctaatagttcaactactttagtgtaactaaaagtggatgatccattagattttgggagaaaatccttcccatgggccacccatggatc

SEQ ID NO: 128648 - DNA, 589 bp, Cannabis sativa
atttatttctaaatattggggttcacaattaaataaattcagaaataattataaaatgatagatattagtgctaattgccttttctaatccaaattaataaggcgatcattacagttaaaaaaactaattttgtaatagtgcatgttagaatttaggatgaatgttgtgaaagtaggattaaacgagtgtaatagtgtatgctaagatgaatgatgttccatctcaaaaataattgacaataaaaaaaatagcttataaatcttatataaggtattattttttcacatattattaatatgagactcattaacataattttttttaaaacgaaaaagaaaagataaattaattccttatactaatatgtcaaatccaaaattatattaatctaaattaactaacaatcatataattataataaattaaaatacacacaatataaatcaaaattctaaaacaacaagatatatacaactataactaaattatgtggacaaaagactaattaggatttttatcttttaactttaacacatatcatatcagacctctggacttttaagatcgttaaaaataccccctgaacta

SEQ ID NO: 128649 - DNA, 697 bp, Cannabis sativa
tttaactaaaaggacattttgttaatttttttaaaaaaaatgacatttattaatttaattgttagatttagggccattttgcatcttggccccttttcacgaaggagcaaataaaataactactccataatgacactatacatttacataaatatatgcactaactcatctttttttaatataatcacatgtttacctttttccataaaatatatatattttttgttgtagaaacaccatcttttctacattgaacaaagtttgcaatctctcatttttatcttacactttctaataatctatcatagtataacttttatgtatatccaactattttgaagaggaagtttcataagttagcatattaacttagtttttctttctttgaaatttattctcttatatggatgaatggggaaaaaaatcttggattcgaaccactgtaagagtggtaaatgcaacattcgaaagattggactcaataatctaatttaggaagttttcacttagatataaaatgtaagaagtagggtttttacatggtatactgtatttggcatgcattttattacttttgtactgccacgcggctgatttttgttacgaaaattatgaatactacgcaagtatacgcagtcaagtagtagctcacgcaagtgaggtcgaaccacagggaattggattaattaatactaaa

SEQ ID NO: 128650 - DNA, 1123 bp, Cannabis sativa
tctctctctctctctctcttgcaccttgcagcttgtgacctggtgctatggcaaaaacaaggtccaagactcagggaagactgaaacctacgacaaagaagatgaagaatcaagggcctgatttaacttcaaatgtgcacaaaatgaaatccatggatgaagtgttagtggttgatcccatacagttctgaggatgaaaaaagtattgaagatgctgaaagagctatttttgagaacaaagtcactgtgactccatcgatgtaggaggagccttgcgataagattggaaacttcttgcaatctacacagcaatgtgaggacagaatgttggaaggtaattataaatctattcctgcaatacttaagtttgatatcgttaagaagaaccttgctagctcatttaagaaagaacgtacagaggtcaatggtaaaggtttgctttcaggacatataagatgaggtttcttattggacaccttccattgtctgctatgttttgggagctaatcctcccctatccattttagatggttttgctaggaagatttgtggggataaggtagacaaagtgagattgttggcctatggaattttcataattaggtttgaatctattgaatctcgtgatgatactaaattttggtttcatcttcttcaataaaaatcctgtgattactacaaaatagacttttagtgtcagtttgggggatgtttttttttaaaaactgacactaaagaccacctcaactctttggtctcagtttataactgacacctataatgacttttagtgtcggttagtagaccaatactaaaagtatagctgagaccaaattgttttgttttaaaaaaatatttatatagattgagtataagtctcggtttaaaattgacactaaaaagattctttggtctcggttataaactgagactattgagatgaatagaaaaaaaaaatcccaaaaaaaccctgttatatacacatattattccaaaccctacatttcaagccctctctctttttcttctgcctaacccgatctctctatcccttctcttcttcatgcggcgacgcttctccggccatctccttcgttggcttcgctctctctctctctctctc

SEQ ID NO: 128651 - DNA, 1548 bp, Cannabis sativa
tattattttattttgttgaagatgaaaatttgaaagatacatttatcattatttttattagttttgacttaatatttattcaagccctcactcaaccaagtttctggcttcgtcactgattgtataggcttagaggttaactgtcatatacataagtatacacattgatcatctaattagtatttagcagtaatatttaattagcacctcaatttcataaagaaaagtaaatttaaaaaggttttgctaaaaaaaataacaaggctaagtgtacacaaattaaaatataagaaatttcgccgccaattatcttttaataaactattaaatttatttagtttattactttatttatttatttatttattttgaaaataaactcttcattactaacaatatgattttaatacatcaaaaaacatgaaaaaatattcatcaaagtaagtttttaatctactttgattgtatgcataaataatttataaatgacatagagtagtgttacctcaaaaaaaattggataacaaacttaaaatatcaaataattaaaaaccaaaaataatgcaatgcttagaaaaagcaagctgatgttaaacaaacaaatacgattattaaatttacattcttaaaagatgcatcgatatattatactcgtacttagaatttttattttgtgaggacttatttatcataaaattatatttttagctacattataattactcttattaaatttatctaattttatagaagctttttcactattttagtttataattattaaattaaaaaatttatatttattttttttaaagacagtatttttattagttggggcacatcaatattaatgggatcgtccccgactccatatttatcatttggcatttaaaaaagtttttaatttaattttttaaaatagtgtatgttgtaattatttaaaataaaatataaattttataaaatgtaatttatactactgacaataatgtcaaaatatttattacatgtaatactattttttttataaacataataaataattatttaaattttattttcgatacaattaaatatttataaatttttaaaaacatacaaattatcttaaataagtaggatatacacaaatacaattatagtaaatatcaaaactcatacacatttattaggttatttatttgttgcatttattatatatgattattgtgaatgagagtaaataattggtactttctttctactactacttggggctttgtgtttctgacatttttcttcacaggattcttgtacctttgttttcttttgtttttatttatttttttatgtttggagacaaggaaagtgaaaaagaaatacatatttaatagttattatatatgttgtgatatttaccacattatcatttactatttaataattaatttatatatgtgttgctatgtaaaaacagtatgataatattaagggaaaaaaacagaaacatacaaaaaaggaaaaaaaattacaaaaatactttgggccggcccattaaacatttataca

SEQ ID NO: 128652 - DNA, 954 bp, Cannabis sativa
tctgaaacctaacccttcccacccagctttggaaccccaagcctgttatcttcctgttttgagtaaaaacctttttctgtggattctgattatggcctcttcggataatactctggtgaatgagatgattgctgaaacagagaactgttgtctggaggatttctctattcaggtggtgccggacctggaatctgctcaggatactatcgccaagacggtagtgggacgactattttccaagaaaactatctctcatggcactctgcgcaagaccctgactggtatgtggaaacttcggcctggatggcgttttcaagctccggagtctaaaacctttgtttttcgcctgaacagcccccgggaagttaagtatgtcttggaaaacggcccttggaatccttgtgggggatttctcctagttaccaacctccccgaggacggaagatgggagtcggccgatcttacgaagcttgatatttgggttaaagctaagggagtcccattaccttacttaactgatgattgccttgttcagatggctaaacggttgggtcctcttcttaacgcgaacaaggttaaaagaaacggtatagtggtcaacgattatcttcgtttccaagttagacttgatctcaatcggcccttactggctggtgtctctctccccgagcttggccaaaagaaagtctggagctacttcaaatatgaacgtcttccttcattctgctataaatgtggtgttataggacatcttgaggatgagtgctctggtttaaagaggatggtttctacacataatggacgctcgattccactgtttggcccttggttgaaagatggatctcggttggaaaatggatttgccttattagaggtggaagaaatccaagatattcagagattggaaaaggaagacaccttggatggtcagtcagccctccctggggctgtccc

SEQ ID NO: 128653 - DNA, 680 bp, Cannabis sativa
tgattttatttatgtcgggtctagatccagagtcggatttgggttcaagtcagagaccgggttcagcgccaggaccgtggggggatttgggtccgggtcatgatcgaagtccaggatattgattacgaaaaaaaaattgtttaaaaaaatattgaaagtaattttttttttgtttttaaaattttgattctcaattaaaaaatttaaaagtaaaaacagttttaaagaacatgtttttgaaaaatatttttaatttttcaattttaaaacagaaaactgattaaaaaagtgttaccaaacggcacctaaattatgtttatatatgtatgtattggttgttttttgtgatgttaaaatgtgttctgaaaatcaaatttgtgtcattcgatctttgtctgaatttaagtgaattgcttttcttgtgtaaattttgaatacccagatgtgcacatggttgacttgactctctatgttcaattaaattaaccatttcttatttgattctagggtcattctgggatttcagtgaatgatacattctctaactaggttttgtttctgtttttttttttaggacagtttaaatattttttattagttaatattttttattatttaattttagattacattataaatgttataaaataatataatataatataaagtagatgagaaga

SEQ ID NO: 128654 - DNA, 1224 bp, Cannabis sativa
  modified_base (1174)..(1180): a, c, t, g, unknown or other
gcacagtacattccacaaccaacagctgcaaggccagggaagctggtagtcagaaaccgaagtggtgacgaaacaatgacactggttgcagccaagaaagatgtagcctgtccactcttacccacgctgattctagtgaacacaagcaaccctgtcttacaatatatggcgaaatcctcgcagttgttcttgaaaagatcataaacaccaaagccattttcaagtaggtaagaggcacggtagagaacatcttctggtagatctgatgaggctagcgtgcaggtccctcctcgagctttggctacaaaaaaaatggggttgactccatactcaaatcgatacagttctccaccgcagaggaaacagtctaggcaagaagagatgacaccgttcagcttcgactgatctccgcatcttggacagggattatcctcagaatgagagggtgaggagctgaaaatgaagcggtccagaacagttcctgtcccaatttcttggcctcttcctctggtgaagtagatcacctctccctctccaacatatattcctgaagaacaaaaaatatattactgcagttttttctaatttaaaatccaaaaactacttcgaaagaaacaaaattgatttctgttgttttttaaaattcgaacaaaacccgttttgtcttgagatgataagttacattttcactattgaattttaaatctaggtcatatttactatgatttgaacaaaagaaatatgagccaaattagccaactttggggctaaattgagaagggactagagttaagaaatactagaatgaagcaacgaataaaattgaagaaacagaagagcgaaggaactaccgtgatgagcatagatataggcatgcctccatgaatagatgtgatcgcctggtttgagatggtctctctcgatcttgttggagaagactcccatgtctcgctctctttggtcaaattaagcaaacaagaggcaaggattttggcttcccttcacactgtgcctcctttttccttttccttttctttccttattatattagggctcctttgggacgtgctattataactcgtattgtattatattcaattaaattatatatcatattttttatatacagcagaacctctatttaaaaatattctattcaagaataacctctaannnnnnnaaaaaaatcaagtcccgatttaggccagttataaataagaataa

SEQ ID NO: 128655 - DNA, 1787 bp, Cannabis sativa
aatagctgccgtaaaagcaacgctgggagattgtacccaaaaacaacctgaccttgagaaaagagatttacgaggcaaaccttgtggctcacaagtcatgaggtaggagatgacctaggggtatgctcagagctcttaggggatgaaacctgaggaaactgaaggaagactaggggtacaacctgggatacgtggaacatcggacaaaaatttccaacccactatttagtctcataagaataaaactcgtgcaaacccttgtaggatggaaaaagtgagtcaaaccttgagaggaagggcagggtctagccacaatcatgatgagagtgatctactgaagtatctgaacctaaaaaagtctgaccttcgtcaacgactcgatccaagataaaaggattcactccatttgcgaatgagtgggttggagaataagtccagagtacaacacatcacgaaatccaggagacaactgggacatgatactgttggaaaacttgattcggaagcctcaggatcaatgaaaaaagatgattccaaaaggttgcctaatgataagaaacccaacaagtatatccctctttataccgaatacaccgagctcaatgaaactcgggaaagatctacctcgcatatgtacaagaagccgtttttggcgagccaagacctatgaaacatgcggggcgcaagagggatccaagtaagcggtgtgaataccatgctgatattggtcataccacagaagagtatcgtcaattgaaagatgagatagaaagtctcatatcacaaggacaccttcatcgatatataaaggggcaagaagatgcctatgatcagttcgttctacccaataacttgagcgagtgaagattataaccctcttccacgagaagaagggacaatttggttatctcgagaggaaaagggtcgcaaaatccagttactccggtaaagacaaacttaaaagagaattgcgacctgagtatatactggctcgttatggtttccataactggacgtcaactagtggtagtcgaagacagaactaaacccaggattattcaacctggaaccccgatatatgtcagggattgaccctgaatattgaaacgattatgggagaatgttggggattgaccctggacatcaaaacccattttatcaaaaccaaatgttcctggaagattgataaaataaacaattgaactggggaagttcttttgagattaatgattgtaaatcacattattgatggaatattttgaattccagttgttaataaaataatcatttctttcaaacaagtaattacaaagcgtaaagtctttaaaattacttgaggggcatatatgtatgattaaccagaattgatctggaaatacatagtacaatgcaaacacatagttttaaattttgaaaactttataaaagggcctcgaccaaaccttttttacggaagaggggtcgaactattataactccctgaccaaaccttttcgtcggaagagagattgaattgttataacatcttgttcaaacctttttgacgagaaatggatcaaaccagtgtactttttgagttataacctttctgacgagaaagaaaaataaaaaattatgactagcgcataaaactgaatactaacggttcgctctagggaaagtattaaacgagatatccaaatatcttgaaaaaaaatacctaaacccaacacgtgggtagaaattttaactactcatgtaagcaataaaaatatatataaaatgacaagttcattaaaaatatattt

SEQ ID NO: 128656 - DNA, 835 bp, Cannabis sativa
aacaaaacaacagacatcaaagctccttggagactcctctggcgtctgcaactttggacagcgaaactcccccaatttttcgactgaaactctcagttgatgctgcccagaatgcaacaaccaacaaaacaggtcttggcttggctctatacaacaatcatggggacttggttttgactgtggcgtcaccttgggacggaattcaatcagccctgttaatggaagcgcatgcactctattatgctctatcttggtgccaaaaacacaacataactccagattatattgtatcttattgtataactcttgtggattatatttgtaatgatgctacacatcatattctcttgaataggtatgcaacaaatatcagaagcttgctgtcttttctccctaatgttactttcaggcacatcccaagacgggataatgaagatgttcatcgccttgcaatgtatgcattaggcttagatcaggaagctagttggaaagctcaaaatttttctctgtaatttgtatcctgtactctattgttctttctgcaatggatacatctctttatttaaaaaaaaaaaaattgcacaaaatacactattaacgctagaaaacggtcattgactgatagtatcatctgatgagagacaatgaacaccagatttttatatttttattaggggtgttcataaaaaccgaaaaaccgaaaccgaccatcaaactggccagaccgtagccgaattttcggttccacgtcgtcatcaaatttggcggtcggtttctgtttttttgacatggcggtcggtttcggtttttgaaataaaaaaatagtttaaccaaa

SEQ ID NO: 128657 - DNA, 896 bp, Cannabis sativa
ttcattgtataattgaattggtgtgaacgtttttaagtggttgtgtggtagctggtaggtgatcacacgtacaaagcaccatgccattatcagtatttttaggctgaaatcatttttattctttgtaggattctcattattattagtattatatttatatataagatacatttaccataacttgaactctacgttactcattaactttaacacaaactcaatttttaataactcaaatcatcataatcgttacgacctaaattcactagcaatcacattcaagggtaattaattaggatgctgagataatataaagcaattataaatatgcttaattaattataatatagcatctactacactaatactagaagtataatatcgatattgtgtactatattattatgtaatttaacggtttattgtctttatcctatactatatacagtaatttggatcttaacaaataaatacttatggggaaatgttatgtgaaaggtcgtattctcgtaatattgaaaaaagtagtatttttgcacatatcagagtttctagtttgggccgagagcctaatcttaaggaagtgggatgatataaatttgggaaaatttcaccgtataccaattttaacttagtccatttcatttttaccgttcttttcatattatttcatttatagccacttttataagtcatgtccctattttgcccttagcttaatgaaaaaaataaaatcaattacttctccagagtccaaatatgatgatcacctccgctcctcctcttgctcctcttcttgtggtaactacattccgatatgatataaaaaaaattattgcaaatatggaagctttctactgatggaatatagtgactgttaaaataaaaacaaatta

SEQ ID NO: 128658 - DNA, 1619 bp, Cannabis sativa
tagactccctcttattgtatgctgaaagcttgttgtattccactttctagctgaatcttgctaaaactccaagtgctcgaactctttcgatctcctttaagagtgcttgcttcctcccgagaaaagacttaaaaaactatctcctgaaagcttgtagaactttctcctgaaggtagcactattgttgctcttcttttgtaaacttgattacagactcaagataatacaaaatacataaatacagtggaagagatgaacaccctctcctctacacaagaaagacactctttcttacaagatatgaatgaaatacagagatgtaaaagagatacaagacctaactactataatgcatatttataatcaatatacaccttattaacaactcatacacactctaaactagactacaaactcactagatacttccctaaaatagatattaaatcagcccataaattttttcttctaattaaatattttaggaaacttacaaagaattagatatacatggatagatagatattgattgaattattaaacttaccatttttgactaactttccatatataaaaaaattagtcatatttcttaccttatataattcaatcaatataaatacaaagaaaacaaaataaaaaacttagccgaaaataataatacatttataaaatatttttatcaatttaaagataccaaatataaaactaacagaaatattaataaaattttaattatcattagtaaaaattgaaatataatttagaaagttacactttaaatagagttttcttagcactcatttttatttatttattttttttttcagcacacaactttcacatcattagaggtaggggtggacaggatctaagctaatctaattgagctaaacaaatccaatctaagccaattataaaaattagacatctaattataattggattagatattaaaagttagattataattggattggttattgaatgtcaatcttaaaattcaattagaaattgatccaatccaattacttttaatatatattaattttttttatttatctatatataataaaaaatatttaaaaaataaaaaaatatattttagttatacttatattagctatttattttcttttattaaatttgtaatacttgattgtttcgtgtatttgttttaatgatgttttgttttattttattacttggtagtgttgttttacttatttcaaacttttaattgtattaaacttgtaagaattatatctttatatagaatattaagttataaaatgaatagtgatatcggaaaaatttctaaagtattatttatttatgttttatttaaaattttatggtttaaagtttttatttataaaaatacgtttataaagttttaaaattacaaaaatatgcattgttaaaaaaaagtaagaaaataactaaaaaaacaacaagaaattaatctcacacacaattacaaattaattataaataaactataaaataatatcattcaaaaaaagaaaactataaaataataaaaaataaataattataatacaactataaataaattataaaacaactaaacttgaaaatgtatttttataaataaa

SEQ ID NO: 128659 - DNA, 588 bp, Cannabis sativa
ttaaaggttcaaataaaaaaatatacatatttttttaataatttcttaaaatattatttatctttataaattttttgttttactaagatccatttcaactcaagggtatctctcctctccctcttttaccaaataaatgatttaatcaatctctttattcccactccctctatttttctctcccctctaccaaatataaggtaatgctatgtaagacaatgctctaaaagtatatgaatggtccttgaattttctaattttagtaaccaatacatatgttaggggttttttttttttttttttgttttgtttttaatatatattttttaaaaaagatataatgaatttgaagctaataatgaacaccaataaattcacttaaagagataagaccactcttaattggttggtagatactaggtaggtatatgttatgttaatatttgcctttttcttttgatatatttgaaattatattcgtgtttgtttatttatcaaaaaaatatgtttgtttcaatgaaattaagataaatagtagcataagtaattaatgttttaagtttgtaagcggcataaatttaatgttta

SEQ ID NO: 128660 - DNA, 522 bp, Cannabis sativa
  modified_base (423)..(423): a, c, t, g, unknown or other
gatgagcaagaggcacatgtcaaaattctgccaatttcacaaggacttcgtccatgacaccaaatagtgttagaacttgaagagggagattgaattactcataaggaagaacaatccccacttgtgttgttatgtgtagaacgactaccctcaagcacaagctaccaaaacgaagaacctatgtcacctctagtggcgggtcacttaggggtaattattggcagaccccacatggcaggcgagaccagtaaagctagggagcactatgctcggacactccgtcacgagcctaaagtgatatcttggccatcaaagaaaggggctccaaacaagccaagcttggagagtccactatctttttcacaaagggagacgctgcccaagtccatttcccacacaatgactgttgggttttgtgccctnaataaaactcatttcaatataacattttatgttgcatggttcacatgatttatttcattatatatataatgtatgaattctctttaagtccagaacata

SEQ ID NO: 128661 - DNA, 746 bp, Cannabis sativa
aataaataaacaatgatgatgaatcgattaataattagatatttctaattttacaacctttaaaattagaaaataaattacaaaattaatctccattgcatcaagggcaattttgtaattttgtaagatcgttgtaagcctcaaaattaattaaaacaattttaattaattattattaaattaaatattaatttaatataccttttaaactattttagataattaaaacaattttaatcaattaattgttaaataaactctttatttacgacaatataattatctttaagttttgtcttaaaataataatatatattatttatttttgggttaaaacaactttaatcttaattggttttagggttgaatttaaatttcaaatctaaaatcaattatatttattttgattcaaatataaattttaaaaaataaaaatcccacaaaactttattattttgacttaattattaaaagtagtaaaactgttttattatttataaattaataattaggtagttatttttttgaatttgaaattaaaataataactaacatatttatttggaatcaaatctaaatagatatcctaaaataatctcaattatttatattaaataattaatagataatatatagtgtatatatggggactagtaaggttagaactgtattttaccaatgaataagtataggaaaattttatttacaccccaaaattttttaagtacaccccattttaataattt

SEQ ID NO: 128662 - DNA, 556 bp, Cannabis sativa
tcttgaacacctaagataactagcaaaggagcctacaagctgggaaggcacaatgagaacatggggcttgttctcctacaaagatactagaatagagagcaccttcgcaaatactagtagtaaccaacttacaaaatgttacttttcagtagtagttctaccaactcatcattagagtgaaaaaaagctagtacccataacctttttggtgtggctgcccaccgttcttcaaggatggcctttgctatgcaagtcaagcaggggtagccatttgatatctagaagcaaatattttttatgtaagcatgtagatttaatttatgtatgttgcacagcaacaaagactaattaatgaataaaaaataatttttatgttcaaatatgttgtgtctaaacaacttgctaacaagattactttttaaattttttccttttctgttccacatgcgtacaatagtaagcaccctaagaaaattcctaggcaagttctatgaaacttggtgaatttcaagtgaccaagagactgtaagtctgcgagctcacttgtggggcacct

SEQ ID NO: 128663 - DNA, 2330 bp, Cannabis sativa
  modified_base (239)..(240): a, c, t, g, unknown or other
actttgccaataccctcgaaaggacataacacttatccaaggtgtaagtttaccttattgtcgattatcatgtcagtctaaatctagtgaactgacaaataatgataattaaactttttaacatataatcataattatatttcactatgctgacgacactataatcatgaataactatatatatatatatgctctagacttaatagaatttatacattaagcataatcatgaaataaannatgtgaaccatgcaacataaaacaatttctgatcttttattaattagcaaatttaattatgttgaaatgggttttatttagggcacaaaaccaaacagtcgccatggcctattggcatgcattgctttgggagtattagtaggagagtgaagcatgtgcatttctcctccttctcccttagacttcatcgcatatgagaatcgttgaatttccctttttttgtattatatttacaagagccatcgttgttgtgctctttaatattctcattgttagagaattgacagagatcgtctacaatggtcagcacgtcgaacaacatttggagaaacatgatgctctatggctgggtttgtctaggcttgccaggtagcttcttccatttttatgaagccattagctcgctcaaggaacttcttcatgttggtcgttgagatccatctaatatctttctacaattcactcaatggtaagatgcctctgagtgtggtcgtatatcgaccttcttctaccagacctttcaacttcgtggcctcagccatgaacccatgagtgtagtctttcaaaggtatttcttatctttgctttattttgacaagatcctccagtcatgaaggtatttatcttgagatagagaatttaatatagaactcttaggagaattcttcccaagaattaaatcttcctagggcaaccttgaaataaaactattgggctattttagctagggttgctggaaagatttagcatttcacatctccggatacttgttagagatctgttcggatctcaaagtattttaggtgtaccaagggatcttctttccctgtgtacatcttccaagttggccttttgaacttgggcaagggtaaggcattgatgtatgccgagaaaggtgagcttcttgacctatccagctcaaggtctgatagttttgggccaacaaagcccttgagtttatctcatattttatccaactattcttgcacagaaggatctgctgtggtcgaagcctagtttattggcccttcttgattgggttgtaggcctggattagctagagcttggccgaccataccctaagagagggtatgtcacggtcggcttgcccaaagcttgacaattggcattggccagccacccctgggtaggggaactggccatggccagccagccctattatgggcatctactcttggctggctagccctatgctaggtagagcctgacaacctattcttcccttattagctggtacaacctgtgcgttgacagggggtagatcacaccgattgctaaagttaggtggatcgaagtatctgaagtgattggtgtcactgctcaagttgttgtcgtcttgggtgtttccagtcgttcttggacctagccagttaaagattggccttaaggttactcactcctgaatgttctgggataagaattcactgccagctagaggtgcaccactaaggggttggctgaaaagtgttggccaatcgggggtgttgttgatccaaatatccctggccagcaccctaagccatcagttgccagagtctggctattcttgccactcgatctttgtggcaagacttgtcctccattgtgttggggaaggtctattcttgttcttgaggaacttggttggactgtctatttatagacccttcctgatttgtccactagtctcccttagagaggatctgtaatgagatcctgacctcttctgacaataatttcattgaactgccttatcaagtcactagcttctttgttaggtgatctaactccacctggtgagatcaaaagatgtactctttgttgggattttatgccctaaataaaacccgttacaatctaatctgatttgtcaacaataaaaagattagaaatcattagaaatgatttatgcttacatgttgtattcatgtttatggtttaatttttatatgtatatatatacacaaaatctgttagatccagaacatacagtcatacacaattacagtattgtcaacacagtggaatgtgattgtgaatatatgattcaaaagactaagtccctatttcatcagtgttttggattaaca

SEQ ID NO: 128664 - DNA, 1041 bp, Cannabis sativa
aaaaaaaaaaaaaaaaaggactttagaggcagttttttggggcatttagcgtcagttttgagcaaaaatgagactatcactgttcaaggcgatgttgtaggtgggtctatatcaatcgatggcataaggggtacctatgccattggttattataaaataactggcgacacaggggaggccaagtggaattaattgactatatgttgttgattttttgctaataactgatgtcgtagtccgttatgccgtcggttatctattttgagccacagcatcagaaacttcctttttcttcctatcaaaaagtttagacgcctttgcaatgaacctgcaaattcataaataaagttaacgaatatttattttgtctaactaatgaaataacattttttaagtactagcatacccagcagccctgacacgtccagaatgctctggtgttccgagagcctacgttagaatgtcatcttggccatggaccttaacttgtccatgactaacttgctcttccagttgagcctagtgcatatatggatatggatatggattgccaccctcaatatcatctacccccacttttctaatagatatgaataatcagttaaatgtttgccataccaataccaagtagtataacttctattgaaacctcctaaatacacatgatttttaatcatcgtaattttttattttgatctattacagcaatctacacatggataatgaatacattcgggattttaaaattctttagagtaaactttataaatgcatcgaatcctacttgaaattccagtgtgtctctctcctcacgcatccatgatttatccataataaaaattttaacaaaaaaaatctcagtatttagtaactagttataactagttactagttacataatgtaactaactagtttcttacaagtttttaatatttatattttgctctaattcttgttttagtttagatcatgttattatattattcatttcaaatattgacatgataactagtaactaattgtaaatagttactagttat

SEQ ID NO: 128665 - DNA, 936 bp, Cannabis sativa
gacagagactcgtttagaattttatataatcttttaataatattttatagtttatggtttatatttatacttttttagtatataattatcattttacaaatttttaagttgtgtttaaaataataaataatgtgtaatattttaatttttatctattttaataattttcatacatttaaatttttaatataaactataattttacattaggagattctccaccttgtttttggctcattagggaatttttcgctccgtctccaaagaaaaataaatagggatggaaattaaaattcttaatgagaatgaggacgcgagagcactccacactaattcggtgcctgtgtatgtggatcccgacttgcacaacaataaatacaatttttcttattttaaacatgttctataaaaaaaaataaaatgtagtgttaaatctgtatggcaatattatattgacacttgacattataactattttttcgatatttagttttctttttaacaaaatatatagtttgtactttcttgacaaaaaatatatttaggactacgattagaattttttccacaatatccaattgttttattactatttttttgtatggagttgatttattattattggtttttaaatttcttacaaataaaataaattagtacaagaatacgaatccatggctagacaagagccaagttttgggtcaactatgtatgttgccgcaagttttgtgctatcatatagtggataaatgataaagactacttgactgtaacagtggaacaataataagaagatgaaaaaaaatcccaaagtgatttgtgggttcgcaatatttaattcaattcaactaaaccgattcaattcaatttaattataattagattgaattagatgctaaaagttaaattctaattagattgaatcgattattaaat

SEQ ID NO: 128666 - DNA, 1028 bp, Cannabis sativa
tagggcataaaatcccaacacatactggctagccttaccaccagcattatcggctgtccataatgtatttcatatttcaatgttgaggaaatatgtttaagaccagactcatgccttgagttacgaggcccttgaactagagtcagacttgtcctacgaagaacaggtagttcagattcttgatagaaaggaaaaggttttatggaacaagaccatagccctagtcaaagtgctcttgaggaagaacaaggtagaggaagccacctcgaagttagagtctcacacagctattcaggttagatttcgaggacgaaacccttttaacgggagataattgtattgactgcactttagaataaagattagtaaaggcaattcacattaattattggtatttttatagttgattaaagctcaaattgatacatttttaagcctttatttgtgcacatataattaatataaattaaatattccttatttttaataataaatttattttaattggaaaattttaatttattttgattttgtgtcatttttcaaatttttgagcatgctgtaaaatgacgcccaattgaaagttgaaatggaatgttcatcaagaatctatagtataattgatatgttaagatatatatgttgacgtggctgcttttccaaaaaaaaaaaataataattataataataactaaaagagaggaaggccaatctctacatgaggctcaaatcaattcaaagagcccaacaccaattgtttcatttggactcattgatttatattaggggaatttttactaatatactaaattcacaaattaatattacagttaccaaataaaatataaataccttatatatgtatatttctaccgagatttacgaaaaaaattcctaccaaaccagaaaaaataagatcaaccccgtgcatatcgtattgccgaaccatatataactatttgagaacgaaagaaatcaaaaagaaaccttcgactattcaaacctccacaacttgtgccattgaagct

SEQ ID NO: 128667 - DNA, 1746 bp, Cannabis sativa
agagaatgaaatcaattagtaaagtattaaagattacaaaagcaattgacttaaataaatgtagactccctctagaaatgagacttaaaaaaatcttctctcgaagacccatgcttgttcaaacaagttcttcatccgattctacgaacagttaagaacaaaacaaacactaaaacctacctgaacaccctaagttttcacaaaataaactctctcctcagaaagatgaaaatatgaaaaataaagctagaagatgtgagaatcttttgattgctctctaagtcctatttatagaatatatcaaccttaaagacagtcacaaaaatgattacccagctgtacaaaactttcttaaaaattcttgatttgtagtatcagaatcggactctgcagcagtaaatgaggaccgtaaaggaaacttttcaaattggaccaagatcacgaatttagacttcaaacctatcatatacagtttatttgatatgctttaatcaaggcaaaactgaaatcatcaattagaaaaagaaaaagttaaattttctaaaaatatgcaactttccataaagataatttcttctcttgcaagaaaagattcccaaaaagatacatcctgttgataaaagaacttttcataaaagaaaaagagcaattagatgtacaaaattaacacaataaaattaatttaattggtcaataaaaatacacattaattaaaaaatatttttcaactaatttgccaaaaaaaaagacttaacaaatactattatttaagtcgttattataatattattgcatcatattttgttggctatttaggatatttgtgtcttgaactatgacttatagattattgtgtctttgaacttttcagcccgttacaaatggtccctaaactattcatagtgttgtaaattaatcattttgtcaagttttatcacaggtgacaaacaaaataatgatatggttgcttagtcagttgtcacgtcaacgttatgtgtaaaatttaaaataaaaaaattaaaatttgtatttttaaaatttatttactaaaaatcaattaataatcaagaaaattacttaaaactaaattaaaaagataaatattttttttttaatttattacacatgtgacgttgatatagcactgatgtaacaattgactaagtaactatgttattattttgcttcccatatgtgataaaacttgatagaatgattaatttataataatactgtaaatagttcaaggatatttttaatatgtttaaaagtttagggatataataatacataagtcataattcaaagtaaaaattctaaatagtctattttatttgtactgaaaattatatggttattttgtatttatttattaatatatattttacattagttttgggtgatcttattagttattttaaataatgacagttattgaagttagtagttattattattatctaatgttttttttttagagttattagttattgaagttattggattatggttactgatcgatgcttgaaagtaatatatttcacatagataagtttttttttccacactctttattgtgaggttgttattatatattatttataaataatttctatgtaattttatctactaatatctattttatataaagtctgtctatataatacaatttttagtttttgagaaattcatgggtgactttttatttatattaaaaataagatggtttattattaaaaataaaat

SEQ ID NO: 128668 - DNA, 1262 bp, Cannabis sativa
attgcaatttatcataaacacttaaaatcctagactattaagtaaatagtaatcctaagatgacggtagattaaagtaaaacctaatttagtggtcattttaacaagattaaaacaataatcatgacattgaacatagaagaatagaaataatttgatataatagaaactagaaattaacattcaataatgaaattaaaaagtcatgtctcatattttgaaataacccttaactgaaaggaaactactcagaactagatattataatgaaaattataataaatagtaagagtttaaggagaaaaaagaactatgatgaagaacacttcaaagccatgatctccgtctcttccttgctctctctttaagtttctatctcaatttagtagctccagggctctaaaattcgtagcctaaaagtcctatttatagtgcttgaaaatatctcactaaaaaaagataactcccttttaaataaaaaagataaaaattcaaaatgacccaggaatcgcccctcgctgcgaccacgggtttgctcgccgtggcgagccaacctgtaactgtagcgacagggcctcacaccatatcttttattttttttttctttttgctcgctatggtgagccttcacccttcgctgcagcgacaactcacgggtttcggctcttcatggacttctaaaactctagaaaaatgttgttttggtgcgtcattccatccactaacatcacctaacattgaaaacaccaaatccattactttttactcataaaaattagttttctttcaaaaaccaaattatttcaaaaataatgacaaatactaaaattactaacaacatcctctaactatggagaaatcaataactttagagcctaaaaggctcttatcaaattctctcacacttagaatttgctagtcgcttagaaaaacactaactaagttaaacacaagtaaatgactcaacatagaaaagaaaatcaaataatggcttcgtcaagagtaaatttaacctcaaaaattggtcatacagataatactataaagatttttaactccacactctttagaatttcaacataggataataacttttcaagctcaatttttgtgtgtgtgttaaattcaattatctcattactaatatccaaatcaattcatgcatgcaaccatcaatactcatatctgaatatatgtgtattttaacgaaattctactcaataagcttaattatcaaactcattctccactaatgtaatcaca

SEQ ID NO: 128669 - DNA, 1440 bp, Cannabis sativa
  modified_base (489)..(493): a, c, t, g, unknown or other
  modified_base (727)..(729): a, c, t, g, unknown or other
tatgtgagactcacgtgccttctccgggaggcatgtctaaggctgatccctttggctaaagagacttagctgaattatctaaacgttaaatcccttcaatctacatgtctcaatccagttggtccacgtattttagacaaaatcaggggcaacaacatcaataaaattcttgatgataaaaaaatacaaaaataagaataaaaaaattgtaatctttaaagataaaagcaactaagaacaactctgaacaaactacacaacaaccaaaacaattagaaaaaagaaagaaacagagaacatgattaaatataataaccataatcaaaatataattattctaaaaatataacaagtacataataagcgtctgtaaaataaatagtaaattcatacagaaaaagactctatacataaaataacataacaacaacataaaaaaaactagggtaaatagcggcataagtacctaaagttttatgtttgtaagcnnnnnaaactcaatgtttatttttagcagtataagtacccaatatttgtaaaactgtaatttttctttaattttatcagtacagactctgttattgtcttaaacaaggcacatataaggcctaaattattgattattgggtctagataaaaatatgtagtatcagttacttccaaacgttcttttaataaatttaaaacagagtctgtgctgacaaaactagaagaaaattacagtttnnnaaacattgggtacttatgccgcttacacacataaaactttgggtacttatgccgctatttaccccataaacttggaattacaataaaatatgacatacaaagtaacgaaaacatagttacattgtctaatgatctactttcttctcactatcatcgcattcatcatcactgcccttctcatctttttcttttgactcaaaatcatcattatcatctgcatctttttgttctccatcactaccctcctcctcttcatcaccactaccttcctctaaatcttcatctttatcatcctactcttctttattatcatctgcttcttcattatcatctgcttctttattaccgtctgattcaatatgttcttcattattactaccaccatcatcattggaagagtcgctacctttgtcctgtaaaaattttggaaacaaaagcatatataagtaactaaaaacaaacttaaaaacaactatagaaaatccatcataccttagcaacaaaatcaacaagcacggatgaaaactgtgtctgcattgtagccattgggtagcaaaataaataaactgggcaacaatgaactctttcaactcaaccaaatcagatgatatattctgttgggcaggggcggacccacattgtagcgagggggggcagtcgccccccctgaaaaaaaaatcgagaaaaaaatgtatatgtattttaattagt

SEQ ID NO: 128670 - DNA, 680 bp, Cannabis sativa
aatttgcatgcataaaaataattgtgcctaggtaaaaaatacgtaccttactacattccctaaaattttattttgtaataactgccttaccatgtgaggaattacttattgccagtcaaaatagacaacactttaataaatatgaataaattattgtttctatcaatctagaaaagaagaaaaaattatgcattaaaagttcaatttaatttatagataacacatattataacgtggtcctagtggaagtcgtatctccacgactttacgactttattcatattgtttctaaccattttatatttcttttcccatctatatatataaagaagaagtatgaggcggtgatgtttcactctaaaatctctctaatgagtattatttgttctctccttaattttctcttttgtttaattttttattagtttcataaattttaattaatataaatcattttttattttatttattttattttatttgaaaaaaatgataactctaaatcaatgatattttgtgtacaaaattcgtagtattaaacattctataatcaaaaatatttttccctcttccatacatatatatactagcaaaaaattaagtgtgaggcacgtatactaaattttataataggtattttctactttatttaaaaatgatattaaaaattaaagaaaaaa

SEQ ID NO: 128671 - DNA, 541 bp, Cannabis sativa
aagtatttttactgttaatttgaccccaaatataaacatacatataataaaaacgaatggggaagacatgtacttatttttaatgtaagtctttatatatattattgctcatctagaattagtctacttaattaattataatacatatataaataatttgtgtccatacttgctgtctaatgacttttgtgttgtgtaacgcaagttgctttcctcctcatgttgcatataaaaaattgaaattatattgcaaaaaaatataacttgcaataaatggatacttaagaattggagagtttattgagtaccattaattagttcatttaaaattcgttaatttgcattgatcccatgtgaatacattgcaaaagacttaaatacattgaattttaaatttagctatataaatttattagaaaattaagttgaaaattaattttaatagattttgaaccaacttaaattaagtaattttcataatatttattgaaaattcatactaagaaggaaaataattttatttatttttagatttatctaa

SEQ ID NO: 128672 - DNA, 1120 bp, Cannabis sativa
  modified_base (998)..(1000): a, c, t, g, unknown or other
aattttgataataacctatataatcagtttttagttttatactctttgataataacaaagattatttcaatttttaacaccaccaccttaggaatggaggctacgagaacacttcttcgaccatcctcacctactcggctgtaatttgatattttattttattttataaaatattaattttaatatattaattgaaaaggttcaaaattacttagaagtacaaagtggattttacaataaatatgcaaaaaagtgattgataattcacattaaataatagttattgttacaaaaataatgacacttaaagtgaacttcgcgacaaaaaattaaaaaactaggtgtgataacaattgaaacatacggcacctaaaaaaaaaaacaattgaaacatacggttttcaccacaaatttctcttacttttatatattttttcaagaatagttatccaccaccataataaaacaaatatgaatatttactattaattttatgtatatataattaagaaataaatatttattactataactattaggttattacatcttgtttttaagattaatttatttatacttacattaagtttttttatctcgtgttatttttaaatttatatctttcatatcgtcatattaatttgaaccatcatatcctggttgtaccaaaattcctgcagtgtcaaaatgctcaatctatacttaccataatagtaagactactcctataagaggaaattacacttactataagattttaaaagttcttatgttaaatataacacttttaagtttaaccaatttatatggtagttttttatttttaagtctttttatggtatttgatatgccatatatatgaaaattaggtttttgaatcccataattaatgtttttatttgtttaggtagttttatttgtcactgatgccagaaaagtcgtcaaaatttactgtcagtgtcgaaaaaaatcaccggagtagctgtcggtgccggaannntcgtcggagttgctgccgacgctaaaaaattcgttggaattaacattgtcgctgaaaaaaccactgaaaaaattgccaagaaactggtttcttgatgaaaaaaccggtttcttgatgaag

SEQ ID NO: 128673 - DNA, 769 bp, Cannabis sativa
ataattaaatgacacatgagatggctgaagttataagaaccaaaagtagtttgtagagacattaaatagtttctggaaaaatatagttgatcagggaaaattaaatgatttgtcatgattaatgagatgtaaaagcgtaatggaaaggaatttgggattgaattaaggtgaagattaaccctagtatggtcactagagagaaaaatacaaatcacttatttaacttaatacaaatcacttatttaacttaatttattaacaaaaatgtacttaattaaaaatcaactagacatcatgaactaaaaaatattaatataagtatttttttaatgaaaaactaaataaaaactgataaataattaaattgtaacccaattttaatataaaaattaattgcgcatcaaattattgcgccaataaaaaataaacttaaaaataacacaaaatatgattttttaaaattttattataaaaatatggtaaatttaggtttgaccactttgtatggcatattttaatttttagacttttttacggtatttactataccatacatatgtaaacttattttcaaactccatatttaatatttagatttaccatctctttctttcctgtaccctacctccctctcgctcttgatttgtgcggcacccttgtccaggctctgatgagccatttttggtcggcgatggtggagcaaaaaatcaacaagaaagtcgagcttgtctctcctttgccgaagaaagatgccggaggtgataagaaa

SEQ ID NO: 128674 - DNA, 960 bp, Cannabis sativa
tgctaaatgggagttttcttttttgtattttcatatttaataaatgctattttggtaattcaattagtataagcccattaacattctcatttttattaaagttatagataagccagttattgtgaagctttaatgacactataatagttttaaggtaaaatttctgtcaaagtttccaaaagtttattttaatgtagataagttttaaatttaaaaaatagcggcaatggccccaatattgagattcttgtaagtccgttgattttcattttaataaatctgttagttgttccaaaaatgtaacgcattgatattaaattgcggtagtctttaaaaagttaacattaatgtagataagttttcaacttaaaaattatagtaagtacctaactgaactgctatgtttgttgctctcaaaaatactgtattaataatttattggtccaaatcataattttaatttaaaataatttaaaaaaataaaaaaaataaatgattaaataactttcaaaactaattaattaatttttttttttatcttttctattatttttcttttttcttcttgttcactccctgcccaacctgtccaatcctaatctgctctactaaaactctccaatttctattagcaagaggggtcactacaaaaattgtctaagtaaactttgaactagaaaaagttgaggtcaaagaatcagtcaccaaaattcaccacccaccactactcatatctctcactctctaccacatactgtgtttctagtgtactttgtcatcactcacacactttttaggaaaacatcccaggaggtcacccctaaaattacctttggtcaaacacgcttaattgtgtagttttttcatgatgggctactagaaaacaagatacaccttgttgatacaagtagtaccaatcaattcatttaagctcttttcaactgtatagtctcataccta

SEQ ID NO: 128675 - DNA, 610 bp, Cannabis sativa
gttatactacatttatgataaatatgtgaggtttacatagatcataagaacctcaagtatttcttcacttagaaagatttaaatatgaagtagagacggtggctggaattggttaaggattatgatgatgaaattttgtattaccccgagaaagccaatgtagtggcaaacccttggagcaagaaaaggtcttgggcaggctctttatactgtgatgatagctcttccgttagtcacagaaatgtttaaggctgaaattgaatttgtgattgggaaatcacaccaaccgatacatcaaattagatttgttgggaaaggatcagaaaaatgtggtagattacgtgtctaaatgtctaattcgttagcaaatcagagatgaacaactggggccggtagggttactgtaacatttagcccttcttgagtggaagtgggaggatattgcaatggacttcgtagttggattgcttagaaccacgagaatgtatgactcggcatgagtcacagtggatcgttttagtttcaaagttatatatattgtgttgtgctttggtggaatctgatatttttaatttatcttattaatttgaactgactttgactttgaaac

SEQ ID NO: 128676 - DNA, 590 bp, Cannabis sativa
atttgcatccgatccgatccaatttttattggatatccgattttattggatcggttgggattggatcggtcggttggaattggattggatgactttctgcacactcctatcttatctcatataagattcatgcctcttatatggcatttatattgcaaattgccaatttgagatgtgtgtgcatgcaggagctatatatatatatttggatgctttggctcaaatataagattttcaaaaatttgtcattacaaaattcaagcgtaatttttactatatgatttataatatttaagtgtattttcttctttgattgaattgtactaataatatagcatagacacgcttttacctgttctttaaaatttcttattagagaaaaattgtttcatataattattgaatgtcaactccatatccttaagagaagacctaacatgttaatgtgctaataatgatattcgataacctattggctttatgataatattagagtcgatgttcaactctttttttttttttaggataaaaacttgttattataaattaaaaagataagtcatttacaataacagagtttagagatggag

SEQ ID NO: 128677 - DNA, 1015 bp, Cannabis sativa
caagccaattcctcacgttgttgtctccaagttgtttgtcctcggcatcattcagcagcgcattagccgaaagcaacataatcttcaactttttgagcagcttttgattgagtttgtccccctgaaagaagcaaaggacttctttggaagcaatcctatcaaaaaggacattgatgaaaccagaaagaagagctcctccaaccattaagtcagccatgattcctctttctgaagaaaaatacaagaaatgaatatgcagagatgattaaggaaggaagttgtttgtgtaggaaattacagatttaccctacacaactcacacacacacaagttatttcacaaggtcaattttgacctttcttgctctgaatttcaatccacacacagttgacacgtattagattttatatgtttattttattgttcatttactttactaatctgttctttgtgtttgaacagccttcgagaaacacacaaagaagcttagggcaaaagtttatcatcaaactttagggataatcagagagaatcgcctctgatgttgagcaaatcccagaagacaataatgcaaagaatgaaacaatacacgaatgcaaagattagggtgagagagataacaaacacgggaattttacaaggttcacccctgaaattggggctacgtccttggtgagctgcctcagagaaagatcagccacaatccactatcaagattgaagttacatcaagtttctgagctccaagacacagtaatcgtctggtagctctcagatcttcacaaatcaggtatgtacagcctctcactcaagctttctctttcttttctttcactcaggatcgaacagatcctctctcttctctcttcttctctaattcactcttttctttctggttacacatgagagaaactctctctgtctaggtctaaggttctcatctttattttctctggagatctgagaagagatgttgaagctgtgtctttctgttttgttcttctatttatataagt

SEQ ID NO: 128678 - DNA, 551 bp, Cannabis sativa
ataagatgacacgtaaacaattattttttgtctgtacatacagtgatacagatggatttttcaacctccacccaagcaaatttccaaacttaatataagtgatatactattttgaattatcacacaaaatattaaaatttcctttatatattattttttaaaaaataaataaaactttagtaatagtaggagttgtcactgggtcggaaagttaccgaaatttactatcggtattggaaaagccaccagagtagttgccgatgtcaaaaaagttaatagagttactgtcgacactgaaaaagtcgttagaattagtatttttgccagaaaaatcactgaaaaaaaaatcagtttcttggtaatttttcagcgacaatgacaattttgacgacttttctggagtttgctataggtaccagaaaattcgctggagtagctgtcggtgtcgaaaaagtcgtcggagttgctgctagcactggaaaagatatcggaatcgatgttgtagccgataaaataaacaagaaactggtacttttaggtttgatcaattt

SEQ ID NO: 128679 - DNA, 2011 bp, Cannabis sativa
ttttattaatttgaaaaattaagacttatagtgacacgccaagcgcgagtgggtaaatgtaccctgacacacttggcgcgtcactatatcaataccctacttttttacagctgtaatttaaaataaataaataaacaaaaaagttatctgaccccaactaaaatacaatttgaaaaatacaaataaaaaaaataatttatataattatcacctctctctctctttcttcttaaacgatcagaccacataacaaaaacccttaacttttctcttcttttatctcgcctctctctctcctgtagctgccgcagaactcctagccacccccggcgacctcgcccacctatgcttcttttctctttcttcctctctggcggcctagacatatggagcgcctcccctctctctctgcccagatgcgcgacctgcgcttcgcctatatctctgcccagatgcacgggcaaatatcagtaatggtggtcgaatctgaccacaaaatcaagctcgacgcttgtaaaaataaaggtataacttttggatcttctctctctcaatacagctattttcttttctctattttagcaaacaaataaaaatctcatagtcagtcataatcgtaaatgccttgttcatgccgcccattttcccataccttaattctttttaaattatttcaacataataaaaaattaaagccaaccaacaaatttctctttcatttattttccttgggaatggtcataatcttgatctgtaatactttcccggtcttgatttcatcttcttgtcttaaaaaccaatgttcatagtctttgatcctaattaaaaatccatgtatatatatatatatattaattcacacacacatatatcaatatcatatcatataaatatttatagagaaaaacagagagagagagatggaaaactccatgggagtagggttcatggcagtatttgcagtgacaggaagtgttgttcttctcgctcatcaaatccacattgaattcgaattgggtcttcccaaaagaagatttggaatttgtatgtgtattttttttttaatattttgaaaaatgccctttttctttttgtacctaaaattgttttttttttgtttgaatttggtttggatgaaaaaaaaaatggtctctggtggtaatgtatctggaactcaaaaaccaagctgccgtcgtcctaattctggtttctaaactctctctatatataatttatatctatctctgtctgtagtttttgtagttcaattatagtaacattgtgaattaaaggctctggtaatgtggtgtctcgtgttttgattttagtttaattaaattaaaggctaaaagccgattagtcctgctatattgtaagtatatggtgattgtgaattaattagggacttgttttttcggataagcagcccacccatgctattatcccaaaccagcatgatatatatggtaaatcttacattggttttcattaacactaatgatgtgtgcacccataagggatcctacttttcggatgcttgcacacattaattttttatttattaatctgtgagtaactcatattttttctttgcatggtgatagtgatggtggcgatttaaggtttttgatagttcgtggttctggccgggattgaagaggcaatgtttggatttgataattttatttgtttttagttgttgtattgttcatgccaatttctgagtttgtagtcatattttttttttttactgttattgtaatttatttatgtattttatttaaattatacttgtaacttttttgaataacttattctatattaatgctattaattataatataattatttttgtgtatttttttgttattaatttagatgtatttatgttacttaaataaaatctgaatgtatttatattatttgcaatttaaattaataattatactcatttaaattcttaatataaatttgtattaaattaaattaaatattatttttttttagaaaa

SEQ ID NO: 128680 - DNA, 764 bp, Cannabis sativa
caggccctagcctgacactcgccctgtggcacctcttacactttggacattctgggtagatccaacaattctcatttccaccatgatggaaaccttcattaccctgaaacattttattcgatcctgtagctggtgaatcattaggtcgtttcttacgatcacctgggtcacttcctctgcccgaaccaacagcagattgtttccacaagtctctccttgcactatttcttttttgtatctagtcttcggcaccctcggcaacaagggccaactccactatctgtgcataagaccgaacaaacccaggttgtttagcagcgacaatcacgtctcgtgcaatgtgctcatccaacccctaaataaatttagcctttttagtggcctcagtagccacttcatctaaagcaaatttttccagttgatcgaatttggtggcatactctgtcaccgtcatactgccctgagtcagttgtataaactcttccacttttgctgctcgaatagattcattataatatttctcgtaaaacagtgcctaaaaagcttcccaggtcatgttattcaagtcatgaccctgtgaaacaatttcccaccagatgcggacatcttcacgcaacatgtaaatatcacatctgacccgatcagtattctctacccgcatgaaatcaaaaaattttgttatcatctcatccattgttcggccttgagtggatcagcaccaccctcaaacactggcgggttttgcttccggaaccgctcataca

SEQ ID NO: 128681 - DNA, 1224 bp, Cannabis sativa
tattttttatttttaaaattgaaatgcaaaagtagttatagaacatatttttattttttaaaataaaaattttacttttatttttgtgattaaaaatttaaaaacaaaaatattaccaaatctaattaagttataataataataaaaaaaaaatgaagtgctatatctctttttaatttggagacattagtgaaagggattttaaacatttttaaagtgtaaatctagccacgtacattattaaataacttttagtattaacacccaatggctaacccaaaaagtcggcattgaaacttaaaaatatattatttttacagagaaatctaaatgcgaaaatatattttaaagtaaattataagaacacatataacttcttctttttttttaaaaaaaaaaaaaaagaaaatacaaaatcaaataggatacgttgtccctacttaattatcaacatctaataaattacattgcaccctctcatcacacagcgaaaaatgctaatagatatgttataattccaaacactaatatattgttattagtaaaaattaattttaaatttatataatttaattaaataaataatataaaaaattactaattaaatatcatcacgcgctatatgatattaggtaccataaagtacttaacaatactcacaacaaaaaatactaaaagacaagttagggtgccaagcaccactcccctcaagttaactccaatataggtgttgctcatatagttgacagaaaaatatggattatattgtattaagtggcaaaaaagaaaagaaagaggtgtgcatttattatttttcttttaaaattcaaacatctaaatctaaataataactttttaagatgtgatattggagcttgaatattaaaatgtttagactattttttcttttctataattaatatatttttttattatataatattattataaagatatataatgttaataaatttattaattttttttttttttttatgcctaatgtgccttttagttttgtaaggcaatatgtcatagttttgtaaatggtttattttttgattttataaggttaatgtggctagtttttttgtatggccaatgtgactagttttcttttgtacgggcaatgtggctagttttttggttttgtaagagtagtatggctagttttggttttgtaaagtgtaaagaccgcctatgaaagaatactttgtattatta

SEQ ID NO: 128682 - DNA, 1718 bp, Cannabis sativa
  modified_base (46)..(65): a, c, t, g, unknown or other
  modified_base (1653)..(1685): a, c, t, g, unknown or other
ttaaatgttatttttgatctatatgaataagtaaatctgattatannnnnnnnnnnnnnnnnnnnggcataaaacccaacaaaggcacctatcgcaagtgggcagaacggttttgatacattcggttctacaaaatattccaaattatttcatgtctactgctttaatccctaaggctctttgtgatgagttggatcgcttggttgcaagattttggtggaatgggaatgttgaaaagaagcagtactgtgcgcttaaaacctggccagatctttgccagcctaagaggtgcggaggtatgggattcaggcgctttgcggatatgaatcggactctcattgcaaaactcttttggatgatgctaaaagacaaaggaaaggactgggttaaaatgtttaaagataagtattgtcatatctgtccgatttggactgtggaaaaaaaaaagggactaattcaagatgctggaaaagtcttttggaggtgcgaaatatttgtgtggaggaagcgggcattatgattgcggatggtaattgtgaaatttgggacagaccttggatcccaggtaggaaggcggaggaaatcaagctgaattttaagttcaagaagaatcagcccctttggcaagtcaaggatctgtttgtggagggctctcgaatgtggaatgagcaacttgtccgtgatcaatggaggaattgctaatgatattctcaatatcaagcctttaacagggggcacagacattgtgttttggaatgctgcaaagtcgggcaactttttctatcaaaagtgcttactgggctagccaacaacacagattcaatacgccaaataagctatgggaaaagtggtggaagctgcgcctgcatcctcgtctaaagtttatggggtagaaaattctatctgatcttctccccacatctgtcagattgggtttaaagtaggttgagcacaagaactgtttattttgcaatttggaagcagaatctactttccatttgttttgtcaatgttctgtgaccaggggtatatggttcagaagttcttgggggatttgcattgatcggcttggctggaattgtctatcgcattttggtggatggtggatgagccttaatgatgaggcacttatcctgtttacggcttgcgtatgtgacactctttggaagtggcgaaatgacatgatatttaagaatgttggctgtgatgtggagcgtgtcttttgggattgcatggcgagatttcaggagttttcttctagccattactgggaagattgccaagagactcgagttaccttgaaggacatcacaccaaactccaagtgggatgactactggtaatgaaaaatcgttgcctctgtgtcgggtgttgatgcattggtgggggtagtttgtttgtatgatgagatcctctcaaatccttggattgttgttgacttctccaaggtgtcgtgtgtgctggaaggggaattgctgggaattcagttagctttgaaggaggcaacagaacgtcgagtgcgtaaggtcaagatagaattggattccaaggtggcggttttggcttttgagtctggttttcttccttatggttggggtacctatcttttgttttctctttgtcttgaactgtgtgttggaaattattttaccnnnnnnnnnnnnnnnnnnnnnnnnnnnnnnnnnaacaccctaaatatgaacttcttaaacgattat

SEQ ID NO: 128683 - DNA, 1631 bp, Cannabis sativa
ttttctaattctaaaaaaaccatatttttctctaaataagggttcaatttttttttttttcctattactaaatttcagcgttgaccctacacttatgtggcaagtacctttcctcaatcatttttatttaaaatgggtcgcagtgtatcatatttgtatataaattatgtatgtacatattatttttgtaatattttatatacatcatgcacaataagtgtgtgtaatttgagtttgtaaccttttatgttttaatgtagaatatatatataaataaaataattagtatttttgtctcttgaactttcgatactacctgatcttacctcttaaaatataggacttgttaaaaattctccttaatatatagcagttatataattatggcttttctgttaggttctgtttttttaccgttaaaaattaatatttttttccataaaaaattaatatttttactttctgaattttgaccaatacaaaatttgccctattttattaaaaaaaattaattttaaaaaattataatattctattagtcctgaaaaaattattaaaacgtgataaaaatattaaactaattagaaaaataattatgtttactaaaaaaacataaattattcttaaaaaaatattttcaaattttattttatttataaaaacatataccaatacaaaatttaccctattttgttaaaaaaattaattttaaaaaattataatattctattagtcctaaaaaaaattattaaaccctgataaaaatattaaactaattaaaaaaataattatgtttactaaaaaaatataaattattctgatattttcaaattttattttatttataaagacgtattgtaaataataaaatcaaaattattgaaaattcaactaagatttgttttatttatgtttataaattcatatcttaaaaataaagaaaaaataattaaaaattcaataaaaataaattatttttgtaaaaaacaaaattaaactaaaaaaatattatgtttacttaaacaaatttaattttttagagaaataaaaatagattcaaaattatttacgtaaggtttagttattacaaaaattaatttttttaatatttttttatttttaaataagaaaataaatagtttttttaaatcgcttaatagtaagaacaaggttttttttatactttaaaacagtttttttttttttttgtttttttttggaattctacatagaaattcttattgtaactagctctgcaatctaaattgcaacaaaaaatcgtacaaaagctcctattgcaactagcgctacaaccactttagaaactaaaaccgtaaatttgaaaaaaaaaaaaattaaaaaaacattatatggggtaattcccctaagaacaaatttttatatgtaaaaatttagtagattcttaacgagaagtatattttagggtttaaaattagtattattaaaaaggctaattagtaatttttccctccgaactttgacatgtactaaatcgtgccctctaaattttttttggcattgtttaagtactaaaccatgctccccagactttgatatctaccaaatcctgcccctcaaactttgatatatactaaatcatgtcccttgaa

SEQ ID NO: 128684 - DNA, 659 bp, Cannabis sativa
gtacgtccatcttcagattttgttaatttgaatttccatgttgctccaccatcatttggaacttttaggaacactgttggattagttgaagtgtctatattaggaccaaacttcaacataaactctcttggaatttactgcagaaaaaatgtcaaaatatgtagttgtagtattagtaaaagtagtagttaaaaagtatggaaatttaaatattgtgtgtgagcttgattgagaagagatcagtagagtttacttacaaacttatttttgaagaaaagctttttagggttgctgagtttcttgaaaaattgaggagcaacatgagaaatagtactggtagacattgttgttttcctttcttttggtctgaaacaaagaactctattttgagttgaagctttggttaccttaccagttaccagttaccacttaccacttaccattctctctcagaatgtctaaaggcaatgtatgagaggaaaagaaagggataggaaggaaaggcaaaggcaaaggatctcgccagcttctaacatcacactttcttctttctgttctttttgtcctataaaactcattgggaaatttgaattattatgcattttttaatacaaaattggtttggagaacacttagtgtaggtaatttttaaaatagga

SEQ ID NO: 128685 - DNA, 745 bp, Cannabis sativa
ggctaggaattttactagcaaattatccaagagaacttaaaaatcaagaatgaggtttttatgttttgaaatacatgactaacatcgtcgcacgtacaaacctcaatcattatacaccctcccgaaagattgccctaactcaaagaattatttaagtaaaatataagggggaataacgtctgggagggtgactaagaccaagacaagtgtttggtgagaaaggacagcgcggctgatgagggcatgaaacgtacatgagttgcatatacatgcctgggaaagatgcatgttagaaaagggagtagagaaaatctctaaatttatctaattttgtgaactcgttttgctgcttgtacaaaatgaacaatatctatagaaaaaatatgcactgtaaaggttgggataccacatgcgtgagggaaatttgaatagccctccacactaaggaagcaattctttgccaatacatttagggttgtatataaatgtttgtaaattgtccaacaacccgcccaaatcaaatcgagataacccgatttaaaatgcaaatcgaaaaatccgatgaaaatataacctgcccaacctaaatgtaaccgaaaaactcaacgaaaatataacctgctcaatctttatattgggcagattgaaaataatacctgttgaccgaggttttcggcaaccactataataataataatttagagagctataagaaattaagagagagatatttttacgtggttgg

SEQ ID NO: 128686 - DNA, 575 bp, Cannabis sativa
tttgtgatgctctaaataaagtatagattttggttttaatgattatgaacaagtttaatgtatgtttggatagttcataatctatgtgaatgtttaacaaaatttacatcccaaaaaagtaagaaagataaatttttaaatgagtcaatctgtgttttttttctaataattttgaataaattaatgttattattaagttttatagattggagattgttcgatatgacaaatttgaagaaggaagatatacttttgggatagatcgatcaacaaatttgaataatattttaattgtacttttatttagaatatttaaatttactaaataaatgtaaatgaatttataaggtattttttttaaagttaaatttatgaagtactgattaatgattttaataaaaggctcaattttaattttttacccaaggcccacaaattgattaagtccgccctggttctatcagaagaaaatcactcaacaataaaaacattaaaaaatagggatttttttaagaatatactaaattaagtaactttttacaaaaatgacattttttttaaaatgaaaataaaat

SEQ ID NO: 128687 - DNA, 906 bp, Cannabis sativa
tcataaactttattccaaaatagaccacataaatttgacttatttatttgatgacccaacacacattttatatatacaattgtgaccccaattatttctaacactccgacgaaaaaaaattatgatagagtgtactctatccacagcatcacgcatctcctccctcatctattccatcttttttcgtcgaaagtatctcgttctccatataattcggtacttggcatatatccttaatgtaaaaaacaaaaaataaagattgtacctttctaattttcattatgaaattatacatttgtatatctttttttataaagagtatacgtatcatctaattaattaatccctcatactaaatcaatattaaaattctgatatatcgatttgtaagatagatttaattacatgatatatatcacacctaataaaataataaatattaaaatcttctatttatgacaaaatatttgtgtcaatctcaagtacctttaaagaaataaaaatatgaagagtgataataaagaacatttaatttcaattttttaacaagaaaatgtatgacgaagtagttttttatacagtgatatttgtcataattatactatcattttgttacattgtttaaaaattcaaaatatctaaaagaataatgtaatatttttgcatgtgtttttagatgcacaattaagtatataaaagaaatatataagaaatatatgtacaattaagttgagaaataaattaaaataagtgattaataataatactccttaagtatataaaagaaaggggtctttttaatattataccaaaaactgattttatttataaaaataccttcaacaaatttttttgcgcatataccgatgtgccacgtcagcctaagtaccgaaattcaaaattatt

SEQ ID NO: 128688 - DNA, 970 bp, Cannabis sativa
ttttttcaaacaatgaataatttattaaaaagaatcaggattgagtacatcaataaggaatgataaaaaaattatttatccaaattgatttatctcctacctttagtgcatgagttaatttttaagtacctatattgacgataaatatgaattaaggatggtttaaaaaaagattaaatattattttggatcagatcttttgttttgttaaatcacaaaatgcattctatattttccaaaatggtaaaaataaaactctgaactcaattttcaacaatttattttttaatatgaccaacttgaagacaatttttaacatgaatagatacaaaaatgtaattagttttgtcataacatttagataagattattattaagttttattttaacaaaaaatcaattcaggatcctatttgtacaattttagaaaatacaaggtccattttgttatttaacaaaatagaagatccgattgataacttttgcaaaacccaggatccaaaataatatttactcggaaaaaaattaaaagtaaactaacaatattatctaatagagaacttaagatcattatagaatgagtctcctagagaatgtagagactaaagttaaatagttagattcctccaaaatgaggagtcctaagctaagtaactaatctaatgccaccataacaatgtcagcttaaataattgtgaattgtcctaaaaaatagcataataatgataagatgaacatatctcaacttcaccacatttagaagaaactaatctatggagaaaatgcatgcaaagaaaaagcttacacataaagaataaacatcagttcagttgctttatagaactaaacaaaactatcagaaatatggttagggaaatttgattttatatacttaaaaaattaaaaaattttattattaaaccaaaaatctaaaccctaaaaaaattatgccttttttttcaaaacccca

SEQ ID NO: 128689 - DNA, 749 bp, Cannabis sativa
attagtatccaagaagtttccaactttcaaaatgaagtccacgaaaaggagagaatcatcaaaggtgtactggatgaaaatagtgcttttccaagagaaagttaagaaactaaagaaggagggcgagtcttggagcatcaaatatgataattagacactcatccttcagagtacccgtacttctagcaaaaaccataggccactatcgcgaatctctagaagcaattagcccaagaaccagctaatggtataaaagcttttattgctctggtggcaatgcagagggccagagagactgttgtgcaatcaatcagtgatgccattaatgcagaggctcacactaaaacacatcgcatttgatccgtggacatgtcttactcaatcttgcttcatcgcttgtggaagaaggattcttccatccatcggcacgttaagggagacagggaggaatacagccagaggattctcgccatcgatgatgagtcgtatctcaagaagtacttttataaagacgatagcaatgagtctaatgaagagtcaactggaaactttgagctggagcatttagcttaagtggtagtctttttggggcctgcccaacatctccatggcccgccccaagacaatccagcaaaccttctagctttgactcaggatgtacccccagtcaagcctcaagagcatcccatcgttctagccaaggaagtgttggaaattattttacaagaatcttagatctactcacaagt

SEQ ID NO: 128690 - DNA, 683 bp, Cannabis sativa
atgtaaagtttgccgtgtcccagtatttttgaaaacatttggtgaaaaaacagtatttttgtaagtttcccaaaaaaaatgagaaagcaaaggaaaggagaaaagagcccaaagaaaggcccagcccaaacctctacttcagcccagccacgcgggtcccacggaaccacatcagctcctaacgacggccttctattagtccaactcatcccagtcagcgcctatgtggctttgtcttttcccagccatgcgtgccacatggcgtcacctaattggatccattttcccagcttctccctcttctttctcttcaggccacgcgggcctcctgctttctcctatcttcacgcaagcccagcccatgccacctgaaatgaaagatcaattacaaagttacaacattacattttcaaaagaagtgtcaaagtcaatcacaaagacttttcaaacccaatatccacaacataataataagaataataataatattaacaacatattaactaagaagatcaaaactatgaggtttgttgttgttgttgttattattattatttattattattattattttgtaatctaaaattattagtattttgcattttagtccattttgagactctataaattggagcttactttatgaaatttggagtgtaatttttagtgtagataaactttag

SEQ ID NO: 128691 - DNA, 529 bp, Cannabis sativa
gttggaaggggctccattgtctatcatggttcgacccatcatcttgttggctatcttgacttccacgatcagcgagtcgctgtgcagaattcttatcttgacaacattttcatcattaaatgttatggtgggctcccctgcccgcaagatctttggcttcctttcttctacggccaggactacatcttcttgctcatgttttactgttcgggcatacctctcctgggctttgtctgaatctccagctatgtgtagacctccaataaggactcgcagatgtccgtctacttgtggtggtagcaagacttgttttttatcgcccctctgattctgatcgactatgacatacttcttcatgtgcggattatttttttcttatcagaaactcgatttcccgctttagattcttgcattcattggtgtcatcgccgtaatcaccatgaaaacgacaaaacttggtcatgtctctcttactgacatcttttttcatgcgtgcgggcttcttgtacggggctaatgactgagtagc

SEQ ID NO: 128692 - DNA, 702 bp, Cannabis sativa
tctagatcctcgtaaaatatttccaagaaatataacagctactcagattatacacaaaaatcccaatagacaaaaacactgtaaaagtcatactaaaactcaaaaaaaaaaaaaatacaaccaaaccaaatcaataaaaaccaaaaaatcatcaatgggcaggcaagacttcaactgtagttttgacttgcctgagtgaatcgattccggaaaagaattgaaattgtggtcgtcgttcaagctcttggctgaatctcctgattgttcaagccctctcatcagaattatctccattgttcaagccctctcatcagaagctcctggtttttccatcaatttttggccatggtcactatggaggtaagtagattgaagaagacgaatgtgagagagaaggcaaagggtcgaggtgggcgtggtgctgtttttgaggtgggagttgtttctcggccgcaacaatccaccatgtttcttagttttttttctctttttgttctgggaatcgattgtttttgggtgtggattgttggttgataggttttgggggtggtttctgggcagtgagaaggtgagaagaagaagaagaagaagaaagttatggtttgaagaagaagaagaaggaaaatcaggtgggtgggtggggtttcgtgtgaagaagcagaaaaaagaaaaaaaaacaagttattttatgatttgaaaata

SEQ ID NO: 128693 - DNA, 2522 bp, Cannabis sativa
aaaaatactctcagctaaataaaattacaaaaataccctttcggagttagcggatattacatgcacccataaaatcagcttgaccaaaagacttggagacacatttaactttaaatttactaaagtctggagtagtgtcaccggagaagtagtcatcaagattcaaacttactctctcatcagatgttggagagatatttctaagtttcaattgcaacaaaaaagaaacaaaaaattatagacaaacatcagaaagtgaattgaaataaaaatgaaaacaaataataaaatacaaatatagaaaaaacaactgtaaaacaacaataaaaaaaagtttaaaaaaccaaacaagtatctctttcaatgaccgattaaatacgagattgttcatgttatccatcttcatctgaggagcctttggttttggcaatttaggccaaatcagaagccttggaatgccaatatttgaatacaatgacagtttcccaataacgtatggacaacacttaaaaaactataattgcaacgccaatggaaaacctaataacctatagtacccacactcttcttctttctgcataaccttcctaagaccagaatcaatcttacccttcaaagattgaattgtcatatcaaacactccttaccccaaccatattcattgtaacgaccactatcaacaacatctattttctcaattgaaacaactttcccagaggaaccacccaacaagtaatactgaacaaaatataacacaaccaacttgactgcaagataatcgttatccttaagattgtcagcaataaaagcagtttggatagcactcctggtaatttttttgtagccctttaaacagtgttttacatgtatattatcatcttgtttgaactgaaaaaatgtcagaatcaatatgacaatccaacctagtaattaaagaaaactcctcaacactaaacttaagatattttccttgcaaacaaaaccaaattccaactcatttggttgttgaacctcccttaacaacaaaccatgaatcagtcggtaatgaatactatagtctagcattcgaagaaaatgaccaaacacggttttcgaaaacatttttaattgggtttcagtaagaatttttttaatatcttcaataacagagtaataaccagaggttataactctggaacggtagtattctgatcgggtgtacttggattcccaatcctataaaaaaaacaaaagaaaacaccactaaacacaaaattaaaacaacagtaaaaaaataaaaaataacaaaaacaagcataaaaaatattagaactaaaataatgaaattacacacctctacaacctttttcccaattatgtcctcaaacagataagttgattgaacaatcttcactagagatttaccctttccctaaagtttaacaaaacaaaactaaagcaacaacaagacacacattcaaacaaatagaaaaccataaaataggagaaccgacaaaaaagaacatgcaaaaagaagaaaaaaaaaatatacagacaaatgaaaaatatgatcaacatgcaaaaaatcctaaaacaacacaagatcaatagaaaaataccttatcagatttgggagactttacaaactcttgctccaactcaaaatcaaagtcggagttctccacaacaggtcgagggcgttttgatctagtgttcttcgaagtaccaacacctagttttcttttagcgagaactggaaaagtagggctaggaggattatctttcaaactcttcttgtccattgatgctcgagttttatttttctaaggttgttttgggggctttttagctacaggggaggaagatgatcgggtaacaactattgttaatgagaaaaaaataatatttatagaagaataccaacaaaaatgggagggaaatgtagagggaaattttagataaaacataataactgaacaaatttgaaaaaaaaaaaaaaaagatattagccacaatacaataactgcctgaaaaaagaaaaaaaattagaagaagaagatgaacactaggacattcgggagtgggatttatgtaataattatttaaaatttaaaaataataaatgataatttttaaatacatttaaaacagaaaaaaaaaatgtcacaaaaagtgacatccaacgtccaatcatattttttttaaaaaaagaattattttaaatattgatgtggcaaaatcttgtaaaaacacatgtaagctacaaaaaataaaaaaatatacacgagaaaagcagtatattgccgtataaaacccaaacattatacacagtaaaaatgaaaaaaatagggaaatttacacccattactgcctttttcatttttttttcatttatactatcgcacggagtatataactttttactgtttttcttttctctactgtgtcaattatttttacaatgtctttcattcttactttgacatgtttatactgttcttctaaagatttgttcttcatagtcttatataaaatatgtatta

SEQ ID NO: 128694 - DNA, 621 bp, Cannabis sativa
  modified_base (27)..(29): a, c, t, g, unknown or other
taacattttgttgtgactaaaaatcannnttagtcacaaaaaaattatgttgtcactaaaaagttgttaccaaaagtagcagtttttgtaatgtgtgatcgtgttggttaaggtctggatcagttcatataataaaaatataaaatatggtatgtctaatatttttaacaaaaatatggcataaaaataaccatacaaaagtaaataaaagaaaaaatctataatctcaaagcattatttaattatgccatgaaaagataaacattaaaaaaattattataatttatgtaatttttactttttaattatgatgttaaatatgtaatttttcttttgaggtatatgctaaatatacacctagtttctccgtatttattttaagaagaaaaaaaaaaactattttctaccttatttttaaattatgccataaaaagtaaacatttaaaaaattatcataatttatgtaatttttatttttaattataatatcaaacatgtaattttttgttgaggtatatgctaaatatgcacttaaatatacaaaaatattggaatttgagttagtttttacaaaaatactgtcacactgaaatgtttttaaaaatactgtgtttttataaa

SEQ ID NO: 128695 - DNA, 569 bp, Cannabis sativa
gcatatcaactcattgaaatgacattaacaaccagccaacttgcagagccaccacttgaattcaaaatcaaagctcaccacaattagccctagaatattcaatctcttgaacacggtgaattctcaaagtgcagtcttcgaacaacaacaataacacataacccccacatagcaacaacaacaacacactgaaatcatttgaccacccgcatataaacatcaaaagactacaaccttagccataaaaaaaatcactagataccttaaatgcaaaaggggatccaccctccgatggtggctcggttgcaggagaatcgaaacaagggcagaggtacaatggtttctgaggtgggttcgggtttgcctagagaaggtgggagatggactgtttgtggggtggaggtcaaagagggttctggtgggaatgggggcgaatcgaggaaggaaggcggcgactggggaggtcgggttcaatagagttgaggtcgaagagggttcggctggaggtttggtcgactgtaggtcgtcggtggggctgttcgaaggtgaagaagaatggaggtcgaagg

SEQ ID NO: 128696 - DNA, 582 bp, Cannabis sativa
ttcttatccgcctcctctaaatttttattcacctcgtcaagctctttgtcctttgcagcaagttgggcatccttgtcctcaagttttctcctgaagcctacagctatgcctttgactcaggcatggacatggccaagttttatgaatctctgagacaaaacattcacctcctgatttcaagcaccaagcagctgacccacaccatcatgttggtcctcagtagcaatagctttgcctttgcctttatttgttggcacaggttgggcagttcttacgagctcatgtctctcaggcttgatcaaaactgtggcatcatccccagtgcccccacaggcaaggcaccgtcaaagagcgcggtcactaatactctctgtttgtcccacctcggccaaggaggcctcttcatcagactttctcatctccttctcagcagcatgcctttttcctctactcttctccttttcaataggagtattacctaggtcctcatggagattggacataatagcaacaccctcacgcaaagtgtacatgccatatttcctaaagttctcctcacaggccaatgtgtagatgttgtgc

SEQ ID NO: 128697 - DNA, 1014 bp, Cannabis sativa
aaatttctaggattcatcgtaagttagtgcgggatagaggtgaaccctgaaaagatataggccttgctgaacatgccttccccaaaaaaacagaaggatgtacaaagtttgaccgggaaggttgctgtcttgagtcgattcatctcccgctcgactgacaaatgcatcccgctcttcaatatttgtaagaaatgtcagaaatttgaatggactaaagaatgcgaggaggcattcagaaaattgaaagaacacatggccaaatcaccaatattttcacaaccaattcacagagcagacttgttcttatatttagctatctccatgagcgttgtcagtgcacccctggtctgggaggaaggaaaagttcaacacccggtatactatgttagcaaacgcatgttaggggtcgaaactcggtatccgttgatcaaaagctagctttttgcctcctgattgcttcaagaaagctaaggccctacttccaggcccattccatcaaagtacttacgaaccacccactccggcaggtcctgcaagaacctgaagcctcaggaagactccttaagtgggccatggagttaagccagttcgacatacattacgttccacccatctctataaagggtcaggcattggaagacttcatcgtagcgtgtaacgagatagaggccaacgccagaaagccagcccaagaaatgtcagcgtggaaggtatatgttcataaggcatctaatgaaagtgggtctggtgccggaatagcaatgatctcacccgacgggttacgactctaagccactctgtggttcacatttccaactgccaacaatgaagccgaatatgaagccctaattccagggttgagattggccaaggttgtaggagcccaaagagtagaagtttacaatgattcccctgttgggttttatgccctaaataaaactccaattcaatgtaatcgattttattcaacatcaataaagatacagaagtattttcattcatttgtgtatgttt

SEQ ID NO: 128698 - DNA, 1373 bp, Cannabis sativa
gggtctttttgggggggggggggggtatgttcatggggtcgtctgtaatgtcccttgcacatcttaacaagccttaagtaatcctggccttgatctttctcatagtcttccatggtgtcagatggagttagggtgtagccacttgtcctggcgtcgtaatttttaccgaaatttttagaaactaattaaaatgagagttgagagattaactaaattaataaagaataaagatggagattttttatgtggtttaggtattaatcaaccctagtccatgagtcacttgtatttggttgaatgaccttgatgtattacaatgaggattttacaagcttaagaatcctagcttcttgctatagtattttcaccatgatttttcttgaccatttgaatgaaggcataaagtagtatttataggctaggaatcgggtcctagtacatccgttacctgctagggtttcatgtaaacttgacccgctaatagagtaaatacatgaaatatgtgactatgggcccactaactgaggcctagtttgtgtggcggaggcgatccgtacatctggagaccacacggtccatgacagatgtcctatatatgtgcactgttcttatgtagtgatgtccgatggctgaggcccagtttggtggtgcacgcactcttatgctctgacacaggggacaagcccttgattctatgggatcaggtgtcagagggctgccacatcttcctgtagcaagcttccgaggtgcctcttcgggtgccctctctggatgtatcccaaaattcattcaaaaggttttaatcactttgcatttgggatgcaggaggccttcctggatccaaatcagccctgtcttggagttgcatcctttggggttcagatggttttgggtccatcctttcgtatgggttggatctatgggtgggcatcatccaatccaatctaatccaattgaactgaaccgaaccgatccaatccaatccaatccaattacaaaaatttagatatccaattacaattggattgtattggatgctaaaagttggattctaaatagattggatcaattattggatgtcaatctcaaaagtgaaaattacatcaaatatgggtttttgaaaatattttacttaaatatggcaattttaactttaaccacattagttgccttttttttatttttaaacttttatatggtttatattgtgccatatttttgatatatttactttcaacaaccatatctattaaaagaaaactaaaataaaaggagggtctccttctctgttcagctcaaccctatccgccaccctccaacagcagccccggccaaagctccaccaccgtccacacctctctctctctctctct

SEQ ID NO: 128699 - DNA, 898 bp, Cannabis sativa
aaccttgtcctcaaggttgaaagctggaaattacgcccgaatgacatcaaatttctcccaggtggcttcaaactcaagcaggtccttccaacgaatcagaacctcgactggttggtccacaaatgaggggttttggcgcacgttgagcaactctcctggttcaacaatgagttccagatcagaagacaaagtaggaggaatagtaggggaagagtgggcttctccaacaacagttcggagttgtgacacatgaaaaaccgggtgaatggcaacggaaggaggtaaatccaattgatatgcaacctttccaatgcgcttcaagactgagaatggaccatagtaccttgctgtcaacttctcattcttacggacggcgagtgatttctggcgatagggtcgtaatttgacaaagactctatccccgatgttgaattccacctggcttcgtgagccatctgccacaaccttcatattctgttaagcgcgcaagaggtgcatttttagatcatccaagaatgagtccctctcctcgagccattgatccacggccaacaccggagtggacccggtcgaatagcgaactaaagaaggcggatcacggccatacaaaactttgaatggggtacaacctaagaaagaatgataagtggtgttgtaccaatactccgcccaatctaaccatttggcccaacctttcggacaattggaagcgaaacaacggagataagtttcaaggcaacgattaacaacttcggattgaccatcagtttggggatggtatgaagtgctgtgacggagcatagtcccttggagtttgaacaattccgaccaaaaatggctaagaaaaatttgatctcgatcggagacaatggaggatggcaccccatgtaacttgacc

SEQ ID NO: 128700 - DNA, 810 bp, Cannabis sativa
gatctcatgcttagttatttttcattaaagaagtcttttataatctttatcttaaatagttttaaacgaactaggcagtgtgacgtctcgagaaatcggggcgttacacttcatgcttgttagaatggacgatgtttgcgtaagacacatgaacaaatggagaatgaaacacaaataatgaattctctatagcccatgcttgggtagcagtctaatcaaacaagagatggtgctactcgtaaatacataaattgtaagatgaagaaaggtacccctgtaagaactcatgtattgtacataaataagctaatggatgaggcagagacacacaaggctatcaatgatgaaaggactcaagtgagtatgatccttgagtcactatctccttgcttcaaagctttcttcaaaaactatgtgacgatcaagctagagttcaacatgactcaattattgaacgagttgaccgtgtttgataaccttaacaaggacaagtccaaggaaggtgaaccaaacgttgttgaagcaaaatctatctctccctcgtttgataagaaaaggaaatggtacagtaaggacaatagcagtggaaagcccaaaccgaaaggcaagagggcacctaaagccaagaacaacaaggccatccttaagtccaaggataagaaggtgaaaggcaattgttttcattgtggtgtaatgggtcactagacgagaaactgtaacaagtatctctctaagattaagaaaggtaaatatcatttatttgttcttgacgctaacttagtggaagatgataatgttgggttttatgcc

SEQ ID NO: 128701 - DNA, 869 bp, Cannabis sativa
gttaaccagttctacacgacctgttgaaccggttaaccagtttgcaccaggtaacccaaacaagtccaaaactggcccaatttgtgtccaaactaagtcaagccttctcgaaaacctgtacataccttaaacaacattttccaaccaataacagcaagaaaaatactcaaaatccaaaagtgccatatatgaatgaggcttgagttttcaaactcaaacttgttcatcctcctcacaaaccatcccaaccagctacaagaaatcaattttaacttaaaatgaacccagaaactgaatcacaaacacatctaactctaagagccactaactctcaaaattactatatcaaaccaaaattaaagcttaaacaacataaaaaaatgagaactcttgggtttacctatggcttgagctacctcgaatcctactaaaaccatgttaaatttgcagaattcagcaccaagcttctagagttcttcttggtttgaaagagaggggaagagaaaatggtgttttagctattttttgtctttttttgcctatttgattaaatcaatttatcaacattaacttagcctgaaaatgacgataaggaccagttgtcattcccacaaccagccacctaaatcaataaatgaaattcgtaaaatgccctttgacctctaagttaagcaattataagcctggggtaaaatggtcaaaaccataacttcgcttaaacccggtattcataatatctcaaatatttgtccaactaagaataggttctaaatttacccatgtgactctaacgaccaaccattgcatttttcatcgtcgccgagcaaaaatcataaaaattgcataattcatatttagcataaataata

SEQ ID NO: 128702 - DNA, 863 bp, Cannabis sativa
  modified_base (196)..(198): a, c, t, g, unknown or other
actttggatagggttctatggatattaataaaggctctcaattaagtcaatgtcgtagctatccaagaatcagcttctgattcagtcggcatatatgaatacgtatatatgaaatttatatatacatatagctttcattttccataccatgtagccaactctaaggttttgaatatcactatatatataaatatannnatatatatatatatattgaatgcaacataaccaaaatattcttctggtatctgaattattagcacccaaatctacctagaatatctaaaagagaaaaatcccatgaaatatattattttataatttacatatgttataagtggtgtggtgttttcaatagtttgaacattttaataaactgtattttttttttattaataatgttggtggggttgaggattaataattgtggttcgatgaatattaaaacacttaatacgacgtcatataatttgtttaaatatatataactttaaattctttaggtatatgggttgacgttatgtttatcaagtagtgaaaaaaaaaagtacaatatacacagcacatatcctttgcttccaacttgatgatgatattggatttgggagaacttcgaatcctgctacttcatttatacacttaattatatgtgattcgaatatgtatgcattgagttgacaatttttctctctcgtataatttttacaagatacacgattgttttgaacttattttaattattacattcattatgggttcgtttagaatgcggtattaggttgtattgtattgtattatattgaattggattatatatcatatttttatataatactatgttagactttaatttatactaaaat

SEQ ID NO: 128703 - DNA, 741 bp, Cannabis sativa
tatttcactaaccatgcttttccaccccatgtacttctccccaatggaactcgtatccatgttcaaggaatcgggactgtaaaaataaaccagaaattaaccctccatgatgtgctttttgtccccacattcaccataaacttgttttccattcccacttttttacacaacactactaacatggtctctttcaaccatgatttatgtgttttacaggctcattctccgaatgtggcgattgggacagctagaagacttgggaaactctatgtccttctccaagattcacttccaatagctagttctacttgtcctttattttctatcaataatggagaccattggcataaacgccttggccatccttcaatgtacatttctcaaagtttcaatgaaatgcataatttcggttcaactaattccaagaatcatttatgccatatttttcaccttgccaagcaaaaaaggttgcccttcatatcaaatcacaattttgttgaaaacatatttgatctaattcatatagatatatggagaccatttaacataataagtgttgaaggttacaagtatttagtcacaattgttgatgacaaatctcggtttacatggacattcatgcttaaaaccaaatccgaagtgcaaaacatcatccccatgttttacaacatggcttgcacacaatactcaaagaacattaaagccattagattcgataatgccaaagaacttaatatgcaa

SEQ ID NO: 128704 - DNA, 644 bp, Cannabis sativa
aaaaaaacccaaatttactcaaaactttaaggttttcatcttgttctctcggctagggccaacacacgacttttttttttttctagacaagaggatgattccatttatggtatgcgtggctttgttgatgtttgagtcttatttggttctagtgcgtgggggcgctattacaaaaacttttattcccgtcagttttggatcgatatttttggaatcagcttcaggtttcaaaactgacgtataagcaataaacacaaaaagtggagttgttgcgtcgattagtgaacgacacatttgataggtaccgtcgatttaaaactgacactaataccaaagcatatcgacataaatatttagttgcgtcgatttttgcacaaacacaaccaaaaaaaatatacccaagataccaccactctttgatttgtaatacaatgtccaataatctcaaatatgagattcaaatcataaaaatattaatactatacaaacccaaaaaatataataaatataataaaatacaaatggatatgagaatcaccgctatcactgccctcttttgtccatcgccactgtcccctactacctgaagaaaaaattgagaaagagagtgaaaccaaatttagtgcaaacgagagcgtgaaaaa

SEQ ID NO: 128705 - DNA, 947 bp, Cannabis sativa
tgatagctatgggaggaagttgatggtggatggtagtaatggtggcgtggctatagtggtgtgtgggagggaggaagaaagcttcaagagaaaaataatttggctacttgagtgaggaaataagtgaagaattaaggctctatttatagctcatgaactcatcatcctaaccaatcacatcaaccctagttaatataaaactaataaaaattcctagataataacacatagatttttctaaattattctcaagctataatcggttaagaactggtcaatatagacctgattagctcatgtaattgagaataataagctcacgtatacacctcactgagttaactaagtttaatatattatcactatactgactaacccacataactctccatgtatgacctaagaccaaaactaacctcaacatacataatacaaggtcaattgataaaaatccttaatattctctcattgcctttcatatatacacgtaggccatcatatacctatgcataactaactgtttcataatcaagtgccacacacataggactccaaacattttaaacatttgaattttatttactataaatatatataccttaattatcttatcaaatgaatatactataacaaactttactaaaattggacaataaccacctccatacgttccatgatcaaatattaccgcctaataatatatcaatactctcccaattttcttttatatattttatattggctttaaaaaaaaaaaagactactgatatccataatatatttattattattatttttattttagataccattacaaattggtaatattcttagaaatattattctctagcaaacaaatatatgtataaatattatgaaatcgttatttccatatcgagttatctagactagcgtaataggaaaataataatcaaatattttggtta

SEQ ID NO: 128706 - DNA, 815 bp, Cannabis sativa
agaaaataatagaaaaaagaaaaacgattactcaacgaaaaatttattaaaaatagaaaaagaaagactatgattaaaaaggaaaaggaaagaatcttttattatttttatagatttatagaaaatgtttgtcactttttttcttattgaaacgtgcaaaatatcattaaattaaaagaactattcttggtgattacaaaaaatttcagctgggagtaaattaaaaaaaaaaaattattcttaatcattataaaaaaaattcagctgggagtacatttaactcgttattactcgaaaataacgaacacttagaccatttagtcatttagccacataattggaggcaataaaagtatggtcatcacaataaataaaacaaagttacaaccttcaaaacactactttagacaatgttactaatgattctaccaattttacatggaacatcttttccattgacgaccttgatagttagttccgaattatcttccacaataatgtaagcatagtctctttcccttatcgttgtaataacgaggagcgtgacactagtttcagccacaataaatggccccaaacactcgagtttcttcccataaaaattgtccatattttcatcacagaccaccacactaagagcattcatgctaggagaacaaacaacatcgaagtttatctttatccatcctgaaagaggtagcgtccaagtatttattttactgtcaacaagatttttttttttttgaataataatgaaatttcattaaatcaaatcttccaaaacaaaggaagcaattacagtaggtaactcaaca

SEQ ID NO: 128707 - DNA, 1267 bp, Cannabis sativa
cagaagttctaaaattataacttaccgctaaaaattaaacttaggtatttatttacaactgagagttaaacttaggtctttatgctagaaattactcatattttaagtaccatgttactttagaaagcatgataagtttaaatatagataaaaatttacttttcaatttaaacaagttatttctgtattaaaaccagtcaacacatagcatactcaaccaaatttaatatttcatattctaggttactttagaaagtattggattatttttttatgttgccaatagtttacatgtgcaatggttgtggttttcaaaaagtatcgagttacgactttttaaggttgactctactacatgtgaccttttatgacgtttgaaagtacaaggttactatttgttattgtctttgttatgcatgtaattgttttaggttactttaatattgttaaaataagtactaggttacattttaatgttttatttgttatatttataagtgttctaggttacttttatgttatctagaaagtattagggtactttttgttacgtttgtttttgtttttgttttgttattaattttgttaatgttctaagttacatttatggtgttaaaaagtagggtattttttaaaatggtacaaataggactctgaattgattttttgtcaaaataaaatttaattataaaccaatctaaaaatgttataacaaaattatttacattttctgtatctgttcgtattaggaattgttttcaagttgattatattaaaaaaaaaagttgtcgaaaattaagcttagggtcctaatttttactattttggaaaatacatggtccattttgtcatttaacaaaatacagagtccaatcggtaacttttgtaaaacacaggatccaaaatgatatttaccctaaaaagtattagtttcttccttcttcttctttttctcaagaaaaaaagtaccaagttcctttatgttactctctttattatatattttatatattgcaaattactaagttatttaggataagtaacttaaatatcatttcacttatgtgttaaactagcaaactcaaaatctaaatttttaaaataatataaaaacaactaatattagtggaaaaatatcatacacgagaatgtagtattttgaaggctaataatctatatatatatatataaaggggaagtatgaggcagtgacatgacactctaaaaacactccaattaactatatctattctctcatttaaagtaa

SEQ ID NO: 128708 - DNA, 963 bp, Cannabis sativa
gggagacctctgactcatggccgatccacagttttttccccctttacctacaccacaaagcacccgtgagtcacaaagacccagcaagaaaagtaagtaactacaaacacatacattaagcattacgagaaaatcatatcaactcatagccacaacttcatcatcataataaatagatctttaccaaatacataattatgctttacaccatcaattaactgtattataagacaacctgactttgatgcttcataaagcactattgttgtccatggccgatccatagttttttcccccttgccacttgttgtccatgagctacgtatgtcactattgttgcccaataaagcaccagacaagtaagaaacatatcagtaatttcaaggtagtagttactcatttttcattaacggtaatgaccatatttttatccattctcaaacaacggtaatgaccgtatctttccctcaatcataattgagtcaaaaacaataataatcatttctcatcattacttcaatcataattgagtcacaaatgataataatcatttctctcattacatgcttataaggatatagcttttcttaccccagtccaataatcaggtgtacgcactgacctaagtgggacaaactcgatgatcctaggtcatatgtcacgataaataaactcggtaaatcacctatccaaactccagaataaccttaattccataactggacaattttaacttcccattggtttcaagataacttaaataacattaaaataccctaaaccaagctgtgaaaaacaccccaaacaaaacttgttttcctattaaagaaagtatgtacaagaattgcgtacgcgtggtgaaagaatcgagaaagaaaaccaatattgtgtcgctgcctgttccagtcgcgacgagaaacatgccagtcgcaacgggaactggcataaagtttttcaagaatt

SEQ ID NO: 128709 - DNA, 996 bp, Cannabis sativa
tattcaaatttttctaatactacctataaatggataatacccattaagagtgttatatatatatatatatatatatatttgtcccccacactattttgcattatagatttattttgtggacaacattagtgcaaatttattttaaactatatacttttgcaaaattttgtacatgcatgcattttccatttgtgtttgttgggccttgtttgtacaatttgttgggctgccacctcaccttaactcttatatttgtatgatattgtttgctttgggcctaaggcctcgcggttttattttttgccacctttctaaaagtgctcatactaatagagtaggtggaacacttatattcaagacaattcttgtctattatttcattgtgagacttaaattgatagcccaacaatcatccctcaagctaaggaccaagtattcgttgtctcccctctagtgaaatcaccttgtgctactgctaacaccaatagaattcaccgcctgactatcaactttatcaagaagacttttgacacaagtcctaaataccgatctccatcttgtaccatcataatcatcaatgaaaaacgctgcctaaccaccacaatatcaagtagactttcgatacaaagcatcatatagatattcaatcgcgaggtgatcacattgaggacttgtctcacatatcaccaaatcaacccactatcttagcgctactaaacttttgactatgataccactatcggaatttgattaccaatcaatccatccctacaccaactcaacatacacatttgatcatcaatgtcatcattgaccttcccattcaatcaaacaattaacaattaggacatggtcaacatttaaaaattaataataataaaataacgaagacacgagcctttgagcccacactagaattagtaaacgcagattctcaatcaatagtaaaaattacataatatatggaaaaattataagagtttacttttttatggc

SEQ ID NO: 128710 - DNA, 969 bp, Cannabis sativa
ttagtttgtaattcaaatacatagcagtgacaaagagaaaatattaataccttgtaatccttttttatttttgccaataaaagtatggtggcatccttaattgctccaagtgcttttataaaactcttctgacatcttcactcctctccctcaataacaaatttctttaaaaatacataccaaattgtaaatattttacaatttagaaccaaaattcaaaattaagaaattgaaatttacaacaaattttaatacacagttaattctatgttctgagttgataaatcaataacatttcattactaaactaaaagttttaaagttaaaaataattttctaagcaaaagagtttgaaatctatctttttcacctacacaagagttttttaaggtacctataattaaaaaaatcatattaattattaatttccttcttttctacttcacaactatgtcatagttaaatatacttagctatttcaaaaaaaaaaatatacttcaatatttagaattctttcaagtaccctagaaagcttgcctatacattcttctttccttttcctatgtcatcttctctgactacttatatcaagcttagccactggatctttcaatttcttttctatgttttatgtgaaaatcaacagtttatttttcttgtttttttttaagtgaaaatgagtaattcaattttttgtcttattatttaataagttataaccaagattaaaaaggtcactaatgcaaccataacattatctagacaatcaaatgtttatataaataaataaaatttaatggttggaacaaaaaaaaaaatcaatctctcaatgttttatgtgaaagtcaacagtccctttttcatattttatcctagtgaaaggaataaaattaagagtaatttgcagtgtaaatatctaaattttatgccgagtagcagataaatacctaagtcgtatttttggcggta

SEQ ID NO: 128711 - DNA, 657 bp, Cannabis sativa
ggggctcctaaagaaattttaccgcaccttcggctcgcagagccttatcaaccatttctacatatgatgtcgcctgattaagattaattaccagataatgtctaatctttgcatttagacctgccaattacttttctttcttgttgaagtttgtgggcactatacaagaagccaacttggccagacgatcaaattttgttatgtactccgttactgacatgccctcactctaaaccagctaagtgaattcttttcgcttagcactgcggaccgcctcattataatacttggcgttgaacaagtctagaaactcttccctggtcatagcagtgacgtatcgagtgaggaagactaactcctaccacacgagcgtgtcttcctggaactgaaatgtagcacaggttactcggtcattcagaacaacctccatgaaatacaaaatcctttctatcaccatgagctgttgctcaaccttcttccgatcttgacccccaagaaaacaggaggtgcctgcttgcaaaatctctcatatagtggctccatacaattgccaacaacaagttgttctactggcaccgcaggaactaaagcagactaaacttgtggtggaggcactgcaggaggaccctgctgcctctgttgggaattattttacca

SEQ ID NO: 128712 - DNA, 1115 bp, Cannabis sativa
ctactaaacttgcctctaagtcaaatgcaggcatactttagcttgacataaagaaaagtaaatctggatacttatatgtcaaggcaataagaagatagcgaggaaaatcatatgtccatagtagaaggctttaaggctaaataatagtagtgttcaaaaacagagtgcctataggccaaaagcaagaacatgaaagccttgaggcaaaatatgaataaaaaatcattacaaatgcataaggccaaagccacgcaataattgtacagccagagaagaactggacaaagttcctatagggaccacataccgagctaaacctctaagccaaggcaaagttccttgtaggctccaagccttagtcaaaactctaggcaaccgtacccaagggtacttgctagataatgtcattgtaaaaagctgtgtatcagcaaagtaaagtcctaagtgtaacaacttggacaaacgttcagtcttaagtcgagcatttaactataatagactcaccattaagtttcatacagagtttctaaaggaaccacgtatgaggccggctaaggttgtatatgcctacaaggccatgataggattcttaccgaggtcaaaagaggacaaaaagctagccacctgcttggaaccaaggcctaggctggctagggttcccaagctttgagagggtcagccagggtcccatgacttagccaagaaccgaccagggtcactgaacccaggcatgaatcatctagcttcttagggtgaaaccctatagctggccaactcccatgattgaaccctagggccagcaagttatcaaacatgacccctagagccggccaaggttagttttgaatcaaaatgtgtgtttttcaaatctcaaacgtgttcttcctgttcttcatgactgaaagagccaataatcacaatgaaggccaaaactgaatcttttccatcatgaaatcacacattatgcattctaaaactgtcacgcggatcaaaataccaaaaagattacaatctaatgtgagaatcaaaaagtttctaaaatcgtaaaaagcttaaaacttaccaatggcaggttcaaaaaagagaagatgaggcatatatatatatatatatat

SEQ ID NO: 128713 - DNA, 1804 bp, Cannabis sativa
tttaatagtaattcaatggcttaaaaaatgtaaccatgatggttccaataaaaatgtaactattgaaacctcctctatttagtaaaatattacataaaactacactggacaagttttttcactaatgtaacaaaaaaaaatgaaaattctattgaaataattagaacacatattaatattaacattattattattattattattatttgctgggatttaagattgttatttggattgttattaagattgttatatcatataggttgatgaaaattgaaaagttgggaaatgacaagtaattaataaaaaataaaatcttggaattatgttcataataattaataaatgtgataagacaagtaagcagagaacaaagtgtttgatgtagaagttgatgagacccttctcccttcgcattttccccaatattgccttgactgaagacttaattaagactttaactggtaaccaaagctttatgtgtgttggagtagagttctttgttttaagcaaaaaaaaaaaagtgttcaaccatggcttgtgatagccatatttccaaggttcaaacaatgttttctcctactgctccccatttttccaagattattcttggccaaactcctgggaataccaagctagtaagtatacattattataactctctctctctctctttctctgcttcaacacattatttttctatgatttatatatgtatgtataatgtatgtacaccacaccagaaattagaggttgacttaacatatatattatttatatatagccataatttttctgttaaattcatctgaatttgaaaaaattgtacagtatctttttctgactgtactatatattcaagcctagtttttgtttttgttttctcaaaataagaggatggcatgttaaagtgagtctcttgtatgatatatgttgaattttcaattcctataatacttaatcataatttatgcaacatgaaaaaggtgtcttcatcagatccaatgcttctttaattggaatgaagaggagaatacatgtatttatataggttgcagtcatgtgtagttatgttttttggtagcttaacttagtggtaaattatctcccattaacaatttattctcttgtgcagcaaattccaaagacattttgggtgaaatgttgtgagtccttatcgagtcaagtatttcttaagcttccatgtggatcaacatgggaggttgggttgacaaaaagtagtgatgggaaggtatggatagacaagggctggaaagcttttgcagaacattgttccttaagccgtggaaacctcttagtttttcgatatgaagggaattctcagttcgttgttatcatattcgataaaactatggttgagatagattatccttttgatcctaaccatattgttgatactaaagatgatatttctgttgaagtatgggacaagtctccattaccatgtaatcatccccacaagaaaatgaaaacaagtgcatatggaaaatctgaagaaggtgttgatcatcttaggacttatgaaagcattttagtttttgttggtcagttaaagatcaaatttccatgttgattattaactttttttgtatgttttgtgaaatgtgttgaatctgttttcagtgaagtttgatttgtcaaataagaaagtatgtggagaatttataagaaatcagaagttgagtagaaaagaaaaagctgaagctttcaagagagcagaagattttaaatctgaagacccttttttcatagttcccatgcacccatcatatgttggatccaa

SEQ ID NO: 128714 - DNA, 1775 bp, Cannabis sativa
tgattgcgggactggaaaccagcctccgcagatttgtccgaagcaccataagaatccatagcagcacaagaaacatgatgatgaagttcagcttcagcagacaaggttgaagatgaaactgttggtgagttttctctacatcttttaagtgtttgcctgagagaaagtccctcagtttgcctttttgattgcacattggggttgatgttttcttgatcataagcaacagcagcagactgtgtggtaatgggagtagatatagatgttgaagagtggagtgggagggtcatttgattaacaatggaagaaagatgtgcaggtgcaatagatgggggataagtagcaaaaaaatgagtggagttggacatagcagccattgggttaaaaattgtagatagatcagaaaactctcccgagctagttatggcagaggatacagcaggcttgtgtgacttatttttagcctgattgggaatagagatggaagagtggtccagttgggatggtacaaagataacagaaggtgtttgctgttccatgatagaagtattgtttatcatgtcattgcaatggggtccattaaatctggccgcataatcgtgaatatcatcctcaataggatcagtaatagtagaccgagatgattcaccataaaacagtttctggggttgaggcacacctctttgttctaattgaggaatggctgcagaaaagcttttcttggccagctgaattaacaagggccacacatttccttttgagaaatccgtacgatagcgatcataacttgaagtgggaggggcagatccttcgataaaaggttggtactcaagtgcaggctcctcaccattgtcaagtttttcaagaaaaacaagacatttgttaaaaggatggccaatgattccacactccatacaatactcagggaacttttcatagggaaattcgatccaaaattcatcccgaatatgtgatagagagatcatccttcctcttttcaaaggctttgagacatcaatcttaactctgactcttaagaaaggtccccaaccttcattcaatgagtcctcaaacacctcaatgaatttaccaattatgttaccagtgcagcagccaaagtcttagtcttactaaggaaaggtaggcgatatatttgcacccaaaagggtgtaaatttcagatcagccgaagtaaaatttttaccaacttctggtgtatgtaagactatatgatgattctggaaatggtatggttcgcgatcgaggactcgtattttgtctccctcacatccaaaagttaataaaaacatatccgaagactctgaaactttaacagggaatctaccatcccaatgatctgccatttgattctgaaatgtagataaccaaacttttttctttgtgaggactttagcatacaaaaccagatcaatagaagtagcagtagcagtggcttcctggtcgtggaactgaaagacagattcttcatcttcagtaagagtaattataacttaaataatataagaggaatactaaagaaattttatattagactctcttttacactctttataattgagtgacatgtgtaactttttaaagtatgtttaagtatagttacaattataccttttttatttttcattaataattaaaatgtgttatctcatttacttgtttatttttttggactatttaattaatttttcatacttttttactaaataatatgtgtaatatcccgaaaaataaataatatttaaatagacatatttt

SEQ ID NO: 128715 - DNA, 1054 bp, Cannabis sativa
gggtgtgttcatgggtcatgatcaaatttttcttgctcagaaattaggaattaggttgttgtgattcaatttgattggtacaggctaaaatctttattaggtactataaaattgtgtatgagtaattactctttcttctctatgtcatttccaacttttgtgctctgtttgacttgtattatttagtttgagctttagttgcaagaccagtgtatgggagattgaggaagaagctagctgatatttatttcttttcaagaccagtgtatgggggtttgtgaagtgagtaagaaggcatttaatgattttctttttaatcatagttaaaaggcatctgttagaagaaccttgtctccagtgcctcgacctggaattgcattgagtggggaagccatttctgtcgtttctccactttccaggttttattcttatgtgtaaattgatcatcttgataagaaacacattcatccacttgtttgattcagaatcaaacactaagcatacatttgtcccatctggtctatgaccaaaattcctgtgataaccaactaaaacaacattaaacttgtgagttgatatattacaagccaaccccactagagttgcctcaccatcaggataaaatctagtcataagtctctctctactcttgggaagaagcttattccaagagtaatatagaatggcttgcttattccaagggcatcacgcatcgtataaaaataagtatagttgcagaaattaaaaaaaggcattgacaggttaccaaacatgtcaacataataaaccgttacaagaggctccaattctgactctgtccttaaaaaatccaatgaaaatttagaaatacccaatattggttcagatcagagttgtgaattttatgtgtgtgagtgattacacgatggaaaaacttactgattgatagtatatcaggtgttttttttcggtttcatgaactttgtaatttttctaacaatgtgccagatattttagaaagggaaatttcattttttgcccctaataaaacccccaatatcaaaatttagaccct

SEQ ID NO: 128716 - DNA, 631 bp, Cannabis sativa
atgcgtgtatctatatgtatgggtatatatgtaattttgtaatatttttaaagtataaaatataaaaaatatacattaattttacataattttttttagcgtagcgtaatagtattttacaatcatttaatagcttaatagcttgaaggtcatatgttcgaatctatgacctctccttttttcccatccctccctcaccactaagctagccttagtagcttacatttgcatagagtttaattaataatgcacattacctagtaccctactgctgtaaatttatgtcacaagaaaatattaacttgttgtgttttggaatgagtaggtcatgctttatttagaacatgtccaacgtaccactcaaatctcaatttagtgtgctaaattgctccaacatatctatctctaatctattttgacgcaattgacatatacgctccgtaacaacgacatttattttggaggagcttcttatggagaataaattcattgaagaaaagacatagtttggaaagtgggaaacaaccagatttatctttttttttttttttttgaatagaagtgttctttattaactcgagcaatcgctcattaaaatagacatgaagtccataggaacactgttaatagg

SEQ ID NO: 128717 - DNA, 1248 bp, Cannabis sativa
  modified_base (28)..(40): a, c, t, g, unknown or other
  modified_base (857)..(867): a, c, t, g, unknown or other
taggatgttaatcaaacatacttgttannnnnnnnnnnnnctggtaaaataattccaacatccagctggtgccacccttcagacactctatgcctactttgcaaataagggataaggcaaatcacatcatgtctctatcggctgagtagagaaatataatctggttgaccagtatggacaatttctaaaagtatggcttatatcctcttgctcctggagttgcaagagcgccaactgcagatgtgcctggagatgggcaagctcctgacttggacgatgatgaggtacctttgtctcatattgtgcgaaatttggtgaagagagagaaggttctctgctggtgcctagccagcgggggtctagtaggtgatgcttctcttcatatcgagcctagaggttaggtttttgggagacctacacgccctatgcccgcatcgaggggcaagggcaaggctattgttgaggactctaatagttcttcttctgatgatgatggtatttgatagttgataacatcatgcttttattcttgtattgaatgtttatgattgctttctgaatttgctactttctttctgcagatattgttggaatttattttacctcgatttagatttattaacatgtatgtttcattaacaccctaaatataaattctctaaaacaatgaaattaaacacataagagtttagaaaagccttacattgatggcagaagaataatatgacttcttccgctcatatttctaacccttatttctttccgtcgtagagtaataacaagatctgagcttggatctctttctctccttcaggttggttacaaccgtcttccgtactatgattgagtacttgacnnnnnnnnnnngggcatggtactctatcactatggctcgagttggtgaagtacaatgaataaggtgtgaaatcactatagaaaggagtctctcatctactagttgtcagagattgaaaactaggtttagtttggttgaggtgaattggatgagaatgagagcatcatgttccttttatagtattccaactagggtttaagatttaattatatggattaaaaaagaaaaaaataatggacaaaaatcacactaagtggccggccattatgcaggcctcactaattacaattttttcactttatttcaactatttatccttctttcaataataccatattttctaatttcaatcctataaatgtcaaaactatttataattataattaattatc

SEQ ID NO: 128718 - DNA, 817 bp, Cannabis sativa
ttaacaaaattaaatagtatttaccctaaaaaaataatgaatagatttgagattttaatttcatcagcttatctagatgtgagatttggattcgtaggagccattaatggcagtgtgagtgtaacgccctacttgtttaggcgtgctaccgtaagttctaaattaatgtgttaacatttgctaatcaatgagtttggtgaaaaacatgtttactaaaactttattattaaatacaagctttactaaatataatttacaaaagtttataaacttcgggatcccaattcatttacaaataaagtagttcaattttcgtttggcgaataatacaactgagcccatgctgtcttgaagaatcgagctctccaagtctaaccgccttgacatgtacaatcttcataaagcttcaaactcatttctggttcaatctcgaccataacctacacatgcaaataaatatgtgagtcgacatactcagtaagaaaagtacgaaacatataaacacataattcgacttgtaactaggcgctcatactcctgcttacaaggctttagaagaatcaagaacattcttaacagaagtatgacctctgtaccacatgcactaagtactcctcccatactagtgttggtatagggttgaaccgtacctcgagtaaaattaattatgtcaaaactatttaattaataattaaattaattatcaaataaaattgtcattttattttcttattaattagacttaataaagtctcataattaacaaataaaccctaaaaccttttttcttcataattaagcccttggttagtgaaaa

SEQ ID NO: 128719 - DNA, 1352 bp, Cannabis sativa
  modified_base (825)..(840): a, c, t, g, unknown or other
tgactattaaaattattttacttaaggggcgtttgatatcacttttattttttaattttttaatcaaaatgaaagcaaaaattgtgtttttaaaaaataataatctgttctataaccacttttattttttaatttttaaaacataaaacaaaactgtgttctataactttcatttttattttttgattttattaagccggatccagctccgtgtttggggtcggggccattgtccgagtccaggattgggactagggtcggagtctgtaccccaaggtcgaggttggagtcgaagtccaaaatattgatcaagagaaaaaaaaaatctgtttaaaaatattttgaaagtgctttttttttcaaaatttttaaaattttgattctcaattaaaaaattggaaagtgaaaacagttttataaaacatattttttcaaaatatttttacttttctaattaaaaaaaaacataaaacacattaaaaatgtgttaccaaacgcacccttaatgttgtttattttaattttataacttagtgttatattattttttattttactagtattagtgtttcttaatggttattttgtatttttaaatatgttagtattttaaatcaattattatttttgtgatatgagaactaaaatgaaagattatattttaaaataaagattagaacgtaaaaaaaaattgtatacaaaattgatgtagattcaaaatccaacaccaataatagtgtagaatttggtgtataatttagtgtgtcattggtagggacggacctagtagtatcaatgtggggggctatagcccccactaacaannnnnnnnnnnnnnnnaaaattaaatgtaattttttaaatttgataattatagactaaaataataaaaaagcccccacaaaattaaataaatctagtaagagtgattataatataagtaaaaatattttttaatgataaataagcccccacaaagtaaaaattctgtatccgtcactgattattggagtaaaatagtgtaaagattccacagcaaattaatgaaatagtgtaacattatcaatgtgtgagaaatgagttctttaaaggtgagagttgcaaatttggttggagtgggagttaaaaacttcaatttcgtccattcaaaaaaaaaaaaaaacttcaagttcgtaactagatttagtgcatcatgcaatgtataactattgttggaacgttttgaatatttttttttgcttgattccatctctaatgtaacactcaaatctttcttattaaaccctttaattaggggtgtgcataaatcgatccaatccaataaaaactgaccgatccaattataatcgacc

SEQ ID NO: 128720 - DNA, 1350 bp, Cannabis sativa
ccttaagctttccatttctctgttattttaagctctggtagcgcagaactggggactaggtgaaataagaagcacggtggttcataaacggcgtcgttgctataaccagcttgggctgggcctgtagttttataggcatgacatattaaagggaaactcacaaaaaatactgaaatttgggttaatttttacaaaaatactgtcacacagaatttttttcaaaaatactatatttttataaaaacaaacacaaaacagaacaactaaaaataactaaaaaaacaaccgttaaacaacagtaaaaacttaacacaatacacagttatacattatttttgaaaaaaaattctaccctacagtataaaaagtgaaaaaattaaaaatttcaacatgtggtgtaaatattcccatattaaaaggagaaattatagtaaattgctctaaattattgggttatgttactaaatgtttttattttcaaacttgtagtaaaatgacttttttaaattatttattatttattttgtcttttgtcacataaaaaaatcaatatcttttttcatattttttttagaattagaaataaattacttaaaaattatggtacatctttattagttttgttaaaatcttttttatttaaaagttatgttgatttttataattttttatgagttgtcgtgggttgttgatatacagattttgttgtattatatatttctgttttattgtatagtatattattatttttagatgatatttattttttattttgctatgtataataatagtatataattttgttagcataatacaaatattttaatatactaggttaatattacgtgtaatgcacttataattatttttttttaattagatttaattaagtaatgttacatacaatacatacaatacatgtatattaattaaaaattatttacatgaatattaatgacttagacatgaaataaaattgtgggtgattttgttgataatgagaagctatttctacagtggatacataggcacttgcacataaaaatctatcacggacaaaagggttttccatggagaagataagggcttcacaaacatcttctatatgtattattggtatttttccaaccaattcgtaccttagagaattgtaaagtattggattgtttttgaggtgagaataaaacattgccacacgcattgtaacaagggaagcagtcatttttctgggaaaagaaagatgtatatatattttagggatatttgcggcataaatatcatacgttttcgattttatacacttaaataccacatgttttttttcgacggattaaataccttaagttacat

SEQ ID NO: 128721 - DNA, 575 bp, Cannabis sativa
tttttttttttttttttactattggctgtaattagaattatgtttgcataatgcattaagatgtattagtataatttcttttataattaaagaaaatgatattgtttgatctatactgatattctgtttttgtggcatttttaaccaaataagtgttttttaaaatttgttctagttatatcctccaaatattattttctattggaaaagacaaatttaaataaatacaataacttaaaaatattaagaactagatcatctccatataaatagtgtaaaattgtattgatttatatttggctcaaattttataaattttgctccaatacaattagggggagtaaaattaattttaataacattaatggatggagtggtgatatataaaagtaaaattaattttaatgcattaatggatgcttaaccgggacgatgacgttaccagtgaagcgatggacagttcccgatttttctttggtcaaagttaatgtagatggtgcacttttttctgcccatgggcagtatggattgggtttgattgcaaggtctgctgcggggttggtcttgggggccag

SEQ ID NO: 128722 - DNA, 788 bp, Cannabis sativa
tacaatactaatacggcgttccaaacgaaccttaagtataaaatactatttatttagacagtcattatatgtgtgtttgtttattagaggcaaaccaaattatctttgaaaagcattcatgtttaagcaaaagtaggagaattagcagagtcacaattaattaattaatttgtattataccatatgattatgatttactacaattttttatgctaaatataaatcacgctcactcaaaaatatgttatagctaaattatgttagtatcttttaaggcattcttgacttgttgatgatgaagcaagaaaataataaaaaacagtcataattaaatttttagtatgattattcatttgtcaaatgataattttaattgttggcccagcaaattatttatcatgctaaaacattaatcaaactataaaaaatatatatctgaatattattcaagtgatgtaccttcaaaccttggactaatatccatgatgatgatctccttcataaataagggaccaaaaaactaaaggaattgagtcattcattgttgatgtatgtacttgaactctatagatatatagtaatagaatagaatcaaaatatgcataatcaaaaagttaaaagctaaatctttttttttttaactttatgaaaataacactgcattggattgtgtgcaaatctttcatattagattatgttaaaagtgagtgtaaaatccaatatacataaaactgttctcagtaaataggaactcactcacattggccacaatatgcaaaacaaacaac

SEQ ID NO: 128723 - DNA, 2059 bp, Cannabis sativa
  modified_base (1452)..(1452): a, c, t, g, unknown or other
  modified_base (2003)..(2028): a, c, t, g, unknown or other
atccttattcaaaaccgtaaggtgatatggtatggatatgttattttgtttttattataatccatgcattgatctaaaaatatgtaaatttatagtcaagtggctttcttttgtggtactctgacctactgtgatgctttggttaaaacttgaaagttacatgtgaaacggtgattatctttacccttgtgaggttggcaaaaggaccttttaaccaaattttgtattgttcgttcgagctagattaagctcatattggaaatagaataatgatactggctggcaatgtaatattaatcaatctaccattaaatttcattgggtaagttcaactctttaacggcttcatcatgtctcgtgagcctcctttacttttgtcttgtaacaaaagcagtgacatcggatgagttggggtatttcgggcattcgttgggcctgtaatgggtaatggggtcgtgaatttctatatattgggcctcttgttccatgtgattctatactgtactcccgttagccgttagggatttttattgataaacagatttttatatatatatttaccgatttcaatttttttaagtaaaatacagaaatttttttcttgttgatatgggaaattaacgtgaaaatattttttttccgaaaaaaaccaataaattgtaatttctaccttctgtttcttattctttcatttatacccacatttataggtaatatttctattataccctttattcattttaggttaattatattgcaaagccacacactctctctctctctctcaaggttttgtgtggaactaaaaaaaaaaaagaagactttcaaaggttaaaatgcattatattaatctcatacaatgatcctaacaaatacacataaatatgtgcataagcaatacaaccaaaaaattggagggagaaactagatctaaggagagagattaatacaaattttaataagaaagtgaaatgttacatacattcaaatcaaaggacaatatagaggttgtggttgccgatgtgtggtggtggtggtggtggcagaggtcatgatggagcttctgtacgatggcggaagctggagttgtgtgcgttaaggagtctatggctgaaacatgaaggagacttgtgtggagggcatactgggtaatgtacttgtaaaattgggtatatttcaattaaatttaaagtgcaggtacttttggttaattgatacttaaaaaaggtatttttaaacttaaccttttttttttgctaaagagtgactattcaattgttacatttttattgtaaccatcatgattatatttttctttgacgtgtaatagcaggctactaataggtaaacattcatttctagaattaattacttataagtaactattttttaaaaatagttaattaaatatttaataagacctcttttaacaattaatatttataaataatntttttatttatatttaaatccttattctaattattttaaccattaagccatttaattataatatttacaataaaatttattttttaacaaaaattaacttctttttacacaaattaaaattctcttcttataataattttttaaataattaacaaaaattaacttctttttacacaaattaaaattctcttcttataataattttttaaataattaacaaaaattaaacttctttttacacaacttatgacaactgaaaaaagacacaaaatttgtcttgagtagattaatatcaaagaaacttaaaaacaaatatcaaacaaacccaaacagaaactcgatcacaataatcagtcaattttctcttaagatcatcaatcacagttaatacctccttaaaattcacctcaacaaaaactctcaaaataaccaaatcgttagacaatttattttgactagaaataatttcaaaaattttatcttttaaatattcattatcaagagaaaccttctcccctgaagaagaacgtgttgggaattattttaccagnnnnnnnnnnnnnnnnnnnnnnnnnnttattaacatcctaaataagaactttctaaa

SEQ ID NO: 128724 - DNA, 890 bp, Cannabis sativa
tattatttaaataataagaataataatattgatattatgattattgtttcaataaaaattgaaatactatcaaaagattttgagtacttatatctatatattttattttatactataaatatttaaatctcaatattgtataaaataaattaaaattcatggccaccactatatcagtaatatatatataaaaaattattggataatgattatttttttttatttatatatactttaatatttttggtattaagttgtagttctattaatttttatgtgtaataaaaatagtgttttggcatcgtaaaaaaatattataatttagtgtgaaatttttttaaaattattatacatgccgcacgaaatggggcttcgttaactagttaataatatgagaaacataagatatctcaaaaaaaaaacataaatactaaaattaataatggttttggtttttttttttaatataataatgggttttgattcatatacaaaaattggaatatttattattgttatatatgactcatagctagtatatatacattcaatatacaattaaatgtatcacaattaataattgttgattggttttagcataacaatcatataatacatacatatatggtcaaactgatccaacccatcaaatttcatagagaataatatatttaattattagttgcaccaactaaaaactagaaaagtattacaatagaatttctattcaaaaatacacttgagattatataaattatattctaatagaggttataactaaatggagttatactaaaaaaaaaaaaatcaaaatacctaaaatatcaatgtaacaacaataacaataaataatccttaatactatattataatagaattatttttgagta

SEQ ID NO: 128725 - DNA, 668 bp, Cannabis sativa
aaaaatagcttctttctgctataataaataataataaaaacaggtggtagttgtgggctaattaattaatcctggcaaatctcataatatatatttgacttggactattttcttgtgaatattaatgaggtgtggggtaaatttaccattttcaattatcacaataaatgcctacctattttcaaacaaagaaaataaaaacataaatgcccatctcaaatttaactcttttgggttgtacttttttatttattaatttatttatggtaaatacacatgtaataagtgtattaaactaacaattaatacaataattactatttttgattgtcaacttttttacattaagatttgttaataataacattcaaaatataatttttgtaataatttaattcttttattacattttattcaattcaatcttgaaatgagggaatttttatattaacaaaataaaaaatcctttttatcataacttatattttattttaatttttcagtcattaaaataaaaaaaaagtgaaaatatttaatttacatttatttatcaaataataacgtaaatataattaaaagatattgggtgattctacaatacacctccttaaaaaagatgtactaatgcacccctacttgtttcggcatctagaaaaaatttttagtct

SEQ ID NO: 128726 - DNA, 726 bp, Cannabis sativa
  modified_base (674)..(681): a, c, t, g, unknown or other
ttatactataaataaatgagatcatatatgccctgaattaaatggacaatcctaaaaaaatatgtgtagttagatattaccttttggacacaaaccattaaaccaatcaagtatatgtaaatgtcatttgcttgcttcaaaatcatcaaactaattatatatagctctttttggctcattggtcaaaatgagataccacaccaacctacctacccatatcattataaatttaggtaaattatcttgagataatttgtttctgataatatataaatcaattatcatctcgaggccagaggttattacaatatattaataaaaataaagaaaaagaaatataataaaaaaaaaatcatttatatttatacataaaaaaaattaaataaagaaatgaaggatttttacaaaaagattatattataatatacaaaaatactgtatttttatgaaataaccgtaaaacaataaaataacaattaaaacaatagtagaacaattaaaaaataaccgtgtaataacaataaaaattttatataatatttttttttaaaaaaaaaattcacttcacaataaaaaaaaaaattaaaattttgagtatgtcacccttaatatttttaacttcacacagtagtaataataggaggaaattacacttagtatgggattttaaaagnnnnnnnnataaatatggcacatttaagtttggccaatttatatggtattttt

SEQ ID NO: 128727 - DNA, 991 bp, Cannabis sativa
  modified_base (664)..(673): a, c, t, g, unknown or other
ataatgtcatacaaactttaagtcttcataaacctcaataatgaaggaatctcatcaaaccatactagttctttatccacccaaagagcatcctaagctaatccatgtgcagctctattggttctccgacgaacatggattaggatattccaaagaaactggacatcaaactagctaaaacctcaccaaagaatattcccatgttttttgattgaatgatagtggttacttttattaaaatttgtaaaagcacctatagtaattttattaaattgagagattttttttaaaaaaaaattagaataataagaaaatgatagaatcaaaaaggcagaacatgattctttttaattaaaataatttgaaaatgataaaactaagaaaaaaataggtttcgatatttaaattttaaagtgattttcttaattagaatatgtgttgattgatattaattaaggaaaagtagcatatcgtatcatataaattcaatttttatatgataattttaactttcttatcttttaaatatataaatataattggaaaattatcccatatactatttttttaatttttttttttttaaatttacggtttgtgtttctaaagtggttgcagcgctacttgcaatagggtttatgtacgattttttgttgcaatttannnnnnnnnnctagttgcaataagagtttttatgtagaattatgtaaaattgcaaaaaaaaaaaaaaaaaaaaattgaagtgtaaaaataaaaaagtcccaatataatttctcaaaaaaatatataaatataaatagagtagttaggtcatgagtattcattcatatcgttcctaaaacgaatgaaatcatgggctacaacggcgactctagctccccaccaaatcataaatcgaagaaagtagaggatgatgatgattgtaatacccagaattaagaaaaggattagcaaaaccctaattagataattatgagttaattgaggaatt

SEQ ID NO: 128728 - DNA, 533 bp, Cannabis sativa
aggaatcccattaaaaggagaagtccactcttgaagaagagaaaaaacgagtcgaggaggcgctcacagctaagcgggaggcataggtagttaagcgtaatgcccatgcctatgatgttgaatatcacgagaccactgtcacggaagtattctatgagttttggaaggctaatcctaaatctcattttggttatctcacatcagacatatatgttgacatgaccgggtattgcaagttttgaaaagccaaggacgagccgaagaaagttgaccagaatgctagtgaagttgcttgggcaagcaccaaccaaactaaagctattaacccggcctcttccatccaagtttcagaagacccattgtttagaaaatacccaaatcttgcaaccccgatagactgaagtgttaactttttttttctttctgtacaaccttaacggccttaggttttgatacaatttaaccagccaagaggcttttaaacttggctttattttttcattatgcaaacatatggctgatcagacagcttt

SEQ ID NO: 128729 - DNA, 1406 bp, Cannabis sativa
ctattaaaacaacgattaataaaagagaaacaaacactagtaaaactattagataagttcagaattgaataaaaaactttagctaccctccaatccaggattactctagtggttagagcactaacagccacttttgagtctgagaaaatttgcacttcattccacccatcctcagtagccgtgctgagagcatgcaaaatagccattatctgcctccaacgccgagtgtgtctgcagcttttgagcactaacaaaccagcaacctgtattcgagtctacactgattgcagcaatgcccgcatccccttggaaccatgaggcatcagtgaaaatataattcccaattccttcattcaatcgcgagttaagcattctgtgttgctcatcaaatcgtatctcagtctgatccttgttaacttcaccactgccatcttgtacaaaagaggacgagatcaagagttccgtagccttacgctcaatcttaaccaaagcagccttagtatcaactctatgggatcgaaagcataaggagtttctctgctaccatatttcctccaggatgcatccaaaataagacagcaactccttcctctcaaaactatcaaaattgctgattaaataaaccaacgtgttagacatactatcgatagggatgccatcaatcttcaaggccaatctgcacccgaaccaaacagcttttgcaaagctacatttccataacaaatggaaagccgattcctcctctaaatcacaaagactacatgatttatcttgcagaaagtataggcgagatttagtaggaattgcctcacttagaattctccagaggaagatagaaattttgggatggatacctggctcccatatccatttccaaatctgatcctctgtagcaaacctttccttattgtcggtaatgtaagcagctttcactgagaattttcctcctgaattttgcttccaaaaaacctgatccttaaaaggagctgggattctaggaatcttaacaatacggtttcctaactcatcaccaaatatttggaaaatcaattcaccattccattcattaccttgagacacatcttcaatagtctggatggtatatcctctgcctctaattgtattcatcaaggacacaaaatcggggtattccaaccaagggatccaaggttggttccaaaaattaatagtggaacccgaagctgctactgatatagaacctttgaggatcattgctctagaatccaagatacatttccattgataggagtcactgcatttttgtttaacacaccagaagttctcatatatatatattttttttttaaaaaaaaaaatttaccttttaatatatatttttttttaaaaaaaaaggattagtcaaagcacaaggaaacattcatcac

SEQ ID NO: 128730 - DNA, 654 bp, Cannabis sativa
atggactcatgatgttgatgtaacacttttgtcttataatataagtcattttcattgttaccttaagcccaaccaattttctgctttttattttactggcttttatggggcaccgaattatcaaaataaaacccattcttggaaagttctccatagagttggatccactatccataactctccttggttgataatgggtgacttcaatgactatttaaactcgcatgacaaaattgggggggacacttctcgtgctccttctacccaatttcacaattttcttgattcgttcattctccatgatatccaatttaatggtcacccctttacctggacaaataaacaaggccagcaatctcatacccaggagcacattggttgggcgatatctaatactgaatgggattctctgtttccaaaacattttcttcttcatgaagactatttcagatttgatcatcgtcctttaatcttgaacctccatcgattaccaacatcccaaaatcacagcaaccggttcttctttgataaattgtgggtggctgaactgaactttgaagatagtcttatacagacttggagttccaaccatcaaagcaatacaaatgatctcatcgtcaacttagctgggaaacttaagcactgttcaaagca

SEQ ID NO: 128731 - DNA, 516 bp, Cannabis sativa
gatcttttgaattctagttttgaagattgggaagtgagcagtgaacatacaccttccccggagctcgaggtgcaacatcacttgtatcccgaccaaatacatggcgaagagtacgaccgtttcatctgagaactaatgaaaggttggaggcactatcttcctgtgaactagacgtacagggtccatccgagcatggtcgacactctgctcgagggctatccaatcccaactactgaaggaaactctatttttgagtttgttgtaactgttgcaaagcatacctctaaaagatctccgcccagtcataaaatgatagcacagaccaagcaggctgtcagaaagccttcatttgctgaccctcatattgctcgactggctaccctggccagggcagaacaggcctgacctaaggtcaaggaggaggagattgcaggagatgttgaagttcaggagatggaggaccagggcgaggtccgtcttgcaactactgctgaggctgaatgcaaagaggaagag

SEQ ID NO: 128732 - DNA, 690 bp, Cannabis sativa
agagagagagagagaagtaataaagatgatgggattgaaccaataaaatgaaatctgaaaccaatttgaagggttgtattaaagaataggcagagaaatgtgagaaaataatacgtacctttttaagttttaagtggagcaaaatcaataaagcacaaaacactgagcatgggcggtagtttccagaattgaacctggtaatatggtaatgaaaatggggaagggaaagtgagtagctaacatgtgtggttcatatttaatatgggaaaaacgtgtgctattaaaatctcctactttgcggcccacaatgcgagttcactcaaaacttaattgcatcactaccacataatattacatgaccataaaatttaatttaatttaatttaatttatacttataaacgtttattttcaaaaacaaaaaaaacaaataaaaatctcccaatttgttgtctgttcatgcaacaattaactcatgtttcgtctattttaattttatatttttttaaacaaaaaataaacgcaattaaatcatgttgttttggtaaaaatacaataccatggcacccaccgtcctctaaaaacaattgttaaagaatgtgtactttattaaaaatttacattcaaggtaaagtttatatgttcgaaaacttcaagtttacttttaacattgtaaattatttaaaaattt

SEQ ID NO: 128733 - DNA, 739 bp, Cannabis sativa
caaaattataattttttcgtgttctatagtattattttctaatttaattgattttcatttaataaattatttaaatgtcaattaaaatttaatacgtctctattctattgtctattaatattttattaattcaggtgaggacgatttgggcaatccttcattaagagttgaggtgcgaaggttgtggcgtgattagcgttagtaatcttaataattgtggttttttttgttttaattgtcattgatgagcatttgttgggtggatatcgaatattattattataatattttttattttttagttatatttatatatatctctaatagttaaacgtgttttataattatattttattaggttttattttatttttaattattcttaccttatatattttattagatttttaaaatttttaattcttatatgaatggcatttagtttatttgttttaataaagatttttgtattaattttggtactttaaaaataatttattttatttatttattatttagcttgaatttatttggggatagtttaaatgaatgccattcttatataaatgccatttttggttagtttgtgcaatttttttttttttttgtaccatttttttttttggctagtaggaaaaaacggggtctttgtctaaagaaatgccttgagaaagggcagatgtatagaacctttcaacgagatagtgctttttcaactctctcaaaatggaatatattc

SEQ ID NO: 128734 - DNA, 552 bp, Cannabis sativa
agaagagtattcttttctagatttcttctaaattatcaaataactcataaacttaatcccttagttaattttctacagtaacacatcaatgccacaaaaagacaagaatcacttaactattatgaccattttgcccttaacaaaagacaaaagcaaactaattttaaagggtaatttggtccttttccaaaacccgataattccccgatattttcaatgcctaacaatgatgtcccgctattaacattctaaaccatacaaaacgtgactttctaacggcccaacgtcgtgttccactgctaccggacataacactgaaaataagaaattcacttatatagcataattgatacatactgaattataataaatctccacaaatgtgtaaatcataattaataattcaatttcataattaatcctaattatttaataacctaatatcataaacttaggcgatcattacagttgctatacggattttgattgcggtttatgttgctctgttagttgttatagggatatctgtgtgaaattccgtaaaaatgtaaa

SEQ ID NO: 128735 - DNA, 950 bp, Cannabis sativa
cactggtggagttagagactctagataagttttacatttctccaaaaattactgctccaccctagagtagtcaccatctgaaatgtaaactttttagcattaatacaatatagaaatatgagtcagtgtagcctaaagggttttgaaaacatcacccttatagactaacttatagatcctccttgatcttaagattaatttcactatcttccaatgttcctatcctagattaaactgatatctacttataaccctgactcaacagcaggtgtttggtcaagtgtatactgaagcatgcatgagacctctcattattgatgcttaaagaatttttttccttggcctttatcttttctggaatagttgaaattatttttagataaataaattccaagtctagaagttggtgacttcctttagattcgaccattgaaagatgctctagcatctttctaaagtaaattttttgcattggagtaattaaattatcagatataccataacccattagttttgatatactcatcaaacccatgatactaggaaagggaagtttgcttaagtccactgaatagacctattttctttagcaaagcttcccctcttgtccttatgtttgaaacttttggttaatccatatgaatggttgaaccatagttctcttggctccgagtcttagtttcttacttggactgtccatttaatgttgaaactaacaatgaatcgtcatcactagtgtcatccaattcataatagggtgggtttccaaaaaccctcccactacgacaaggtattgtgacttttgatctaggaacatcagtgatattgtcttcttcagttgtgaagacttacgtcaatacaagagaggcagtgggaccatcttatatagtataagatgatggaacactttgggtttaaatcaaatagtatctcctctacttggctacttt

SEQ ID NO: 128736 - DNA, 671 bp, Cannabis sativa
tccaactgttggaaattcctctgctgcaatacattctgctggtgttggcactgttccagctcctccgaaatggtgtccgcccccccaggtgcttataaaattaacattgatgctggttttaatgtggcaggttctgttattggtattggggcagttgttagggactattttggtgatgttgtgggtgcctactccaagtccctgttgggttgttattcggttaaagaaatggaagcaatggctatttttcatagcctgaaatgggcacttcaacatggactgcaaattgactatcttgagacagattctcttattgttgccactgccatcaataaacattcagcaaaaggaaatgtctctatattttatgatattgttgatgatataactcttttattatcctcttttcctagagttctcgtgtctcatgtcaagcgtgatgctaataaagcggctcacgagttagcgagatttgcccttcgattggataatgattgttcttggttgggggaaattccatctccaatccactctgttattgttatggattctattcaataataataatagtgttttctcaaaacaaaaaaaaaaggacacgaactgatcatgtctcccacaccaattacgccagccacttcctccaagagctccacgtgtttgagctggtc

SEQ ID NO: 128737 - DNA, 507 bp, Cannabis sativa
aaaaatggtggtcctttctctgccactctaaactaccaccaaaaattaaattgtttgtttggagagcttatcatcatacactcactactacttctaattattggttcaagaaagtgtttcctagttctatctgttcttattgtcaaaatcatgtggagacagtttctcatgcccttttttattgttccagagcaaagaaaatatggaaatattccccttttcatcaattccttatgtataatcaatgtttggattttaaagaattttttttattgcttttgaatctttttcgaatgaaaattgtgagtcaattatgggattactttgaatgtatccatgtttgcgaaaccaaaacttgaatttaaaaatgtttttgataggatagcttcgtatttggttgatcactaagatgcacatgttagcaggtttgtcaaatttcattcaattttactatttcaaagattatttatgtactaaatcatgctcccaaactttgatatctaccaa

SEQ ID NO: 128738 - DNA, 642 bp, Cannabis sativa
tctactaggaaatgtttttttcttttgagtgttgagaatgcttttggtggctcatagttgtgtactgtatgttatgtttgaaatctatttttttaagggaaatttacactaaggttttatttttttttacttagatatgacagtttaagtttaattatttttatggtattattttaaaattattttatgatattaaatttaattttcaaaattcatatttatttttagataaatttcttctcaaaatcctttatcaagaaattaattttttcataaagaagctattcttttattacgaaactagtttttcatcaagaagctggttttgaatatagaaataaaatttgtatactaattttaaaattttttatctatcgatcggtcagaacgaaactcgtcaaaaatcattcatcaagaaactcactttttcatcaaaaaaaaaaatagtgtttgattatactgtatatcccatatttttattttttaaaacaaaatgtacaattaaatttacatgctatatatattaatgggtacacttttaattggtattacccatgaatgagtaaaattagaaaattttgagtttttatacttaatttttctatctaattaaaaaaaatctatcatttttatatcatatgg

SEQ ID NO: 128739 - DNA, 1301 bp, Cannabis sativa
aaaataattatgaggacttgtttggaaatcttcttcatcactactatctctctctttctttctctctattaataattattcccttttcactccaaaactatcattagattatatccctatttcttcttcttctccattcattacaattataaatttctcttttcaataatttttcctttcctttttaatttttttctttttcaataacatatatacatatggggatcatgatcatgatgatcatcaatcgaaattgataagctcatcatcaatatcatcatcgagtagtgaggaaacaacgacaaatcatcatcatgatcacgaaattctggaagagcaaaacaacgttgttacagttaacgttggaacaggtaataataataacaataataatcatcgttggtacgagtgtgtattttgtaaaagaggcttcacaacagcacaagccctaggcggacacatgaatattcatcgcaaacagagaagatcatcgcctaataataataataacaattataataataaaaagttattattattaggagatgatcatcatcaagaggagattactactattaatactagtactaatttgaggacctttcttgcaattaatcaaagttgttgtagtactacaccaccaccacaacttctaccactacatgagtattttgcaaactcatcctcggatcatcatgatgagggtataaatgtaaattaccatcaaattaataagggtaatttatttgatcatgtggtaacaacacccaaggataagggtcttgattttcatgagtatttgagtttgggaattaataattataataataataaagagaaaataataagtacttgtgttcatgatcaagaagaagatggtgatgttgaagtactagatttggagcttcgacttggctatcatcataagtattactagctagtatttttgtttaattaattaatatatttatttatttatttattattatatgtgttttttatatatagatattattaattatatgtgttgttaattaattagtagtagtagtagttaaggtatataataaacctaatcctttttttttcaattgtttattaattattagtatatctaattaatttaagtgactaacaatttgattatggtttttgtctaaaacaatattattttaagatttattcaattttgatgattactttttagtaacaatatatggattttttttaattactaattagtataattaattagattttttaacatatatacatatgttatgtgttagtatttttttttt

SEQ ID NO: 128740 - DNA, 594 bp, Cannabis sativa
tttttttttttttttgaatttatgatgtattttcttatttaagcgtgtgcattgtagaagcactctatattaagtatatttaaaaaatatactcattaacattgtattttcatgaaaaatatatttggtatcttgtaattttttgctaagatagtaccttgtatttttaataatacttaattgatactttatatttttaaattgtacaatttagtatataaagtaaaatttaatcaatataattatcttgatttaaccaaacaggtctcatctaatgtaatcaaataattaaatttaaatttataatttataatttttttaattgtatcgataaaattttattaaaaattaaatttatagtaggtatgattttaaaatataaaatactaaataaatattattaaaaatataaaataccaaataattattagtaaaaatataataactaatttgtatttagataaaacataccgtaataagaggagtgctattgtcaacctcctattataacctcttagtcaacctccacgctcgaaaacataattcggtatattttttttcaatttttttttttttcacgagggtgttcgttat

SEQ ID NO: 128741 - DNA, 1053 bp, Cannabis sativa
taaaactatcataatattattggttgttttaatatttagtagtgttgttcaaaaaaaattaacaaactgctcaattcgaataaactgcttaaactaaaccgaataaaccaataaaaaaacacaactcaaataacttcccaaaaaattcaaaccgcctaatgtatatattgagcaggttgaatattattctaacatgcccaaataacccgaataaactgatttacatatttttttactaaaattatttataacataatatataaagggaaatttgacattatatgcttaaaattaattggtacactaaaaatatgctaggatattttgcatcatgcaaaatatacttataccattttcgcattccaattttacccctaaacaaataaaaaccaataattcctatctctctctcgtatctctttgctctctctcactctctctaggatacttacaccacacacacacacacacacattgtaccagtcggacgtccaaccgcagctagtccggccgccttacgtaaaggaaacttgaaaccaaccaaagctctaagaaagacattcctttagaaaataatgggtatgtaatttctttagtaattattgtttgatttagttgtgtttatgttgatattaatagatttacacatatccttgtttttatgtactatttttgtcaatgaaacacgaaatgcagcaagtctgcgtttttctaatttttttgcaattttagcaatattttacgatttgattagcaacatctagcgattaaagtgttggcgtgaggttagggatgaagtttatcgatatgtatcgatttgtcacgatttatgtcgcgacacattgcattcttgtgttatgttgacgtttttttttttaattttctcgataattctgcgacgtttgtcgatatatgttgttgtcgataatttccacgatgaattgcgattattttcgcgatatttcgcgacatataagtttgtcataatttttggtaatttttgtttgcagattcaaatgtgtttgtagttgtactgtatgatggggcttgggc

SEQ ID NO: 128742 - DNA, 684 bp, Cannabis sativa
ggcatggggacgccgtagatggcgcctgtgattatgttgtagattccggtgaagataagggtggtgccgaggttgagatctctggctaaagtgagggcaagaatgatgggtatgtaagtgcctaggtctcccatggcgccattgagctcagcccatttggagttgaagagtagattggttcggagttggtggaggagtttggccgagaaagtgagtggtttttcatcggaggggttttggtgctccatatcaatatttgattatagtttgaagggaagttggcacatacatagatttatttataaattgtgtctttttttttaagaatatgccataacaatttgaaaatgacattagttgaaagggacaatataattcttagcaaaaatttcatgtcaaattttgtatatggtataataatgaaaatattgtattgaaatattatatgtttagtgtgatatttcccttgagtaagatttattgggatggtgtggctgattcgatttgaaaaagtccttccttgtttgcaagatttttaaaagccaaatcatgttttgtaagggtggtgtttgatccttttaaagttaaggtttgttctttgttattttgcttcatctttttaattggtcttgtgacttgtttgactaaattacatgcaaaaaaaaaaaaaaagacaaaacaaaa

SEQ ID NO: 128743 - DNA, 662 bp, Cannabis sativa
taatatatttatgttatgtgacaatgtttttgggtactccttttaagaagagcttattaaaaacaccaaaacatgtttttggggtttgtctttagtccgttgatgagcattgttcataatcccttaattttggtctatgcattgattattatgagaaaaaaaaacccctaaaacatgggactggctatgttctatatgtgctttttatttaaaatgcacataataatctaaagaagcaatgatctctcttcatgttcttattcttaatgaaagcacattaattaatgaaacacaatatctcacaagacttgaaaacttaatgaaggacccacttactatgaactgaagagtttataactaaaacatatgagaagttaatgcatgttggttgaggttgtccttgtcttaggtgattttggcttgaggttatgtaggttcagaacaaataaccacccttggcattagtataatggcttacgaaagattgaaaatgacataaatggacctaatttaaaattctctttataggttggccctctttgtttttggcactaaatagtaaatatattactattccacaattttaggggtgtttattggatcacatataatgtttttaggcctattcagatccgatctaattatatattggatgttagatt

SEQ ID NO: 128744 - DNA, 3120 bp, Cannabis sativa
ttccccctcaaccaagacgtcaccttgctcagatactggctcctcgacctcattatatcctccaaagcgtggaggcccggccacttcttcctcctcagcctcgaaaaggctatcaagacggacatcgtcctgctcgtctatctcctggacctcaatgtccccctcataatcctcttcctccacagcgggcagatcttgcttggcacttggcagcgtggcatgctgggccacgtgagggtcagatgcattaactttccgcatcgtctgctttttgcgggccatcatccttctcttggatggatattggtgtgtatgctgaaaaacattaacagcagggacagctattgaaataccaaagttaccagaacttggacggcctacgggaagggtatcagcaataccaggtcagacaatatatgtctagctagacggaagataacgtctccaacccttctttagttcccaaacaaagcgcctgtaaccttctcctgcaatcttctcggagtaagagtggtgttgcacttcaggttatggagtaggagaacgctcgctactcacatcccaatcctcgaaactcgagttagaaagtccgccactcgaagaggatggactggcgcagagacgagattggtcctcgtactgaagttgaagtagatcccggtcaatacagtgttcaccttcttaaaactcaccagggttcatctacaaaagacaatacacgagatgagtatttggccgggatattaaacaacaaataggcaaatatgccgaccaggactactcagtagattaaaaagatgaagaacacgtaaagatcaattcttaacccaggagtttgaaagttttgggttaaaggataaatttcacgaagcttcgaatgagcaaggtgagaatcaaacatagcgagattaaatccaaaatttcgtaagtaacgaagccgtacgaaccattacagggaaaattacaaaatttcaagcctagattttctacatatctcctacaacaagtcaagaacagtcatattttctacaatggaaacccagatgattgaagatactcactatttaaagcctaagcgttgtccagacgaagttgtttggatacttctgctagaaatcccacgacaaacttaaaagaaaactccttttttgctctaaggttatttcgtacagaaaatggtaaaagtaacttatgaaaagtttcagccctatttataagctaacttgcgaaaggggtaatcaactaaaatccttaaacgcttcgatttccctccaaaagtgaatattgggaaattaaaagcaatcaagtgcctcaggagaataactgtcaaaagcgtgcaaaagaaaacatgtctcgaggtattaattagtcaaaaaatgaagggatgcctggtcagattcacatcaaatcacgaatagactcacccgacacgtgtcacccattcaaatgtaaagtcagctcggatgaagtctacacgcaaattcggaagtcccgtacagacttgggtggtaaatgttatcccaatttttgcactatgacgtggcatcacattctggtgacacgtggacttgattctccatacctgcctgaaagagatgttccgagcagaacctacacggacgaggtcctcctagtcgagtagtggacaatccgagcagcatatcaacacttagcaattccaaaatttgtatcgtgaaacacaagagcaatccctataaatttgggatcgtaccacaaagatatggcaagctatccaaatcccacaatttgtgtattctaaatatgtaatatgtattcttaccaatcatagacattgtaagcaaaagggaaaccttccctcaaacatgtagccctataaatagtgatccattctcactggtaaaggggtcgagagaattacttgatagagatctaagagagcatactcagagatttcattgtaagagctttaagagaggaaatattgtgttcttcgttcttaagtcactacaaatcaaggagattaggctattaccgaactgttcgaggtcgaacttctttaaaaaccttgtattctttatttatcttttcatatcatatatgaattatatccttgattgcttatcatttagactcactgtcgttggctaaaagcgaggtcaacatttacattagttaagtatttaaccaatagtttccgatgtttgaattttgtaaaagcatcatttttattcttaagtagatatatccatacttttcttgaaaaataatccacaatagatgaaacaaaagaacaaccaccatgtgtactagttttctcaggatcccatacgtcagaatgtacatacttaagtattctttaagatttgtgagtacctgttgtaaactttaacctgtgatgttttccaagtatgcaatatttacaaatatcttatttactcactttatccttacccaacagttgttgctcactcatgagttgtaagcctcgctcacttatatgcactaatcttttgtgccatagggtagaaatttcatcttctttgtcgttgtgagttgtgatgttacagctagaaataggagagcctcgtaggtattatagtccaccattttttatgcctttcatgattgttagtgctcccctactaagcttcatttgacctgcctctaccttactcacaacacccaaatcatcaagcacactaatagaaattaggtttctagaaagattaggcacatatgttactgatgttagggttcttattatcccatcatacattttgaatctaattgatcccgaccctttaatctcactggtctgattgttctcttggaccacttttccacctttagattccctaaaatcaaacatataacttttgtcattagtcatatgaaaggtgcaacctgaatctaaaattcaatcatctttaaaagatgatgcaacaagatatacttcaccattatcagcacttccataacatcaccatagttggcttggttatttttaggaaaattagaactagggttagaattttctccttgtactttatatttatttggtttgcctttgtttagaaaatagcaatctctcttgaaatgtcctggcttgccacagttgtaactgttgggttttgtgcc

SEQ ID NO: 128745 - DNA, 648 bp, Cannabis sativa
aaagtgttgattggtgctttatgtctctttgtgtgttgtcatgttcattctttgcaatttaatatgggggggcttattttgaaagattttaagaaaaaggggggcataatttttcaaattttttgaatttttgggctatttttttcttttattttttcaattatggaaacatatttttattgcattttatctattgtgtttcctttattttttagggatttgcttttttgtggtgttttaggaaacttgttttcatttaattatttattttgttggtttcctttttcgtgtcattttcggatttggttggtgtatttattttgtagattttgtgggttatgctgtttcctttttcaacttttggtaatctttgactatattttgaaatatcctttttggtttcctattttctctcctcacgtggtgaccaagtaaggaagtttactttcctttttttcttttttctaatttttgggtaattatgttcaagtgttatacatgctcaactacccacattcccacgatcaccattattcattcctctcttatttttttcaaaagtctaaccttcttcaaagtttgagagtgtgtttgttttctagggtttcaaagaaaaatggcaaaaactaaaaatgctcaaccttccaa

SEQ ID NO: 128746 - DNA, 867 bp, Cannabis sativa
ttagtgtttctaatcattagctattattaacgaccctttaaaatcgacgagtattcttgactatagttgtcaattttaaacactaacttcattttattagcaacggtcatcaaaaaatattaatttcaggaccgatgagaataatgtattttgtactacagtgtaccattttgctctagaaaaagaattacattttgctttccttcttacacttatcctattatacttagtatttttttttattaacaagtaaatctcttctcttgattttttgctctcaaagaacatcattcttagctctctaaattatgtacacaaaagccactaacatgaaagagaggcttttctttcttaaacatagtcattttacttggagatatccatcctatcaatcgatgtatataccagcaacttgttttccagttcagccagccttttaattgaataaggcagtgcttactataacaacaatgaagggattatttcacaaatctataaaaataataaaaaattacaaaaatacgtttgtacaaagttttaaatatttttttatgattttatttacagaaaatacagtttttttataatgtactcttgttaatttgttattatttgtatgttattttttttttattattgttttgatgttagtttgatattattttcttgttacttttatatagttcttttattatttatataaactaatgtaaaaatataaaaataaaaatatttaaacttaaaaatataaatgtgttttatataattatcacaacaatcaaatcaatactgtttcgcactttctttactgatgttgcagaatattgtggacattgtcccacgtgaaataaatggtagagaattgag

SEQ ID NO: 128747 - DNA, 1411 bp, Cannabis sativa
aatagaaatagtgaaaatctcactcttacccctttgtaaaatgtggcccttgacctatctcggaatatatttctccattaaccacaataaattcgtactaataagatttgaatatgaagaatgttttcgcgttaaatttagttaaaatgaccccttaatttaaaaattaaaaatgttcttcttttcaggataaattttaacaaattttttcctcactcgtacactcattagtgttctcttaaaatctcacccttcaaatctcaaaaaatcgtgaaatttcacagagaggaagtcaagaccgttgtccattctattggttatgttaggaaaaaatatagttttcaagcactaacaatcattttaatcaaaatagtaaaaattttacttttttgttagtgatacccctttgtgaaatatcgccaagacccatctcaaaatattttttccactagtaaaaataaatttattctactaagacgtgaatatgtatataggttttgcatttaatttagttaaaatgttgacttaaaatctcatcctacacatgtcaaaaaattgtaaaatttcacaaagagaaagccaagactgttgtccatcactattctattagtcacattgggaaaaaatctagttttgaagtactaacaatcattttataatcaaaatagtgaaaatctcactttttctgtactggtaccactttgtgtgaaatgtgttctggacccatctcaaaatatttttttctcactagtcacaatgaattttaaaagggttaccactatcagaaaagtaagattttcatattaaaaagattgttagtgcttgaaactgcattttctctcaatgggttcgggccacaattcacacaaaggggtaccaaatatcataaaattaagatttttactatctcgattaaaacgattgttagtgattaaaaactacattttctctcaatttgaccaatagaaaagtgatggacatggcagtcttggtttcctcctagtaaaatttcatgatttttgagatgtgtagagtgggatactaagagaacactaatgagtgtaagactaaggataatacttgttaaaatttatcctgaaacgaagaacattataaaattttgaattgggggttaattttaaccaaatttaacgcaaaccaatcttcatattcacgtcttagtagtacgaattgattgtaataagtgggaaaaaatatttcgagatggatccgggccacatttcactgagggggtaccactatcagaaaagtgagattttcactatttcgatgaaaatgattgtaatacattttctctcaacgtgactagcaaaaaagtgatggacaatggtctttgcttccttcttgtgaaatttcacgattttttaatatgtgtagggtgagattttaa

SEQ ID NO: 128748 - DNA, 978 bp, Cannabis sativa
ttagtgtaaaaaaatttttcttatatatatatataagaaaataaaaataaattatcatcttaaataaataatatactatatacaacgaaaaatatatatcatacaacaaataatatatacccaaaatatttaaaaataatataaaataatatcattgaaaaaaatgtatatagcacacttacaaaattatataccattattaaaataattatactacgcccacaaaattataaaccacctttatatataataaaatagaaactaaacatgacctaaaataaatgatgtattacagaataaaacttatatactatacaacaaaaagtatatataccaattattattcgagtttctggattaatgatatgtgtattttcaaggcccaaaatagccaagatgggcccatccctgtgcccaatcaagttaatggattagcccacaatggagtcaggttacgactcggagttcagatgtaaatccaacttacaggtgcgataaggtcggagcgcttcagtctgggaaaggctatcttgcctatatgatgaaaggtccatcaggacgtatccagatacgctcacggggtaatccaaattggaaaactgaagggacatccgaaaacatccagaaaccatcctatgtggatgtttccagacacagggtctcaccaaggtaaaggtttgtcccttgcgtaagacctaaagagtacgcacaccaccaaaaggaaacaacatttttgtccaatatcatattctttgtaccagtgtggctacacacgacatctgtcaccaccaaacggtctccacacgtacgaatgaccaatatcttgtaaattaggcattgcctaactggcccaaagtcaatatatattatattttaccccatcagtggacctatagttgacatctttaaatcttaccaggtctgggttcacccatacccgactctagcctataaatagaacattattctttcatgcaa

SEQ ID NO: 128749 - DNA, 719 bp, Cannabis sativa
gcctcggccattgcagggctcacttgaccataaaaagtcttcacccatccttataaatcacaataaatgctcatttagcatttttgaatataagataccaaacaacaaaagtttgaaattataacacgagagacacaaaagtcctatataattatagtcttttggggtccattatccatttttcattagttttgcattactcccaatttgtgttcatacacgatttttccaacctaaaattaataataaatacacattgttcgtaagaatactatgaaaatgtatcttcataaaacgtacttaattataacaataaatattaatgaaaatgtatcttcttttaggggacatgagtcatacattgacttttggtttattcaattaaagcacacaagtttcatgaattatattttggattctttttacatatgcttgcaatattttcttttttttttttatttaaacgtttatatcttacaatgcataatttgggacacaaacttaggaccacacgcccttctatgattacttgagctagcctcaagtggtcacatatgcttgcaacatatagcatttatcttgcttttcttagaccaaattaaaataagagtatttgtacgaaatttttcttatgattgaactgttagactttttatttgggcttacattaaattttattggttttattaaaacttgggttgattggatagttctttgct

SEQ ID NO: 128750 - DNA, 798 bp, Cannabis sativa
  modified_base (39)..(40): a, c, t, g, unknown or other
actttatatgtatttatttacattattttagaaattcannttaggatgttaatgaaacatacctggtagtaaatctagatcctggtaaaataattccaacagacccagcttagaggccagcaacgaaccttagttccaagcataggccggccaacctagggacatagtccccatggccggccagaccccatgaaaggcacccatggctggccaagaagcatgttcaaaacaagaaataatgcccttgcattcatggtaaaataaatcaaataaagtgaaagagagggaatagaaaggatacccacaacaagattctgacacagatgaagatgggaagcttggatcgttgaaagaacacaaaaatcccaaggagaatggagcctatgggtttggccacctagagagaagaaggagcattttaaagagccaaatcctagtgggaaaaagtaaaagtgaaaaaaggattttccaccaaaacttacttatgtagtacatgtgggccccctttttctcacttacttcaccaactcatcataaaggaacataaatgagttatttctctattgcaataagatcagacaatcaagacaaaatgcttcaacacacgcaccattttttatttagcgaagctgacaaaagtcccagcaacatcaatattgtcggtaaatccccttttcgtatacacgaccggacagggacttaatgggaaaatgttatcctaatttttgtccttgttgtaaaaaattgtgtacgcaagtatacgcaatcgtaacaagtaataaagtgataaatcgagta

SEQ ID NO: 128751 - DNA, 1175 bp, Cannabis sativa
  modified_base (1123)..(1126): a, c, t, g, unknown or other
aaaatcgggtagtcgcacctaataaccaccttaataccgaggctcagattcaattcactccttgtaaagattttaggtcttacagatgagtacacacccaatctacctatgatgacacaaaggtcgtgaaaaaacaattaatatgcaccgaacatgatcaacatggctctgtataaccaaagcaggcaaataataagaataacaaaagaacatattcctttttattttttagaaaattcgacagcacaacggctgtattttgaataaactcaaaaatcataacctgcataaatatttgtacaaaaatatatttggcactctgtgccctagaacagtctagaaaaatatccaaattaagttttcaacttttcaaacaatttgcaaatcataaaaattcgaatatgtctaatgttattcaacacatataaacatcaagttaagtccctgcctatcccaagtcgttaaactttgtccaaaagacgatcttaagctctcaagtctcgagctccaattgtttatttcaatcttagatattactctcacatataccatcaaatggctaaataattatcatcattgcattctacattcaaacgagtccaagaacatataatatgactatatttaaagtttggagttctgaaacttcacctaagcggtgcacattaactatcggtggcttaaaaatcgatgtaccggaatcgtcgcgaaaaataggtgtagcatgtatcaaaatgaccaccttgtcgagtagatcacaccatgacaaccgtttgtcaaaatagtacacgataccaccattagaaagtcgtcgaaaagggacagagctacaaaaatgtcactagaaaaagtagcgagttgggcaaaatagcttagtgtaggtcgttctcctcgacaatctaagtataatggtaaaaacgactcgtcaaacagacaccgaaggtaggtggccagaaaatctgttcgaagtttgaacctccaaactttgacttgcaatcctaggataacatcggggaaaggagcggtgtcgcttgggggtgaggtcaccggcaccttggggttcgaatggtctggcgcatggggccagatggtggccagaatgttggaatatcttttaccaggnnnnagatttactaacaaatatgtttttgacatcctaaatatgaacttctaaa

SEQ ID NO: 128752 - DNA, 829 bp, Cannabis sativa
accacgtaaaaatccttctctaaatttcttacagctctctaaacttataatattttatcggttgccgaaaacctcggtcaacaaatatgatatatacaatcttaattttcttgattatcttaaacttatcaacaaattaaagtttgtatctatatttttcctaaccaactcaattataaaataaaaaattttatatacatttataaaaattgtaaataaaactttttaaaaaaaaaaaaaaaaaaagatacaatatgtatatattgttttaaacaaaatatacatatactatttattatatttacaaatttaaatgatataaaaatgtatatatattttagaatttataaaatttatatataaatcttatttatattaaattttaatttcaatatgcacacaataatcaatttaataatattataattaattggacatgattaattatttaatcaccaattacaagtcaaaataaatataagaatactttatttatagcttgtaagtacagcatccacatcatttatatttataaatcatactgaatttttacaaaaataaattaaatgttacctcacctacgttggatatgtaccatttttttggcaaaagtaccaaaacattactttttcttgcattttagtacgaaccatcaaatgtgactattgccgttaataaccatgtcagcatattattttgagttatttacaaaaatacgagaaatgaaagataagttttgatatatatggcataaaaatttaattatactaaatattgtattttttaaaaaaaacttcaaaatatgggaaaagttcattttatttaaaaa

SEQ ID NO: 128753 - DNA, 1770 bp, Cannabis sativa
  modified_base (73)..(73): a, c, t, g, unknown or other
aactacatgtatacataaatgacttctaatcttctattgataacaaatcagattacattgaaatgagttttanttagggcataaaattccaacactttggggaagtaatcttcatcaaggatttatgcatgaagtttcctatgacaatggatttactggagcgatcaaaggaaatcaaaaaaagtgctaaatactcttttaacaactcgagtcggattgtgttcatggttctagaaaaaactattacaataatttatttttttatttttaaactataattactttccataataattatttttaataaaaaaaccttatagaaattatatattgcatttgttttacttcggtctaaatctcacacactactgtaatatctatcagtctatgtatttatgtaaatatttaatttctatatatttatataaatgaaagtactaaagaaaatgaggtagcatcctacaatattttaaactattttaagagaattttagtaaatttagttcatttatatatttgtagatgttgagatatatgatttagtaagttctttttttttattatttgaaagaattccacatggattaagaactacattattaatatacttttatactataaataaagtattcttacatttattttgatttgtccaaaaatatatgggtgattgataacttgatcctgctcaattaattataatttaattttttattattattttaggtcatcaaatcaaatttatatatttagaagcaaaaaaaatgtgagttagcaacctattatttttatgttctttttcatattttttattcatttctcttctaagtgatatttgatatactcaccaaaaaaattatataaaataataaattataaataaagatagaatagaatataattatacaattaaattaataaatttaaaatcaattattttatattttaaagtaaatgcaaaataaattttgacattttttaatgtttgtcaaatttaaaataattattaattaaattatttaattgttttttcataggagtgttattttcttaaaattatttattttaatttttatttaaataattaaaactatattaatttattaatacatgacatattattagaataataaaaaatctttaaatatatatttttatatgtacttttggtgatgagatgagaccattttgaatattaaatttataggttatatatattttatttattccaaagttaatattatttattttcacatatttttgcactatttaatctttgtcaaatatttaaatctgaaaaaaatctgtatgttttttaacaaataaaaataatctatagttttagaatttttatttcatattattaattttattgaatatatctttatttttttcatttttctatgtctttttatgctttgagtaatattagagtcatttcacaaaagtcccacatggttttgaaactgttgtcggtgatataatttcacattaaatagatcaatattcttttatttttatttttcacaaagttagtataatttattttctatgtgggtgattgataaacataatcttaccaaattagttataatttttttcaaatgcaaattatatttttgcattttacaatatttattaagtttaaaataattataaaaaagctatttaaatttacaaggtattgagacaagtaagtgagtggaaataagaagtgctctaattgaatatctatcagaaatgaatacttaacttgttactaagttaagt

SEQ ID NO: 128754 - DNA, 753 bp, Cannabis sativa
tgttgtttttgtgcatttgtaaaattaacccaaaataaaaagtggtatatatatatatatagcggtggaatttggtatgattgtttgaatagtttggggccacagttgatagctcatttttgaattgtacatttgtaccgaagcaaaacgcaagacgcatcaacgcatttctcggatctgtgtgtggggactaatttgtctttttgctgccctctccctacttatcacattcacatatacatagacctgctctctatgcttttttatttttgagttccctatctgtgtttatatgtgcctgcccaatagcttaagcctaaacatgtcacaaacactatatttatagcccttctccttagggtcagtacagaataaagatcccttttccttaacaacttttaaatttttattatttttctattcatctatacatttttcacttattaaggcaccatctaacccagtctccatcttctccaactccaatgctatctatattgaattagtttttttttttctttctatggtgtgagacactgttgcttagggtactccatcaaaccgttcataccatattacatcgcattaaaatatgttttttagaacttctgttatacggttgcagtttaaaaaatttccaaagcatttgggatatcacatgcagtgtaatccacagtacattgctctttaaaaaaaatactaatttttgtaatatatttgtatttttatttaacttttagttttgtttaatct

SEQ ID NO: 128755 - DNA, 747 bp, Cannabis sativa
cttagtttgtggtggcaaacataccatgtatgttcttatatttaatattttatataattaagttatacatcttcttttatatattttaaataattttgatatttgagttaatatttgattggagaatattttatattgtgtaataatttatattgtttatcgagaattttagaaactaatataaataaaagttgagaaattaaaaaaaaaacaatagaaagtagagatggagatttttacgtagtttgggtgttaataaaccataatccacgagtcaatcatatttgaagcttacaaatcctagctttctactatagtgtttacataatgaatttgtaacccttcgcatgagggcaaatattgtacttatagattaggatttgggtttaggtatatccgtgacccgctggatttgtatgtaaacttaactcactaatgaggtaaatacatgaaatatgttgactaggggcccatagactgaggtcatcccatgggacgaaggtgatccgtatgcttagggatcacacgatatttgacagatggcatgcgtgtaccgtctttgtgtactgttgtgctaaagtagtggccgtaaaaaaaaaagagaggtttccttttggtggtgcacgtactcttaagtgtcatttggttggaggtaatgaaatataataaaatggaaagcaaacaatcttcattccattcatttgtttggttgcatatcaaagtattggaatgacatttctaccattt

SEQ ID NO: 128756 - DNA, 2029 bp, Cannabis sativa
  modified_base (1946)..(1994): a, c, t, g, unknown or other
cgtggtgtctcgagaaccgttccattttataaatgccctaccaatcctctaacttccttctgtgctttggcggcgcactctcgagtataagatccccaattttgaaaatctattatgtgcttcctctctgctgctcgtttcaacatctttgtgctagatcttattgccaggtatatatatatatatatactctgctttcttaatttaactatttttctttctttctttctttctttttttgataattcccttatttcctcttttcccaatccctctctcttcttttgttcttctcttcccccctctccctccccattctttttaaaagcaggagagtttcaatttttatgaggaaatattgtaacatttagggttttctgatgatggggctttactcttagttctaggtccgccttccctacaccatttgaccttgctccggtatatcccttgtcgcggcttttcaggggtcgtggctttaccttcctcatgttatgatttggtaaaggggaaggttgttttaagtttggcctcgttttaaataaacttcggatctcgagttttgttttatttatgttataatggcgaatgtggattatctaagcgtctcatctctggtttctgactttctttcttcgagtattgctcctgggttcatcgaatccctgttggtttttgatactcctcccatggagggtgagaatgtcgatgttcccgcagacccggaggttgagtgcttaggtagtgtttccatcgtcccccgttcttgctcctagaatgaggcgagtatcagtggtcaagtgatcccttctgaaggggttaccctagcggttcctccactgaagaaatctaagaggaaacaatcgactctgggaagttcttatttggacgttaaatcaagctgtccgtcagttttgacacagtcagaacttgatttcttagtgtcttcttacggttttctgtcgggagttgaggttagactccccaagctgcatgagagggcagactcccctcaggttgagtgggtatgcctgcactcctactggtttgagtcaacaatcagattaaggctgcccatccctaagttaattaaggagttcccttttcattattatattgctcctgctcaattacttcctaacgtgtgggctatccttttaggtttaatagttttgggggataaggcgggagttcagtgggaagtatccgacgttgtccatttttattcattgatggaaagcgagcaaggacgttaccatcttcgtcctaagaagaattgagctctccttaccgacctagagacttctcataaagggtggaaggataggttcttctttgctaaaggccctatttaatttgtttttgacgaccctacggccccattcatcaaccggagctgaggagctcctggtacttccttcgcccctgttgttaggatgtccctcctctttgttgccttttttgtttctctctttctcttctttttttttattcactgctatgtttttatttttattttaacaatggtgctttcgtgtagcttccgccgacaacgcggagacggttattggagatatttttaacgagaaggtttgtaaggtcacatccctggatctgaagtttcggtcgatcaagtttcttctttccagcgaagccttaattgaatcctccacctggcctcgtgaactcaagatccccctaggtattcccactccttatccttcttattttatttggcctgatttcttaaaatgcgcactgaagcacttgagtcaaacacccaaaccagttttgatagtcttttctgagaatcattcccaccttgcagaaacctaccctcgtcatcttcccaaaatgaggctatttgaaatgactgtcgaggagatcgaggctcaaaccgatgctcggcggaaaaggcttatggcaaagtgtaacaccctaactannnnnnnnnnnnnnnnnnnnnnnnnnnnnnnnnnnnnnnnnnnnnnnnnatcaacgaggtttatggaaatcatgattaattaaa

SEQ ID NO: 128757 - DNA, 867 bp, Cannabis sativa
gaatataccctcatttaaaaacagaacagaagcattcagataggactcaagccatttttggtttgctagaattctatctattttcgaaaaaattctatcatcaccctcttgcttgttattccaagtgtaaaagctgccgccaaacttcacatcttccaattgacaagttgatacacagttaataaaagactctgaggctttatacttgacccgaacaccaattctctcctctttttccaagatatcattaaaatcgcctagtaccacccaagaaccatcaggcctaaggctttgtaactcttgccacatgctttgtctacccacatcttcattgaaaccatacacaaaaaaaattatattaaacaaggacatatagtgtggtatgataacatgaaaaattgctaatcaattattaagtgtcatatatttatatagtaaataatagtctattaataataataaaactaattcaccaaaatttaatttctttagtgataaaaagagataaatttttagtctcccgttagtttcggagcttctgaaactacctgggaatcatagtcccttcatgggaagggtggagtcgactattccgatcggttttctgctgtattttctggcgtttgtgcgagttctgtccatggatctcgaattggttaatcggcttgcagaggtcttgcgattggatgagagtgatggaccagttcttcaattgaataaagatggtattgaggagggaaagaagaggttagatatgtgtcttgttggtaaagttattggccctagaccggccaataagatggaattgagaatgctatgaaggggatttggaaacttaaccaccggtttcaggtggaggaattgagc

SEQ ID NO: 128758 - DNA, 1138 bp, Cannabis sativa
taagtttatattttttttttaataatggggtgtatttataagtttataggatgcaaatagaactcccctatacaattttgtagggttgtaaatataatgccccaaagaggttatgtataaaattaagctaatttttctattatatctataaaataaattttatttacaaaaatatcctcaataatttgaattacacaaatactgagtgcccaattagcatatatacccattccaaaataattcctactttctttaaaaaaaaaaaataataataattcctactgaaaatagaaaaaatagagaaaaacctatgtcccgaaattatttgttttttttttttttttctgttttaaagaaatgttgctttttgatacaaaagaatatgaaatggttacctttgtctaaaaaaaaaattatttcaaatgttttaaagaaatgttgctttttttttctgtttttacaaaaaaattatattttaggttcaaaggtttttttttatatatatttttacatttttacgatattctataaaaacaacacgaaaacaacaaaaaaaattacataaaaaataacatccaaacaacattaaaacagcaatgaaaaataatatacaaataacaaaaaaattaacaaaagtacaacataaaaaatatatcaaaatatcgtattttctgtgaataaaatcataaaaatcgtaaaaatatttaaaattctgtacaactatatttttgtaattttttagctgtttttgtgtatttgtaaaataatttcttttttctcatgtgaaattctaagggcctcgtgtatttcatcatacacatcactttttttttaaaaaaaaaaataaaagataaaaataaaaatatttattttcacttcttaattttaaatagaaattttggtcaaatcgatattggttggactaaaaaataaacaatttttaagggcaatttaagatgtgagaagtatatatatttttatcggcatagatgaccaaaaattaaaatcgacattttaatttcttttataatgtactagttaacgaagccgcacttcgtgcggcatgtataataattttaaaaaaatttcacactaaaatataatatatttttaagatgccaaaacactatttttatta

SEQ ID NO: 128759 - DNA, 899 bp, Cannabis sativa
aataatttccaacaagtttatcattcaggctcaaatttggttaacgaaaatctgcattaacatgaataaaattcatgaattagtattgtccagacaaataaatgatataaaactaaaaatggaacaaaatgggcccaaaaaagggccatccacgcgcccccacgcacctattcttttaagggtcgtacgacatgtcgtttggtgaaaacgacatgaatagagtaaagaaaatgacccgtcgttcgcgttgaaggggactgaaccaataaaacaaacgacgcggaaaaaagacatgttgttttagtcgtccctgtcacccaaaaaaatttccccatgggttcgcgggtctgcaactcggatcggcgcgacccgatttgtgactcggtcgaataggccatctccgaccatcgaatttgacgtcgtttaaggggttttgtttccatttttaatcatatatcactttccaaaacccatttaattcaaaaaaaacacaaaatataatcaaattattatgaacccaaaatgggtttttctctaataatgcactctataaaaacttggtatttcacaataaaatcatacagcaaccgcctcaaaaaactagaaaaaaaactattctaaaatatttaatctcatatgacccattaacaacatattattccgaagataaaaaaaaatcaaatttgaaaacaaaatgggttaagttcaaatattatagagctctaaaatcaaatatactagctctaataccagttgttaaatgatcacaaattatgagcattaaatcacacatataatacactaatcatcattactcataaccattaatccaagatgaatactttattgttggaaattactttaccaggatcttaggtctactcacaagtatgttgatt

SEQ ID NO: 128760 - DNA, 705 bp, Cannabis sativa
  modified_base (31)..(31): a, c, t, g, unknown or other
tttatatcccaaagacactatgctcttcaantacttgaagacttaggacaattgggatgtaaagtttctaatgctcccatggaattcaatctaaagctaagtcaagatggagaagataaactttctgaccctaaactttataggagaatcattggaaagctccaatatcttactataactaggtctgatcttgcttacatagtgaataagctaagtcagttcttggtcagtcctagaatcaatcacatgaatgtagctttaagagctcttcactacatcaaaggagctccatgagaaggtcttttgtacctggcagattcgaagatccaacttgaggcatacacagatgctgactgggcaacatgtgttgacacaagacgatccacaacaagattttgtgtattccttgggagatccttagtgtcctggaaaagtaaaaaacaacatactgtatgaaggtcttcaactaaagccgagtacagagcgatgtcgaacaccacttgtgagctaatatggttgacatctctgttaaaggaattaaacattgatcacataggacttgctatattacattgtgacaatagaacaacccaataaattgttgctagttctgtttttcacgagaggactaagcacatagaaattaattgtcacttggtgagggaaaggtctaagaaagagttgtgaaaacagttcacactacca

SEQ ID NO: 128761 - DNA, 1271 bp, Cannabis sativa
tatattggaaaagaattatatattataaacgatattcttcttattgtttaattactttcctagatttatttgtattatatataatacgtatataaatcaatggctactctttattattatatgaattatcacagttataaagaggtccatgctctttttcagagcaggtttatatagtagagtgatgtttaaacatttgtgttcatatatatatatatatatatatatattgttagatgatttgttttcttgataaagtttatttttacactttattagaatagttattttttatattttttacgagaatttatataaaaaaccaagtaacaattaaagtatagcaatttaaattgtaataacaactcaaataaaaattacccaaataatttaataaattaaaaaataatatataaaataattctcttaaaaaaatcttgaaatattatttatactccgacaattatttaagatgaacataaattatacatatctactctagctaggacaagtcaaaatagaaaattttaataagaaaaaagaatgttgaatacttgaatatatatatatagttgggaatctagtagaggatcaagaatatgattttttgcaatgtaactagggtttcgatttcttaatatataataatgtgattatgtaccactcctatgtttagggaatattattctaaagcactgtcttttccttcgttgaccacctcattagaccacatctttgaattcaaatcactcttacattataatttcttcaatttatttattttggttaattgaaacaaagatatttctgtcctttaattattaccctttactttttttttacatcattttcccaccattgattttgttgacctacatataactttttttttaatatatatatatatatatatttgtatatttatataattaagtcccaactgtgtgcggctggcagaaagggtgataaaagttacattatattccattactttaaatctttatattaaatttcttgggtgtaattcttcacaagaatcattcaatgtatatgctaatttattataatttgtacaattataagagttgtatatgtttattagggtttagggtagaatatgatttttattactacaaaagcatgtagccaatagctaaatgacaaaacaaaaagactaagaaaataataaatataaagagacacttttcagtgcaaagtcgtgtttatgtgcacaaagtttatgatgtcgtaagcttttttttttttttttt

SEQ ID NO: 128762 - DNA, 1343 bp, Cannabis sativa
atttggcatcactcataggcatccatgtcccactacacatgaacaaaatggcctagtagaaagaaagcatagacatgttgttgaaaatggtctaaccttactagctcaagcatctatgcctctcaaatattgggatgaagcctttagaacctcagtctatctctccaatagacttcccacacctgttctccaacaccaatctccaatagagaagctattccacattacccctaattacaataccctaaaaacatttggttgcaaattttttccaaatatatataagaccttataacaaacatgtacaagcttgaatttaggtcttccccgtgcaatttcttagggtattgtctaaaccacaaagggtataaatgtttaaactcttctggccgattatgcatttcaagagatgtcatctttgatgaaacatcttttcctttttcttccaattccaaactggccactgattcatacatgtactctgaatttgccacacctgcacaaaatcccattgtctaatacattcaactcatcttgtcttgatgttccctctgctgttactactaatactgtgccatctgtggcaagtttttccttgcctacacaggaaccaagacctgctgctatcaaccaacatgccactgatactaggcagtctgcctctctacacagcaacaacaacaattcagctcctatttacccactccagttgctgacataccaacagtatctactgaaatagccacaccaaacatcactgttgttgcaccagcactagaacctgttacacaaacacaagtcactaccaactctcatgccatgcaaacaagggggaaatcaggaattcacaagcctaaagcctatctaatctctaaaattccaagaactgtcaaagaggctctgcagcaagaacaatggatccaaaccatgatagatgaaatgttggctttaaacagaaatgaaacttaatctctggttccattacctgaggacagaactcccataggctgcaaatgggttttcagggaaaagagaactcagatggaacacataacaagtacaaagctcgccttgttaacaagggctttcatcaataaccggggtttgactttactgaaacttttagcccggttgtcaaacttgtgacaattagaattgttcttactattgctatatcaaatggttggtcaatcaagcaacttgacatcaataatgcctttctaaatggcacattgaatgaagaagtttacatgctacaacccccaggttttgaaataacttctcctcccaaccttgtatgcaagttgcataaagccttatatggcttaaaacaagcaccccgt

SEQ ID NO: 128763 - DNA, 1939 bp, Cannabis sativa
  modified_base (1333)..(1345): a, c, t, g, unknown or other
  modified_base (1648)..(1654): a, c, t, g, unknown or other
ctgtcacttccgcatttaatgagttatttcattttcaaatataattatcgttccatgcattgatctatattcttctcaatctaacacgtgttttctgttaaaatagtagttgaatttcaggtatgaccattgccccttaaaaagttctttttaaatgatcatagagggtacatttgtcataatccctttcttcaaggccacacatgcccttaaactttacatcgtcacggtttgaagggtcattgttagctttaatgaactgctctttcatcttctacttcaccctcaaccgttagatttccaaaactttggccttaccattactggtaactaagtataaaatgatggcccaggctagccatattccataaactcctagtttttggtggatttcatcgagaagttggattgccattctactacatagatgtcccatcaaggcttagaaaattatccctcagaacttgtaataccggaatataccaaccgcttttcgtctccatatgttcctaaaaatatcaaacctcagtttatattgggaacgaaagattctaagacccaagatcatccgattaatccaaaccaaggagatactgccgatcgttacaagtgattcttacaagggatttctgagattaagcatcattcttggtaaatggtggtctgatgtgaattcattttttttttatcattgttgcttcattgatgttttctctttgtctctacaggaatggacatagattttgagagtatgttcaaaggtcctccccgagccgataagaaatcaaggaagaaggtaaccgagctgatgaggtcatggattccattgaagaacccaaacggctcgagaccaaagcttacacgaggaaatctttgagccagccaatcactagtgttgataaatttcctgaggcggggaatgaggtcacggctgcaaggaatgaggtctctactgccagaaatgggatcttctgaagcgaggaatgaaggtcccttctgcaaagaatgaggtctatgcagggagcatcgtagagggacatgttactgagtcagtacatcaggtcgactccttttgctttgagctggtctttctcgagctctcctgtctcctgtaaccttgtattctttgtttagtataatggcctaatggttttcccctattgatatttttgtaaagacaagtttgtaaaccaacttggcctttttcttatcttaaatgtcttgtacttttacattcaaacttaatatatttgtgtttggttgcattttcattcacaatgtaaacaactatattttgatcaaatgcatagtacttttggtctttccattgctnnnnnnnnnnnnntttaagtagttagtaatctactatatttgcgggcagtttattatctaccagactcgagcagttatcaattctgcctcgcaatgacagttataatttgtcttaagcaaacttgaatatacttttaatgattttatcactttttacatttttgattgcttatatgaatatttagatcgcatattcaatcattaggtttaagtacttttatcaggacaccttgatatctcctttaatactttcctatcttccacgaaccgttaatattcagctttgtacgtaagttatgagttatatctcatttannnnnnntgattttcctttctcgtcagacaggtttaaatcaaaaagttatgatggtttcatccccttctcgtcaaaaaagtttgaccaaaaactttaaaaaaaaaattaaagttgtgggtttgcattatatcatgtatttccatatgaatttcggttaatcatacacaaatgccccttaagtaattttaaagaggactttgtaattacttacataaacgaaatgattctctgtattcataactgaagtttaaaatattacatcagcaatgtgagttacatcattaatttact

SEQ ID NO: 128764 - DNA, 856 bp, Cannabis sativa
aattaataaatcacgactaatgataggacgagaacaagaatgaatactaaaacataaaaataataaatccataaaataaaaaaatcaacaccaagatatatactagttcaagtttgatagatcgatgatctatcgctctactagttttggaacaccactgtaatctttattgattgagcaagaatataggtacaatatagtcaagacaagattctatgttgagttctcaaactaattgtatttcaactctcacacttacacccaagaatcttcttcatctatagaagattttttttcactacaacattttccccattttcccacaaactcattttccctaataggtttataaatgctcccacagacccaattctcccattttctctattttttttctcaggcattaaactttcttcagtcctctctctcaacccttctccaccactaccactgagtaccaccacgcaccagcaaggacaccacgcagagtaccaccatgcaccaaactccatttcatgtaagtaatttttttaaaattttagatttctggttttttattttgtaaagattttagagatatatatcatttctagattttaaatatatttatatataatgtgtatttatatatattttaattttgtgtatatatacatgtatattagtttgtatatatttaagtatatttaaattattttttgtgtggtatacatatattttatttttcatagtttcttactttttgttttaacttcaaatatttttttagggttactaagaattttagagatatatataatatttttaaaatttgtagatttatttatatatgtaaataatgtgtatttatatatgt

SEQ ID NO: 128765 - DNA, 781 bp, Cannabis sativa
cccatatatatggggtcgttaaacaatatggatagtgttgggtccgacctattaaaggtcaggttaggcccagctcgacccataagcacgaattactcattttatgtcgggctagtgccaggcttaaataggccagtttgtttttgtaaaacaggtcaacctgtttttgtaaaatggattggcctattttattttatgggtcataaggtttatgaaaaagggaaaattacacagtataatgttttttgctcgtttttaacttttatactgtcatgcggtataaatttatttatactgtataattttaataattttagatggcagtatactgccctttttaaaacttttattttattatttttggccacgtgtctcaccagagttagaccatatcaataaattaattttttttatataaatataaggttttgatgttgacgtgggttgtcacttttatgacaatttcatttttttaaatgttttttttaatattatttattcttttttttttacttaaaattaataataataaagatgaaaatatatataaagctttgatttaatcgatattgtcaccttgctacaagtttttttatttactttctatttttttttacttaaaattaatgatgataaagatcagactcaaaacaaatttttcattatatttcctattctttctctctccgtgttcatcatcatcttcttcttcatgtgtttctctttttttttttttcaaaatccatacacttattatcttttttctcaatatcttctctct

SEQ ID NO: 128766 - DNA, 1458 bp, Cannabis sativa
cacaatgaaaggtcttattttctcccaaatattcgtacctcatgtgatttggtaagactcttaactccagttttggtggcttttcaatagatggaactgactttgttgggatgactcctagttcttcataatattttctattcaacgacccataagagtcaagccacataacatactcatttacttctttaccgtcttgttccactacctcctcttgtaccaaagttagagttagagggtcttcactgtgcttcttcaattctaccaacttgtccaccacataaattgagaaacaattatcattagctgtaggataagtcatcgccttaagtacgttgaatacgacttcacctccttgaactctcagctttagctctcccttttggacatcaatcagtgcttttcctgttgccaataaaggtcttctcaagatgatagggacattattgtcttcttccatgtcaaggactataaaatcagcagggaatataaatttgtctaccttgacaaggacatatttaattgctcctcatgggtgagctaaagaacgatcatctagctacagtgtagcagttgtaggttttcttctccaagttgtagcctcttaaatactgtcaagggcataaggttgatactagcccttagatcacacaatgcatgaatattttcaagcctcccaatagtgcaaggtatggtaaaactcctaggatctttcagtttaggagggagtttcttctgaagaattgcactacactcctctgttggagctactgtctcaaattcttccatctttctctttttagacaaaatctccttcatgaatttgacgtagcttggcatttattccaagacttctgcaaagagaatgttgatatgcatctttttaaatacttcaagaaatttgctaaactgctgatccatgttagcatcctctgaggatagggaatttttatgtggtggtcaatactaataggaggagaagtttctttttgttgaagaccatcagtagtcttcttctcttccggtgtaggtgctggttcatcatcttcttcatcctctggcttatcctggcttggaccagcatagttcttaccacttctcaaggtaattgccttacagttctcttttggattgacttcagtagtgctaggcaagttaccttgagccatgttagtgttttgagaagccaactgccccaccttagttttcaagaccttaatggaatgaattgcaaaaacgtgcctatttgagaatagaccctccattagagtcttattgttgttgatactgttggctttgctgagattgatttttctgaggataaaacccttgttgttgctgattaggaaactgcttttggaagttctgcagacgacccccttggttgaacccataattattctgatagtttcaaatggcttggacgtgctccattggcaaactgtctacatctatagg

SEQ ID NO: 128767 - DNA, 1021 bp, Cannabis sativa
tgtcatttgctcacttatttttgtttgttttgcggctgggagttccatttgctcgcttattcttgtttgcggctaggagtaccattttacttgcttgtggctggctaactctttgataggtgtggatcgaaagcccgctagggatatgactctaataccatgttgagaatcatgggattccatctcaaaactaattggtaatgagtggagtagccgatattcttatatatggctcaatacttttacatttgatctatgtgggacaatattgtccaataaatcacaccaatgtcgcaaccagcaacatcagaacaaagagtcacatcaatgttcaccatgaatgtaccaagaggagagggagccatctgcactcaggtgaaggtcaaggagtccagctcatttaaactaaaatctaactttcaaacatagcttaacggatttttttgaggcatttttaattcatgttcgatgttaagctaaaaagtacctagagtagattgtattaaatgccatgaatggatgagtatctaatacaagtattttataacattgtacgtaagaaatattgcatataatttaattttgcatatatagttaagaatattaaatatatattataactttttgagtatttaatgttagaattattatatagaaaatataaattgacactttatttacaaaaatacctctataaggtgtggacaacatttatatctcttatgtgcttttaattatcaaaatacctcttacactatcacttacacaattagacgatgtttgttggatggttagccgaaggttgtatcagacgaaggtttcaattagacgaaagttgctgggtggttggacgaaggttacatcagacgaaggtttcaatcagacgaaggttgctgggtggttggccgaaggttagaacagatgaaggtttcaatcagacaaaataatttttagcaaaatatttatgcaactgttatgaaacattaaaaatcagaatagtatttccacatacgtaactcta

SEQ ID NO: 128768 - DNA, 1648 bp, Cannabis sativa
atcaatttttgaacaataattttgaataaacaaataaattaatattgagaataataaatgattaatcaaactaaataaagttgaaggaaataaaagaataaacaaaataaatatacaagaatcaaattttgtatattttttcattgatgatgtgatggtatctagaatttgaaactacattatgtggagggtcttgttcacatgaactatcttgaatagtcgaatgagaaacaatgtctataagagtactagattaatatgcaacacttacttttattttaagttagagattattcagatttatgcccttaaagtaagtaattaatagataatatattacaaaatatataagatacaattgtaagataaataaatacattaattgttgaagtataattaataaaaatcttaattctcttgtacacccttacaagattatatgatatgaataaaataagtcagtatggtatgaaatgaaaagaaatttttaatatggaactactatgtatggtttactatacactatacttcaagtgtgtgtgattttgattcagatcacatatatggatcgacatctagtaaacgtattgtgtataatttgattatgcatgactggactaatatgtagtaacatctttagttgacgtgttgtttattatgaaggtgtttgttaaccaaaattaattagcttttacataatagatactttacagaaataataataaatagtttaaaaattaataactccagatattttttacatgattttgtagttaaaatctgcatactccacgactttcttttatcaataatcttttttgaatacagaatacaatatcagaataatattatttttctcccaattttctcgtccttttttctatggaatctgcccctctttataggaatataggtcggcagttttcctcttgcgatcagtttaaatatacctttgcatgaaacgtggacaattcacacatttcatttaattgcatgtgggataatatttgataatttctcaactaccttttgtttttatccctttgacggttaaagctgatttggaaggttgtatctggcttacatgagttatcctccttgtccaacttatgaaacaaaatgctaactgttggcaggttgtatgcctcgtcatatctctttatttgatttaaaatttcgagatgaccatcttgttatatgtaatctgcggttgttgtatgtgattatatttattctactcaaacaaatgaatatcttcttctttttgactatgtactttgaggtagacgtatgtctcgtcaatattgggtccatagtttttttatccttatcttgcataagactacatagtaggcgagttttgaatgttttctatgaatcctttatttaataataacgatatattttattctgcaatcatttatgtaaattttattatatcaagtaattcatattccatttacaggacacatatcaacttctgaagtgcagccaaattttggatctaacaattgccccttgaaaagttcttttttaaatttaaaagagctttttaaatgatgataacggtatttttatcttaaccaaaatttgaaaaattacatgctttgggttttggcggtttaggattttgaggcatatcattagc

SEQ ID NO: 128769 - DNA, 1396 bp, Cannabis sativa
caaatatataaaaagaaaattttttaattttaaatttttttaacttttaaagatttttgttttttattttttatttttaaaataattaacttttttattttaatttaaatatttattacgtggactaattaaactgtgccacgtgtacagtgtgtacacgtagacataccaacttggcacttaacacccaaaaatggatggaaagtgctaattgctaacagaacttgaatttaggaagttttaccaccaaaattttaaaatttggtgttagttacaaaaactagatcacttaaggaggttataccgcaaataattctaactttaatactcaagaacttacaataatactagtcaattcaaaacatcctatatcctaacagcaagaccgatccaaggctaaagtgggctagattcgtacctagagtctacccattttagagacaaaaatcatttttttttttttttaaaaaaatactatttatatttataatatgtgctaattttttttttcttataacacatttcagaaccggtcctgtcctagtaggggtgttcatcaaatcgctcaaatcgcacaagccgccaacaccgtaccacgctgtataaaaaatgcgatttacaatttttacagtgcagttgcaatttacatttttttaaccgcgcagtgcagtgcaatatgcagttttgaatttgataattacaattcaaaccgcaccgcactatacattacaaagttaccaatttttacaatatgatatttattctttttttcatataagaacaaatgtaaataatatatgcatatattactttattttttttagaggcaattcaatatatataacttaataatattatacatgttataatgttaaaactttaataatttttttttttgttttgtattgttaaagttttattagtttgatttttaaatttttattatagtatttgataatgatgatattgtaaacggcttaaatcgtaccacactgtatttttacagttttaaaatcttgcgatgcggttgcagtttaaaaaattataaaaactgcacatccagtttaattttaaaaattgactacaattcacaccacatgcaccacgaatataaccatcaaaactattaactgtcatcaaatatcattaaatattaacttatcatagcatcgaaaaataaaattagccaataacaaagaattatgaatttgaagacataaaattgacctataacagtcatcaatacgatttcttaaacaataaagacataattcttgaaaccaaagaattttataatttttttttgatgcggtgaacaaagtcacacatgattgttagactatttttagcctatattttggatcgattttatgttcgcttttcactgttttaggac

SEQ ID NO: 128770 - DNA, 846 bp, Cannabis sativa
tcctaactaattagtaataaaattaactaactcctttgacagtttgttctccttgatagccgccctcaaactcaatgtagacttagaaacaacattgagtttggaccgaatatcactgaacattgagctggagataggcttagttaggcagtcagctaattgagcttgagcaggcataagctttacttggatttgatgttgagaaccttgttggagagctttaagccactgttcataggggtattatgtgtgttgacattttgcatgttagctttgcagagcatttcttccaagtatttggtttgagaaagaaggataccttattctgttttaatgacttgaattcctagaaaataattgaccaagcctagatcttttaaggcaaaggtggtgctaagatcaacaacaaggtgattgaccataatgtcatcattgcccattattaagatatcatcaacatacactagcacatagatacaacttgagttagtgaccttgacaaagagtgaatgatcagctttagaaaattgaaatccatactacagcaaatagaggacaacttttcaaactaagctcaaggagcttgtttgagaccataaatggccttgtttatcttgcaaacatgatctagaaatttaggatctacaaaaccaggtggttgctccatatacatttcttcttgtgggtccccatttaaaaacgcattattgatatcaagttgtcttattgtccaaccttttgtaacaacaactgtaagtgttgaaatatattttaccaagatctagatttacttacaagtattttcttaacatcctaatatgaatttctaaaacgatgaaaataaac

SEQ ID NO: 128771 - DNA, 625 bp, Cannabis sativa
aaattaataactttcaaacatcttcttcctgtataaaaattatttataacgcaaattttagaaaaaaaaaaaaattattaacctaattgaagtatcattacacttttaagagttcaggatatataaagagaaaaaaaaagagagaaatctctacttagcttgtttgtagatgatcatagacggtttgactttttctttttggaaataaaccatacacatatgacatatgttgaaaatacagttaggaaatttaaaatcaactgtattacaacgtgagtggttttgttttttccaaaaaattaaaataaataataaaagttgttaatcttttatggaaatatcctatgacaatcaaaagaactgctaccatttgattaagaatcaaaagccacaaaaatgtttttattagaagcatctccaaagaagaaaattcatttttcaatccatttattaaagtaaaataaaaaaaaatgaagcaagttatcaaagcaaccaggctataaagcgcgactaattgggcttcaattagagaagaagcccattgaaatgcaatctacatagggaaatttacacagtttaatgtgttttcccattttctttcttttatactgttacactccaaaaa

SEQ ID NO: 128772 - DNA, 888 bp, Cannabis sativa
  modified_base (850)..(858): a, c, t, g, unknown or other
atattctttgcattgaatatttgtaacttgtattatgactttgttactttcttcttgtagatatgtattctaggttcagaggtctagctagtggaactttagaagagcctttgggtcgtccgaaggccaaggtggctcagaccacccatgctaaagatgttgtggggtcatctcttcctcctccatggagtgcaccggttgggcagcccatgatggatgaccctctagttaggagggaacgactttcaagcaggggcacccaaaagcctagtaggggagctggctcagccatggggtagaaatccatggaggtagcttgtaggcatctagatagagcctatcctactgtggattgcgagctgcaggtgcttggtaatggtgagtcaaagaggctttctaccgttggtctttaggagttggccttggtaagttgcacattttacttcgatgaatttttctgtggtattgtaaggtggtcgaccataggggctgttgtaggaagctggccagccatggatagtgtctttgagaggtcggccgcccttggctgcaccgtataggggctggctggttagtgttgtcttctggcacttatcatgaccttgatttgtttttaggcctttatgaagcttagctttttgcatggaaactctagggtgtctttgggtgctctttgggagtaggtaaagaccttggaggctaatctcttggcgaaaggcaaggctttggttgatatggaggctcttggcttacaaaaccagaacaagagttcttgtttagaggtcatgctcggcactaggaatcaggagaacacctttctcactgctaacatgtaaagcccgcttagttnnnnnnnnnattagcagttgtttatgtttaattatgaaa

SEQ ID NO: 128773 - DNA, 2616 bp, Cannabis sativa
agtttatatagtgttagggtgaaatatagccatttatagccgttggacatgaaaaacaagactgccactgggcaatcttgttcaccatttccaaatcggtaaatcgagatcaggagaaccgattaaccgtttgggaaccggttgaccgaattcctggcagtggcaaaaagtccaattttttgaactaaaacggctataactctctactcaattatctgatttcagaaattgtaattttgttttcttagttaaatgatatgtgatttaaaaagtcaattgaaaatttttatatcatttggtgagaaaacttgtcgcacaagttaataaaccaaaatttgtacttaaaacgtttttgagtatggacttgaaaatcactatacaagactaggaaatataaataaatcttcatggagccttgtcttgagttccttgagtctcgaaatccaattcgagtcactttcgagaattttggtaaaattaccattttacccttggagttaattttatcttagacaaatttattttaccttttaattgtgctataaaattaacaaatcgttagtaacaaataataatcaaatatttattaattgtcacaacaaggagatctaagagtttgagttaacaatctccctctttttgatgatatcaaatatttgattattttgaaaagaaaaaggaaaaattgaagcaagatatattagattagctctcccttagtgtgtgcaatggtaaaaaaaaatttaccttttagttttcccttgcatgattttgtaaactctcactcaattttatacttaagtttaaaaagcattagatatccaaaaaaaaattgaagttgttaccaaaaaaaaaaatcataaaattttcctcccatatgattcatcagaaagggtggcaaaggaattcacaatatcaaagacaaataaaaagataaaacaaagcataccattaaccataaaaattcaaacacatagcatccaaaataaaaacaaaacaaactaacacataaaatctaaaaggcactaagcctacgcaaataaactaaatcaaataaacatgagaaaagatgctaaaaacaaatgcaagggagctaatttggtggaggtccaaatcgatccatgcaagcccttcattgtgccatctcttcttgagcatcagtaaattcgtactccatgtcactccacatagtggcaatgccgcttcttatggtagccatctcattttggagagtagaaatttgagtgttcatttcacctctcaaggtgttaaaattggaagcaatggaggtgtgaaggttagcaaaagcctcttcgatattaaagtgagggacttgtggcattggcgacacttcttcttttgcttcctcttcgctttgagcttgggcttcttgctcttcttcttcactttcacttgagaccaaagctgcttcctcatgggcatgtgaaccttgtttagtagaaatccacttcttttccacttcattaaacttgtagcgcattaatttgaatgtgatctcaccaagactgtcagaatccttgggttcataaatgtcagtttcatcttcaattgggattcttaggagcgggaacaagtagctaagaagataactatagggtaaggctccttttagggtaggcttatacacttcattgatggtttttaggataaggtaaattaggttgatttggttgtctttcaagatgatgttgtataggattatttgatcaattgcacttacttcatcttgatggccttttctaagaacaaggttagagcatataaaagcatggaggatttttccttaaagggtgatgaaggttcatttttgttttatacgaaagttgtcacctatgcacacattattattgaaaaggtaataattgaaggtggtattattcataaggcggagtttatggtcaagcaagaggccatcgttgggttgcatttagaatattattaagcttgtctatggttaactcaaatgctacccctttgaggattcccttaacactatatggattgcaatgagttttaatgcaagcataaaaagccctaactagcctaggatagatattgatttgtatttctaacaaggttttccatcccatatgttcaaaaagagaattgaaattgacatactcaagagctttgagatctcattgcttaccatttagaatatctctttgtgagaagtcttcattgaatctttttgcatattttctatgggagaagaggtcattccttgccttggacctttgttccctttgttgcattgaggattcttgcctatttactcttgaagatgaagcattagagagtgaaaattttagagaatagggttggaggcttctatttagggttggaatatctgaatggggaatagaaacttgatggtaggatttttatgtggtaaaaattgcaattgaaaagacaaaaaagacattgggatcgttacctactgtgaactgattcaccagtttgtcaagtatgcaagtttcctgcaacaagcagttttcccaaaaagtcttcaaaacaagttttatcaaccatttgaccccaaatctttttagaaagcattttcttatcattctcatcatatgcctcataagtctt

SEQ ID NO: 128774 - DNA, 844 bp, Cannabis sativa
gcagtcagcgcaatgaaaagcaggaattctgatgtccaaaagctgcacttcaacattcaagacaaggtaaagaagttcatcgatctctcggcgaaattcaaccttcaagacgtcatctggacccctcgttcctgtaatagtgtggcccactctgtggctcaatgggcaaaccgaaacaacatgtttggagttttggatttggccaattttgatgatttcctgcagctgattgctgcagatggtcatactcggcattagaatagtctgtttctgtttttttgttcttgtagtagtctggttttattccttagttggtagcttgttgattgtttgttgcagttttttagtttttctggtgtagttggacgttgtctgttgttagtcgtttcgccctgttttcagggttcccctggctgtttggccgttggtgtttgtttttcaatgaattccacattcaaaaaaaaaaaaaattcctacaagtcaagtaaacaattttccaaatttttgaaattcatatagatctaaggccaatatatccggccaattgttagtaattatatatatacatatatatatatatcgagttgtctcttcaattaatatttgacctctataataatatatataaaagatggttccaggaagattaatcaaatgaattagctgtctaaaaaatttgccacaatttttttcttaataacaatttttgggcccactaatcactattcactactctatacctaataattacggcgttaactattgactaattccaaatatatatagtaaatctgtgatcgaagtatctatatatatatatatacatatccaaatctatatgatt

SEQ ID NO: 128775 - DNA, 729 bp, Cannabis sativa
tatttttattagttttgacttaatatttattcaagccctcacttagccaaatttttggcttcgtcactggctacagatcatgatacacgatgatcaacaactgaatatgtattaatgcttagatctggagtcttatcttagtgtaaaaaaaggtaactaatagtgtccttatcaactacagaagtaaaatacaaagcatcatcaatggccactcaagagagttcatggttgatatagctgataaagaatctaaatagtttatatattatgcattgccacttcattgtaataaccagcctgctattagcttaataaaaaatctaatatttcatgctcgaataaagcatgtggaagtacattattattttcttagagagaaagtttcacaagaggagttagagatgcactaagtaaaaagcgaagatcaagtataccagacatattcactaaaggactcaacacttatagattttagaaactcagagaacaactagcatgaagagtcgttgttgagggagagtgttaaaatcaccaccgactgtacataattacatattaacatttctataattttctaggcttgagcattaaaagaattaattagaaatatgtagatgtgtggagacttttctagctattgggcataagccgaaaaccaaaataaacttgaaaattctagttaattaaggtagcatttggtaacacttttgtttttaaatttttaatcac

SEQ ID NO: 128776 - DNA, 1201 bp, Cannabis sativa
aactttaatagaaaaataaaaaaactgtcaaactaacaatattagttaaataaccatacatatatttaatataagaaaaataaatttaaaattaaattaaatattatatatttaaaaatgtaattgaattgtattaaattttactttaattattattatttaaattaataattaagtaataacaactctaatacaattctaaataaatatcatgcattttatgttattaatacttaatatattatatatatgtttgaaataaaataacaagtaaaactgttacacgattcagcaaacttttataatagtgatttatcataagtattttataattatattttgcaaacaaaaaattgtcagtttaaaataaataaaaacaattttcaaataacatgatcatcatgatttatattataacaatcattcataaatttaataacaattatataaggtatgatcttattctaacaatataaaatagtttaaatttaaataatcataattaaattattttatttttaaatatattattaaaatgattgcacgaggtggagacacataagtggatataccctacatttctatcatgttttatatatatatattcctaaattaatgacatgaatattgtataattgttcttataagtcctaaataaaaaatgtgctgtgcttcaatttaaaaattaatcaagaaggattggaatacaacagctctcattaaacaggacaattgctacaaaaaagaaacttatgggtcaaatgaatccataatatttacataaaacaagaaaattggtgagattacaaagcacctagttaagagagttggtattggagaaaaattgtagaaaccaaagagagagtcaaagttttaattgatccagtacaattctcactagattcatacaacattgcagattgctaaaccaagacttggggcatgctattggagtagagaaatatgaggacgattaaatgtgtaaagattgtagaagaagacagaagaaagaatttctattgtattgagataagccaccagtgaaggtttatatacagagcaataagcaacaagccagctaaagcaataagaagaaattagttacaagacagttacaaaccaaaataacagaaccataacagaaagataactaatctttaactaacttctcttaacaaaatgtgccaaaacatagctttgt

SEQ ID NO: 128777 - DNA, 1164 bp, Cannabis sativa
ggttagggtctaccagtgatgtacttttgaaactctaattttgccgcctaggtcggctaatgaaaagacttgtaatattttgtaaaatatattctgggatcccgaaacatgaaattttttattgtaaagttaagtttattacaagttttattttcaatctgttttcgattaaagtttaaattacctgtgtttatcttactagtaatccagcttaggggattagggtttcttaatcaccttgggtaacgtgcttaattgttagggctttacaccaagtgtaaaagttatatcggctatctcgaaatgaaactaaagtgtgacgcttgaccctaagcactatgggtaaccaaccacattgattaccttggaatgctccttcttcggcttcccgaggaacagtgtcctggaggtattgtgcccgagccacgtgatcttgagctttctcatcgtctaggacaggaacctgtttccaagaaaaatacttgggatatgtataatgacaagtaaaatccttgtcagttaggagacccacagacctcaggttgacctcattcagaagaaagtcacatgaccgaagaccgtatgggagacccaacaagagcctgcgtcgctcggccatctcaggagtaggggcaagtcttttcgagacaactatcaaagacaaagcaaaattacaatcagctaaaccagaataaaatacatggactaatttaaccatgttgtgcaaataatcacttattatgcagaaagttgttgtgcaaactggggagagatcggtcgtccagaagaattcatctctaaaggaagttttattttaaaaattaacaatgatagtaaaaatcccttgctgcattcttcctcactggaacaaccttgacagagtaaagatactctatttccaggggagtggggcactcccaattcaagattttttacagaaccctcaaacttacgaggattctgtatgaaatgggattcagttgaaatggggcaagcccgaggtggtttaagaagtccttgaaatagtcttgcatggggattattgctctagccctgatgtgttcaaggctccaagctcctatcccgatcgagccacttgtactggtctcgccactggccccctcagatgttttacgtgcgagtcgcactggtgggtagcaacta

SEQ ID NO: 128778 - DNA, 698 bp, Cannabis sativa
gccattagagcaccttttagaaaacaagatactcgatttttgattgctacatagctggcccgaccaactctcatacttgtgtatacactccttgatacagatagccgcattcttgcttgccctcacacaaaccattgtatcgtcggcaaacattagatgtgaaattggtgtcactcctctagcaatggaaatacccttaatagtcccaaccattttcgctttctgcaataatctagatagaacatcatgacaaaacagaaataagaatgggagatcgggtcaccttgccgcagaccccgcgagggtctacacttctttagaggtttcccattgagtaggaccgcataggaagcactagtaacacatgtcatgattcgagcaatagtgtcattagagaaaccgtgagctcctaggactttcctcaagaagttccattcgatccggtcataagccttatgcatatccattttgatggccatcagacctccattgctcttgttctttctcaccgaattcaccacttcttggccgagcaaagttgcatccgcaatccaacgtcccggaatgaaggcagcttggaatggcaaaatcaccctatccataatcccttttaacctttgagaaaggatccgagaaatgattttataaacaaaattgcaaagactaatcggtctaaacaattccaccctctccgcgtt

SEQ ID NO: 128779 - DNA, 558 bp, Cannabis sativa
ataggggggctagaaattccaagtgcaatcataccaaaataggggctgcgggtcttgaattcctttgaatctctagcgaaggcagctgatgttggggagttaatcacgaagggagtatctacggggatgggccaacaaagcagtacctcggaggcgaaggacacttccaccctagacttggggagaaaaaaaacctgcagaggcatatgttgaggagagtttaaggaattaggatgatggaggtcgagggaaacgaagaatgacagaagatcgggaagtttctggttttggaaaactccaaatgacttttagtcctactgtggatactaccggtgactaggaactttttactatccctgttacttacttaatagaaccacatgggatggaaggagtccagtcatttgtctttggctcgggccagaagactattcccaaagaacatagtaggaaggttgttgtgaagaaggatgctaaaacaaaaaatgataagattagtggtatgccaattggagtttctcagaatggggattcgacagttgctaggagtgaagaaga

SEQ ID NO: 128780 - DNA, 873 bp, Cannabis sativa
caatccgcacaagtgcggatatatccatccgcacttgcactttgcagattggattggattggatccgctattttatgaacacccctatcagttacaataaataaataatgtataactagttattttatattgtttttcttatatatttatttatttatttgtatttttgtaaaaatttatttaacaactcacatcaaaattattggaacaacttaaactataaattaaaaaaaaaaaaattgatatatataaggtttttttttaatttttttttaaattatctttataaaataatttttttttagaaaagtcatttgtaaatttatactttaaaaattataaaaataaatgtaaaatcagtattacgtgtccaaaatataacctttcacaataattgtgaaagttaaagttgaaagctttatcaaccaattatgtggtggttgactgaatcacaattaatcaatttgaaatctagctttgataaaatcttctgagtttgacattatcaaatctgtctatcactggtttggtcattcaaaatcatttccatgagcttaatttaaccagatattaaggggtgtgtttgaaaaaaaatcaagcggtttcacgtactcattatataacaaattattatttatttcagtacaacaaattttattaatcaattcaaaaaaatcaataaagaaaccaccaaataaaaatagttaaaaaatatatatatatttgactgtattatgtcatgcaaccagattattatttatttatttatttgaataaatctgaatttatgtttgatgggttaaaaataaattaaaatttatttaaaatgtatatattttttttttttgaaaaataaaagctttattaattcaa

SEQ ID NO: 128781 - DNA, 1070 bp, Cannabis sativa
tgttaccaaacggcaccttaattagttaattaatctccttgatttccaataggtgtctgcacatatataaatatataaatatagaaatgttatggagaccttaaggtgttaagcatctggaggtgacatattattactagtgcaatttaatattaaattttatgcatttttatttaataaataacataaaaaaaaacctattaataactattcacaattacgtgtgtgtcacattgatatgttgttagacactttaaaatgactaataacaatcctcatataactatcaattcaaaaaacatgtaatcaagataatcaaacttcacagtcgaccaaaaaattattattgtagaagatattgatatttattaattatatatatatatatatatatttagggttaattttacttccaaattataattatattcatagatagtgttgtaaagtggtcgatttttttgagttttatgatgtaactaacaaaatatacactgttgtttagtctcattgcaattaatacatcatcggtatactttcaaaggaaaaaaaataattttttttaaatattaaatgatttttagtttaataattttttttaaaaatacatacattaaacttttaactattaattttatatatcttaaacttgtgtatgtggtgctgacatgattaaaacattcaagccagcattgaaataggttataggtaaatggaaaatttgaatccatactataaaaataaataatatttttaaaaattattaaaaaatatatacattctttaaaaagtattttttttttatttagatccctaaaatgagtggaggcctaaaccacctatacttaaaaccgaccctgccagcatgttattgtgtctatcatcattgccacgtgtaacaaaacttaataaaaataattattttaattacgacactgaaaataatttgagaattattgttaacgaattgaatgaatggcataataatacatatagggctcatttagtacgttgtattaagccgtattgtattgtattatattgagttagattatatattatatttttat

SEQ ID NO: 128782 - DNA, 1144 bp, Cannabis sativa
tttataaaacaatcgtaaaacaacaaaatagaacaattaaaataacagtgaaacaactaaaaaataaccatggaacaattgtgaaaaattaacaaagtacacagtataaaatttacacagtatttttgagaaaaattctaccccatagtaaaaaaaggtaaaaaaaattaaaaatttcaatatgtggtgtaaaaactccgtaatttatatgtctttattacatatatattgggtcgtccaactttgttgtcctaagtacaaaaccaacaaaactcaaaacctttttttattttatattatattattaacatcgagttccacccctaatattttgtgccgctaataatattagaaccatttcgagtgaaaaaattccaagattaattatgaacattattaagcatttaggctctgggactaattaggccttgagactaattaggccctaatactaattagaccctaggtagcaataaaattattaagttattttaaaaaaaaaaaaatgttgtataaaattattaaaaaaatatgtatatttttaattttttttagattcctaagttaggtaggtccagaactgatgccaagacagccttagcttaggctggggccaaatgtattaggattctttattggcattactcaaatgacactttacattgtgtttaaaaatgccaaaacgagtataaaacgtcatttgagcaatgccaataaaaaatcttaatacatttgaacacaatatataagataaaaagaaataaatatttataagtgatggattataattaataataaatattattatttatataaatatactcacatgagcttatattatagttcttgaggagaagaccataaccataaaactgtgcctcatgtcaagaaaaatgataactcgaatgacatgaacttgtttttgcacctatactattatatcaaaataattaataaatatattatatataaatttaaatatatatgttatataatatataattgatattatgtacctaccatccaattctcatctatatattataattttctttaattgtttttttttttaatggaaaatcaacattttattaaccattgaattcagctaccaaagtaggtaacaaatcaactgggacagacc

SEQ ID NO: 128783 - DNA, 1960 bp, Cannabis sativa
tgctcttgatatgcttgttgaatccattttttgtcactttaagaagtttggtaaaaataccaatttgtgttgcaaaaaattattttctcttttaattttactacaaaatcaacaaatcattagtaccaaataataatcaaatatttgttaatcatcaaaacaaagagatctaaaagtttaagttaacaagtcggtctatagtagtgtctgccaaacctagaaatataagaaccaataatgacttagtcacagaggtcgaagaaattgaagaggtccaaataatgataaatcatttattgatattgatggttttggtacaagagaaacaacagtgggatcttattctcgagatgatatggatggcatatggattgaaattaaataaccaaataaaagtaaatgtgtaactttatattaatattgatagtaaaagtgtttccaaattcattgctaattttactcatacatttaatgttcttatgcagagatacacgacaaaggatgacagtgacacacttgtggaggataacacacccaatgaggataaataacctcaaccaaagaaattatgaggtccatcggtgtgtaaagaggtatttaagtggcgaagtcaagggttgaaaattcctctaaaattgaatgaacatggtcaaccaattggagataattgtaggatactttaaacttatcttagcaaccttgcacgtacgttggtgcctatagatttcatccattggccaagtgtttcagatacaatattgagtaatctatgggatgatatcgaggtaaaagtacttacatgtaactatatttttttaacatgatgaattgttgaaactttttttcattcttttcagaagacatttatagttgaagcaaatagttatcaagcttttatttttgagtctatttgcaataaatggagggatcactagtcagatttgacttcaaatattatatatgcttacttaaaaaatccagagtatgcgaagaaaaatccgactgcattgacagagccaccaaaaaaataagaatatcacaagggagcaatggaaaaaatttgtagcttcccgaaataatcttaaatttaaagtaagttttattttaatatttcaatttatgcatcttaagtataattgcaatgataattatttttgttttaattatttaggcattgcaaaaggctcaagagagacgtgctaagcaagaatatattcattgatcagtttgacttcaatagcacaaatagatgacaagatacaaaaagagcgtcgtacatctgacccattgaccgagttgaactttggaagcaatcttggacgaattctaaaggagaatttttagatgaatcaaccaaaaaaattggtgaaaagattgtaagttattatattaactaattaactaaactatatttgatcttttgataatcgtccaagtgattatgtttatttgtgtagaatgaacttcttcagaaaaaagcaagtgctgaacttgttgtgattggctcaaatgatgttcttgcccaagcattaggtaaacacgagcaccctggtcgtgttcgtggtaaaggattgtctgtgtgttaaagagaggtgtttaaaaagcctccaaggagcacttgcgcacaattactagaggaacgactacaagataaaaaaaaacaagaaattaaacaagcattgaaaagtatcgaggaaaaattcaattctttaaaggcccaactgaaaatgataacaagccaattctctcaatcacaaccgtctcaagctcaatcaaagaatgaaattgatcctcaatctgagaatgtagatgacactcaactgtctcaagctcaatcgaagaatgtagttgatgttgaaaataattttaccaggatctagatttactaccaagtatgttggattaacaacctaatatgaattctaaaacaatgaacataaacacatataaagttagaaaa

SEQ ID NO: 128784 - DNA, 1153 bp, Cannabis sativa
  modified_base (1090)..(1118): a, c, t, g, unknown or other
ttattttgacaaaaaattaaggtcctacttgtactattttagaaaaatacaagatttattttgtcatttaacaaaacatagagtctaagtaataacttttgcaaaatacaggtccaaaataatttttttttaaaaaaatgagtagttttatatgaatttttgtgaagactctataatgttatttaagactacaacacacaatttcaactgataccgactttgccatttgaaagttgagttgaaactgtcaaaataagaactaaatcagttgtaaatcacacaacacaagtacgatcttcttggtgctttcactaatatagataatcatgttgaaattgtcatatttttgtactttattatttattacttgtttgtaatcatcttttcatttcaggtttacattcttcatttatatattattgtattttatttgtggagcccttgcttgtacggtgtgagtcattatacaggatgctaacctttgttgagtctttttaaatcaagtaacgaacatactccacaacgaaaatagacaattttttgaatgtccatttgtaaaatagtattgttttttcttataaataattctttgcaaattagcatgtttcaactgtagtgttcggcataatgcgggttgtgtcaaaaaaaagagaaacttttgtaagtgacaatagggaagaaaaaaaacatatttttccaaatactctcgtatttttatatatattattactctttcaatctatatagtcaacactatatattacaacttacaactacattattattctctcatagttttgccaggcattgattgtaatcctaagggtattatagcaaatcccacttatagcgttctggatagaaattctttcggtataatacaactaaaagaggagtatgtcattacctactaccacaagggggccgaacctatatatcaaatcctattgtctattactttttattcttctttgtcacacacgtggcaagcattagatctgcatgaccccgttgtcggttgatcacttttcaaggtcaatcatttggtactttcattgaccccgttgattgagagtgcaattccaagttnnnnnnnnnnnnnnnnnnnnnnnnnnnnnagttagggaatttacttggttaattcggttcgact

SEQ ID NO: 128785 - DNA, 1679 bp, Cannabis sativa
atcacttgtatcttcattatttccaaaaatgaaaaagatgcccaaaacacttttcaagaaagctgactagaaatgacctaggttgacaaaatgtcaacctggacgctaggtccactttttttccaccaaacgattctatttgattgaaaacactcgtatcccagttatttatgaacggagaatatcccaagaagacttcacggaaaaactaattggaaatggacaaggttgacgaaatttcaacttgggcattgggcccagcacttgggtcaacctcagtgctgggtcccagttttggctctcagaatttgtttgtttctcgaaagtatctaaatcttaattattgaggaaaatagataatatgcttagaaggcttcttctgaactactattggtaatgaccctagttggcaaaatatcagcctagacgctgagcccaacgcttaggtcaacctgggctttgggtcctagttttggccttcaagtcgatcagtttctttccctaacacacttaatttctcgttttggatatatggagacgaataaaatgcttgggatacttcttcaatattatggttggaagcgcctcaggttgaaaatatgtcagtctaggcactgtgtgcattaggtgtccttggcgcctggtgccttaattgctctgattctgattttggtgcctcaaatatgttcgaaataagtcttattcatgtcaaagtataaagtttgagtcatttgtactaagatgggcccaaagactgaaatcctaagctgaatgtctacctgggtgctgggtgaaaaccctatgcccccgggttgactttcggggtcctatttcatatgttttcagtttctaggccttggacttggattctgctagtctttttggttcagaaactgaaagatggtgagtttgaaacaacttgacaggatccaaacacccattctggagttcttggagttaacttgggcacaaggctagagactcctctcaaattgaatgctttgactcgggactactcaattctaagattttttttttcttgctacgtagtaaatattgatgtccacatcaccagaattagtttttaagtaaataaaagctattaattaaatcattcgaattgataaaaaaattaattaatgtgtaaaattattgactatatgtagcttatttaattagtctatatatatagctggggatgagctatatatcaaaagttgcagctgtaccatttcacttattatatcactaatttatatagtacactttattgattgatcaaattatgcttctctgacccgatcaatatccatcaccatttgcactcatagaagttttattttattttctgtcttttcgaatgaaataatagttgaagggttcatatacaatttgatccatatgtttaattcacttttgaatctttaagggtgtgttacatgcatggaggaatttacatgatttgaaggttctagttacactctttaattttcattatcctatgaaattgagtgtaattactaaaaaagattatttaaatatgaactactaaaaaatattactttcctttcactacaagaaatgtcacttttactagcacagttcgctgttgcgctggtaaaagtaacttttaccaacacatttcacaaactgcactgccaaagagatcaaagttttaa

SEQ ID NO: 128786 - DNA, 1421 bp, Cannabis sativa
gaatattcattccaccaaaatggtggaaaaactattttaaattataatcacattctaacactttaatatgcaactaaacaaaagaacgaagattgtttccttcatttcattacctccaaccaaacattatattttggttgaaataaatgaatgaaatagaaattgtttcttttatatttcatttcatttcactatttccaaccaaacgctacttaaagtttttatgggttaatggcgaaaatttaaaaaataattttttttattaaaaatataatgtaaaacttaaataagtctacaaacaattagcattaacaagtcctaacgttattgactttcattaagaaaaaaaaaatattttgttgccatgccaaactatttatgattaggtattattgtccttaagaaaataaaaaaggtgtggatggctgttgagccaaaagaattagtaatagaagtagcaattgtgcctatcatctttggataggatgttagggattttggctttggcattctaagttaatataatatgattgttttgaactcttccaaagtttagtaccaattgtgcctatcatctttgaataagatgatagggattttggctttggcattctaagttaatataatatggttgttttgaactcttccaaagtttagttgtatatattctttatgttatgcatgagtcaagctactctcgtctaaaataaggacggttgaccaaaatttttcagtaaccattaaataagtatgagtaaagatgattacgaaaaatagagaatagattttttacgtgattccagtattaatgaactgtagtgcacgagtcatttttatttatggagagaatgttctcttgatcaaagaatattttagtctgaaagcccacccttgtgtgtaaatccaaaaatcttttttcctattacaattctaagtatttataggaaaaaagaaagagtcaaaggaagaaaaaaggttcatctcccttctctaggtgctactcaactttcattgtaagagtttagtgatacaaaatttattccatgtgcggttgatgtgatagtgtatagtcgtcacttgatgatggagtcatgtacagtgacctgctttaatgatggagtcccggagaacttgtgatccgagcgcttagtgcctcctggatagttaaagatctacttaatcatttatcttgatatggggggcctactcccgagtgcacccttgctcagggagtccgggtgcatagtaataataatctctccacgagtaggttccccccttgacacgtggaatccatatgcttaccttgctatgtattttagttaaaaatgagtctaatacggatgggtttgaagctttcataaaaaaaaaaaaaaaattatgtctaaataaaaaaatgggtctttctataaattattttt

SEQ ID NO: 128787 - DNA, 1069 bp, Cannabis sativa
atattgaataagaatttctaagtatgtaagagtattgttattaggcggctatgatgcctaatattattataattaggtgacgttttataaatagttagttgtcctcaattaatattattaaagtaaaataagtgaaatctgatattgaattgtacatatagtaatatgacaccttataagggtgttaggcaccaaaagtgttcttagcattgttcatatgtaagagcatgcaaataagtaattatagcccacttaacaaaaaaaaatgtactctaataatgtgccaaacgatgtaaaatttatatcaccataaatgcactattttctttttaaattggtgttcattattgttgattgattttactacataagcctccatgttgtgaccaattttttcttcaaatatcttgttgactaatcgttgataatttgttccccgcgttttttagtctaaagggcatgaccttgtagtagtagagtctcatatatttgtcatgaaactgtatgttcttgatctgagacatgtattttgatctggttatattcgtaatatgcatctatgaaagtcattaaatttgtgtcctatagtgacttctacaagttggccaattctcgttaaaaaaaaaaaaaatcaatcattgggacatgccttgtttaatctgtaaatcaatacaagtcctccatgtttcattaagctttgggactagaattgggttcgcaacccatatcggatgaaatgcttctcttatgaaattattacttagaagcttatcgacttcttcttttaaggcattttgtcttccaggatcaaggagaagtcttgtaatgtcttcacttcaagcatctattgggcccttacacctacagaatgatggctcttatacacgagtacgtcactctagttacttcttgcaatgaggaccgaccctacaaatcaacacaagtatttttagcgtgctttattctcactcacacgcttcttgggaaaacttctgatgaggttacccatcctgaaattacccctggtcaagcacacttaactgtggagttctttcgtgatgatctacca

SEQ ID NO: 128788 - DNA, 635 bp, Cannabis sativa
aagaatggacaaaatgacaccatatattaatatggttaaaaccatggattggaatgggccataaattgattcaataattgagtttttataccacatattgaaattcctacttttttttttgtactggggcagaatttttttcaaaaatattgtacactatgttaagtttctactgttgtttcactgttatttttaattgttctgttttgttgttttatggttgttttataaaaaaatagtatttttgtaaagatttctgtatgatagtaaaattataattttttatcaaaaattcaatatttttgtataatatgcaaagggggatttcattaggatctgagaaaaaattgacacaccaattttttaaaataaggcgaggcgagcaaggtgtgcgctttgagcccccaaacactcaaggtcccgaacttgtgaaaaaatattattagtatatacattaaatattaaataataagataatatattaaatgggcccaagtaaacatttaatagttgaaaagaatgggcctttgcatcacatacaactatttatatgggaggagttgaagaatacaatttttttttttatatatttatatattaactaaatttaacttcaaataaaatttaattcaaat

SEQ ID NO: 128789 - DNA, 1329 bp, Cannabis sativa
gagccgttggaggtatcggaggacgaggatgggaacgatgcagagcttaagcagagagacgtattccaatcacctttatctcccaaagcttcattggaggatattcagagacaggacgatgtgagaaacgactttgtgcactttcttcgtgcaaatgaccaatgtaacagtgaaatagcacaaggtatgtctccgattccccctactttgcgatctggaagtgtggtgcgaaaccttgataaatcttttagaaactctgaatctagtagcagcaaagtgaagatatcgtttgaagatattgaggaggaagtctctttttggacaccttcaatagtgtgttatgtattgggggcaaaccctcctgtacatattattgagggatttgttaaaagactttggtctgataaggtggatatggtgaaattactgtcgtatggtgtcttcataatcagatttagctcactggaacatagagaccagattttaaatggtggatatgtgtttttcaacagaagaccggttatcatgaagccatgggatcctcatgagaatttcaggaaagaaaacatcaagagtgtgccaatttggattcacctggaagaattggagttgaaatactggggacaagggacactgttcaaaattgtgagtcaattaggcaagccgattatgctggattctgtaaccaaggacagagaacgattgagctatgctagagttatggtagaggtgcagatggaccagaattttccagaaattctggaatttgagaatgaatatggttcagttaccacagtaggtgtgaaatatgagtggaaaccaaatgtttgctcccactgctctggtttaggacacttggctgctgactgtaggaagcattcaaatgggaagccacagtgggttgtgaaacaggatcatagaaagcaagctgagacagatggagagggatttgtgaaggtgatgaagaataaaagtggtccaagaaggcagaatgaaccgctgaatgtggggaaggtagggactgctgttagtaatacttttcaggtgttggaagacaatgagaacatgggcaatatgggaaataatttcgatcagatactggaagatgagaatgagacagatgagaccatggggaaagagaacaaaacaagagggggggagtaccctctcttggaaatggataaaatactttgttggaatgtccgaggagccaataatcaacataaacaacagcttataaggcaatttatctatgctcaaaaggttgattttgttggtctcctcgagactagagttaaggctccaaagcttggggccttatatgtaaat

SEQ ID NO: 128790 - DNA, 834 bp, Cannabis sativa
caattttcataatcaagcccttcttgctaagcaggcttggcgcctttggactaactctgactctctcttgcactccatactgaaagctcgctatttcagaaactccaattttcttgttgctcctaactgtcataattcttcttttatatggaaaagtctcctcgggggccgccaactcctcaagcatggtctggtctggaagatcggttctggcaatagcatccccttatctgcttccaattggatacctgacatctcttctcctaccatccttcatcctattgacccttctctctcgtttgtttcttttttcaccaaccttgataatacctggaatatttctcgattaaaacattattttactctttaccaggtgggcaagattctccaaatatcccttcactatacccctgctgatactctcatttagggattccaccactctggcattctcactgttaaattcgcttaccatctcacttctactactgccaatatcaactctccttcttcttccaacccaaatccttttgaaaattggtggaaaactctctggactcttccaatccccccaaaaatcaaacacttctcctggaaagctttcaatcatattttgtcgtgtgctctaaacttgtttcacaagaaagttcttccacaaccatcctgtaatttttgtgggtctaatactgaatctatttctcatgctcttattgattgtaccagggctcgcaatgtatggaagcactcaaaattaaaaaaaattcacagtgactaccgaagttatgatattaaagattattatcttcaagcactgcagtttatttccacaaatga

SEQ ID NO: 128791 - DNA, 2441 bp, Cannabis sativa
cacaagtgaatgaaaaattacttttgttactttattgatatagaataatctggattacattgaaacagagttttatttaggacataaaacccaacatcctctccctagaaaaaagagcagcatcacaattaaccttcaactctcccaaagacggtttaatccaatgctcaacaccagcctgaggctgactagaagaagaagaaactcctccatttttaatttgagcaaatttccaaagttcaaggtaagtaattctggatgaaacaactttttccacagaagtagctttatcattccaaagtaaatcattacggccccccaaacactccatagaatcattgccagcttatcaatagtctcagccaaatgagtgttatagaatttctcaaaccagataccaaaatcctcatccccatgattaaaacgcagacccagacctccctccaaacaatcttttgtaaaagaacaaccagccataatatgaaaaatggtttcgggttcagaattacacaaagaacatatactgtaaacatgaacccgcttagtctgaagagagactagagttggaaggcaatttgtgagagccctccaaagcaaattcttaactttttgaggaagtttcaaataccaaaactttctccaaaaactagaattatcctacatattccatcttccattgcgcacttgtaaagcacgataggcagtctaactgaatatccaccaaaagtttcaaaagaccaataccaagtatccaattcaggcaacacaggcagcgaaattttacaaatgagatcaacatctctggccgggcacaaaaagatcatctgaaagctccacatcccaacacattcgattaggctgaagaagattagagacatgacaattctgaagagcctcatgagaagaaatcacaaagggattgtccacattagggagccaaggttggtgaagaacaaagatcgaagaactagaacccacacaccatctagcccccaatttaaccacctcttgagcttcaaatatactctgccacgcataactcggatttgcatccaactcagaatcaagaaaagaaccctgggggtaatatctagcttgaaaaacacgagccacaagcgaagtcagattggttaaaagacgccaaccctgcttgcccaacatagctagattaaaatacctcaaatttctaaagcccaatccacctttatgcttatgcagacacaacttatctcagcttttccaatgtatttctccaccttgagaggccttagaatgccaccagaatcttcccataaggcgatcaatgtctttacagattttaaggggaaccaaaaagacactcatggtgtaagaaggcaaagattggatcacactttaataacacctccttaccagctcttgataaaagcttgctatcccagttttgaatacgcttcctaaccttctcctttaagaagcccaaagtcgccatcttgtttcttccaaccacactcggcaaacccaaataaaagctattgtcattagcagcatgcatatgaagggttgacaaaataccgaagcgaacaatatcaatcgtgttggagctaaaaaatacagaagacttatttagatttaccttttggcccaaagcctcttcaaattttttcagcaattccagaacacgttgagcctcctctatagtggccgagcaataaagaaagctatcatcagcaaatagcatatgagtgacataaggggctctacgagccacacgacacccatggatccatttcttctcttcataaagccgaataagagttgagagaccttccgcacagataataaagagatatggaataggatctcccatggacaatgttataagagattgttctcagacattccattaccttcataacccagtcaaccgagaatcccatacgaagtaagatagcatgcaggaaagaccactctattctatcataagctttgctcatatccaacttaagagccatacatccttgttttccttgttgttttcgtctcaaatagtggagaatctcaaaagagacaacaacattatccgtaatgagacgaccaggaataaacgcactctgaaactcagaaataacaatagacccttgagccagttagccaaaactttagaaattactttgtaaagtacattacacagagcaataggtctcaaatctcccatgactacatgcattttcttttttggaataagcacaagattagtagcattaagatctttaggcatcaccttattccgaaagaaattctgaacaagtcgaacgacattctgaccaacaatatgcatgccaacacttctgattagggctgaacatcgggtgggtttaccgggtttcgggttggcgggtttcgggttcacgggtttcgggttcaaaaaaatgaacccaaacccggacccgaatagggca

SEQ ID NO: 128792 - DNA, 1998 bp, Cannabis sativa
aaataacatgggcactaatgtcagtcatatcaacatggctccaggctaaaacattgctatttgcttttattgtggaaacaatatgttcttttactgcaagaggtaggttcttccccactcggatattattggtgggatcttcatcatctatacatacttcttccactttctccattggttctataacatgttctgcgctaacgcgtggattaagctcatcttctgggatcacccccagtgctggctgggaagatgttctggcttcagagttatttccttcctaggccatgagtataaatctagttaaaatgctatagcaactctgtgcacttttatgatcccctctcatagttcctatgctttctatatgactggagaactttaagcatagatgccaaatggatgtcaccactccgaagtctattagtaattgtcttcctaggatagcaagcattataagcagtagggaaggaaatcaactatcataaatgtgttgtaattaaaggaggatattgcgttccttctaagaacttccccatttatagtcattggaagctgtatctttcccatggggatcaatgtatctctattgaagccttaaagttgaatcagacaaggtaacaagttggcttttactagaccaatggcgtgaaaggctcctttgaaaatgatgtttacagagcttccgttatccacgaggattctggaaactcttttgttggctatttaagattctattaccaacgggtcattatgagggaaatgcacatggctggcatcgtcttttgtaaaattcatgggaaattttatcatccttggacgttggacatgtgattgcaccaagtggcaagttttactttggttcaattcattaaggtaccgcttctgtgcatttcgagtgctttcaacaatatgggatccacttgaaatagttggcacaggaccatctaaagcttgtaatgcagctccaggagggtgcaaatttctgggactgggggctacagctactgccgttgctagagcattttatgccccttgaagggcttgtgcatttggagcttgtattccaggtagctatggatggcctacttcctaaggaggatttatggctccataatgtctgagaacaaaaagttgtccatgtgcaactgcctgtcccgaatagatgactgggattctcacccaattggtcaagtgtccgttctgtaccaacccttctatttcatcttttaagtaatcacactcattggtggtgtgaccaatatcaccatgatatttacacttttcatttggatctcttctgtattttttgcccttgtacatagacggaggctttttatagtgtaccatgttacaggttgccttatatacacttgcccttctttgaggattcactctgattgagactctttgtactccttttactctttgaatgggttatattagactctggaactttttttttggtttgtttgtccgagagtggcactgtatccagtatgtgtagctccaaacccataaaaaactagcatgtacagttggctgcacgaaagtacttggtccatataccgtaggactagttaaagcaattaatggagggtaatggatggagttgtcatctgcgattgttgggtatttgttatttcgcaggaaggtgcagggagtactccatattcttgggtataagcgtcttctaaatttatgaatccttgggctcttgtcaaaaattcgctcaaggcatctgcccttttgcgctggagatcccctatagtaaagatctagttgtcagtcctcatgttagagccactatttcatgtcatcaatgactttagtcttagcagccacatccatcatgcgttggataaacttcttcaagctttctcctggttgttgttaggctatttttagcctaagttttgggtcacattttatagttgtttttcttctttattattagttttgcaatagaattatgcttgtttttttttggtttcaggt

SEQ ID NO: 128793 - DNA, 621 bp, Cannabis sativa
ctctctctctctctctccaccaaactaaaatttttcttttgtttaatctaaaaactagcccttcaatctgataatagaatttataggtgaatcagaagattggaagcttaaggtaagggttagtttatggttttcatggaaaagcttaagttttaaaagttgaaattgtattttggagctgttgggttttatttctcggatgatataggaatgcttctgatgcttttgggatgattttaccactgttttgagttagaaatcaagtttgagtttttaaagctcaaagcttgagctttaatagcgtttttcatttaagagcttgattttgatttttgttacgtatagattattggatggatattgtttagttgttctgtgaagtttagaatcaattggttaggtttttgtgggctttcaaggagtttaagcgtgagttttcttgtctctgcgaaaaatagtagagtttttggagcaaaataaaagggtgtcgttttcaattttttttgggagatcaaaaaatatactttggtcataactttttactcgggtgtccgttttaaacattctatatactgttttgaagcttgcaacaagctctaaaatatggtgtatgttttagag

SEQ ID NO: 128794 - DNA, 1320 bp, Cannabis sativa
  modified_base (723)..(726): a, c, t, g, unknown or other
  modified_base (974)..(984): a, c, t, g, unknown or other
atttgaattcggccgacatgtatctctgtgtgctagtactatactactacataagtacatacgtgtaatttatatatatatatatatcatatatattaatcatgaagtatcgatttggacgtttgaccattaattttctaggtttaatgagtaccttactttatgtgcttgtggtatagtttctctaaataaaaaagtttcttcgagcttttatcattcctagaaagcaattgacttgcggaagttgaacctagaaggctttcttgttcttatgggaagggtcttcaggaatgttagtcctcctccaaaaaggagttccggatggctagctgttcctcctagaaggcggtcccggatagtcgactccaactagctcttttctatccaggaaggttcttcaagaagtgccttgaaccgtgactccggaagccctcatactcactcccggatgtactcctttaggatattgatcctaaggcttataaatactgcctacactagtcatttcaggggtgcgtcgttcagtttgagattgggaaataaagagagaaaagattgagaggtacaaagatagaggtacagagaaaagagagagattgggtttgggttttgtaagagtgttgggatttattttaccagaatctagatttactaacatgtatgttttattaacacccgaaatacaaattctctaaaataataaaattaaacacataagagttnnnnaaaccttacattgatggcaacggaataatatgactccttctgctcagatctctaactcttacaaaacccaaacccaatctctctcttttctctgtacctctatctttgtacctctcaatcttttctgctcagatctctaactctcgttcctttctgtagcagaataatgacaagatctgagcctagatcaccttctctccttcgggttggttaccaccatcttctgcactatgattgagtacttgacnnnnnnnnnnngggcatgacactctatcactatgactcgagtatgaagaacaatgaatgagggccgaaatccctatagaatgagtctctcatctactagttgtctggcagagttagaaactagatttggtaagttgaaagtattgtctgagaatgagagcatcatgttccttttgtagtattttaactagggtttaggattgaattatatggattaaaaaagaataacataatggacaaaaattacacatactagttacaattttgctactttatttcaactatttactcttctttcaataataccatatttttcaatttcaatcatataaatgtcaaaactattta

SEQ ID NO: 128795 - DNA, 2105 bp, Cannabis sativa
tacactgagtagggataaatttactgtttcacccctcaatgtattttatccttaaaacattgggcacttgggctctttttaagaattcacttaatgcatctgcccttttgcgctggagatctcccacagttaacatctagttgtaagtcctgatgttagagccactattttcatgtcatcattgactttggtttaagcagccacatccatcatgcattgaataaacttattcaagctctcttcttattgtttcttgacactggttaaggagctacttccaaatcatagtccttggctattataatctactttctgaacattacatgtagctctctctagttttggatcgatcccggagacaacctcttccaccaatcctctgggaacttactcaatgttaatgaaaaatataaacattttgcatcatcacgggccttggaaactttcatgatgcaattgtatttggacaaatggtccctggggtctgtgcgtccttcatacagttctatctggggcattctaaaatgttttgataatggtgcatcaatgattatcttcacagaaggctccgtctcctttgcctcagagtcatataaggcacaactttgttttctagaaatcttttctgtgatcttcatcaactcctcgaccttacgtttcagtcgttgagtcttatcactagatgattctcttccgcagatgcgatcatggatgtggtttatcaaatcgttcctgtggggtcttactttttcagctttggttctttccttcttggcattcaatcttcttcggagatcatttgtggaaaggcttccgccactgtcatctgatgccggatgtactttgtcaacatcctcatcgtggttactggaatcactaggaggaggcttttccctttgagactctagcttctggacttcgacctctatcttgttcttctttgtgactctacctcttgaattggtttggtcactatgccctgaggtgtggtttcctttcctcttctattgaggttggtcaacaactttagaatttttcggttgttttgtcgaaggattcttctttcgttcttcaatagcgattctctttcctttgtccttgcaaacgcctgaagttcctggatctttcggatctactttctcaggtgcatcagttgttggaggagctagcacgttaggagatagtttagtttagacagtcattacagcttccattctggtcatcttgcagagtaataactcattgaattgatctgtcggagttaacctgcttttggccaattagagttgtcttgccatgataaccacaggatctgactcattaggctggcttttctctccaacgttatcatcagtgactttttcctgagggtcgtcttcatgcatatcctctagtacgtctttactattaacttcaacatccccaaagctactttccccagattttgcatccttaataatgggatcgtctcgattttgatcttcatgttgacgacctttctaacgactagtcacctcttgagggtcattagagtctccagctctggcactagggccaatgaaacgaagacctgacttggttcaggtgagcgccatgattactcgaacgtaatctataaatggtctcattcctttcttcagctctcaatgaaagcaccaaaatatttatcgaaattttcagaaatggaatttaaataataagaactgatgaataattaatcaaaagagcaagtataaaaagagacaaatagtttttacgtggttagagaggtaactagccctagtccacgaatagtattatttagtaaatacttatcttgtaaaaaccttcaagaataaagagaacatatgttttcaagtttgcccgagccaagtttacaagagagttccacctctaatccagaagattcctggagtatttatattagtttgagaattacattaggttttttctctcccactattggggagtttagagtaactaatactcttaggctatctcatgaagtctcgcctataaagaagatgatatgctgactaggcatgtaaagcccgcttagttaatttggaaattatcagttaattgattaattatgaaattattta

SEQ ID NO: 128796 - DNA, 955 bp, Cannabis sativa
  modified_base (45)..(47): a, c, t, g, unknown or other
  modified_base (923)..(924): a, c, t, g, unknown or other
atgtcgtacctacttctattggcctccaactctcacacaaggccnnnaagagaagaatttaacctttaaataaacaagggccaagttgcaaaatggccctaaatctacccattaagttaataaatgtccatttttataaaaaattaagaaaatgtccatttccttaaaatttgatgataaaattacaattatatccttaggtaataaaccctaattttctaccgcattctcattttcctggagaacaaaccctaactttctaccctatgtcattttcttgtctccagagaactctctttcttctccctcagtaccaagaccatcttgcctctaccagcccgaccaaaaccccctgtattaccaccaccgatcgtcaccgcccctggacaattacaatcgcagatcatcaccgcctgtttctagtaaccatcgcagatcgtcaccacccgtttcaagcaatctgtaagaaccaaactcaaaggtaaggtacataaagatcaatcattgatatatgttaagtttagctttagatgaatcgtagaaagtgaacattcaatcaaacacctcattgcattttcacttcatgagtatgatcttgtaattcttgtcaataaaaatggactaaaagaaaatacttaaaaattaatgataaaccacttctaatattcaaagcaatgatccttatagttacataagggagtataattttttaaagcaaaaagaaaataataacaagaaaaatagaaaagaaaatcttctaattattattttaagtattgtttgatttttgcatattctttgtatgagcacttgactattatgtataaattgattttgttttattatgttttattatgttttatattgtttgatttttgcatatactctgtatgagcacttgactattaggtataaattcattnngttttaatatgttttatattgtttgattttt

SEQ ID NO: 128797 - DNA, 533 bp, Cannabis sativa
aatacaaattattattagtacattgatgtgatcacatcatgcatgcatggctgagtttttttatttatttttattcacgtggtaataatttttacttaaaacaaaattcaaacttaacaacttaagataaaattattgtatgtaatagtatattcatagaataaattattaaattaatgaaaatattcaaaacaccatcatccatgctgtccaaaagttttataataatataataattaaaagggaaaaagattagtgagaaatggcactatgattaataacccaaattggcaagggtatttccaatatttcatatatacacataagaatagccaacacagtatcttaagatagacatatataataaatgtgaatatattacaacacacagccaaagtagaccaagttttatcttgttcttgtgttcatcttttataatgactacaagaaactctcttccttcaccataaaaaaataaaaaaaaataaaaacagtggaatgtgagaaaccagttagtaaaacaaccaaaataa

SEQ ID NO: 128798 - DNA, 675 bp, Cannabis sativa
gagagagccttgttggattttttctcgaatgaaatggcagtcaatttcaacgtgcttcgtgcgctcatgatagacaggattttcactagtgtgaatggctttagtgttgtcacagtatagagatgcagtcctgttgagtgatatgccaaaatcctttagtacaacaatgattcaggttacttcaaaggttgcattagccatggcacggtactcaagttcagttgaagatcgagagacaacttgttgttttttcttatttccatgagacaagatcttggccaaggaacacacattagccagatatggatcgacgtgtatcctagcatgtcccctagtctgtatctggaaagaaagatttgtacattgtgttggaatatattttaccaggacatgttgacttcaataacttgaatccaacccattatcttttagtattctgtactataaagacatggagcaacctaatctaagcccagagagctaaaattacacaaacatgcgatccagaagccaacttaggcacctagggttttcacccatcgcctaggttgacatcttcaactagggttttagtttttgggaccgtcttagtgcaaacgggtcaaaacttgcattggaacatcaactagatgttggaaatattttaccagcatctagatttactaccaagtatgt

SEQ ID NO: 128799 - DNA, 779 bp, Cannabis sativa
tttttcatttatagtacttatattgtgtatatatcttgttacttatatcccgcaaccgcaccgcaaatggtttcaaaccataatttttatgcggtgtgatgtggtgtgggcggcttgtaggtgtgagcagtttgatgaacactcataattagagtaaattttttacatttgtatcttcattgaagattctctaactcctggcccaaatccgatttcttgggtaaaatgaccaaaatactaagtttaatggagtttatttttatatggcataagtaaataatacaaaaagatatgaaattaaaaaataatcaaaatttaaaatatgaaaaacaaaaaaagaagaccataaataaatttaaaaaaacttttaataataagtatcttcagaatgtcgtcgaaaaagttgtcgtagctagaaaagtcactggaaagtcattgacaccggaaaagtcgctgaaaaaaatattgtcactagaaaagtcactgaaaaaagtcattggagttgtcattatcgttagaaagatcaccacaggtagatgtctcagatataaattaaaatagaactcgttttataaaaataaaaaataaaaatatataatacataataactcaaactggttataattaaagtaaaactggttctataacataatgaataaaaataaataacacaaaataactgaaatcaattataattaaaatagagggcttttttcataaatgtacaacaaaaacaacataattacaaaaaatgtgcaaaaaaaattattttaaaaact

SEQ ID NO: 128800 - DNA, 1273 bp, Cannabis sativa
cttttgaaaccccgaacatccacaactatggaaaaactgaaaaacatagaaaacaagcgtaattctgtcctaaaacatcgaaaaatgattctatttgtgacccaaaacataggctaaaaatagcctaacaaccatgttttcaagttgatccaattgtgcttgcacaaatagaagaactggttcagcctgttgactgagctatgtcacgttgggatctctatgaactggatcctggatgcgaatacctggttggacagctggtgggacgtactgttcgtttaggccccttcttctatttaaatcagtcgtgaggtcatgtgcggtgcccaacctattaaataccgaggtaccaggtggtcttggcatctgacttatttggctggtgggttggctagagattttagtcagggtgaagttgttaggtataactccacccaaaggacggtcaggaaggatttggccatctacagtttggcccacaggttggacctgtggcagtggattgggcgactgatcgttgtgagtttgggtagtatgcccagcaacatacccttccaaaatcgcccaaagggatactagatgcagtagctggttgttgattcgtgacttggtaggccttctttatcaatacagtggcctgccttgtgcgatcatcagtggctgcttactgagcccttaaagtttccatctccttgtccctccattctataaactgatgtctctgctcgttgaatgtaaggtttatagttgcacggagatcctcttgatcatggcgcaaagcattattttgaccttgcattagtccaagggctgttcggaggttctagatctcagtatcatttccagctgtcctctgaaaattagtggtggacgggacttcagtgttcggagtgggctgatcggctgctgaactggtgttcccagtctctagcaatgcgtggtgtgatcccagccagaggggaagtcacaccatggcccacagtaggtggctgtgtattggcctgttcggggtttgtccctgctggtcctctcgtgttcctaggggtctgcacgttgggatctatcaccatcgggtcgccctgatcagccaagcctctatgaatttacaccaccatcctgtacgcctgtcaaaacttgagagaaaaaaaaacttgggttttagctctcaatgaaagtaccaaaatattgacctcacttttagccaacgacagtgagtcaattaataagcgattaagaatgtaattaaaatagagcaaaaataataaagtaataa

SEQ ID NO: 128801 - DNA, 760 bp, Cannabis sativa
ttcctttccattccatttcatacctctaaccaaacgctacttaatagttaacttgacttaagagaattagataaagctttcagatctgagataagactatttcatttgttgggatgatgaagatgaactgagttttagttatttattaaggtagactgatgagtatatatataaatattaacacaattgaccatacacactatatcatgtgaggaaagccacgtgactggcctatatttctatataattattgagttttggctccataattggttggttcaaaatgtatctaactaataaattcatggtattaagaaacaacactcaatggcaagacttatagtcgagttcttactaaagtcttttttaacaccacaacacttgagtttaataactcctccattacatttgggatcgttccatggacagcattgggtagacatggacaatttggatcctctaaagaaaacatttggccaagaaaacaacgcctttcatgttgcaatactaggtgaagctaatcccaaagatttaccagtgcagaaattgctactatcccattccttgcttgcctttcagccaaacaagaaaggggacaccccgctacatttggcggccaagttggggaatgagagtttcgcagtggttctgatagatcatgcaaagacattaggccatgatagtgactacagaaatctgctgaggaaggtgaattatgagaaggaaaacacagcacttcatgaagctgtgatcaacggtc

SEQ ID NO: 128802 - DNA, 1074 bp, Cannabis sativa
aaaaaaaaaaaaaaaaagaggttgtgctatcaattccataaactagtgtatataaacagcaccaaatataaacaaacatgcttaaaaacatgatgaaaatcaaatcaacgaacaactcataactaggaatagaagcatccacaatgtatctcgaacacgcaaaattcaaaaacaataaaacccaagctcaatgatcccccgcccaaagtactcaagaggataaaggaaaaaaaaaatcgattacaaaccgagagagacaaactcataaattacgaaaaccaagaatacccatagaaaagaactagtaaacaatgattaataaaatccagtaatcaaaaccaaaaggataagaagtaataaataaatatattaatggaggaagacgaagaaattagagaattgagggaaagtcacctggaaaattgacaatggtagagagtcgaaatcgaaaagggggttgaagtgaaaaaggtgtgagatcgtgggtgagagaaatgaagaagaagaagaaggaaggaggtaagtaagtaaaagaggagtgttttggttgagctcccaaaccaaacgccctaagtaaacaaaaaaagtacccctgcgctatgtaatcgcgggagacactctgcggagaaacaatattttcctttttatttttatatatgtattaattagttgttattatttaattattaattaaaattaattttattaaacaataaaaaataaataatttaaataatataattaattattttattataaaatgtaattaattaattaacgtcaaatttaaatttaaattaaaatttatataaaaaataaataattattagagaaatttacactcattactgttttttccattttttttttgtttgtactgtgacacggtggaatttacttttgtactgttttttttttttttgcagtatcctgcctttgcaaactttaaataaaaatatatatattataaattgtaaaaagcgtgtgcagtgggtttttttttgtttttgttaattttcttttaattaaaattatattatattttaaaggtataaaagtgtgatgtgacttgtg

SEQ ID NO: 128803 - DNA, 504 bp, Cannabis sativa
tttgtggtctaaaatttcaagatgcctctgtttttttttgttttttttttttgtaagaagagatgtacgattaggttatgcttatgataaagtttagactattgttcttaagacaaaaaaattaattctattttttaatttatatatattttttttaaagcttattaatttgaatatagttttctcaataaatttgttataaaagaaaaagacaaattaatgttaataggagcattttttttttcatatatgtataaaagttttgaaactaaataacataattgtaatatcatttatttattgtcaaattagaataagcattgtaaatttgtgagggcatttagcccacgtttaaaacataattgtttaggaatatgacacatgtcgctattaattgtttcttgaagtgaaaattagggtatttatatatgggtgactattcaatagttacatttttattgtaattatatgattacatttttctttaacctgtaatagcaggtt

SEQ ID NO: 128804 - DNA, 778 bp, Cannabis sativa
aatcagattagattgaaatgggttttatttagggcataaaatcccaacagatggttgccacaagatcaagaagtgttgaaagtgaaactactggccaactcacttgaggcgcacctatcacttaaactggtgatgggacaacacctgcatctcagatgttaggtggaggcctcagaataagcttcatgactcatatcccaaggccaccaaatttaggtactgaaactagtgaccaaattccaaccggggagccacatgtggaactagaagaaccaaggaggtcgatcctcaagttgaaagcttagcaaactattgctagtctacaacaacatctgtgattctctctcgacaagcaacatgaacagattcaaacctatttcattgacgagtgatgaattataaacaatcaacatgttgaacaagagcaagaaagagcaaatcttgctaaaagaatccgagagacctataaatccagcaatggaagggctcctccggcaattttttttgctagagctggatacaaccctcgtctgccaacccacgtagggataagcacgcaaggggaaaccctccgtgcgcttggtacgtctgccaatcctggtagccatactgctcagcgtgcagcaggtgcaacaacctctacataacaacaatctttagagcatcttaatgtatctttatatttattatgtttttttttcacataacaacaatctgtgcagcaacctctacataacaacaatctttagagaaacctctacataacaacaatctttag

SEQ ID NO: 128805 - DNA, 740 bp, Cannabis sativa
  modified_base (674)..(690): a, c, t, g, unknown or other
atatttattttaatttaagttttttttaaaacaaaataaaatagttcaatctattcttaaaccaaatactttcagcataatccaatcttgtcaagtccaatctaatccagtccagtcatgcgtaccaaacaagtccttaaggattttcaagtctcatatgctcaatctagtgtctaaggatgagcataccctaacaaggttctaaccccaacaaagtgtattcaacaatatgtgtcacaagtaaacaaatggtgataatttatagagttctcactcctatatgaacatgaatgaccactataaagtctttggatattaccaatcacaaagtgaaccttaatagtattagttaggtgattttgaggtgttttggggctgttagaaagactcccgaatgttcacaaacgtatgcacttgtatgctgaaaaaacagtaactagttactagttatcattttttttttcagctttagccaattcttctccaaagtgtttcaaactactcccacttaattttgaaccatttatacaccttataaataaataaataaagtctctaacaactatattttcaatagctatcatatattcacatccaaacacaattagtaacatttttttactaatttcttaagaaagataatatggagaagcaggcccggccctgggcatagnnnnnnnnnnnnnnnnnctagggcccacccagcccaggggcccaaattttttttttcctcttttaaa

SEQ ID NO: 128806 - DNA, 805 bp, Cannabis sativa
aatagaaaagaagtaggtgggcacgtgagaaatgtggcgagaagtaggtgacgattttttaatgggccctcatacccgacaatgtaaaactatcggatatagtataggcgacggtttaagggcccaatactatacccgacggtttcaaaccgtcgggtataagggctcgataaattcacgaattccaattaaaatagtcgtctattcctgtaattactattataaaccttcaggaatactaaattttcctgacggttttaaacagttaattttttttagcgacggtccctaaaaaaaacatttttaggaccgtcgcgaattctgacttttgtagtagtgatatttgcccatcaagggttaacatttttatttttattttgaaaggaaggataaacataacatttaaatttacataaaaccttttggccccatatctaagatggcctaagaataagaaaaacttacttcatgtaaaggctatactatatataattaagggtgaattgtgacataaatacctaatatttcagattttatacatttaaatatcttatctttatttttagaggcaaaaatattcaatgttacaattctcttacacctgttactaccacttccgttaacttataaatatagatacgtggagggcccaaatgcattacatttaattttttttattttaaaactaatattcttaatatcagaattaaatgctacgtgtttcaataataaaaaaatcaattctcataacaatttttacatggtatttaaaaaaccgtgtttttgcaaatgtcagttgtatata

SEQ ID NO: 128807 - DNA, 1351 bp, Cannabis sativa
  modified_base (67)..(70): a, c, t, g, unknown or other
accatgtaacataaaatgttatttctgatcttcattaataagtaatctgattatattgaaatgggtnnnntttagggcacaaaaccgaacaaatattgtcttacctgatgtcgcgcaataatagagattccaaatcccccgagtgcttctgaccaagtaccggtaatgctagtcacaattccaggatttacacaagtagggttaacccctaattttcatattcataaaatacatacatggcatagaaaataaagataatcacatagagctcggaacgagctttccaacagtatatagaactcccaaaacggagttcggatcacaaagttatgcattttcaaagtcaacacatgaatctgcctagaaagtcgagggcgggctgcgacatgcaaaaagccatgtcgtggcacctgtgaccaattcccaggttccacttaaaggggcgggccgcaacatgtaaaagtcatgccgcggcacctgggttccaaacccaaaaaaccagcaagcttaacttcaaatttcagcagaaaaatacatccaaatcataccaaattcacatacaactcaaagttattccccttaaattagcaagctcaaacataaggcattataatacatataatcatgcatcaaagcccactatataccctgaaaaatcagattatgcaacaatcaaagcaaggcttaaaacttgatcataactcaaccaattccatattcaaaagctagaatttccaaactagcttcaaacttaacttttccaacaacaaacactaaataacaacttaaattcaaatatgagaaataccctaaaatctcatctagagctcaacaaacaacatccaagatttagacatgcaatcaaagctaaaacttatcaaaatcaaagataattcttcccacatgcattcaaggaaacacaagccatatactccattaatttcagcaaggaaattcaaattaaaaactgtaattactatctcaaagtaaagcaagagcaatcaactaatttccaatagaatcaaagataattgaaagatggtttgggagagaggggttcgggttagagggagagaaaaccaaaaaatttaattcttttattattcataaaccaagggttaaaaagaccaaattgcccctagggccaaaatgcacacacatagacacttaagggcatttaagtcatttcatgcttaattaaactcaaataaatttcatattaatcactaataaataaaattccaatatttcaatccaaattacatttcgggcccgtacccggtttggcctgaaatacccggttgtgactataccgcgccaacctgtcagaacacacctgaaaaagacaaca

SEQ ID NO: 128808 - DNA, 2177 bp, Cannabis sativa
tcaatttagttgggttaacccgtctaaaatgatatttattattattgtttaccggttgagattttcggaaactgtttataaaataaatgagcttaagaaagaaataattaaaagaagaagaccttgattttacgtgattcaggttttaacgagtgtccacgattcaatattattgagctaaaaaagcttcaacatatctcttacaagtgtttttaccctggaagatgagccctaattctcaagacttgatctcaattttctttttccaaacctttgtatgaaggggtaatgttctatttataggtgagattcgggtatgggaaaactcagacccgacaaggtttaaaagtataaactaggcccgctgatgaggcaaaatataatgtatattgactttgggccaattgagtgaggcccgattcacgaggaatgatcatccatacgagaggggaccgttcgatgatgtcaggtgtccactacaaaaaacagggtctataacgagaacaaatgtccttgttagaacttcacatgtcctcggtaaaaccatataaccaagacaagtcctcgctaaaaagtcctcgttagaggctcgtcgttggaagttgctttctaccgaggacaacagtggtgttatcgttaaagaatctaccaaggacaatgttgtcggtaaaagcttggataagttgtcgataaaagctttcattttggcctaatgaacccatctataccgaggacattgtccacggtacagactcttttaccgagaacaatttttttttataaaaaccttatttttttttattcattattaatttttataataaatatatcatatattttttttcacattaatattgctcaaataataataaaaataaaattcattaataaaaatactataaatttacttttttatattttaaagttacaagtataattatctaacatgctaataaaatagttcgggaaagaaatagtcactacatataaacacaactactaactcagtcctccatcatcaaaatgatcagattgttgaggtggattctgcaatctcggagtgacacaatttttcctaaccaagtcctcgagctgtttaatccgctctcaactatgacatcagctccaacatatacaccagtctgaggtggaggaggttgggtaaatgtaggtggtccgccggaggtgagagagagacgccggagaacgaagaaaacgtcggggacgatctccaattttgcattttttggcgagggttttcttggtctgaaatggggatttcaggttaagagagtttggagaagacaaagtagctgaaaaataaaaggaaataaaaatgtcctcggtagaactaatactaaggacacttaacaccaaaaacaactgcaaatttttcctgctggtgcgaaaatagcaataacgatgacatgtcctcgatataggtgtcctcgttagagacttagttttttgtagtggtcatgcgtagccatgtttgtaccgagaatattagagaatatggcgttggacaaaaaagtagtcttcttttggtgcacgtactccccaagtctcacgcatgggtaaaactctaacattgtggggccttatgtctagagggctccgtgtaagatgacatcccactactacaaaaaggggtatatgcgacagttctaaaaatactttttggagaaatgtcgctaaaaaattaagcaagtgtttgaaactatcagaaaaaataaggtattctcaacgattttaaactgtcaaaattagacgttattaatagtcggggaaacggttttaaacgatcgggtattccccattaaaaaaatccacattaaactcttaaaaatagtcacgaatagcctcacgaatgttctaaacccgtcaagaatacctaatttttctcaacggtttaaaatattattttgaactctgtgttttgtaaaagttactgattaattggaccctctgttttgttaaatgacaaaatgaaccttgtattttctaaaatgataaaaataggaccctgagtttcatttttgacaaaattttttttatataactaacttgaagataattcctaatacgaataattacagacaatataaacagttttgttataacacttttagatcggattataattaaattttatattttttataaaaaaaaaaaaa

SEQ ID NO: 128809 - DNA, 1085 bp, Cannabis sativa
atggggccgcatggccacccttgtgtatagggtcgcttctatataaatattaaaatatacatatacataaaaataaaatagagtttattcacaaatatagattttgtttttagaattattaatttcacactttgatctaattttgataatactttttgggttaaataacctctgatacacgttaattaaaattttcaaaaaattggtcgaaatatttaaatagcttgttgaatttgcatagaattatttatagattaagtgatgaaagtgcaaaataatttgaaaaattaagagagactattttactaacactacaaattaaaaaagattatatttttagtggcaattgtttagtctcaatgtaaattttttgtgactaaaatgtgacttttattcacaacaaaaagttacttgtgactaaaatataacatttagatacatattgtcactaatttagttttagtcacaacaaatattatgactaaaaacacattttagtcacaataaattgtgatttttgtgactaatatttttagccacgaattttagtcaaaacgtaagaatgataatttataattagtcacaacttttaaattttttatcacaaattttattatgattaaagtaaaaaattttgtaatgtaactatcatcttggggttaaataatattagaattttcatgagaaattaatagtacttgtacttatatttattgggagcattaatagggtatatatgggaagaagttaagttgggcatgagagagtggcttcccatgaaaattgcataatcttttatcctcatctctcctaaatctatatatgagcacatattattgatgggattgggggctacatatccactgacccagctacccacttggtgctcaacaatataaatttatttttatatatatataattacgtgcgattatactattttagtgtcaatttatgttctcatctcatattcgtattcttattattattattatgtaagttaatatgttaagcgtttgataatatttttttaattaattttttatttttaaaagtagaaaagtgaaaatattttttaaaatcat

SEQ ID NO: 128810 - DNA, 1805 bp, Cannabis sativa
tacacctatttacaaggcttaacagatggtcaataacattcttatcagaagtacgacttctataccgcatgcacttaagtactcctcccatactagtgttggtagagttgaaccgtaccctcaggtactaatgagtgttgtaccgcatgcacaatgtactcatcccgtactagtgttggttacactgtatcgtacccattaaatcatatactataccaatacactttgtatcactaccgtactagtgttagtagtatatgcatcacataatagtatgcaatttacatacatacacatatacatatacatatcttatgctagtctcaccttgcttccaaattcaagtgtgttagtcgacctgaatggaaaatcatgcgctgaacagaggcccaatgtcagaatcacataaatgggtaaaaaacatgctaaaaacttctcatgaacctaaactcaaaattagaagtttccctatcgataggctagtttctctggggttgtgtgttctcctttactgaattttaccctgcaggccttccctagcacacattcattgcaaaattctagcctttcttgccttttttccttgaacaacccttgtctgtttaattcttcaagtcccctttggctcacatgtccaagtctaaggtgccaaagcctacttcgacttgttgtagggttgagtacagcaagtactacactttcaatgattattttgccatctagaaaataaaggccattgttcagttgacctttgataagatcttgagatccatggccaattctcatcactccaccttcaatcttaactgagcaaacattctaatagacagtaggtttcttttatgttcagggacatacctgacttgttgaagggtttgcaattttccatcatgagtttcaatctaactgtgccaatttcctaaattgcacatgccttgttattgcctaggagcactattccattgtgttcttctaaaaaaagagctaagtagcttccatgtttggtgtcatgtgaaatgagcagcctgagtcaagcacccattctccacctgagtcaaaaattgatgccaccagaacatcaactgtctcacatccatctttaagatcagcttccccatgattcctggttcttgattgttgactatccctctttagttttactttcaaaggcagacattcatgtctgaagtgtccctcctttttacagtagaagcactgttttccagtgttgccccttgaattgaatcccccagctaaaccctttgcaccagttctaggctggtttgagttgtgatgattctgatttcccttctagctcatggaaaattttcctttgataatcaatagtccctccccattgctatgcccaccctcatgacctttcttctgaatttcttttgaattgagtgttgccttcatttttgttatagtgagggtgtccttaccatacaagatggttgtatggtatgaacaaaatgttcatacattttgggaagagaactaagaagtcttatggcctgatcttcatcatctattttgacaccaagattattaagatccaagataatcttgttgaaatcatcaagatgcttcctcaactctttggtttcatccatcttaagagtatataatctcttcttcaggtatagtttgttggctagtgatttcttcatgtaaattgaagaaagtttgttccgcagcccaagtgccttctcttcatcagacacttctctaacctcatccccaaggctaagaagaatgtgttgggatttatgccctaaatcaaactcatttcaatataatca

SEQ ID NO: 128811 - DNA, 1168 bp, Cannabis sativa
tttatagaacgtagaaaccctagagacagccacaaagtcgaatctacagctgtacaaaactttcctaaggaaaacttgatttgcagcatcaaaaacggattccgacgcagcaatttagaccagaaaaggaaacttgccaaaagcagatcctgtattgggtcttgatacctgcataaacagtgtgtatgctctgatataatcatgacacaatcgaacttaataaagaaaatgataatagtcaaagtttcctttaaaaaccaactttccataagagaattacttctcttacaagaaaagtccatctgaaaataaatctttcctaagatagaaaagagtaataaaaaccgaataataaaggtgagaaaatcgattatgaaagcaaataaatctcaccataaaataaaaaatattttggcatctaaattgccaaaaaggactttacaatctccccctttggcactttaaataatcaaaatattttttaacaaagaagtacctgcaagtcaaaattagcaagaacaaacaaacactcccccaggcaaacacaattgaaaactaaaataacaaaataataagctaacttcaaatctaaagtaatcacaagtaccaaacacaacaccccctggaaaaagggtccagagttgagaaacaggaaattaaaaaacaaactattactccccctctttgtttatctaatggccaaagacaaaaaccttaaaatatatccataaaacaaaaaaaaaaatttaaaatgaaagagaaacttatgccccatagagcttgatcaatgaggacagctacttggacatctcttgctgaacctcctccatggaagcaagacgattgttcatctgttgaacctcatgtttgacctcctagacatctgcaggagcagaactcaaacttgcaccagcagtagcagcaccagctttatgacgcttgggaaaagctccatcaaaatactccgagggttggaagatggtgttagtaagaggaggctcaagtgtctcatgagagtaggccacatctttctgagaggacataattttatagattaagttaggaaaaacaagcttatgagtacgctttttacctattcgaaatgaaacaattgttgagttttgtgccctaaataaaactcattcaaatataatcagatttacttatt

SEQ ID NO: 128812 - DNA, 1298 bp, Cannabis sativa
  modified_base (1204)..(1218): a, c, t, g, unknown or other
ttgtttgctttgtgtcgttgcagccatctcactatccgctgaagtgaactcgagcagatctgccattgcagccactctttgagttgttgccagcaacctgctgcaatattgcagcagaaaaaaatatgctctaggtcctctttgtcattcttgcatagcaaacaatcataatctggtatgacattaatcttacatagtctttcccttgtttttagcttattttggacaactaaccacaagaaaaaactatgccgaggtatgttcaatctactccacacaatcactgcccactgctttctttcgccttcagttttaaataaattgtagggatttgatatttggaagcatggccctgtcattcgctgctggaagtcagccgagttcttcaacttctccttggctgccactatctttttccagtaccaattggcctgaagtggagcttgatagctccaccaattctcttcttttaaatacacattgtacacccatttaatccacatattgtcttctttgttcgctatcgcccaaatgtattttgtcattgctgccaaattccattcttccacctttctaaacccaattcctcctgctgtctttgattggcaaaccgattcccaagttaccaaaccagccccttgtgatgtactttgacccttccatagaaaagccctacagatggcctctatcttctttattattttcttaggcaaaatcatgatttggctccaatatgagtgaatagctagtagaactgaattgattaaaataactctaccagcatatgagaggttccttgagctccaaactcttattctagcaaccatcttttccaccaatatttcaaactccttgcttgagatcctcttagcacaaataggcatgccaaggtacttgaatggagcttcttttttacaaaagcccaaaatgtccaccactcgttgaatttccctttcttccatgccgcagcaatagatagctgatttagaagggctaggctccaacccagaggagtaagagaacaattttaaagcttgcaataggcagtagatgcttatgaaatctccatggcaaaataagatcacatcatttgcaaaacagaggtggttaagtttaagatctttacatcgctcaaagtatttgaactcttccttttcccctgcttttcctaatattcgagataagtatttcatgccaagtacannnnnnnnnnnnnnnataggatctccttgccttaatcccctgctagcctcaaagtagccatgcatagtcccattaaaatctatcatggtgtgaca

SEQ ID NO: 128813 - DNA, 755 bp, Cannabis sativa
ctcctgtaacagctgatttgatttaatgtgatacatcttttctttcaaaaaaaaaaaaaaaaaaaaaaccataaccatccaaactcaataaccaccgctaccacaaactaataatgttgtgacatttctagccactaatcaggtgtccatggttgtcgggcctgaaaatattttcatttcaccaatagcatgtataccacccatatattttaataaattcttcataattaataaattacatttatttattcatttctactaaaatccctaattatcacaaattagattagtatgatcataatctcacccctcttacccttaatacacagatttttgcgagttgagttaagtgtgttcaatctcgcaacaaacttggccttcctatctgtgtaggttatgccttaaatctagtgatatgcgagatgtacctcgttaattctacattcgtctcattgatcatcttgatacatttgatgtttgttgagaagactcctttcatgttttttctttgcgaggagatcatttaatttttggtacacgtgtcacgtgaataaactaattcatttactgctcgaaaaatgagtataacagatattgcagatggaatttttctagtaaaaactatgtttttttgctatgaaaaagatatgtttctcccgtcaaatcaatcacattatatagatggatggattgataccaataagtattcagttttaattaaacatgtttctcaaataaataaaataataaaataa

SEQ ID NO: 128814 - DNA, 808 bp, Cannabis sativa
tttggcctataggcactctactttcgaacactactattatttagccttaaagccttttactatgggcgtatgatcatcctagctatcttcttatggccttgacatgaaagtatccatacttacttttctttatgtcaagctgaagtatgcctgcacttgacttagaggtaggtttagtagcttattctaatggttaaaatttctctgcataagttctctaagctagtttgatacattgtacggtgtaggtgcccccaaagtgagcacacagacttatggtttttttgtcacttgcaattccccaagtttcatagaccttgcctgagaaatttcttggggtgctatcgagtgtatgcatgtggaactgtaaagaataactttaagatgttatctttattagcaagttgtttagacatagtcggtcttacgtgtaataaaagcttacaacttagtgttcgcttttgaaatcacattgtggctaaccctacgtagcttaccacgcaatggccatcactaaagagtgatgggaggccatgctaaaaagtaatagggactagctcttttatatttggctacctctgtaaggcttaccgtacaaaggccaccactgaagtgtaatgagatgccaatactgaagagagatgggtactagctcttttatgagtccctgcatggtaaaacgttagaggaactaatatataagttggctagtgcaagatcttaccgagatgttcgttattctagtattttggtagaagagcctgatgggttttatgcccgaaataaaactctttacaatctgattagt

SEQ ID NO: 128815 - DNA, 1800 bp, Cannabis sativa
  modified_base (1750)..(1750): a, c, t, g, unknown or other
taaatataatcatgaaataaataaatcatgtgaaccatgcaacataaaagcagtttctaatctttgttaattagtaaatctgattatattgaaatgagttttatttaggacactaaaccctacattaggaccaatggcttggaatgtgaatttggactaagttttattaaattattactatagaaacctaattgttcaaaaactaagttcaatatcttatatgtttactgacttagaaacaatagaaaaacacacacagtgataaactcaagaaaaagtatagatatggtaagttagaatgtgctagaaatgcaaatgtggcaacttcattttgttagcattgtgcattaagcttatttcttttgctaagctctgttcaattcattggaatttcaggttaataaaaggccctcaacagatttcatgcagaaagttcaaaaagatgttactccaagcatgagggtaattctaatagattggcttgtagaggtagctagcttcaacaagttatagattggtgtagatttgtgaagtcttatatattgataaaatgagcatgcggtttttttacattttgttatgatacatgtaagatataaaacttttagctatatgatcgttacttttggtgatacttagttttattgatatacttcatagttatatcagttttttaatatgacatgtagaatacaatttttatgatcgttatataattttttaagttacatgaaaaatcttatccttattatattataaatgttattgttagtcatataaatattatttttttataacatataaatattgttatgaaagtcaatttaatatctgaaaatgtaggtggggaaaattgtaaagaaatttgcaatttttccctacctacagcattgtgtcattttatagccgacacaaaaagtaaaaaaaattgagtaaaattatgtgtcaagggttaaccgacgtaataatctaattagcttcggttacaatttgaagctaagtttcttgtttcattccaaaactgacgctaatatagcgtactttttgcttcagttctcaactgaagcaaaaaaaatttgcgtcggtttagaaatgaagcaaataacttgactatttgcgtctatttttattacgtcggtttacacaacctacacaaaaagtttttgtgtcattttacaactgaagcaaaaagtcatttttgtaatagtgaggtattattgtaattttttatttgtagactgtataattgttgaaagaacagatctattgtattttagtaatatagttgtcttttttgtatattctttaaaaaaactatttatcatcacttacaatgatattataaaaagattaaaaggtaaaaaaaggtaaatagcgatagttacttacatcatgttttttttcttaaaaataatgaccaatgtcattgataactgaataatatcatacaggctaagagactatatacattccaaagaataaaataatgaacagtcatctagccaaacaagatgttaatccatccgaagagcatgcacaactaatctatgtgcagccacattggccgaccaaagtacatagattagggacactccaggagaactggataacaaacttgtaatattctctatcaattatcctagatcactgaaaaaaagaatgtctcctagaaaaagtagacgcaattgctgaggggtaagaatcaacaagtacaacaaatttttaaggaaattattttaccaggatcttngatctactcacaagtatgtttatcaacatcctaaataagaactttctaaa

SEQ ID NO: 128816 - DNA, 776 bp, Cannabis sativa
ttaagatcatcactatctatggattaaggtacgcttccgccatttgagttcttctctttgaataaacaaaggtattctttagatctatggttatacatttataattatatgtattatgtttatctatggaattgaatcttgttgttgcatattttatgagtgttaaagaattctaacaggatattcaaattatagaagataaatgtcgagttatatgattgtgaaatgccttattttttctaattttttctttgttggctgtgttttcttattgggctaacataaacagtttcaatatagtctaattagttgtggtaatttgtggatgataaatgtatctttatatttttgtatagaatatgcacatgttataaatattaggggtgcttactgctaactagaatttgtaattgtctttgtgctacaatgacaatgattgtctttttcgtttcatagtagagtggacattgtttttgcttgtaactttgtaattgtatttctgaaggcttataaagtgttgactattgacttagccaacaaacatggttaggattagattttgcttatgactgtcacatgttaaacaataataactatagagacacaaagtgtaatgccccattgcatagggacgtcacgtgtgtaattttataaactagattaatacttatacattaataaattattaaaaattgtgagaatattaaaaatttgactaaaataaaagactgaaaacggacattataacggtagtgttatctcaatttttgcactct

SEQ ID NO: 128817 - DNA, 1054 bp, Cannabis sativa
actgacagccgcatctctctctctctctctctctctctcttgtcgccaaccgaatatgtctcagagccgccgctatccacagatccgtactcctccggatatggcgtaagtgtttggttggtaacttgggttagaatgtctttcattttgctatagggtaagtcataatatgtggcttcgagtagttttttataccactgctgtgtgttttattgttaaacatcacagttcttgtcttttgatgtggttaaacatcaaagctatcaaagctctagagggaggctctttgtgaatatagattttaattcttactattttagaatatgctgatatggaataaactgcttattgtttcatgattttaattcttcatctttagcaaaatagataattaagttttgtagataagctgtaataaattccgtttatatgatttagttttccaaagtttcttcccatatgatccttagttatgcttcctattttgaaatcatagacataactagcattttggaattactatggatttgaatacttgaatctttacaattgtgaatttttcatttgagatttgtcatctttgttatttatcacatgatgttgtgaacaattctaatcaaacatttcatttgtcatgaatagaggtttaggatttcaatttatttattgtgcatttgctgtgtcaatttgaatgtatagtttctttacttgctccctttggctactgcattctgtaccgaagtttttcccacttgaaatgcatttgctacttttaaaaaatagttctgtcttccaactcaaaggtacatttgtttctttgttgactgtttgaatttttagtgataatagtttcaatttataagttgatatatatctatatatatttcctgcatctgtataaatgtatagtttcaattctataattttctttgtatttttctcactagtaatatataactacttacatttgaggcatttatataattagttcccataactcacatacttacacaaaagttctgtgttttttttttctttttcctttttttttctt

SEQ ID NO: 128818 - DNA, 582 bp, Cannabis sativa
  modified_base (112)..(116): a, c, t, g, unknown or other
ttcttgcaagtaattttctagcaaatatagcattaattttagcaagttaattacaatcattttaattttgaatcatttctcaaccattctcatatttttctttttgctttannnnntaattagttggttttacatcatatttttgtttgcaatccctgtggagaccatcttacttataactttattacttttgtgactacgtatacttgcgtacgtaattttcacaatagggtgcaccgtataggggatggccgactagtgttgtcttttggcactaatcttgagcttgttttgttttcaggcctttatgaagctaagctttttgcatggtaaatccagggggtcttcgagtgctcatcggaagtaggtaaagacgctggaggctagttttttggcgaagggcaaggctttggctaatatggagactcttggcttgtagaatcaaaatatgatttctaatttggaggtcatgcttagcaccaagaatcaggagaacacccttgtaacgccctaaataattaggcacgctacccaaaaatgattatgaaaccctaatcccctaaccaggattactaattaaaa

SEQ ID NO: 128819 - DNA, 933 bp, Cannabis sativa
agagagagagagagagaggaagtggtggtgtgagaatgtggcttgacgaaatgagcctaaaataggttctggtatgcctatctcttccaatatgcaacaagtagttacacatcctgcatacttgccatacaaaagattaatagttccctattgggaagtgagtagtaaaaaaaattataactgaagttgttacataaaattgcatggttaagacttcaacagtcagaactagagttggaaagtccctattcgtacagacgtccaaatagggaattggatgcaaatgttattctaatttttttccacgtgacgtggcatgtccacataggcaagattgatgccacgtggagtatagcctgtcagtaagaagaccaagtcaccatgcacaatgtaccaattgacgaagagtccaaatacttaagcaggacaaagagacaataaaatggccaacaaggggggtctagctggaccaccccaggctcaccctaatacagcataggccaaacagcctccagcagatggtaggccgaccaactcctcttctagcagacacttttggtgtctctgcagctttaaacctggacgggcactctcagctacgaattgacttcaacaacccaaaaaagtaggggttcaacttcaattatttacctattctttaggaataattaatgggttattttcttatatatttaatatgtaacaaataggtgatatctcctctttttaaggaatatcaacctattttagcttagatcttctgtaagttctcttctatataaagagcattatgctaaacctcatgggctaatctctaagttctgattctaaagctcttgagttggaaccctagcactctctcctacacgccacctgcagtgtagtagagactaagtctctctcatctcatatacttgagatctgtctcacatt

SEQ ID NO: 128820 - DNA, 635 bp, Cannabis sativa
attggacatagttaatcaaaaaatcatgattatatatgtattaaattttaaaaatattccatacaattattatgtcttttttggacgtgatttgtatggttaatacaaattttattgtttattagtagtatctgattatgttttgtaaatattaatatacaattttgttaattagtaggcttactcattaatacaatataaattagtcataaaaatagttacacaaatctaattatagtaagttgactcattaatatatctattataattaaattaagaatttgtatgaatctattaaaatatgtttttaaatcggtacatttttaaaattgttttttttgtacattttttgtaataaaattgtttttactatatactaatgaaaaaaaaacccctttaaaattgtgaatcaaatccgaaggtccacgaaaatccccactcttagactgcagggaagagtgaaatcaatcttcttattaaattaaaaaaaaatatatatgttaacagataaatatcattatatacatatataatatatgtattggtgtaatcacatcaaacaaaacctctaccgtgagcacatgtgctagttaactgttagcataaagactttatataatggttcacattataaa

SEQ ID NO: 128821 - DNA, 1253 bp, Cannabis sativa
  modified_base (809)..(818): a, c, t, g, unknown or other
  modified_base (955)..(958): a, c, t, g, unknown or other
atacgaaactaattatttttaaaccataccttaagctctccctcttcaagagtttgctatcctgttactaccggagcttagattgctaggtttcaagttgaaaataaagaaaaatagatataagaagcgaaaattttgacgaaggaaggagaataagggttcatttatgtttatgttactgtaacttatataatatatatttaaagttacaataactttatatatataaaataatattataataataaaatattagtaataataatataatattaataataatataaattaaaattttattattaatagttatcttattatttcttaactactaaaaaagctctactttgtatttagtcaacttcgagtaccccaaaatatactggtatttctaaaattaacttatctcaataatcccatcaatattttttaactaaaaccgttgtgaaatttttggcctccaatcaggtctccagggtcgctaaacttgaaaatatttttattttacaaccactacggtaaagaaaaactaggttcactaagtattataatttttttatcatgctcattctatatttcttgaatctcagtaccaaccacttgccaaaaaaaaaaaaaaaactcagatacaaaatcttcttgataagcatcatcattatgttctttatagttgaatattgaacattatgatgattccaatgttccttcgtattatcaatgactcttcttaatttttctttgaaaacattactttcaagattctctgcctttgaacactacaaaaaaaatactacttttagtgacaattnnnnnnnnnnaacataatttttttgtgacttttagtcacaacaaaatgttacttgtgactaaaataaaatatttagttacaagttgtcacttaatttagttttagtcacaacatgtattgtagctaaaaatacatttagtcacaacnnnntataatttttgtgactaatacattcagccacagctcttttagtcacaacataagaataataatttataattagacttttaaaagtaaaaatttttgtagtggaataaaacactttattaaagtagttgttctctgtagggatgaattcaagactagaaaagctcacttagaaatgaagaattttaatgatcatatgatgaactaattcctcttcgatttcatcattcaaataaaatattgtcttcttcattttcttcttattcttcttattgtatcaaaaccgtatattaccgaa

SEQ ID NO: 128822 - DNA, 948 bp, Cannabis sativa
  modified_base (278)..(282): a, c, t, g, unknown or other
  modified_base (901)..(907): a, c, t, g, unknown or other
gttatatttttagttatatatgagacatttactttggtgacttttccagtgacttttccagcgacgttgacttttttggcgacgttgacttttccattgactttttggtgacttttctggcgacttttctggcaaaacttatttttgttttacaaatatgagatttctattttctttacaaaaatgtggcataaaaaaaacctatataaatgtaaaaaaataaaaaaaaaaaacccataagcttatttatttatgccataaaaaagtaaactataccnnnnnttcccatatttataaaaattccccaaaaatttaagtgaatttggtattatttaagaggattaaagtttaaatagtaataaccgtgactgattgtgttcaaggtatgatttaaggaactgtttaaagaattttatctaataaccaaaaatattttgatattattttttactacgttatatgtatatattcatttattatcattagtaaactccatgtgaaaataattgattacttagaatatgttattttgttaagttaagagaattatgacatgtttataaattaaactttcataattactttggcctttagttatagtccatttcaaacttgatacgagttaagaagtaatttttttcgattattatgggcattgtttaagctaagtaataattaaataattaatagaaatgttagtgctccacccaaggatatgaaaatttagtggtgaaaataagataacggtttatttcataaatgatcgtggaccgatatttcattgggtttatagaaatgtaaacataatgtattggtgatagtatgtgttcatggtgtagtaagatattatttaatatacataatagaggcagtgatggttgttggaaattattttactagnnnnnnngatctactcacaagtatgtttattgacaccctaaatatgaa

SEQ ID NO: 128823 - DNA, 547 bp, Cannabis sativa
ctaatggcagcccacttctctttagtttagtttttttttaataaaaaaatagccctttatttaatttattactttttcatataaaacttcattttttttaacttattttaaatatcattcaattatttttaaaaatttgttataagttatattgtgatgtcttattatttagagcatatgtaatcatactatataaggacattgaggtttaaaaataagctcaaaccatataaaaaatgacttcatagagaatgaatagtttgttctcatgtaagaaactccttattattttgctaatttttttagtagtattctaatcaagcatattattatttttttattattttattgaattaatttatatttaacaaatttcatttataaaatattattaaaataatcaaatactaactaaaataggaagcatgattagagcaaaataataaaaataactttttattttaaccttttagctatttaattaaaatttagctaaaaaataaagagagtggttgaagatgttcttagataccaagggtacctaaca

SEQ ID NO: 128824 - DNA, 733 bp, Cannabis sativa
attccttcaaagaaaaagttacaaaggaaccctaattcccgtaaaataataagattttcacaagagagattaacctcaatccaagtagtattagctttgttagtaaaaacataattaactaaaatatgtactactccgttagtttctcaatatacaaaggaaatttcattaacattttcatacaataacatatttcgtatatattgatatttttattattatgaaatctaggagttgtattgaagtaattggatagttactagtaattattctattttaaaatgtaaaagtgtgtatggattgtatatgaaattttattttcatatttagcaaatgagttaataattatacggtttaataatattaattaactaaaaatagtaatattttgtaattatacactcataataattagagagtgtaatttaaacctgtcagatattttaaattacatgattattatgtaatcatttatctgagaagttacttcaaattttataattacttcaaattacactcaattttatttacataataaatttttatactcgcccttatgttatagttaatttaaatacgattgtgtgataattataatatcaaaatatttaaacaaacccatatttacactattttttttttcttaaaaggaaaagttgtatttgattttaactaaatttcaataacttatttaaaaaaagtaattttcaataatataagggaaatttgattt

SEQ ID NO: 128825 - DNA, 533 bp, Cannabis sativa
taaatttgattaattgattaataagaggggtatttttcaacttaccccaataattttctcaataaacatttgggcctggaaacggacctagttgggtttacagtttcttcatctatagggcttgaggttgggcttggtggaatatcaagggcctatcaaatcaatgtcaaaattatctcagaaaaaaaaaagtcaaaattgtcacataatgaaataaccaaacaattactagacttacttctgtctacttcaaatagttatagagaagatttttttaagtttaattttttgttatgaatagttatagaaaagttgattgtgatgtccaatactatacatttcagacaattttgcactgtggtcaacacaaccctgttgacttttagcaaaatacaataaaggttacaaattttgaggtcaaccttttatgttttgacacgtggacttttctaaaattctgaaaataaatatatatatcttaggggctgtttggaataggttaatcctagtaagggaatggtaatgtgaaacat

SEQ ID NO: 128826 - DNA, 963 bp, Cannabis sativa
  modified_base (62)..(63): a, c, t, g, unknown or other
aattagatagaaaaattaagtatatataaaaactcaaaattttttaattttacccattcatnngtaatacccattaagagtgcactcatatatatataatcatatgtaaagagcacactaatgtaaccgtaatagctaaaaaaaattaattctaaaagattaaattctcaaatcttattttaataattaaaaaataaaaatatattacataattaaaaaaaattaaacatacatgtattgcacttaatattacttaattaaacttaattaaaaaaaaaaactaattatacgtacattgcacagaacattaacctagcctatctaaaagcacaaaaaagtgtaggtgatattgtagattttttttcattttatattttatattttttaaatagtataaaataataccctgaactgatattttcatcaaaataaaattaaattattatgacaaaacttagtatatttttttatttatgtatttgttcatattataaattatctttaaattagttatattaaaaaaaattgagcgtaaattacttttttatactattttaaaaaatataaaatttattttataattttacaaaataaataattcaaacaataatttttatatatgatctaatattaatcaaatatataacatatttttggatgagtctaattttcagaccaattaaaagtctacgtgtccaatttattttcttttcattagtttctttaatccatccgttaagtctttgttaccattttttctttctttcttttgctgtatagaaagaaattcaaattcatgggagataaggctgaggagacaaacttgctaacgagggaccacatgggccaaatgggcctctgatatagtgaaaattacatgaaatatgggatttcataacaaagttagaaaaatatggcatttttaggtttgccacttttctatggcattttttcacatttaag

SEQ ID NO: 128827 - DNA, 1119 bp, Cannabis sativa
gagagaggtgcagtgaaaagagagagatttggtttggttttttaagaaaaatcttctatagatgaagaagattcttgggtgtaaatgtgagagttgaaaaactttgtaagaactcttcagagaatctcatctcgactgtattgtacatattcttgctcaatcaataaataatgatttcggtggtgttccagaactggagtagagccatagatcaaatcgatctatcggacttgaaccagtatatatcttggtgttgatttcttaatcttttgcatttattgtttctaatttatatactctttttgttcttgctttcatccgcttgttgttcttgatttgttaatcttgtcattactaattgtttgaatgttaaagtttcattgatttgattctacaatgttagtcgtaattttcccataaatcagagcttggttatcaatcaagatcacaaaatcaagattcattccactgcaattcttgaagaaactttgaatgtcatcaatggtgagatttgaattggagaagtttaatagaactgggactttacactatggagagaaagtctgaaaggaatcctagtgcaccagaaacttacaaaggttcttggagatgagaagttattggcagaaaagaaactagaggaaaaagcagaattggagtaaatggcttactacaaaatcatcatgtatctgtgaaatagtgttcgaagtaaaatcatcgtagagaagacgatggaaggagtttggaataagttggaagaattatacttaaagccatcaattgctagcaagattaattttctagaaaggttataggattttagaaatgatttcttccatttctttagatgataatattgatagatttaataagattattataggattggctaatataaaccacaagtttgataaagaaagccaggccattattttgttgagatcactttcaattgcatatcaagaagtcaacgcagctatcatgtatggtagagatgtgattgcattggaggatgttcttaccgcacttaaatcgaaagatttttatttatagttggaaaaagaatccaagaaagaagaagtgtacttggcaagaggaagatgttgggttttatgccct

SEQ ID NO: 128828 - DNA, 1494 bp, Cannabis sativa
cacgtttttgaaaaatattttcacttttccacttttaaaaacagaaaactgattaaaaaaatgttaccaaacgccaccatagttattttaagaatatctaaatagtattgttaacggctaattctcgccaataaaataaaagtgagaaaattaaaattaagatatcaaattaaagagtaatataacttaaaaagcttaaagattagaacaacaatgcaacaaaagaagtcttcgtattatactgatttttcaacccccacttcaatggaagagaaatgtattataatgagactctactgaacttgtgttacaaattgattctcatggtatttaatccctagggaaggttagtacatgatacacctcctaaccctcaaatgttagagttgtggttgcaaatgtgtggttatcggggtacttgatggtcctaacagttggttcttgtgtacaacttcgtcactactacttgttgggtgcagaggtcaggtgggtacacaacacgctcataaggatatttgttgatccttttagtgctccttgcttcattactgcttggtacctagtccatccccagtccatccccttcatgacatgagacttgcattttgttatcttattgcattggaaaataaagaaagagaaggcgatgcaagctttcttggcaccaagacctccttggcgccaaggagagagaaaatagtaaaaatagaaaaagaaaagggtagggtagatggcgctaaggagagggaaagagagaagagaagagaggaaagtagttggtggcgccaaggaaagagaaagagaagaaaagagatgaaagtggttggtcgctatttaccgagtttttcggcaactgaatatttttagagcttaagaaagtactgaaggtataaataaagtaataataaacaagtaatttttacatggttcaggcgttaattatccttagtctacgagtctattttattaggctctttggcaagtgattatttatacaaatacaaaaataatggactgttactcctccttaccgtgttcctcttgaagaagaggaagctcagtaggaatattctagagttaataatggagttatagtaatgtgttttacaaagaattagtcttcaaattccatgtgaagagccgaaggaggaaaaaggaagtcccctgccttgtgtgtctttgagggtatttataggccgatcccttcgtatgggccaccttggatggatcttcatagggaaacccccaccgttagattggtaggtggcatattttccatgtggtctttaccgatgtcaaattgtactggttgtactggtggtgctttggacgcgtgtcattctaaggtcgttcttatttgaattacccttattctgccgttggattgtttggcataatacacaaggacacatgtgctctgcgtggtagcgtggcgtgggagacaacctctgacatcgtacatgtaacagcctcaccattgggttcgtagcctga

SEQ ID NO: 128829 - DNA, 540 bp, Cannabis sativa
ttactatttatttatgatgatttagatttataaaatacatatttcaaataataaatagacaaaagggaatataccttagcatatatttgactaaaaagtgggttatattttgcaaattaaaataagtaaccattttatccaataaatgtttttcccattttatacatagtttatttttaaagaagtaaaaaatgtttgtatggaactaatgcgaaaaaatcattttagttttataatatttatggaaaatttaatcacatgtcactagcaactatttaagtttcaagtgccaattattttacttttcaaacaaaaaaagtatcaactatttttgctatataaaaaaagtatcaattatttcaaatttgactaaaaatgagatattttgcatatggatacctaaatgtgtgttacattatcctttatttagttaataaaaaaaaatgacatccacaaatttaatactaaattttgacaaaattatcttattttaaaaataataataagaaaaaaaaggatgatatttctaaatcatatgat

SEQ ID NO: 128830 - DNA, 745 bp, Cannabis sativa
acgtaactttcttctagtaaatataaaagtgtgatgatctttttaaaaataataatttgtgtaaattttcgtgataatcatgaaattggcaaaaataagggtatgtgggccgagatggatgattgatgtgggggcttgggaaggtagaaggttgcttcgtgtagcccaataactataagggaatgaagattcttagtcacgcaatgcaatacatggcagtgaccaacaccaacccaccatgactatgaccatcatctcttctcttgctgacgtggccactttgacgatatataataacgagcctaatcctaagaatattgaattttatttttaattaaaatagtaaaaaaattagaataaaaaattatttttattgttatattgtttcaactatactttataatatttgaatttatcaaatataaattaattttataaaataatattttttttattaaaatactattaaaaaaatttaacaaaaaagttagaagttcagctattttttgtatgagtggaatttatttttttaagtctcaatttttattttaattaaaaagtgtgtttataattagttattaggttttttataatttttattaaagtaaataaatagagatattaaataacatctataacaatattatcataggcggacccacattgtagcgagggggggcagtcgccccccctgaaaaaaaaaatcgagaaaaaaatgtatatgtattttaattagttacaacat

SEQ ID NO: 128831 - DNA, 642 bp, Cannabis sativa
ttacctattacttgttaaaaaacgatacgtatgcttgcgtgttggatttatcataacaactcgtctgttaacctttttagccatattgcctccttgatggcttctatagcatccatgtattcaacttctgatgacgaaaaggctactacttttcgtaggttagatttgtagttgatgcagctcctaaagtgaacacaaaccttgttaggctctttctagtgtttaggtttgttgcaaaatctgagtctgcataaccagttatttcttccttgaattagttctctttactaaacacattgctagtgtttagagtaccttacaggtatctcatagtctatttcaatgcttcccaatgtttagtgacagggtctgaaatatatttgttgaccacattcatggcatgagctaggtcatgtcttgaacacaccatggattacattagacttccaacatagcttgcatagggaacgttgttcatcttgtccctttttgcttttatttttggtgattgagatgcagacaacttgaagtgttaagcaacaggtgttgcaaccggtttgcacttggccatgccaaatttattcaatactctctgtaggtatgcaacttgggaaagtattatcatgccagacttagagtaat

SEQ ID NO: 128832 - DNA, 887 bp, Cannabis sativa
aggcggtgtgggattgcacagcttactcggtatttcccttacggatcacgggactactgactgtcacaaaaagtgtactgaaatatgtctttagaggtcgactgtatccttacccataaatttataagggcattttcaaaataaaagatgaacaacaatcaaccaataggattataacacaaaaagaataccaatactagttgggaaaacgcctaatacaattacgtatggaaaaagatcataaggtgaatagattctttcaatgaatcgggttctatatattcaaaataacattgtcaatattgatattattattatcatgtattgtctaattcgatcaatattgtgtacccttatattctttctaattattacatgttctatatgcacaaaacaatcgtcaactagttcttcactgcatcttttttccgcatataataatacatgcacttctagatcgatactccatgcatgatgttgcaaactagcacggcatagtaccaaaaaaatgggtccaaaagcacatcacattaaaaattcttaaaattttgaattctaattaattttttatatgattatacgagtaaagtattgttaaaaaattgtataaaaaataattgaaaccataaaaaatacatataatttagtgattaattcattaattgtaaaagatagtagaaaagtagagctcaaattcgagctcgtataaaaaaacaagctgacctatttataaaaatgggacggcccaagtaaatcatgacacgaaaatatgagtttaacagactatgacaaacctaccttttaaaatgttgccctgacatagtatgatttatatttatgggttagcacgcactacaaaaaatagttacttttagtgacaatttttt

SEQ ID NO: 128833 - DNA, 1090 bp, Cannabis sativa
attcttcttgatgagcatatctaatctcacatcacgaaatgaatttgtaatttttggaactttttaagttctagttttatttacatatacttgtcgatcatttaatatatctttataaaaattaaatctatctatctatttatatataggatacttatagtgtaagaacattacttttgtccttactatacacttttatatccattcattatatatgtataggtaaaaattgtataagaacacaattattatggaacaccttactcttactaaatatttctgttattttttagattagtttattaatatcttttatttaataaaataataatttttagttttgaaaaaaagtgctaggaaggttattggtgttaatattgctgcttcttgttttttttttgttttttttttttttttttttgaaattcttttatttacaaaactagttaatgggttggtagttatacctataatgatattgggttgaatagattgaggtgaaaggaacaatagaaaaaatggtatttcagccacttactggattgtatttcaagttccatgaaggtctttattaaaaaaagaaagaaagaaataagggaaaataatcagcatgctatggttaactcatttatgctatttatttttaaaattgtttaatgttattattaataatggatcttgaaatttaattttaaaattatttaataaaatgaactgtagataatttgtgtatgtaaatttaattgtgaaataattttataggtggtgaagtcgtgaggtagtaaaccaatcactatacattctatgttgaaatttattttgtttattacatattactatatcaggttataatcattctaaagatgatcttaacaaatggatatatacaacttatagctgaaaatctaagaaattttgtaaatattgaccagttgatccaacctatatagtgtaaactttatataaaaaaactacagtagaacctctattaaagaatactctattcaagaataacttctaatttgttataaaataatcaagtcccgatttgggccagttacaaataaaaataacctctaaattgtaatta

SEQ ID NO: 128834 - DNA, 767 bp, Cannabis sativa
  modified_base (704)..(706): a, c, t, g, unknown or other
aacaaaacacagggtccaattggtaacttttgtaaaacagagggtccaaaatgatatttaccctattttttattataataataaaaatatatttataagaataaataaaataaaatttaatccaaccattttatttgtaaaaagagtggctagtattatcaatgagaaaagaagaagaaaaaaataatacttaattatatattttaatggttaatttattaatttttttgggtttcactttttcttaaaccaattttttgaaaaatactctgaagtgataatggtctagttagcaaataaactaaattaaattattatgaaatataaataaatactttaaaagaaagacaaaacttataatttctttttttttcttttttaaaaaaaaataattatatgtttgttagtactagacaaaatacacattatattttagtttgacttttctaaagatagcccaccatataataattattaaaaagtttaattacaatataattttatattgcatatacatatatgtttggagggctatggctactgtagggagataaatagtgactctctggtgcttaatacctttctcgatgtcataccattacaaatttttttaattttagtcacaaatttgtgattaattgtaaattataatttctatgttgtgactaacacgtccgtagctaaaggtattagtcacaaaaatnnnaatttgttgtgattaaatatatttttagttacaatacttgttgtgactaaacctaaattag

SEQ ID NO: 128835 - DNA, 757 bp, Cannabis sativa
tactttatgtaattattccttaaaattttattgtttttttactgaacaatgacataaatatacatatgtgtacatgtcacattaaaatttcaaaagtcaatattaacggtgagatttaactagcatctcaaaatttacaagaaaaaataaaattaaaagagttttgccaccaaaaaaaattagagattaaatgtataaaataaaaatataaaagagtttcaccgccaataactcttttaaatacttgtttgtgttatttttacaattttattcttttatatttttacaaaattaaattttaaaaaatattattttaaagttataaaaatattgtactttaattaaaaaaaaacaacttagaaaaagtactttttagaagcaaaaaaatccatctaggcccaatatgaaaagttgggcacgaatgacagcaccacagtcactggacgcccaagttgacatagcctcacttttggtggttccgtcgacccgattgtgattccgtcttgagcattattcttgttttgctccaaaaacaagatatgattatttgaatcaggagaaattatcattcaagtagtgagttagcccccaagcatcaccaggcactaatgtgcaagcacactgggtgcccaagttaacattagcctggggctctgtgttctgtccttcaaacagtagttttgcttcaggcatcagtcttgttttgctcccaaaataagattgggatgcttccgcaagtcaatatctcatgtacatg

SEQ ID NO: 128836 - DNA, 794 bp, Cannabis sativa
atcccattatggttattagcaacattaggcacatagttaatgattctgtattatggaattaaacctatgattgtattagtccattataataattctaacatagaacacacttttgtaagctatttgactggcaaggtctcggatcagcttatacgagagaatttttctcataatcaaacaagtttgaccgtgtgatatggaagccataactagattattatttccataagatttttcttagcatatttaaaatgctaaccatggttaatgctgagttacactagacatgaccatagttagaatttgaaactataaatagcacacaacacttcatcttttgttacaatttttactctccaatattttgactctttattatttctttcctagctctctcggccaaacactaagatcacacctcccaaacaaatatcatcataataaagtcttgacctgcaccacccttacaccattattcctttgttcctcgctcactcaagtctaagactctaagtcaccatcattcttgttatgtatctcatacgtagcaaaaaccttttgtatcaccaaacaccacaatcatcctcatacatatatacatttccttatcatattgacatcactatcaccactatttttgcattcaagttttagtgttcaattaaatcttattgggagctacttaaggtttttcataaagacaattgttgattctcaaggatcactctcgcaatcaaggctaggattccacattcgaggtaaggaaattaagtaaaaaaaaacataaattttct

SEQ ID NO: 128837 - DNA, 822 bp, Cannabis sativa
aggtttgacctattttcaacccgctcaattaacagattggactgtttgtaattttttcaggttattttagtttataatttttatcggttttttcggtttggtttaagcggtttacaaattagttttgtaaagccctactataaaaggaattatattaaagctaggtgaggaaaaacgacatgaaaaccatataaacgacacaaaattttggaaacgacagtaagtgtagaagtagatattttgtaagtttccaaagtgtttcatattttataatttaataataaggaggacagttacatggatggcattaattgtaggtggtaaagtcaaggacacgattatgaatgaatagtaattaaaacgacaatatgagtagagaataaacgacaacaaaagaaaaagagaaaacgacaacaaaataaagagagaggagatgacgtggtgtgtggaggtaggggtgttcatcaaactgctcacactgcacaaaccgcctgcaccgcactatatcgcataaaaaatgtcatttgaatttttttgcgatatggttgcagtttgtattttttctaaaccgcacggtgcaatgcaatttacggtttgaaatctaataattgcagtatgtattatacagttaccaatttttataatattttttttttctttttttacataaaaataaatatatttaatatgtgtacatattatattattttttagagacaattaaatataataacttgatgattagttatgatcttaaaattttaatgatattttttttgtattgttaaaattttataaattaatttttaaatttttattata

SEQ ID NO: 128838 - DNA, 893 bp, Cannabis sativa
atccatcatcacatatcgatgtgcttgatactgtatccttctggacagggccctttcttgaggcaactcgcctttggttatgtatttgatgatggggtgcatctagttgggctccggctcaattgtagccacagtatctttaactttaatgcttggttccgtgaggcgctcaacgggcaccacccccagtctctcaacctctttgtctgatgccaacttagccaattaacagtctgtgtgagtattcttttctttggggattcttccactttgtaatccatgaattcatggagtagctcctgtacaatagctacatacgcaaccattttttctccatgcgtttgatactctcccgagacttggtttaccactaattgcgaatcgctgaagacttctactctcgcggatcccacgatttttgctaatttcaatcctgcaatgagggcttcattttcagattcattgttagaagccagaaattcgaaacgcagggccgcctggagtcgaagcctgttcagagataccaaaactatcccgactcctgatccatttttgttcgacactccgtcgacgaatattttccatgtcggggtttgtggtttgggcatgcttgcactagcctctgcttcattgcactctcttatgaagttagctagggcttgtccctttatggaaatgtgtggtacgtagtgtatgtcgaactgacttaattccatggtctatttgaggagtctccctgacgcttccggcttctgtaggactttggaagtagggtcttaactttcttgaagccatcaggaggtagaaaactagcttctcaatcaatggatactgtatctcggtccctatcgtacgcttactgacgtagtacataggatgttggactttttctt

SEQ ID NO: 128839 - DNA, 717 bp, Cannabis sativa
atattaaaagtgatttttttttgtttttaaaattttgatttctaattataaaattaaaaagtaaaaacagctttatttttgaaaaatattttcactttttcactttgaaaaagtttagcttaattagtagagcatgatattaaagttgtaatccttagttcaagtcccattataaacacattcaatcatttattttatatatgtatataaatcaattttttttatttaagtatatataaaaggcttcaaaattttatcctcctacaaattttcatcacagattaggacgatcaaaagagtaccatttatgtgacattaatttaacattaaaattaattgggaatttgggaaatagtctcccattcatccatattgtttcttaggtcataaattagaatacatgtttcattataggaacaatgccagtctcatatattaagaggagtcaagatgtaaaaaaaaatattaagaagcgctaatgaaaaaaaaaaaaggacaaattattttaaattataacactttatgttacattaaataaatattttaattttattaaaaatatatatatatatatattagttattttctctctaacattttatttttctttctccacttctctctcttttttcctccacaaaaacagtataagtgatcaagagtaagtatgcgtatctttatatattaaaagtgcctatctaacggcaattcttggtt

SEQ ID NO: 128840 - DNA, 950 bp, Cannabis sativa
aaaaaaaaaaagaaagagagagagcagaaagataagtgagttagagagaattttttttttttttttaagatgtaattattaatataagggggtaaaaaaggaaaaataagtcaaaataagtattatttaatataaattagttaaaagtgtaaaatttaataataagtatatttttaagattatataatgaaatttcccattcaaatgtgtagctcaaaacaatatttatttttaaaacttttaaataaaaaaataaaggggaattacttttttttttattttttaaaatttacggtttgggtttctaaagtagttgcagcgctagttgcaataggggtttctatgcgatttttattgcaatttaaattgcagtgctagttgcaatatgcatttctatgtaaaatttcgtaaaaataaataaataaaaaatcctattttaaaatgtaaaaatgaaaaagccaaaacaaaaataaatacatgctacaatataaagtgcacacattaaaaatcgtaatatattaatgagcattaaatctatatatagtttctaatctaaaacagcctactaaaagtatctactatctatctatataagaaaatgtgtgaaacttctactataccgtctaacaccacaaattttctattttttttttaatattttaaatggaaaattttccatttaaaagtactacatattattattattattatttttttacaattactacatattatttttaataaaaggccaatattatttttaattatttctaagttccacccaatttttgcaatatgagacaaatattgttcacaagtctataccatgacaactcaatacatatttgatttttttttctctttcttaatttttttttttttgaaaggaacttgaagcttcattgatagaaaaagaagtacaaagcaaacaagtccttacaaggaaggta

SEQ ID NO: 128841 - DNA, 856 bp, Cannabis sativa
ttaaaacaggtaagtttatgcctttagaaagaattcatccagaaaacagaacctactcgtgattgtcgtccgcaaaaatttttattatccagtgaagccagatcctctgagaaggataacacactgaataagatattcaaggatatttgccataaatatatcctcatttaattatccaaatcaaatccctatgttttgtgggattgacacgcatcgacaagaaattataggcaactagtttagttttccaaattattcttaattgttttgagaaatttaatcaatgtatttttctcttataaatagtggagccattcattattaagggatcccaaaattataattctcttgagagctcttataggttgtcaaataattgtaagtttttatttttagaagtctaatgtatgtctagctaagagtttgcataagacttagcattgccttttttttaagaatattaagtagtatttgaataacttaagttaagaccactttatacaaaatgataagatatatctttcttgagatatattaaagactacattcataatttattgagatgaattgacattctaaaaatatagttacctatttagattccaactccattactatgttgattcatgtaaatcaatatttaattacgtccttaaaattaccagtaagttgtatcgttgagaattttaattattttttttcattataaaagttagatacatttattgttttgaaaatatatctagtatggtgtataatagagtttcatactaagccaagagtttagaattatattttcagactattaagaaaattttgcgataaattcagttacagtatttatggataagaacta

SEQ ID NO: 128842 - DNA, 671 bp, Cannabis sativa
tagaatccctaagcacccatcctgcaacaagtctttagcctttaacactgagattatgggaacttgagaaaccccgaactaatcccataaatacaaatggttcctcacccttaggttgaaaggtcaccatcttccgcttacaatcagtattagtagtgtacttagagaagaaatctattccaagtctaatatcaaactctgttatactcaattccactaggttagcaatcaacttcctatcctcaatcctaattggtatagacctaatccacattttggagataactaattctttgtcaggcaggagggttccaaatcctatttcataactgtcatatggcctacccaacttatcaattactctggctaccacataggaatgtgtggctctagaatcaaacaaaatagagtaaaaagagttgttgattgaaagctgacatgtcactactgaaggactagcttcagcattagcctgggtaagagcaaacaccataggtagagcaggcttttgtcctcttgttttctttcgtcaattgtgggcagtctcttttgtaatgtttagttacactgcactaaaaacatgctcagtccttacactcacccaggtgatgattcttacaactggggcattctgggtaagtgtatctggtttcgaagctaccctgacgatt

SEQ ID NO: 128843 - DNA, 1251 bp, Cannabis sativa
attattataattttaataatttttaattgtataaatatatttattgattatttaaattttgcattggtaacaatttaataatattattattatttaagccttttcaattattcttttctttttattattttgacatatttgaaaaaatatgtataaataaaaaaaacatatttatttaatttgctaatagattaatataaaactatttaacataaataaatgaataaaatactatcatttaagagtgagaacaaaaaaaaaaaaaaagagtaagaactttatgtttccaacaaaataaaagtttgtggatcaatttgctaaaaaataaaatttaaggatcaacttgctaaaatttatgaattttaggatcaatttgccgaaaaataaaatttaagtatcaacttactaaaacatgtattatttaaagaacctattatacaaatatgccaaaaaaatgaaagacaatatttttcttttctttaatttctccctaccaaatatagccaaaaggtcgcttagttacggtttaaaaaattcaagcaatatgaatattcactccgataaataaatgaacttgtgcaaagatgaaacagcaaaacaagattcctgtcatagtatatatgaacattgacataaaaaaaatactaccaaaaacattttgtgttttttgcctcattggaataataatctccattctgacattgtggaattctagtgtatatcattcaagtattggtacacactctccaaccaaacatataagatttttcaattaagaaaaaaagaatgtaacatgtcatttacttttctcaatggaaaaaaaatttcatggcaccactagtttccgaccaagagaaaacgttacacatcaccttctttacaagaagaaatgtccgtacagaaaaaatgaataacagaatagtgacatcccaagtactagaaagtatctacatatgtgaattatcaatgtacaaacacattcatgtaattacttcttccccttccaccaactgcacctgtaaatagtagacattaaactcatcaaaatctgcataattagagctaaatagaaacagatcattaatcaaccatatgataaaacattgttctttaaaatctcaacatggatcataatcttaacgaaacatgaaacaataatttgatgatgataagagaatgcaaccctctaatatatcaagtatcaactcagtcaataatagcacaattcatcattcaaaatctttttacaaa

SEQ ID NO: 128844 - DNA, 1006 bp, Cannabis sativa
  modified_base (170)..(177): a, c, t, g, unknown or other
tttgagagaggtatttttgggttttagataaggtagtcatatatttttaatggtaatatgtattagtttagggataaaatattaggtatatgtaagtatcgaaaatcaaattttccttaagttatgtggattttcataaaaatacaaaaatataaaaaaaaatatatatnnnnnnnnatatatatatatattttgaagggtaaaaattaaatattataagtacggatttttttaaaaaaaaagttaataatttgtactaaaaaaataaatttcaatcataattaattgttataatattttaataattaataaaaaataaaattgaatgactaattaatagtgatcactaattataaaattttgttaatttttaaataattgactttgctttataaattaattaatttatttattactatatatagaaaatattctaatatttcctaaagaaattagagactcattcagaataattataaaaatgaaattcttattaaaatatttacagtattttttttttttacatttcaaaatattttttttgtatttttttacgaaaattcacataataatctatatagcaatgtaaattgtaacaaaaatctacttaataattacataaaaattacgaaataacggacggaacaaccccaaccgtaatttaaaaaaaaattaaaaaataacatataatataattctctacattgaaaggcaattctaagagtaaaatcaactcatattttatcttggcatagcataaaaaaatataatttcaatgctaatttttttctatttcaatcacaatatccaaaattatactacaaatatatttttttttattatattaatttacatatacaatataggagtttttttatttttacactttaaaacatttttttttatttttacggaattctacatagaaatccttattgcaagtttacagctagccctatatcctaaattgcaacaaaaaatcgtacagaaatccctattgcaacta

SEQ ID NO: 128845 - DNA, 967 bp, Cannabis sativa
gtagtagacccatttatatatattctctatttggttttagtatttttttttttaaaaaaattagcctatattttatgatcgtatatgttgtaccaatttatgattatatgtaaattttaaaaagttttaaatagattatagtgccgaaaattataaagttcaaacaattatttatcatccgtatatataaagaaagaatagttgtacgtgcaactaaatatcactttattttcaacactatatactattttaaatttttttaaaaatttacaagtgatcctatacagctgtaacaaataaaaaatttaccgaaacaactctttaaataatgtactataaactccgcctaaggtaatactagcatggagtgatttagtaataaattccacatatcaagacgatatgtcatgatgttctagatctagagtggtcgtgcctttaagatttttctcattataattcattcattaatggagtagaatttttccttgttttttctaactctttgaagaatgagttattttcttctttcttcttgagaatggtctttaacttttctctcttcttgaggacgggtcttctacttatcctcatcgcgtgtgtgccttattgatccctgccttatcctaagtttctttgtggttccctgcctttgttccctgtttgtttccctagtttttctcccttatctgtcgtcccatgtctggtttctttctgtagtgctcttttttttttcgtttttgttttggtgtgaagtttgttccctgctggtcgtctcgtgctgtttgtttagttgtctttgtggtttattagtttcttttgtggggatttttttaaggttgtgtgagtgtgtcctgttaaggtggggtaaattccttttgtcttgtgaagcttttatttctcattccttttgtcggttgttgtcgggtaggtattatggaaatagttaattctcataatgaagctc

SEQ ID NO: 128846 - DNA, 539 bp, Cannabis sativa
tggggggaaagctgggcctatgcccttaaacgatcttccttgcgtaggggtttacttcagcaaacatcatgtcgagtctcgtggcagtgagcttttggctttcactaaggaaggaaaaaagcgcatgggctgggacattaaattttctagtaaacaccaaagggtgaagtattgttgggttcacgggagtcatgctagacttttgtgaagcaggcttcaactttcggagaggaagggtaaagtcacctaaaagttcaagcgtagactttgcttgaagggatcaaggggaagagcatcacgaggagtaggatagacatcaagcagtcttccaattcgggaaggagggttgaagacgcatcatacccccagtgatctttcttgcacaaaaaacaacgtgcatgcgagagttatgttgaatttttatgtaacaagcttcaacttctgggaaggaaggctgaagttgtataaaaattcaagcttagacttttcttgagaggatcaaagggaaaagcatcatgaggagtaggatagacttcaag

SEQ ID NO: 128847 - DNA, 513 bp, Cannabis sativa
ggggaaattgctaattaaccttgtctttttgtaaaaaagaaaaagagggtttaatttgttcagaattttttttcttaatactgcatttagtttcaatcaaaacatgagataatgaaaatgaacacaataaatagatttaaacagcaacagtactctaaaattgaaatttctcatgaaacaaaaaaacgatattaattggaaaaaattgtatgttttacaaacaaacaaacagctatagatcggttctcttctgccggccgcaccaatacttggagctttggcagacctttccagtccttggccacaaaatctgtgtctgtgatccacaattatagtagcgatctcgagaggagttcggctctgagttgaagaaggagacctctgtcttccattaagtgatctcaggtgccgtcaaggacctccctaattcgcttgaagtaggcgcctttgtcgctttggagtcgctcaaatcggttggtcgtataatcaatgacaataagttttctatccttt

SEQ ID NO: 128848 - DNA, 1277 bp, Cannabis sativa
cgctcttccgatcttaattctcaaattagactatgtctatttgtgagtagatctaagatactggtaaaataatttccaacaatcatatgttcaatttttaacttaatttcattatagggtatgttaattaacttattacaaatgagttcttatttgtcagtcataacatcaaacatttccccttcattctttattcaaagaaagagcaagtactcatttcttaatttcatacctggtggcctgtaaaacaatgcccttaaacttctttttgggctcttcacaagactcaagacctaaaaattcaaaatcatttctttctctttaatcgactgaaataaaaaataaaaagaattgtaattgagaataaagagagaaataagtgagtgagtgacctgactaatcattagatcagcttgattccaatgaaaaggaaaataactaacaatacatctctcaaactcttcaacaagcttaacaaaagatgaatcatcaaaagataacttgcataatcgtggacattctcttctatctttaaaacgcatttgtctagctgccaacactaacatcctcaacaagagggtatttttcttaggatcctcaatataattttatcaaataaaactaaatagttaaatatcgctttaattatacaattcataattgatataattattcaaaataatagtttctacaaaattactattttttccttaagaattatttctcatagaaattaattattctcaaattcattcttcaaattaaaccttcccttgtatagtgttgtatggaggtaacttaattggaaaccatgaacctatatttcaaaactccaataaacacttaattattattgaactcatcaatagaataatctggcttattaattctattattactccactataaatatggaattgtactctttgacaatgtagaattattttacagaattcttacttattgaaacaccctaactaacttaggcatgttagcgtgattttaaacgtactgtgcagctcgttgctaatcaacgagactaatgaaaatgtgaataattaaaattttcctatttaattaaaaatataaagtaatacatttataaaattttgggatcccgttacaaaatacatttacaaaagtttgctattcacatacaaaagttttgacgcctagcaactattcagcaaaagccttgatgtcccaaagatcgtacgctccaagcctaaccaccccgacatgtataatcttcacctgctcgttctcacggctcctca

SEQ ID NO: 128849 - DNA, 848 bp, Cannabis sativa
  modified_base (27)..(65): a, c, t, g, unknown or other
ttatgttgtattcttgttaatttgttnnnnnnnnnnnnnnnnnnnnnnnnnnnnnnnnnnnnnnnttttgatgttatttagatgttacttttatgttttttttctttttattattttcgtgttgtttttatggaaaactgtaaaaatgtaaaaaatatctgtaaaggtaaaaatgtaatttttttacaaaaaatggtgcatcatgtaattatcttttttttattgagtatcatattgtctattatatttataggaagtatcccataattaattagccatattctgaaaaaaattatattttaagttatataaaatttgatacttaaatatatcaatagatatgacactaaaaaaaaatatttaacactaataatagttttaacaattctaaaagaaacttaatttaatattaattgtgattttataaatattacataaaagaatgaaagcaacctactttaaaaatgaataaccacccactattattgggcgcaatgttgattcgatcaacttaactccaatccacctagtcagtagattatactctttatggcctgaacttcgtgagaaagtccaaagatataccgttagagggaaaaaaggaaaactctaatgtaattctacaactattataaatactccactaatcttgcatgaattaatgacatgtttacttagagggaatgggaatgtatggtatggtattgattcctatacaattgtttactaaatactccccatttttattgggaatacctttccctttcctagcttaattcattctaattttaattttattaattaaaaataaaaaagacaaatatgccctttaaaaatctataaacaaa

SEQ ID NO: 128850 - DNA, 1377 bp, Cannabis sativa
tagtatagggcgggccttaagaacaaagcaactaatgaactctcgcgcacgcaccaaatggtttaattagcaactatttgttcaaaatatcctctcgcttatggacttacaagctcatgtagctactgattccattgttcaaaagattgtgcaagagccgagtttgtgccacgattattgtgattgttctatgaatcaagtatttttgaagtttctttgttgtttgctttgcttataccgtcctcatcaccttttattctattattgtagcaaaagcatcatggcaaccatgtagagggacattctggggaatttaaagtatttcaacgcaacacatctatattggcaaggagtgagaaaagatgtctagaagcttgtagttgaatgcacaatttaccaattctccagcaaggctgcttcaaccactacccattcccaagcaggtttgggaggacgtatcgatggattttattgtgttgttatcaattgggtttgattatttttgtggtgtcgatcctttgagcaagtatgacctctttatccctctctgtcatcctttcttttggtttgggaggacatatcgatggattttattgagtttcgttaaaaaaatgggtttgattctttttgtggtagtcgatcctttgagcaagtatgaccactttatccctctcccccatcctttcttttctttgtcactacactacactagccacagtgttcgtctgcaagattgcaagactcaattgtttttcatgttccattgtctcggatcgtgatagaaattttcttaatttgttttggaaggaactctttcgcttaaaagggtgcaatatttaagcatagcatagcccgacatataacccttagtcagatggtcaaacagaggtcgtcaatcgttgcctcaagacatattttcgttgttttgtgagctctcagccgcatcatggatgacatggttgcctagggctgagtattagtataacatatccaaccacacttagccaaaatgaccccattcaaggctttctaccatcacgatccaccaccactactttgttttgaaataggcaacaccatcttagacataaagattagtagtgagaggagaagtgaataaaaggggtacatgggtcattgtaatggggcttgtggatataatatacataggacaatattaagagggtgaaggctatggagaatcattttgtactaagtagtagctcttggctcttaggagagtgattgtctctcaaatacccagtagttcaatttttcttaccattttatcatctaatatcattatatgacggtttgttccttctaagctactgttggatttccttctacaacaataccctatcaattggtattaga

SEQ ID NO: 128851 - DNA, 831 bp, Cannabis sativa
tggccaagtaaacattcaagaggagactgttgttgaagcacctgtgttggcagtcgattaattaaaaatgctgctgtatggaatgcatgccaccaatatgtaaaatctaaccccgattgtgcaagcaaagtgagtcccatctctgttatatgtctatgtttatgctctgcccttccattttgttcacttgttttaggacaagggtgtgtaaattcaattccttgatctgtgaggaatttggcaaagggtcgatattcccctccccaatatgcctggattctcttaataggtagattaaattgtttgcctgccatgcttttaaattttataaagatgtcaaaagcttgtgatttgagggtgaggggatagatccaagtgaacctactatggtcatcaagaaagtgaacataatagcaataaccatctttggactctatatgggaagggccccataaatctgtgtggatgagctctaaaggttgagaggctcttgaggttgagatgggaaagtgtagcttatggctcttacccatttgacaggccttgcaaaattctaactggttgagggaactagtagaagagacttgctgtagaatgtgactgagaacattcttggatgagtgtccaagtttctggtgccatgtattaatattttgcttacaagaaagatgagtaacaggacaagaatgtgaaagatcaaactttttattacttgaagtaggattacaagtagtggtattggttacaaggctattgtcaatagaactattacatattatagtagtgggattaaaagcataaaccatagactgtgttgatttggttacatct

SEQ ID NO: 128852 - DNA, 844 bp, Cannabis sativa
tatattatattacaacaagaaataggtttgaaattatttacagaatcaggacaagaaatcttaggaatcgaagtgattgttgtggagtttattttcttaagaattctccatgaatgtaggaaataaagaacagcgtcacacacatcatctcctactatattccaattatcttgatagaaatgaccattgaaaccatccggtcccatacccttttgacctggaatatcaaatatagtagctttcacttcttttcttgtgtatggtttgaccaacatctgattttgttcactactcagcaccgggccaaccttattgacacttttcaaaaatgatcttctattagccattttagctcctaagagttcagtgtagagctgtaggaaagcattatttactttacttgaatcatccacccacagtccttccatgtcttttattgagtaaatgtgaattttcttgccttcgagctctaataatggcatgaaaaattatggtgtttggatctccttttttatccaatgcatcttagccttttgagctaagaaagaaaaataattttgatgcacttatttatactcctcattggctgctaattctttatcaattaaatccttgttagttggaaacctatgttcctcctgacaacctttgagcacattaaaggcccttactttctattcttgaatgccaccaattccaaccttattcaaagttctcaatgctccttttagtcttttcagtttgttaagtaaggagaacaatggtgtaccttgttgctgaacactctaactatcaattagaattttaggtaattcaatagaattttgccaaaatctaaaatact

SEQ ID NO: 128853 - DNA, 1933 bp, Cannabis sativa
  modified_base (233)..(237): a, c, t, g, unknown or other
taatcgagataaatgacttttttatcattactcgtttttatagtttacacacttttgtattacctcttcttactgccgtatttatattaatgcacttcctaataatacgtaagtaaggtattttcggtcctttataaaggctatattatactatttgtaatcaattggttatcatatggggtaggcccaataatatttcattactataaatatggattattgaaaagaataannnnngtatttagatatttctcttcaactttgatcaataggtgttgctgcagctctgattaaatatatctggacagccaatgaataatctgatgataagttttgtaaagattttttattccaggaaatttctataagctagttgatatatataattaagtttatgattatagcagagaatttgtacttagtccaactagcgataactacaattttcttctttattttagtgtgtttagttttccattttatacatatacctcattttttatttatgaaatctattaatcatgtgattaatttttcacgtcctcgcacaaaaatggatatattatatggccatatatcttacgtctcaatttgaaacccaaacgtcttattgttaaacttaatcctatatatgagcaattatgtaataaaaaatctatgcattaatactactcatgaaagataatatacaagaggtgaaagtattaatttagaacataataatcaatattgtctatgttgtctctgtgagacatagaacactgaatttctccaaagtgttcaatacaaacaaaagattaagagtaaatgcaagagaggagccaatgtgtgtagggcaagaaagaaaatagagtctttaattaaataccaattataagagtagaatgtctctagtattggtgggtaatagtctttgacttaaaaaaaaaaaactattttgtagtagtgaaaatagctgctgaaaaaagaaccttcaaatcaccttgggcacgaaatttactcggccccatccctttgcgtgcctaatgcctcaaatggcacaaagtagcagagtaatggggccctttttattgtggaaaaattcccactcaaccccaatggtacatttttaggaaaaaaactaggcacaactttacgtgcctaaaatctaaaatggttatgttgtgctaaagttacattttaattaaaaaaaaatgggcacaacttcttctgtgcgatcataaattcttaatttatgggtcagtgtattgtggaattatatatatctataaaataattatatatttttttcttttgcagaaataatattatattcatatgtcatgtattgaagaaagatagtgtgaaaaagagtaaaaagaatgtaattgaattttttttcaaggatgatgcataatttaagcctttatttaataataataataataaggatttattctcctactaaattgtgcctcccaaacattttagtgcattaaaattgactaatttatggtataaatacttaagtttaactcctacttgtaaataaatacttaagtttggtggtaataatacttaagttgtatttctagatcgaacatccatataagtatttgaccgttaaatgtcaagtcattatctacgtgtcatttccttattggtatatttaaactatttcttttttaaaaaaaataaaaatttaattatttggaccaatcaaagattgccaagcaattttacttaacaattaataactatgtacctacagaagttctaaaaatataacttaactattattaccgccaaaaataaaacttagctatttatttgcaaccggtagttaaatttaggcatttatgccgcaaattactcttaaaataattctcttcaaattattaaaattgttaaattcaaggattttcgtttaatttttgaaactaattaattagat

SEQ ID NO: 128854 - DNA, 2129 bp, Cannabis sativa
  modified_base (2015)..(2019): a, c, t, g, unknown or other
tcaaatctcttaaattgataactactcagattgtaatgggttttatttatggcacaaaatccaacaaaaggacccatagacccgtcccctgtgtcccactctccttattttgcaacatctcaaaagtattcttttctttgtgatgaaccccatgctccctaacaacttgcttagccttgagaagatgagctcattttggtgtttcctaatttccttcagcctctccctctccttctactctagtcgactttgcccccttttttgattctcgagcaatctctcggctactcaattcccctggcttcttttgagaaataactccatccttcccccattctttacccaatcttacctcttccttatccttgccatcgattcccataactatagcctctttagttttagtttggacatcattttcacctttcttctccttaccagccccatctcctttcacatcttttttgacccattgcttagcctcacctttcctacaattagccatgatatgcccatatcccccacaacttttgcactttaccggcaaccattcatagtccacccctgctcaaccaatctccctttctcattattatagtgaatagctctcggaggattttcggttatatccatttccaccaaaacacaagcaaatttgaccatggatctttccttcgttactttgtctaccattattgggttaccaattgtactaaccaatgcactcaaatagttctttccccaatattgcaatcccaaatcatgtaaacgaatccacaatggtacagattttacaagtttcacatcatctaattcagtagtccaaggtctagtaattaccggttttcgatcgaattggattacaccatgctccaggacgtgatctctagtagcttcatcgttaaacttgactatggtgaaccctccattcatacgcactatctgagcaatacccaggtttccccacatccttcgaatgacgccttcaaacacagcaaacagagggtttgctccaagcaccatacagattacagcaaagctccaattagccgtctgcataactacctcctgtgcatcaatttgggcaattttaatgccttccttgatcataggttcttcaaatatcaattgggcttcatggtcctagaacttactagcaaaaaatttcctccaatgactctgagattgagtctgatggtcgtcgttttccactatatcacaccagttcagatcctcttcattccctttcacatcgcctaagtcagactctgctacctccaaggttgcttttccttcttccacaatcgcatctgcaacaacaacttcttcaagaacaattcgatcctaaccaatcggctctcctcctcactcctagtgctagattccacactcaattctcggattacaggctttcggatcgttcgtcgcctcttcaccatggaaggaagctagggagaacacacacacctctttttctttttcttttttttcttttaagtttaactaaatatcatagcttttcttaaagattcatggtagtcagggatatatatattgatacctgatatttttatttatttatcttttatctcaaaaaagatttgtgaactcatctttatataaaataataaatgatataattttcttaaatattatattccaccctatattttttttagtgtatattttctcctttattataaaagtataatttatgatgttataaaagtcccacataacttaaaaatgtgattagtattagatttgtaacctataaatatatcactcattcttttttttcactgtatgggtgattgattaattcaatcttactccattaagtatacttttttatgatgtcaatcacatctttgatatttggttaaatgaataaaaaacaactaaattttttctaatattttggatatttttattcacctttaattatttgtatttttataaatctatataatataactattcatcatagagtttttatttttatttttattttnnnnnaaaagtcccacatagcttaaaaatttaattagtgttagacttgtaacttataaatatatcacttattcttctttccattgaatcagtgagtgattaactcaatcttaccc

SEQ ID NO: 128855 - DNA, 655 bp, Cannabis sativa
cccgtttccttgtccttaacaaaaacacaagttttatgaaattccaagaaaacatcattgtcattagttagtttagatacactaactagattcttagttatagtaggaatttgcaaaacagaattaaggtttaaggattgagattttgaagaaagagaggctgtaccaatgttagaaataagcaatttcttaccattagccacagcaacagtttcgtgaccagtgaaaggggtggcagtctcaagattgtcaagagaatgagcaatatgattggttgcaccagaatccacataccatccaacatcatcaccaaagtcaggaacagattgagctagaaaagcttgagggtcatactcgaaagtttgttctgtaaggtgaacctgaggctgggcattagaggcctttggagtaacccaatttcgatcaaatcgatagtgacaagtaacagcagtatgcccaaatttcatacagacttggcacaaaggtctattattattgagaggtctgtttccattggcccgatggaagtatcttgaggggttttcagacacttgaccccgcgcagaaccatcccttgctgaaccattaaaggacctgtatggaccgtttcttgaacccactgtgagattggctgccatttttgcagaaagatcca

SEQ ID NO: 128856 - DNA, 513 bp, Cannabis sativa
gcaagtcaggcatatagatgtgggagaggttagtgatagttgttgtattggcaattggattggtaggcgatggcggagtcactacagaagagtggctaatcacttgtttatttttttgctgagtggtaaaaggtggcagggtatgtatcggttggttgggggtagagtggttatgaatttgagtactagtggagcttgtagtatgggaatttatatggtggggaatatgattatatgtagggaaagttgaaaaggtgttgggaggatttggcaaagatgtggcaagaggagtagtgttgctggtatggggaaagagaggcttcggattagtggttgaaggatcagataaaaaattttgttgagtaccagcattacatccaaaagtcaagccttgaggagatgtgttattgatgatatttgggttgggactaatagtagttgcatgtggagacaaaccagatgtgtttggtggcaattgtggaaggccacgggtgggtgtgataatttgtgagg

SEQ ID NO: 128857 - DNA, 665 bp, Cannabis sativa
gtgagatactacttgattgcgtacacttgcgtaataaccataaaattcgtaacacgctgcccttgcctaccaagttcaagctgcctacttgaagtatgtacagagggattgaagagcccttggcacacatcaaatattatgcaatccatatggatttgcaaaatgttgaggttgatacccatcgccagatcatcccgtcaaccttgttgaaaactgcacaataatgttttctcaaatttgctgctagaaggtttcactcatggaactctttcacaagagatttctacatacatctcttatcttcctgagaaactccttataggttggaggacatagtggaggtcaaaaagaggtcaggggaacctctgaaagactatgtctaatgattcatgaccgaggcaaccaaggtcaagaatttgacagaggaaacaagatactgctgggctttgtgcccgaaataaaactttatttcaatgcaatcttttctattcaattattaataaagaaacaaatttaatttcattacatatttaatgtgttatttggttcacgtgatcatttatttatttatttgatttataaatttatccaaatccttatcacactgatagaataatctatagtgtagtttacttgcaccttggataagtgctatgtcctttcca

SEQ ID NO: 128858 - DNA, 807 bp, Cannabis sativa
gccagaagtcaaggagaataacttgaggccctgtagtagataatatacacttctgaaatcccctttgcagaaaaaagtacatcatcagcaaaggccaaatgattaaatttgatatctacacacctgtcatggtaaagaaaatccttcttggttccaattttccccattattcttgataggtactccatacctagtacaaagagtagtggatgcaatgggaaaatgtaatccataaaacatctcttctaagaaatcccactcaatggtgttataagctttttgcagatcaagtttcatcatgcatctagctttattggatttccttccatagtgcctaaaaagatcttcgcatatcatgacgttgtgccctatgaaacttcctttaataaaacccctggttcttggaaactaaatcaggaagactggctttgattctagaacacaataacttggtttcaacattataaatgacattacaacaagctattggtctaaagtctttaacagtattaggacacttaattttaggcactagagttaagacagtggagttgatttctttaagtatcttacctgtttccaaaaaggaagtaacaactttgtataaatcatctccaaaagatatttataaaataaaaaccaaccaaaagatattttaattttaaaaattacaattattaaaaaaaactacagagtatatgataattaactaaagggtatccctttagttataatgtttggccttatttttttgaaacagttttcagaaaacaaagttctaaaaaacaagaattttgaaaacaacaa

SEQ ID NO: 128859 - DNA, 822 bp, Cannabis sativa
  modified_base (678)..(680): a, c, t, g, unknown or other
ataaaaaagatactaatatacatactaaaaaaatacaaacaaaatacaaacataaattataaattataaaatattactagaaatataagataaaatattaaatgggactccatcgaagcggggagcgtgatctcagggacaaaaaataattttcgtccccgtcccgttcccaatttagatatagaattcccgccccattaaaagcgggtccctgactccccgtagagaaaatgtgcatccctaagtataatatttgggggcactacatcacataaatcttttaatatatcttttcaataaaaataaatagaatttttatatacttgtagagttttgtttcttatttttttttatataaaattcctcttaaattatgaaaataactagagaatataacagcgcgttgcgcggtcttaataataataatactattgttataggattgttacatcattttttgattattattaaatagaaaatttagtaaaaaataattatgaattagagtaaataaaagactaaaaagagaatatgttatttcactcttatcagtttataattggagaaaattatttagatttttttctctaagaaaagtaaatcgtaaagatgtatagtagaatatgcttttagctatattttaattagtatgtgagttttaatttattattattattnnnattattattattattaattttaaaaaattgaaaaagaaaccattttttattttaattgcgtataattgtatttgaataaatattgtttattagttaatatttttgttggtatttatacataatttttattatataaatttta

SEQ ID NO: 128860 - DNA, 738 bp, Cannabis sativa
tacattgtattaaaaattttggttgtaataattaatacaatacattgctttatccaaacatagtgttatttattatttattacaatacgactcttgtacagtgtaccaacgagccctgagtgtgtatatcataacatactcttatttaatgaaaagaaatgttaaaagatatcagaggtacctagaattatttaggcgtgatgtaccgctattattgtggttaagtatccgatatcatacaatttaatttaataacaattaaaaaatatttctaactatttacaagatgctacatttatgtagtgttagagcatcttcaatggagatgcaaatgagtgatgcaaatataaaatatagcttgttttgttaaaagtctattccaattgtttgctaaattgtgatgcaaatatgtcacataacaaaacgtaatccaaatttggatcacaatataatatgatgtaaaatttattttacaataaatgttatgcttttatatttattattatgctatttttaatattttattattaaattttaattaacatactcttttgtattaaataacttgtattattattaaattttatatttttttgtattattagaattattattctttttttttttgaaaataagtgtgcatatataagataaataaagttagacctcacggtcattacaaagaatttgttcagggatggaatgaataggaagacatccaaacttctggtgggtaaa

SEQ ID NO: 128861 - DNA, 728 bp, Cannabis sativa
atattcttgagcatcacccaaaatggtagaccatttgaaatgactaggcttaccttgatctttccatccaattcaacttaaacctagccgcaattcttggttaaaatggtgagaaatagctctaaaattgttttgtgttgatgaggtcttgcttgggggtgttttagtcgatagaaaagaagaagaggatgaaggtggtggtatttctaattgtataatacttatattaaattatataatttaacttaataaaataataaaaggttcatctctatcttattttagcaaaatcccactaaataatgatttaattaaaacttcggtataaaaaccaaaaagcctttagcttaacacttaagcagtctttaatttaagggtaatttgttcataaccaattactccaaaatatactgataagactatactagccaaacttatcaaaactacaaaaaccacaaattaataatgttgtgacatttctggtcaccgatcgagtttcaacggttgttggacccaaaaatatttttatttagtatatacaatacccacagattcttatgaaatcttcgtaattaataaattacgcttatttactcattttcactaaaatccctaatcatcacatataattagattactaagatcataatcttacccatttatagtcttaacacacctattactcttaaaatccctaattatcacataattagattagtaagatcata

SEQ ID NO: 128862 - DNA, 1069 bp, Cannabis sativa
attattaataaaccaatataaaaaaataccacaattatacaaaatcaaaaaccaattcatcaaaaatctatacaaaaaatctctttttctcattaaaaaacaaaaatctatacagaatcaacaaacaaaatgagtaaacattaataaaaaaaattatatatcatttgaactaaataataaaccttagaacaataaaagaaatggacacaaacaacatacaatttaaatcaaaactaaaatctctaaatctatataaaaaaaaactacaaatgaattgcccaatatcaaaccctaaaaaccttaaatcggaggtgcaaaagggatggtcgttgttcgtcgaggcctgtgaatggccaccggtgactactctatctgtatgttgagacctctgctctactcgtcgcttgggaatttaggtgtgtcgagcaccgtgatgtggtccatttggaccatcgtcgttcacctagtaatgtcgctgatcaatagtagagggaacgagagatgggaaagaggttaagggcttcggtgtttactgggacagagcttgaagattgtagatggccagaacatggctggaagaggtaaagagagatggtcggaggttgagggctctaacaccgcaccaaactggggagagagagatagagatcgttagagatgtataaatggaattttagggtttctattctaacatatcccttttatacctctttttagtgttttctaatttcttttaataaataaatttagaaagagaaatagggtatataatagcctatgtaaatgggttcaatgggaatttaggttttcttttaattattttttttaagtttttttattatgtttttagtgattcggatagtgtgactctacactttcagagttgcgcagtggacatcactatatatttatatttttaaaaaatatagataaataattaaacttttagtgacacttcacaattttagtgacccacattgtgccctaaataaaactttatttcaatgtaatcttttatatttatttatcaataaagaaacaaatatatttcattacttatttaatgtgt

SEQ ID NO: 128863 - DNA, 591 bp, Cannabis sativa
gaatcaaattatcgagagtagtggaagtattttacccattgcctattttcaaaataagacccttgtgtagcaactcttttacccagaaaattctacgccaaacaaataagggggaatggcctaaagagaaggtcataaaggtggagttcgggtggtatctggctgctaagattttggccatagttgagtttggatgcttgaggatgcaccaggcttgtttagcaagcaaagcctgattgaaatggacgagggaacgaaaaccaagccccccgtgctttttggacttgcaaagcttttaccaactttgccaatgagttttgggacggttgttctcattgaaaccccaccaaaaatttgcgatgatcgattcgagggagtgacatgtggcaaccggaaggcgaaatcaagccatggtataagtggggatcgcctaaataacggacttaaggagagtttctttatctcctatagagaatactttgtgcttccagttgttaagatgaccccacactttgtcatggaggtaatgaaagacttactttttcgttttgccaatatgctgaggaagtccttgttgggttttgtgcccta

SEQ ID NO: 128864 - DNA, 962 bp, Cannabis sativa
ttttgttttgcagttggtcgtaaataagtgcttgtttacctagcctactgaagagaaatatttcaagtccattaataagggtaaaatcccttctttgttttgagatggacatcgatcagacggtagagggcgatggtacacaagagtccgtgtttcaaagccaagcaaagaccattaatgaggtcataacaaaggcaaagttagttccaccaccacctgctccaaaagcaaacgagttgtctactttagccactttgtccactccaacctacagatatgtggataatgacctggcaaagaggttggatagacttgaggcccagcaggctaccatcatattgtcgtagacggagttactgaatagccatctcaatatgaggcaatcctttttagaaagttagaaagatttgaaggagactcttttggctaagatgaccattttgatggcattgttgaagccgaaggagggggaaccataacccacccaaggagtatatgaccaagcaaattgtcgacctgtggagagtgataatgaagatgtgttcccaaaaaattaggaactagatgataatgtggcattgtctactctaatggaagcaattatcatggccattggtgatacacaatcacaagatgatgttctactcctgactggacccccaaaagatgtaccattttttaggaagagaaagctgccttgctacttgaaggactacattggggaaaagaagaagatgcaagttcttccagagaacgttgatctaaaaagaccacatgattgtagattgctacgtgcactcaagaggtggttgattggggatattccaaatgtctgtcctaagaatctgcacactgacgtgggcgatatgaagttcttcacgaagttgttgatgatggggaattagttggacgaggacgtaagtatttagttatggtactctttaataatattttattatttt

SEQ ID NO: 128865 - DNA, 524 bp, Cannabis sativa
tcgtagaggtataaagtggccatacttcgtcaaacggtccaccaccacaaagattgagtcaaacccgtgagacattggcaatccttcaatgaaatccatagaaatgtcctcccaaacttgctccggaataggcaaaggctgaagcatccccgcaggggattgagctagatacttgttctgttggcaaactgcacattcagctacgaattgttgaaccgcctttcgcattcccggccaataaagatcggttgccaaccgctgaaatgttttaaatacccctgaatggccaccaatcttaccggtgtggtattcttgtaacaacaatggaatgcatggtgaagtggatggcaacacaagtcggccccgaaaacgtaacaccccttgaatcaaggtgtatcctcccccgtcatgacccttttccaagtcagaaataaccttggacagcaagggatctttctttacttgtgcttgcaactccggaatggagataagacttggcacggatatggcagccaaggatttgt

SEQ ID NO: 128866 - DNA, 1683 bp, Cannabis sativa
tttaattaatcacgttttccaataacctcgttgattagcaacgagctgcacagtaagtttaaaatcacgttagcacgcctatgctagttagggtgttacagtttcatagaaacattcgagcaagaagaaggcaaaacaatatcttatctattgtaaattggaatgacatcagagtggatgaaccagcacaagtacaagaaactttcctatcctattataaaagcttacttggagataaaatggccaacaggaaatttgttttaaaaagtgttatccaacatggaactttggtaacaccaaaacaagtagagatgttattgggagactttacaaaaaaagaagtgaagaaagttttctttgaaatacctggagataaagctccaggtcttgatagtttaacaagttatttttttcaagataactgggagcttattgggcaagacatctttgaggctgttaattcctttctcgaaacaggtgaaattcttaaggagattaacactactgtcctaaaacttattccaaagattaagtgtccaaacacagttagtgatttcagacctattgcatgttgtaatgtgctatataaggcagccactaagctgatttgctctagacttaaacatgttctgcctgttttggttgctccaggccaagatggcttcatcaaaggtaggttcattgctcataatataatgatctgtcaggatcttgtgccacattttgggaggaaaacagtcaaaccagggtgcatcattaagctcgatctacaaaaagcgtacgacgcaatttagttggactttttggaagaaaacctctggtaattcaatttcccaaacaagtttgttaaattgattatgatatgtctgcgaacccccagattttccttaatgttcaatggttctttacatggttatttcaaagctcgaagcggactcaggcaaggggatctaatgtctccgcttctatttgtccttggaatggagtacctatccagaataatgcaacgaattgggactaagccagatttcaagtttttttgtgcagatctaaaattaaatcatctgagttttgcagatatgtaatcttcttctgtcatggagattacaagagcatctattacctttttcaaggtttgaaactgttttcttgttcatctgggttacaaccaaattcttttaaaacatccacgtaacaccataactattttaggcatgttaacgttattttttactcactgtgcaactcgttgctaatcaacgaggttattgaaaatcgtaattaattaaaattttgcttaattaattaaaaacataaaatagcatacatatataattttgggatctcgtttacaaaagaatttacaaaagtttcactatacatatacaaaagtctgtcacctagcgactatacaaaataagcccttatgtcccaaagatcgtacgcttcaggcctaaccgtcccaacatgcataatctccatctgctcgctctcacggctcctcagccttagccttgccttacctacacatggaaatagcaactgttagtcaacagactcagtaagaaaagcataagtaataacataataataatcctaattataattaggcgcccatacacccaatcataaccctatccctgtgttccacacggtaccgagtctagaacattcatacaacaa

SEQ ID NO: 128867 - DNA, 729 bp, Cannabis sativa
aaaagagaaaacattatctcaattgaattgttgaaacataataaacatgatggtatcataattcatttgggttgctttttcctcgtcaccattctcaagcttcaacattccacaggaagtaaaaccaaaaaacaaatttaaatgtcaaatattattaaaattgatttaccatttggcaattataactgattcttgaaatatatacaaaaaaaaaatattcctcgaaatggaaagctgcattctgactcttttgatttgaatgttctcttcttcttctcatcagtttgatcatgccctccgtctccaatgtaaatcgagtatcagacgggggtgtgtacctaaaataatttctcaatattacgaattattttattaaagttccaacaaaagactgaaaattttggaacccttcgacattcaatcaacttaaattaaagttatgctgacaaactcttaattgccatgatgaggaaataattatatgcacagtaacatgtttatccaaattacatattctgcatagttagcaaattacacagaaaaaaaaaattaagtttttacacaaaagcataatcaacagataaatataatacaactctaaattagagaaaaaacaatctagatcatatttaaagcggagatgtagtaagacatatatttgttcttaaaaatatatcataccaatattcacatgagtttagtacacttgttacatctacttcacactgc

SEQ ID NO: 128868 - DNA, 828 bp, Cannabis sativa
aaaaattatcactaaaagtagcagttttttatagtgtaacagaaaaataacataaaaaatagtatacaaataacaataaaattaacaacaaaataattttatgtaaataataagagtacaacataaaaatatatcaaaaaattatattttatgtaaataatatcttaaaaatcgtaaaaatatttaaaatttcgtgcaattgtatttttataatttttttaaattgtttggatgtgttattgttgtaaataatccttataaattttgtattgaaatgtttttttaagtgatctaattgtactgtaaattttagtgcagtatgttctaacttttatacattttcaaaatattattcatgagtctcgtgcgctgttaatttttcccgtatcttttatttgaaataataaatctccaaaaccaaacacactttacacaaaaataaaatattactttaaatttagtctcactaaagcactatatatgtaatttatgtatacattgaaagaagagatgttccattaaaatcaaaataattggagtatatgtatataacgcggtttggtttggaatgagagaatagttctacacggtttcatcaatatataaatatatgtattaatctttttgtatgatagtggacgaattataataatgtttttataaatatattatatgataatgcttttttatcttttttatatattatatattatatgataatttagggtggcctttagttgggaggaatgaaaatataagaatagaaatgagaatgagaataggaatagaattgaataaaatttaaaatgcataaaaaaaattaataaa

SEQ ID NO: 128869 - DNA, 1859 bp, Cannabis sativa
agaacagtcttgacaaccctttcagagggatgtccaagtctgttatgccacaaactaaactcagaaaacaatggggcattacatttaacacatgatagacactgactaggagcagtggaggattgactcaaggaagcactggcttgagttgatgaagaggggctttgattcaaatcagaagagtgcagctggatttgggaagagctaaaagaatacaggccattcacaaggtgtcccttcagcaaggtaagatgagtcttctcctccttgacaaaacatatgtcagcatgaaattggaaatagacatcattgtctttggcaaactgagacacacttagcaaattttttgttatggcaggcacatgtaatagattattgagcaaaagaggatgagtagtgtaattagaagataacaaggagtgaccagtttggagaatcgacaaacctgtgccatcaccaacaaaaagttggtcagaaccagtgttttcagtaggtgtcatgatgttttgagagtctggagtgcagtggttggttgccccagaatctggataccaattcgagtcccagcccgagttggaactggccaaatgtgcctgcatttgtgcttgatttccagagttgcttgttgatgaattggtgatgtaggccttgtcaaacctgtagaagcaatctagagcagtgtgaccagttttgagacaaatttggcactgaagtcggttgttgttgctgtttggaaatcttcctcctcgattcccagagaaacctcctctctgattgttgaatccaggtggtggtgattgagaactgagattcgagttgccaaatcgagattgagtgactctaaattggctcgagttaaatgaaggaaaataggatccagaattgtatccattgtaaggaggctgagatccactggatctaggataggggttcctgaagtttcgattggaattagtgtagtttgcctcaggaaattcagaatctgtataggccatgttgacattgaaatcagcttctttgtcacttttctcaattctggattcagaagcaaggagtaatgcttctatctcagctacagaatagctttcaagtcgtgtgttggtggagatgacgaatgtatcatactcactgggaagtcctttgaagatcgcagcaacatgatcacgagtgctaagaacttctccaactgaagcaagtaaatcaacagtttgtttgactctgagcaagtagtcatttaaactgagagatcctttcttcaggttttgaagtttggttcgaaactccagaatctttgcagagacttgtaaggtaaagtatttctgcaaggtattccagatctggctcgaggtgttgcatcctaccattcgagtaagaagactttcagacatggatgacaacagccaagagaccagtagagaatcttgaacttcccaagtagaataagcaggattgacattttcagcttcacgatcggcatcagtcaaatactgaggtggagctgaattttcttgaatgtaaggcattaatcgattccctcgtatggcagcaaggacttgttggcgccatagaaggtaattatgatcgtttaacttgatagacagagtatgattgaagaacacaggactttgatcatcaccacgattccttggattcatctgattgttattcgcctggtttgatccgtttgcagcttgagcgcttgatccgttgacagcttgagcttggaagccattgccggagttggtgacaacgttagccattaacggaggaaagctgtgctctgataccatattagatcttcttgacattgttgagagagaacaagaacaaaccagaaagaaagaaagaaaagagaaaga

SEQ ID NO: 128870 - DNA, 577 bp, Cannabis sativa
tgttatttctgatctttattagtaagtaaatctgattatattgaaatgggttttatttggggcacaaaacccaacacactaatcttctcacatgatcccacttgccaacgagagccataacgaaccatatcttgagcccctaacagactcctccacacaaagtttggtttttgcctaactcagctgaaagaaaattctctcttggaaagtaacgagcctcaaagatttttgaaaccaaagaattgaaatgagtgaggagcctctaaccttgctttactaatattgcaagattaagatcacctaaacttcgaaaactcatgccaccaagatctttatgtttgcaaagtcgatcttaatccaatggatcccaaaaatggtaatggaaattgattacaatgttgtaataaatattgtaataagtaataaattgacaaaattatctccactttattcttaaaaatttatataaataagaggtattaaagtcattttagttttactttatttagttcttgtgatgtaattctcactacataagtgttaggttatttttagtattaattttaaattaagttta

SEQ ID NO: 128871 - DNA, 699 bp, Cannabis sativa
acttatacttctcaacctcagctctaagctcctcctccttggtcttcttctcttcttccaacttgcagaagacagcccggagaacctccttttcctcttgaaggtcggtcacttccttagacaaggaagcaatggaggcttcaagttgatcagaggcttgtagatctttggtcagttcggccaccttcttctcagcagcaagaagtttcttgttgacctgtcccagttccatccagacagccccaagctgaaccctggcttcatcggcatccttcctatccaagtccactttcgctcgcatggtgttagaaatgacagcattcttagaggcagcggacttagctcgggaataagcataagccatcttcagaccaatctgtacagaaaaagaatattaaaatttgaactaagtgaagaaggataaaaggaagctgttaggaaggacttaccctcgtatactccttcaggactcccccatcaccagctccagagaaaggtcattatctgccccagccagctgctcgttcacctcacggaccgactgagtcacatagtgagtgagcatttctcttcctctttttgtctctagatgtagtaccggaggtggggcagggaccttgatcagctcaaatctgcccttcgactgctctggcctgtccgagctacctcctcgagaatccttggacttagtcatttttg

SEQ ID NO: 128872 - DNA, 522 bp, Cannabis sativa
ctaatgagtttgaatgtaccaaaaaaaaaattcgataaaaatgttgttctctagcgaaccaagcttatcatttgaagtcgcaaaactcaaaaatttccattccaataactctttaacttcaataactcaatacctttataactctaattaccaataactaaaacactcgaaaaactcataaatgtcataaatttagaataaccattataggacttattaaaaagataccttagagaaaataaaacataccgattcataatgaaataagagaaagaacttctactatatatgcctaaatccgtttaaaattttatatgtaattgtataaatggtcatccataattctggaaaacttactattgtaagaatcaaataagttatcatatatagaaagaatacaatgatatatattcatatagtatatagactaatttataaaagtgaaaccataccaatttataagaaaaataactagagtttatgatgaaaagtactacactaaataaagacatatacaaataa

SEQ ID NO: 128873 - DNA, 1439 bp, Cannabis sativa
aatcaacatccaatccgcacaaatgcggattttgaattttctaatccaattcaatccgcacaagtgcaaatatctgtactttacggattgaattagatttaattatgcagattaaattggatcggctattttttaaacactcctagaaactacgagaaaaagtcaaaagaaattgttatatgtatatctaaacaaagaataaatacacatattgtacgtggctttgtatgtcatatatatacaaaggggggagggcatatatatataccaaaaaaaaaaaataataataataattaataaaaagtgaggaagcttaggtgtaaacagaagagtggtccacaaaaaccaatcaaagtgacataaacatgtaggtcccccattaaagatgcttaagttaagaagtcaaagaaattgactgtgtgattgattgtagtagtgggtaaattaaacctgtccccatatgcacacgccaaaatattataacctatctttcatttttctctttgcttataaacatagataataaatatcatagcgtaaataaataaataaatagaaaaataaaatataatattagtgtgagtgagtctcgtgggtttttgtcctgaattgccacgtccctctcaactttccgaatttatcgaccccatactatcgccatccacgttcgtacgtacacgccacctcccttgatgtgaaaattgaccattgatttatacatttcttttgttttttcaattgatttattatattttgttttttctttaaattattattagtatacttttttcttttctaattattcgccaaaaacatatatgtttttgcttcttctcaaaagtatttgaaggaataatatgaattaaagaaattggagcaaagctgagtaaaggtatttgtttttaagtactttcccttgtttaatatttttctatttagttatatacttaagtttttttctttctacgactaattagcctttgtttttatgtctttatgtatttaaatctattagtttgtttttgtgtataatagatgcaaggtgttaacatatattgggagttcactatatattataatacttgttttattttattttttggttgtaaaataaggtaatgttgtgaagataatctttaaggtttttctttttgggctatatatttaaaattaaaagttatgaaatgaggtcgctttaggttgtcatattcactttttggttgatgaacaaagctgtactaaactaccaaatgtggcaataaaagaaattcacaatcggttggtgaaaaatcaccatttttttttttggcaatactcataattaactttgcttaatctaatctattagttttaaaaaagtgtaatttaaataaaaacataacttttataaaaggaaaactactcttaagtacgaggatctcctgtataaaacttttaca

SEQ ID NO: 128874 - DNA, 1281 bp, Cannabis sativa
tacatgaccatgaaaaaaaaaattgaataaaaaattatttcgagtgttaaaacagataagggtgcatcaatatatccattttaaatgggtgcattgtaaaatttctcaatagataatacacattgaaaagtgttctatataaatatactaggtaacactaacatagtccctcttcgtatggtgttttaaattttcatttttgtgagatattttattttttaaattatatataattataatttatacttttttttgaattattattaatgaattaaatattttaaaaattttaaatgataaaataaaattctaaacttgaaattttaaagtatttataatacggagaatatttaaaattaagtacaaattgttaaatatttttagttgatatttattataatttcaaattataaattataaataatatgttaaatctaattaattcaaataattttttcttttctctatgtaaatttataaaaaataaactcatcaaacaaatcgaaacaaaactattaattaatatgatttaataaatataaataaatatctaatttctatgtctatgtaaatatttaaaattaaaaaaatttataactaataaaaatagaaaatatcataattcctgaatgtgtttattaaaaatgtgttaaacactgtaaaccacaaaattttatcttaatgtgataagttacactatatttgaggcaaaaactatattttagttatgtaaattgaaaaaaaaaaagttcaagctgttatcataaccgtatttcacttgtaattactactagattcaaggtcgttttaatcactatatctcacttgtagcaccactatattcaaattcattattattatcgtatctcacttatagtccttcaaatttattgtcatttttatctcacttttaatagacactgcattcaaaattattgtcattactagtatcaaagatattggctaagcatcatcaaatttaatttttattgtacctttatcttctatcaaataaaaagaatatataaaactcattatatataattgtttgatagaataatatatttacttatttaaaattaaaaaaatatttcttcatcatatttttttattccattaaagatcctatttttctatcatcaagattggttctatcaacaaaattactcaagaataaaaataataaatacaaaattatggaaaaaaataaaattgattaaaaatataataatgtaacatatatatatatatatactagttgagatcatactgcttgtaaga

SEQ ID NO: 128875 - DNA, 2497 bp, Cannabis sativa
ataataatcataacacatattttcataataatcataacacatattttcatgaacataacacatattttcatgaaaatataacacatattttcatgaaaatagggtctataaagcataaaatacataaataatcacataattagagtaattagttctaagtgtcgtactaattccatatctaagtataacaatccttacaattatccactcgttagaaggattttgttcccaaaatctaacctgaatgactctgaatattgagtcctcattttagactctaactctcagggtagcctcttctacgttggtgttcttccagagtaccttgactaaggatatagtattgttctgtggaactttattcttcttattgaggatctgacctggttgttcatcataggataaatctggtgccaactctagggcatcataactcaagacatgagttgaatcagacacatacttcctcagcattgacacatgaaaaaaattgtgaactatcgaaaatgcaggaggtaaagctagcagatacgctacttgtccaaccttctcgagtatattaaatggccctatgaacctgagacttaacttgcccccctttttgaagcattttacacccttcattggtgaaatccataggaagacactttctcctctcaaaaactctatgtctcggcgcttaggaacagcataactcttttgcctacttttggaagtaaacatctgtgccttgatctttttggcatcattggtcttttgaactaactcaggacccaaatactttctttctctggttttatcccagtgaatcgaatattagcacttcctatcatacaacaactcataaggagccatccctattgtactctaataggtgttgttataagaatattctatcaatggtaggtacgaaccttaaaaatttaccactcacgcttgtaacatgtcctctagaatttgaattttcttttcggactgaccatctgtctagggttgaaaagatatactaaacttcaactttgtatccatgtccttctggagactctgccaaaatttggaagtaaatttcgaatctctatgtaagactatggatttcgtagctccatggagatgcactatctccttaacatacaactcaatattctaatccactgtaaatgtggttttcactggcaaaaattatgctaagtttgtgaaacgatccacagttactcaaactgaattatacatttcagtggtcctaggcaatctgaccacaaaatctatggcaacatcttcccatttccactcgggaagtgttcgaggctatagtaaccctgcccatttctattgatcagtcttgatttgttgaaaagtaaaacattttgacacataatctaccacatccctctttatatcgcaccaccaacaataatagggtttcaaatcttgatactattggatcttattttaccaagatctagatttattaacatgtatgttaattattataatctatctataaataatctaacatcctcaatatgaattttctaaaacaataaaataaacacatataaaattgaagaaaatcttacattgatggcaacataatataatggatcattccgttcatatctctaacccttgttcctttctatcgcagagtattaccaagatctgaacctagatcttcttaggtgatgaaattcttcacaatcttccacactatgattgagtattgacttgaattgtgtgagtaaggcactcactcactatagggcaccaaattatgaagagagaagagagaggaattcaaatcctatagagaggctctttattttttcagttgcctaataaagtagaaaactaggatatggaaataagagccatctctttctatttataagattccttatagggttaggatttaaattatatagaattaatagaagataaaataatggcttaaattgaccttcagtggctgaccatatatgtgggccccacacgtttcaattttaccatttatttaagagcttatcttttcttttacaaatactatattttaatttcaatcctataaattttaaatctatttatttaataattaattatcaaataaaattcttattaattagaccttacaaagttccttaattaacaaataaccctaaattcttctttcttctcaattaagccattgcttagtgaaaatttataaacaatacatagtctagtttagaattcgaattggttaattaaaactaattaaatgagactaattaaatgagtctaaaagctaatattatctcaactagtgcggggaccatggacctatatgatcaagctcccaataagtagttctagaatttaccgattaaattttctatcttatgaattcctcctgactccactatagatttgaaattgcactccttattgcatggaatgctctatatgttccaaatatagacacactataattatctactgttataatctaaataatcaaaga

SEQ ID NO: 128876 - DNA, 812 bp, Cannabis sativa
acaataaacttaaatctttaagtacttatggataaatattcatttaattaattattttgtatcataggaacctaaaacgaacccacatacatgtaattaattgttataataattgaactcctacaaaaattaacaaatttagtaaaaggggttataattttgtttgaaattgacactatttttttataaggggagattacttgaattgagagtataactgtaaatatgtgcttactgtgctagcgtgactcatatttttttaaaatataagtcgtaccgtgtcaagctacaaaaatacagaccgtgttgtatcataaaaaaaaaaaaaaaaaaaagataaattgtgtcaagtcctgccaaaatttttttaaagttgacttgataagacctgctagcctgatagttttatgtcgtgctttatccaggttgactcattttttttaaatagatcaccgtattttcttatacgagctcaaattcatgttccatgtttttgtatttttattacaatcgatgaactaattactaaattatatgtgtattttataattttaattatttttatgtaattttttaacaaaaatagcacatatacatataaaagtaattataattattagaatttgaatattattattttaatttgtaaataaatatttactaatattattattatcaaattattaggctttttaatatgttatgcttttgagctaatctatttgtgtttatatgtcgtgcttttagacttgttgtgcttaaactcatattttctgtattaaaattttctaaattctttttttttttttttt

SEQ ID NO: 128877 - DNA, 883 bp, Cannabis sativa
ttatatctaataagtaaccaataagagatcgagactactcaaagagtctatactccctacataatgagattgcaccaaaaaaaaaagttgagaaagcgcaagtggcaaaaagcttcctcaaaaaaatgatagctcatacaagaagtcgagaaatctcaagagattctccctccacatgacaagcacgcaccatcaaaagagatagagccaatgctctccgataaaggatcgtggaaaaaggacctcagggcataatcgcttaaaggatcaccagggaaccgaaagatgggagtaaatctcaacaaacctagtgtacaagaacacataaaagtgtttttatagactagggtgcaagtgttaatcctaaaaattagcaaggataactctcgagattagccaactactactcgggagattagcaaggacacacataaagagtttttttggatgcatagtcgtatttgcttctttaattgaacaatgtatgtaactcggcatgcatgcatcgagcaaagtcactcgaccatgcattgaagaaagtcactcaaccatgcatggtgaagaatcgctcaaccatgcatggcgttaacctaaacattagctcctctaaattttgagattagtcgacgaagaattcgatgtcaactccaaaaactagcacttgatttttgagacatgtccaaacacttcggagattggcctcatgctcgcaagtgaggtgttaagcaatatgggtgaacctgattattggcaagagagagagagttaggtgagagagaaataggggtgcaagtagagagattgggtgagagggagagagggtgcgagtatagagagtgggcgagagagagagagagaagggtgcgagagagagagagagaga

SEQ ID NO: 128878 - DNA, 689 bp, Cannabis sativa
gaaaataagtggcattgttaaaacaagtgatattttgtttgatatttgcagatagggcaactttcaactgtgccaccaaaacaaagaaccccagaagctttagccgaagctatacaactaatggatagtcttgtggatgcagcctttatgggaggcttcattcttgaaaaaatcatgggcccagtatcgaccgggcacttggagctccgaacccgaaacccgaatgataacccgagtgtgacatttaactattttaaagagcccttagacttacaaagatgtgtacaaggcattcaaatcatagaaaagataatagactcaaaatcattttctagtttcagatacgattacatgtcagtgcctacattgctgaacatgaccgccagttcacctataaatctgttgcctaaacatgccaactcatcaacttctttggagcagttttgtaaggacacagtgatgaccatatggcattaccatggaggttgccaagttggtagggttgttgatacagattataaggttcttggagttgatgccctaagagttattgatggttctacttttaattactctcctggaaccaatcctcaggctactgttatgatgcttggaaggtaaatagacacattttattttattttatttaagaaaaaatatgatgaaaaatatatttttccaattaattc

SEQ ID NO: 128879 - DNA, 943 bp, Cannabis sativa
aagcttgggcatattaattataaaaacctgaaaaaattgtctaatgcaggtattgtcactactacaatttggtcttttagtgacactatttagtgacacgcacaaaagtgggtgtcactaaatagttatgggtaatttttagtgacacacataattagactctaaattttcattgttagtctcttataatgtgggtcactaaaaatttgaagtgtcactaaaaagtaatatccatacttttttttattttttttttttattaaaaaagctaacctatagagtcacgccaagagagattggaaaaacatatccccacttgcctagcgtgtcactatatcatacttttaaatttaatattaagatatagtgacgcgctatgagagtaggtacacatatacccaaacacatttcgcgcgtcactataggaataaaaaaatgtgataaaaaaactaatttccataaaaataaataattatattaaaaacataattaaaaaaagaaagaaattaattaagtataaattatctctttctaactaaaaccctaaaatttctaacataactctaccagtgctctctctatccctctcgtgcgaaccagaaccctaagccggcccctccaatccgaaccccaagccccttcaagttcgaaccccaaagccccctccggtctgagaaccccgaccgttacctttttccagtccaacaaccccgacgaccgtgaccttcattcagtctgagaacccaacacccgaatctgaccaaatcccaataatggtggtcgaatctgaccacaaaatcaagctcgatgccctaaaaataaaggaatggggtaggtgttacttctacaattatgatttctattagctgttgtatgttctggcatctgtgtttgggttttatgccctaaataaaactcatatcaatataatcagatttactta

SEQ ID NO: 128880 - DNA, 1464 bp, Cannabis sativa
tgagttggaaagagaggctacaatggctagggcgacacaaggaataaatcctcaaaactaacttgatcctggggtgagaagaccacaaggcagacctcgaggttctagaaccaggagataggaagcaaaccagggaaatccacaaaacacccaggaagaataacctgggggaagaagggatgttccagtggatgatcaacaaaataatcaagagcaacaacgagatgttcctcaaggatcccaaggatttacgaaccatgggaacaaacaacttggtgtaccagaagcatctcgcaggaatgaggatgcgagacagcctcgacctagggatcaaggaatcccttgtggaaataagagaaaccctagaaaccaacccaagacaagtgggctacctctaagacacccttagtgtctttcttaatcagagagggaagatgtatacacgtatctaaatagagggcgtctattttactctttcgaaggagaaggccaatacaagacgaacaaagttctagttcaggacactcgaggtctcgaggacacagtcgatcaggtaggaaaatgcaataggaaaatagacctcgacgttacgctgaccaagaaagcatgagcaatacacgaagctaccaatctaaaagttacttagaaatgaggtctgtgagtaattacgagcgaaggcaacttgatcttcgcaagcacttgaatcgaagacagcccaaacttcgcgagtgactaaatcagaatgcaccttacttgcgccatcaacttaatgcaaatcaacagcaggtggatcccatccaattgccaatcattgaattggaggataaattcagaaagtatcaggatgtggaacatgggaaattacccggttatgactcgaatggggaaacttagtcgtttcatcctgatattttgaattttgaattccctcagggattcaaaaacccacatgtctcgcagtatgatgaggctacagacccagtcgctcacttgaataactttaataccaaaatgcgagccaaaaatgtctcaaataatttgcgttgcatcttattcccaacttctttagctagagcaacgagtagctggttcgaaaaatttactcatcattcaataacatcttgggaataattttccaaggtctttaacaaacaatttcaagctgctagagacatgcgaccttaaccgtcatccttaactaacataaagcagcagtcacgcgagtcgctttagcacaggttctgcaatgattaaaaacctaaatgacagtattcagcttattgctctttaagcagggatcacaactgatctttttagggcttgaggcgagttgtgggatgacctacaacgtcgctcagtgagaaacattcatgaattcaatgaaagagcacaagtatttgtgcgaaaaaaaagaagtaagaaacgagatgaagttgttgaagactggcttgggaagtaaaccca

SEQ ID NO: 128881 - DNA, 558 bp, Cannabis sativa
cactaaattacaataaactagagttagtagtactccatatgctatttatcgatatgatgtagagaccaagttagtgtaatttggtagaacaaattaataaatgttggaacatttgtgaattattactaaaaaattggaaaggatttttgaagtccttagaggactagtctcatatttctttggaacacttatttataagtgtatatatagtgtagatataagtaattggactgggcctcaagagttacccacttttgtgaaagagagatgagtcacacaaaggctcatctgaacacacgcattgatgttcaagcaaggctagccttgaaatatagtagttcataaggaaaaaaaaattgagcctttatttaaaagaaacgtaatatttttaaaatcagtaaaacaatataaattttaaaaatgaatttctttgtaggcctctaggctagacacagacctaatccgcttatgcttaaggtcgggcctgtgttcgagtcgagctggtgtggtgtgcacattattttttggagaaaatgtatttattaaattattatttta

SEQ ID NO: 128882 - DNA, 710 bp, Cannabis sativa
actccaagaagtcttagaacaacagtttgactacctaacgtctgagtaaggactttctaaatcggtcgcagacgaggactcctacgcgaatgaaaatggccacatcagatttatatggaaatctacctacagatggctatacctttttctgacacagaataagatgttctcccatgtcagactatggtagtgcgtgtacgcacctttgggcataccctttttgcttgacggtttgtctagagaataatgtataaaggaaaaacctttgggcaacatgtgtccctgatctagacggtacacttaccatccctgtacacctcatgatcaagaaggttcctcaatgttggacagttaaatttgaagttgtatcttcctgcccttgcaatgggttgtggtatgaaatcctaagtgggtaaaaggaatgcctttacccacatgtaagcctataaatcccctcagttcttatgtacaatgggtgaaaattttaaactagccgaacctctgcaaaaactcctacaagcttcttcttctttaaaagaaacaaaaagagtgtagagttaggtttatatttttttttatgaataaaagcatttatatatataaaagaaagagttagacctcatggtcgttacaaaggatagcattcgggatggtagatacatctaccataccgttaatgttgttggcaaatgctcatttagccacattat

SEQ ID NO: 128883 - DNA, 575 bp, Cannabis sativa
gagagagagagagagaatgagagttgggattgagaaactgtattgataaacattgtcgattacgttggctcgggttagtgagttaatgagtgttgagggattacaccatagatgacttactgtgattatttcattatagctcctgagattgatatctctaattctcattatcaataaagattggtggcaatactttcaaactagagtatgaccaagttcacattgaacttaggatcaaaaccagtataattctcgtgtgttgttgtgtctgatagccatctagattcatctatagccaatatcttccaagaattaactagagaaaaatactaaaatccaattaataacaacataaggcataatgatcattttgtccttccctaccaggaactaatctaatcacttaggggtaaaatgatccaaaactataataaaaaataatctcgacataccaaaagtttaactatcttgcctcacttattctaggatactcaaccgtatctaagtgactcttattggctaaatcgtcacatttcaattaggggtgttcataaagtatccgatccaatccaatc

SEQ ID NO: 128884 - DNA, 727 bp, Cannabis sativa
gaaagaataagtagaaaatgaaacattatttttcttaagtaagcaactttctcttaagtcttaagttaacaacttggtcttactcaatagagtggagtggacaaccattgatgttggtttagaactgggaaatcaaccagattcatccattatatatatgtttaagttaatgccatgtcttattcatttcattccaaaaaagtctatctcttgtttcggtcccacccactttgtataatttatctttggaagttgatattctatacctgccaatgccatgtccatacgtcaatcattatgctcctatcatataaatatttatattattattgctcctccataaatgatgtgataaaaaaaaaaattgagaaaataaaacaaagcatgtcatataatagaatgttaaatttccttaatgtcttttagcggactaagacaaatgcttacgtgtagaacgacacattgtttaagctactcagtaaaagcaccgtactacatgtcgttggtactcgtttaattttgaaatttgaactaacttttttgctataattatagtgtggttttaaaataaaataattagatatgaattcattttttgtaaaaaaaaatatatatttttactttaaagaattttttttaatttttttatgatttttcttaaaaataacaaaaaaaataaataaaagtaatatgaaaataacatctaatagcatcaaaataacaacaa

SEQ ID NO: 128885 - DNA, 705 bp, Cannabis sativa
attaaactaaaaaattctccgtatccttttcaagagtgtaccataaaattttcttaaaaaactataacaaaaaaaaaaaaataggaatatgtaactgatttattctgattgcataaaattttgttaaagtaataatattgttgtgtaaaagaaattatatgtaacttatcaatttagaaatattaattattgagaaaaatatcttctttatacaattttggaagaatgatatttatcgaaaacaaaaaaaaaagtgtgcaacaacaagcattgttttcgcggctatattgaccaattatcaattattggaagcatgatcaattctgtcgggtttttgtttccattatttagcagatcaattttatagaaaaggataataatatctagatgatccaatcatctgttgccatgtcagcttcatatatatttttccaaataattcgttaaaagaaacgaaaataaaagagtcagaaaaataaaaaagttaacaaaagaaagtataaaatttggaaaaaatctgtaggagagttgggtttgagagtggaaagcaattttatgtttttaaaagattgggattcacgtaaaaatacttaattgatttgatattttcaaaaactaaatttaaatatgattttaaattttaagcttaaaaataaaaataataattttatgttttctatgttttcaaatcattgaatctaaaaa

SEQ ID NO: 128886 - DNA, 1079 bp, Cannabis sativa
atattataaaaattagtaactttataatatataatgcagtgcagtttgaaccgcaattattagattcaaaactgcaaaccgcaccgcactgcgcaatttgaaaaaaatgcaaaccgtaaccgcactacaaaaaatttcaaactgcatcttttatggagtgtagtgtggtgcgagcggtttgtgcagcttgggcggtttgatgaacactcctaccattggccatgcgagtccttacagagattttcgtcctgtataaattgatgagatcgaaatgacctataggtcacgaagtacattatctttttgatttgaggcctaaccatactcattagcagtcaggctactatatggctttcagcacacccatagaggtgttaagtttctaaaaggcattgaaaaggtgttgaaagtgttagtttttatagtccatataagagttataaaaacagaagcagaattttgataaaagaatttttatatagtatgaaccataagcttaaggatctcaacataatgtaaaaatattaaatcaaactactgaaagaaattcaattacctcttgatgcctatcaaggtatccttgtttcttttcgtataacaatcgaacatccaatctaagaacttgactgaagaatccacaccttgatcttgcctcaacactcataaatagagtaggctattaaatataataaaatgaatagatttagatattctcataagacattgtaatgagattaggattttgatctcccacacaccttgagagatgtgggtgattagtggttaaaaatacattttttatttattttaaatgataaaacaagttaagttttagttgatatttttatcaaattattgtaatatattttataaatgaatgttgtcgagtgaatttcgcaacaccaaaatgtattatttaattaataggaaaaagaattttcagggaagtgacaagtgcgagtattcgacctagaatgccgagtactcgactaggtatgcaagaacaaataacaaggctggaaaatgtaaataagacaaagaattatagtggttcagtcagattgtgatctgcttagtcc

SEQ ID NO: 128887 - DNA, 1160 bp, Cannabis sativa
  modified_base (946)..(953): a, c, t, g, unknown or other
aagattggcttcatctctcctatccacggcgagcttcaggcagccatttcgggtcttcaaattctgagaaagcttaatgcgactaaagccgatctcctctccgactcccaagtcttgatctctgctatttgctctgcttcttcgcctcattggagtatcaaccgctctttccttaatttgcttatgttgattgcttctttggatgttgatgttttttgggtaccaagagagtctaacaaggctgcccattttcttgctaaatgtggtcttgatcatgactgctctgggcttgtgaacttttaggaggtgagtccccatgtactcaccaacatcattttgtgtgataaataaatgttcatgttttcagtagcaaaaaaaaactacatcatttctcaatcttccttctctaattcctcatttctttttagccaatgattttagaggagtgctaaggagtgagagttgtcactaaaatatgaaaagagtttaaaagagagtctctttagcatttgtaatacacttgcttcacctaagtagtctcattgtacacagtgtactagtatatatgcacactttttgggaaaacttctaggaagtcacttattctaaggttaatcatacacatttaactttgaagttcttaagtgatggataaggttgagcatgaaatttagaaaactgaaaaaaccgttcaaactgacctgccgaacatcgttagaaccgaaaccagcaaaatcaaaaatcgaaaaaatcgctaacggttaaaatcgccattgaatgtcaatttttttttggataataaaccgaccaaaaaaactaaaactgactgttatacatatatattaatttattaagttgtttttgctttatgtattgtagttattgataatatgtaataataatatattattattttattaatttaaagttaaaagaataagataannnnnnnnttgaacaattaatttatatggttggagttgtagaatgttgaataatgtgcttatagaataagttggatcatatttttaaaaaaagtactgaaattcaaaacggtcagttttaagaaagattttggattggccggtcggtttttgaattgcaccaatccagaccaaaaattaaattctggatttttatatagaaaaaaatcgaccaaa

SEQ ID NO: 128888 - DNA, 626 bp, Cannabis sativa
cttggagatggcttacgccatggttcattttaatttatggaagatggatcctactgtactctgacttcttggtgagaaagagagggaagaggctacatggagagtgattgtcttaagtcctcaaggcctcgtggaagctgaggcatcctctggggagactgaaaaagggtctatccaagatgcagttgagcctaatttgaatcttccaaataagtcagttggtgactcaatccaagtcgagtcaacagtccattctcccactcaagaccaataggggtcacttccgttcatcattttctatctcctttttaagacaattttagcttttctttttgcagagttgtttttatttttgcctaatctgcggggctgcgtatgacaatcatcttttgtgcaggaacaacttaatttgccttttgagaggcactgttatagaccttcatgtttcactctcttttacttcttagttttaagttttatgcgtcggcatgttagatgattttaagggttgttttcatatattgtttagaaacatgtggttccaacagctattaattcaatccttagatttcacgtgacccacatgttgggttttatgccctaaataaaactctgtttcaatgtaa

SEQ ID NO: 128889 - DNA, 1239 bp, Cannabis sativa
tatatatatatatatatcttccccttattagcttcatggaagatgttatattccaagagttagccaaatgttctccctgttagcgaggacagaaaggacttcaggactctcactattaatctgctattaagaaagatcaatgttcccaaaagctacgagtattctaggaggctagtgggttagtctgatccgggaaggctatgaccagatggtcctagaacctacttggtcgtatcttatctggagctcaaggcgacggatacatatcttctaacaccgaattatatcttgtcccctgtgtcagaccttggtagtgtgtgtacgtgtctcgaaagctctttttgtccgacggcttgtctagacaagaactttgcaaggtaaaacctttgtgcgactcatgtcattattctcacgaaatgcattgcaacagccgtacaccacaccatacgaaatgccttgccttttagaatttctcataactaaaatatatatcacatttttttatatatttttttttatttttttaaattaagatatttaaaaaataataatcacttttttaaaacatattaatttataaaaacagaacaaactaatgaattttctccaatgtcttaaaaatgttaaaaaagatgtttaaaattcgagatgaaatctaagattaagatataggtttgagaaatacattagtgacgactacaaatgaactacggtaatgataagggatgagatacagtcatgaaaacatgtgagatacggtgataaaaataagtgagatacaatgagacaataagtgagatacaataataacaatagttttgaataatcgagatatgaaaattatacattatggcgaacaccttaatttttttctacaccaccctatttatttatttttataaaaataattttttttaacaaaataatttaaagtacaatatataataaatttttaatttcttaataaataattctaaataattattaataaatttgtacttttaatttttagtaaataaaattattaataataatataagataagacaatatatttataattttaatatatattaaaattatatttttaaataactatttattataatactaaaaaatattaaattaaaaaacaactacagtagaacctttatccaagaatacacttgggactaagtaaattatattctaattgggaggttataactaaatagagttacactagaaaaaaaaattaaaa

SEQ ID NO: 128890 - DNA, 1434 bp, Cannabis sativa
tttatcttttcccttgctcatcttgctctagaaggataacaccccaatgtttatcactaccgtctatttgaagaatatgtttttcgtcagagagaatctgtaaaggtggtagattttgcatgatttctttcagctttctggctgccacggcttggtcatgtaatcattctagactattcattttgagcatattgctgagtggccttattagtacagacagttggagaacaaagtctcgtaaataattgatgatgcctaagaattgttgcacttgaactttcgtgagattttcatttgggaatttgagtagttcatgggttatatgtggttgggcttcatattgtcctttggataatttcatcccaaggaattctatttgcgtctgtccaataatcatttccttttcagataacataataccatgggatttggtgatagaaataaattgggtcaataacgattgatggacttttgcatcaggagaaaagggcaaaatattgtcaatatagatgagagccttttctaatatcgggccatatatcttggtcatagctttttggaataaagaaggggcaattttgagcccaaaaggtaagacggtctattggaaatgatgatttaaaatgcaaaaggctattttcggtcggccatcttgtttgatgcctaattgtcaaaatcccgtttttaggttaaattttgaaaaatatgggcttttgataaattggcaaataatgaattcttatttggtattgggaatttatcgtctgctccgaactcatttaagagcttgtagttgatgaccaacctttgctttcctcgagctttccctgatcgattattgacataaaatgcttgacatgcacctgaagatgaagttgactctattaaaccctggtgttgtaactatttgcattcattaaacgccatttgttgatgttctggatcatgcttgggtgactagcctgtgtaaggtttatatcttcattaagcttaaaaggaaggtttacgaagaacttttgatttttccataaaggatggtcacatttcttcaagaactctgcatgattgcacatgagacttcgatgagctctttcttgatttgatgaaatgggtcatggggcattaagaaatagtttggtatggcttcccatggagaaaaatgttgtttgtaaccaagtccatttggaagaatacgcaaacctttcttctttgtgtaaagatcaaatccaatatttaagtcttttccgagtaattttgatccaatgactatgtgagtaacagaacaccctggtaggaacaacaatcaaatcggtttgctgataaaaactacctccatttgcaacgtgaaagtattatttttctctcttccaatattatttaggaagaatatcagggttcattatcgtgtatgacgctcccatgtcaaaaaatctt

SEQ ID NO: 128891 - DNA, 1117 bp, Cannabis sativa
  modified_base (30)..(46): a, c, t, g, unknown or other
atttagggtgtttaaataacatacttgtgnnnnnnnnnnnnnnnnnggtaaaataaattccaacagggaatggccaaccaaggtttgcagggcatggttgatgttcaccatacactctcccagggtatggccagccaacccctgtctctttagaatcagcagcctccctaaggaggactagttaatcaagtccccccagcaacagatccttctgtgcatgcacagttggaccaactcagggacatgatccaaggaatagctggcccaaagccttcagacctcgaacttgatcagtcgaggggatcaccattcgcagcatattgaaatgccctacctctacggaagttaaaaatgccagtatgtaagatgtataccagacgggaggacctgctggctcacatcaaatacttcgagatctagctcgacctccagaaggtcactggtgatgtgtgctgttgcatattcccagccacactgttagagacagcccaacattagtactttaaactcacaccagggctattcaactcttgggttgagttcacacgagaattctacacacaattctcgtcctcgagactcgtaccatcacaattggaagaccttgttaaagtcaaacagcgacaaggggaacctctgaaagattatatttagagatttatggccgaggcaaccaaagtcaaaggccttactgaagaaggccgatatatgaccatactggggggcatactcccactaagcaacatttggaaggatatcaggaggatatccaccaacaacatgaaggagttcctcgatagagcaaccgactttataaaacttgaagaagccatacatcaggcccaaggtgggcatatcaataataggcagtcccaagacacccagcaacctcatgactcaccaggtgcacaggcaggaaacaacaatgttgcccatacctctagttgtaaacacactagaaataagtgcaaggaggaacaatggcaaagggaagtttaatacttctcccatgccccagaagaccaaggaggagaaatatacttacttcaccctcctaatagagaagcctgagaccatcttcatggccattcaaggaacagtcccataccgaaagccc

SEQ ID NO: 128892 - DNA, 778 bp, Cannabis sativa
gagaaaagatatatttatgatttcctataaatatctatacacagtagtatttagttgtagttatagtcatagtagaattaggttatcgtataataacgtgtacatacttcttctgggaccttcgctttccctcctatatatatatctcgatcattttcgtcgtcattcgttttgcagagagatctgagattgtttcgtttatccaaaaatggaagataataaatataaggaagaagagaggttggagttatttcatgggtacagagaacgtttgaaagaagaaatcagaaagaaaaggatgaacaaatcaactactgcagctcccaataacattaataattctaggaaaaagcttcaatatgataattatggatcattttttggcccatcaccatcatccaaaccagttaataataatattattgcttcaagagtaattcaagagatgagtaagtcaataacttcattattatcatctcccaaagctgtgactgatgatgatgatgttaaaactaaagttcagaaactaaaagattcaagagactattcctttttaatgaatgatgatgatgatgatgatcaaatgccaatgaaaactaaacaagcattgggaaataatgttagtcatgcaaaaaagacatcatctactcctatgagtggacactctagtagattaccttcaccaagtagtaggctcacttggccaccaatggattctacaagacagcatagtagcaataatggaactgggcctagtcggcctagtatcaaaaacgga

SEQ ID NO: 128893 - DNA, 830 bp, Cannabis sativa
tttttttttttttttctctttcagcttattcattattaatttttatataatttttgtttttgttttttctttttagagttggcaggtaaatctcaacctttatatatataaactaggtaatataaatgttattagtgtggtagttttaaatatgtatttttgtgagttgctgtaaatattttattttttttaattattcactaattatattttttaagttattattaataataaataaaatatttttaaaatttaaaatgataatataaaaatttaaatttaaaattttaaaatatttattatgaaatcacttaaatatatttggaataaattgatacatatctctttttattatgcattcaccaaaatagctgcaaaataaatttaattgaaatataactatgttatttacctaataaaacatgttatttatctaataaaatatgtcgtttattgtattttagacatgttgtttatctaataaggcttgtcttaccttattttaaggtagtaatttttgtttatcttatttaagacatgtcctttactttatttaagacatgttatttaccttattttaagcatgttatgtaccttattttaaggcttgtttacctaataaagcatgttgtttaccttattatagagtggtaattttgcttaccttatttaagacatgtcatttttacattatttaaggcatgtcgtttaccttattttaggtatgttgtgttatattatttaatataataatatgtagattaaaatgtggtaatatatgttataatatatattaagtatttggtaaataaattgtgtaacatatgatt

SEQ ID NO: 128894 - DNA, 620 bp, Cannabis sativa
  modified_base (552)..(591): a, c, t, g, unknown or other
ctcctcctcagttaccagagggttaagaagttcgtagaaggactcatcaagctctgtatttgctgagctatactagttatggaagaattcattgaaaaccctcccaatgtttttatttgatgtaacccaattcccttgattgttcttcacagcattaatctcgtttcttctccttctaacgatcgtggaagcgtgaaaaaaacttagtatttctatctcccaactttagccaaacttctcttgatttttgccgccacattccctcttttcttatccaaagctcagctattcttttcattaaagtgtcctcttcttgttgaagcaaaggagagaggggttgaccttggatccaaccaatccgatcctccgcttctttaatgagtttttcacagtcaccgaaatactctcttttccacctttggagagcagttctcgtattgcctaaccgcgtgctaagactgctaccaccctgccccctaatcctctaagcattcttgatagtttccccacaagaaatttcccttccctaagctgttgggttttatgccctannnnnnnnnnnnnnnnnnnnnnnnnnnnnnnnnnnnnnnnatagattagaaataacatttaatgttgca

SEQ ID NO: 128895 - DNA, 659 bp, Cannabis sativa
tgtaaggacctaatggaggcttgaagcggggatgttataggtttctggggacatacttggacctcggctcctcatatccatcaaggaacaatgtcaagacttgatatttcatcaacttcatcccgaagagcccattcacagctatggacccccatgttgacattccaacttgcgcaccgatttcatttcaccaagcaacgcctgtgaaatttgacgaaactaaaatgtgtggagcatttttcaccaaaaagaaggtcgagcatcaataaaaccgatttcgaagatgtcgtccccacctgagcgcccaatgcatgcctcgaggccactatgggcacctaagttaatgtatctcaacctagggcactccaagacctctttctagagaagttttatgggaatttcccttatttttgtccccagatgaaaagttgggggcccacggtgacaacactccagtcactaggcacccaagttgatgtagcctcgcttctagtggttctgccgatttgattgggattccgtctcagacattctttttattttgcttaaaaataatacatgagacttagaatcaagagaaaatatctttagagtagtgagttagcccccatgcatcaccaagcgccagtgtgcaagcacactgggcgcttaggttgaca

SEQ ID NO: 128896 - DNA, 1333 bp, Cannabis sativa
ttcgatggatcagtgagaaacaagagagatgtgggtggtgctttcaacagatccgagagaaggaaagagagatagtgttggtaatggttggaagtaagggtgttgattaaactgcccgcaccacaccgcacaaaaaatgtagtttgaaattctttgcggtacggttgtggtttacatttttgccaaatcgcgtagtgcgatgcggtttgcgattttgaatttaataatcaaccgcactgcattctattttacaaaaatactaatttttacattatgatttctcttttcatatatgagcaactcatatgcttacaaactccaagctataaaattaaatttaaaaaacatccatataaattattctcatttttattttttttaacttcttattgttaatatattattagtgatatatataatatgtaatatatatgtatattatataattttttagagacaatttaatacaataactcaattagtgtatatgttatgacattaaaagtttgataagatagtttattttttatttgattgttaaaattttattagactaattttttatttttttttaatgtttgataatgatgttagtgtaaaccgcactgcaccatatttttgcggtgagttttcgcgcggttttaaagtcttgcagagcagttgtagtttgaaaaattgcaaaaaccatatgtgcggtttgatttgaaaaactaacttaaacccgcaccacccataccacgaacaatcttaaatttggaagtttttgtccaatttttgtcaagagaaagagaatgagggtaaaataattatatttttgagtaaggaccagcttgaaatgtttctggttattacttggaacttgtggaatacccgaaatgcttgtatacatggtggttttgtaccacaaccggcagagatggtggagtggagttataaactgctggttgattttcagggaggaaactgctgtccgcaagaggccatgcgaagggagcagggggtttggaaggtgccgaggcatggggaagttaagattaatgtgggtgctggtgttaagaagggggctgggtactcgggactggggtgtgtcatccatggtgaacaaggggaagtgatctatgcttcttcgattgctataccacgggaatactcgccgttacaattggagctgatggctattttgaaacggatacaagctaggctacagagacatataatgaattttagcatggaattggactgtttggaagctattcaattaatccaaaaaaaggaagatggctgccgtgatgttgattgtttgctagatcagattagattgttgttgtctcat

SEQ ID NO: 128897 - DNA, 892 bp, Cannabis sativa
gagttaagccaatgcgtacaaatacaaaagtctgaagaacacaaaatttcataatgctcaaacatcattattaagtgatggccttttgaacatttatcattcaatggtttggaaaagccttagtgctaaggtctcaatgaccacttctaaagcaaaaaattgttttaacaagcattactcttcagtaatgtcttctggacagagtttatcctttaagagtttctattttttagctaagatccgaacaaatcatgtaatagctttttattatttaataaatataagttacattataaatgaataaagtaattaattatcattcaaattgtgtcattttataaatgattgcttgcaaaattttagtgatttatttctaaagtcaaggagcttcctacatgtgtacaaacagacccacctaagtacagggtccaaacagattagtatggcatactctggtcaatttgagtctaaagcttgctcggtcacttgggggtacctacacccatacaatattggtaagatgccatgaaaaatactaagattttttttaattattttaaaatttagaaaagctaagtacatatatgcaaaaataacaaataatttatcagatttatgcatacataaatttatgcatagagaaaaaggagcagagaaagtaacccttttcaatatgtcaaaatgtcattttgttcacaggacctaaataacaaacttgtcaccaaaagcacatgtgagaggagaccaaatagataaacaagaacttaatttaaatttgcaattccaaatatctcaatcgcgtgaattttaaactaaccaatatttttaacagagcagtgattcaatttcacttttcaagtgtaatgaccgctctagtaatgtggattagtaa

SEQ ID NO: 128898 - DNA, 610 bp, Cannabis sativa
aaagtattacaagccaatatcaacccaccccatttataaaatgagtattatttttgggtattagtgtttttaatattttttataagtggtgtcttacgattagttagcgatatcttttaaaaattattttcttaattcgataattaattacaccaataatggtatgacactgagaagtgtactaagtcccaatagattgtccctttataaatggattatcccttttaatgggtttatataaagaatcatacttaatttttttattaatttatcaatttttttttttgaaaaattctcaatttattaaaatatttataataagttgaacatcttttacaattgttaattataacacttttataagtgtatatatattaatattgtactatatagaagttctaatattattattgggacaattgaattatatagtctcatatatgttttctctaataattcatatataaaactattatatataacctcatgcatatagtatgtcatcccatatagtattagatacttatcatactttaaaatttctattagcaatactcaaaattaagtaaccggagcttacgtactggaggatttaaaaagagtattagta

SEQ ID NO: 128899 - DNA, 649 bp, Cannabis sativa
acaatttaaatttggtagttttatttctaattaataattcaagtaacctgaaaaaaaatagtgatatttcaatacaaaatcactaaccaaatatgttaaagttactcatgaaattcacaatttcacacacacaaccaatcagggtcggctcaaaaattgggcagtaggggtccacgccgaaggtctccaacttaagcccaaaaaatcctttaataaatgcctcaaatttgttatttaaaaatactatattttgtatttttacaattacttattaaaaatataattatttttttaaaaaaaatacataattactttttaaaataccaaatttgatattatatatatttttttaaaaaaggtctaattatattttaaaattttaccactataaaccaaaaaaaaaatataaatttttcatataaaaaagcttaattaaattttttggcccaagactctccattggcttgagacagacttataaccaatgtgggattcctgataccacttactaatctcgtgatatagattaatttaggttccaagattaaacaaaaatagggttaatatcattttgaattttgtgttttacaaaagttatcaatcagattatctgttttgttaaatgacaaactgaaccatatattttcca

SEQ ID NO: 128900 - DNA, 1252 bp, Cannabis sativa
tctggcaatgtccagcttctcctttgacgtcagggcggccccaggggactgctcaccgtctcggagagtagtgtcgaagatacgtacatagtttggatcggagatacggttcggaatgtactccggccgccgcaccttctctgtgtccggtgactcgctaccggagctctggcaggaaacgatctggggtttcttgtaatgaggatttgggttgagtttaagagaggcggcttgaaaagcttggactttgtcgtggagtagtaaatgtgtacggcgttggcagtggtaatggtttttggaggaggtggtggtgattgtgggggagaacttggggttggagaaaatagcggtcgccatgaacgtgacagaagaagaagaagaagagaagttggagtgatgaatgaatgaagataaagatggagtagaagctgagttggagtataagtaaacactgcagtccagtcatgcagccaaattgtttgaccaaatgacaaacaataaaaccctaaacctacaccaaacacaaacaaacaaataatttgtctattcaatttgaattctcataatatttccaagttacaattgtataaaaaaaactaaggtgatatttgatttaatagacaatttatgaattcaattgttacttggaacaatttacatgtaacttagttattattacgattagattctttagttttttttttttaataaaaattaaaaaatttattaattaataaattcgttcaaaacaatagaacgcactttatatgaacagtcctccaactaaagcacccgacctgtagagaaacaagagtctcttgctaagcaatgagccaacttatttgcagatcgttttacaaaacacaaatcaacaaaagataaaaccagaagcaaattttgaacatcttgaacaataagacaaaactgtgaaggcataaaaatatcgttctgaatcgtttggacacacatcaaactatctgtttccaacatgactctatcccacgaatgagttgcaatctaactcaaaacttctttaatgcctattatctcagcaatttcgggttgaacacaaccaatcttccccttcttgaatgcttctaccatagtaccatgatgattctgagctacaaaactcatgctaaaacgcccctcttgttcaaataaagccccatcaacattaactttgatcttgtttaactcaggtgcaatccaacgctcaagatttcacccaccatcatgcagcggagacaac

SEQ ID NO: 128901 - DNA, 1088 bp, Cannabis sativa
tgaagtggtcattgacctctctaaggaacaaaccattgtagaccctcctgtcccaaaaatgactaagtccaaggattctcggggaggtagctcgggcaggccaaagcaagctaggggctgattcgagcttgtcagaagcagatccgagcagatcatggcccctgccccacctccggtgctgcacccagggaccaaaagaggcagagaaatgctcactcactacgtgactcgatcgatccatgaggtgaatgagcagcaggctggggcagacaatgacctttctctggagcttgtgatgggaggagttctaaaggagttttcaagggtaagtcctttctaatagtttctttttgtccttcttcacttagttcagattttaatgttctttctctgtataaatcagtctgaagatggcttgtgcttattcccgagctaagtcggctgcctcaaagaatgttgccatttccaacactatgcgggcggaggtggacttggctaggaaggacaccgatgaagctagggtacaacttggggttgtccggatggagctgggagaggtcaacaagaatcttcttgctgctgagaagaaggtggctgaactgaccaaagatcttcaaacaaccaatcagcttgaagccaccattgcctccttatctaaggaagtggccagccttcaagaagaaagggaggttctccgggctattttccgcaggttggaagaagagaagaagaccaaggaggaggatcttagagttgaggttgaaaagtataagtcaaaggccgggcagcagagatctgaagtggagaggctcggagggaaagtgaatgctctagagtcagctggtcttgagattttttatgacatctagaagtacaatccccaggcgaactttgaataattgggcgataccaaagacatgcttctcgagtactgcactacttaggaagcctatggggaatccgaggcgaccacttccacctctgtagctgaccaaaatgttgaagtgccccccatttagttaaacgatcctccagctccagctgatccagttgacccgtacaaagtgttggaaatatttgaccaggat

SEQ ID NO: 128902 - DNA, 1643 bp, Cannabis sativa
aatgacaatagatatgttggtaggcctccatcatcatcaaaatgcccaaaattccctcatcccagtccataatttcataaatattctgatcaccatgtggatctacatcatcatcaacttctccatctccatcatcatcatcatctccatctccatcatcatcatctctatcatcatcatctccatcatcatcatcagcagcagcatcatcatcatcttcccaggattctgatgatgaggaggatgaaataatcactgtctcatgcacaatattaccaggttggaggctgcactcacgagactctacctcttcatcaatccactatgttgctaaatcaccccattgtaaaaacttgttgaagaaattatcattacgatcatgatggccttttggattgacaacaacatctgctactaaatcactgtcaaatggcaactccttcgggatgcacttgtctaatttagcaaatgatggttggggaacatgtcttacagcctcctcatccagtctccattcaactgcataaactggatctggcaacaccaaatatatgttggcctccttgtaatttttacccctcaaatcatccaacaccatatcaatttcattttcctcaattacactaaatcccatattcaggtgcttctcttttggcttaaaaagaaaaccaaacaggaataggtatcccaattcttgagctatttcttcaagatggagcctgctgaatctattgaaactatagaaattaaagtaggcaattcaaccattctcatacttcctattgccacatcgggtgatctaataactaccgtggaataatttcatagtaaaattatctaaattcaaacctgcaaagttaatatataatcacacagttaaacttacaagtgatctaggcaaaaccaattaaactttcccaacattttcacttaacccctaatagcaattaattcccaatgccaacaaacagacaagaaataatatatatatacatataaacatgtgaaaatattcccattaaagaagacaacaaccaaagatactcaacagcctttgattaatctatttttaccaataatttgaaactttctactttaatatcatatccaactactatacacgatatggaccacaagctccaaacctcataaaccattaaagctactactgatagaaatttagtataatccccccattaactcattttgcttagatttgctcaaacaacatcaatatttttaaaaaactcaaaaaatcctagaatatatggatctggtacttactgtagtcgggaagaggatcttcttcactcgacgatgatacaccatttcaaaaaccttctccttccacaaattttttgggtttcctttgatttcccacgagaatgatgaatctcttcttcaatttgctgggttttaagtttttccccttcgtactttctctacctctttaaaaggttttgtttttctcgatttccttcgatttctcacgaaaatgataataactcttaagtttgatttttaaggtgtcgacttcaccaccaagtacttgctctatctctttttaggtttagatttagagtttatagtttagttttaatttagtttcatgcttttaattttgttgttttgttctatctccc

SEQ ID NO: 128903 - DNA, 719 bp, Cannabis sativa
aggttgacatttagccaatatcaaggagatttttcgagaattctttcagacatattctccatttttagcaaggattaagatttaactatttttggggaccaaacaaaacttccaagtgacctgaaactggacccagtgccaaagttgacacctggcactaggcccagcacccatgttgacatattgtcaacttaggccatttccaattagtttctccaaaaagtgttctggggcatttttttctgtcataaaaaataacaaagatacaagcaaactcgagaagaaaaccacaatcccaagggcatcaaagctgagcccagtgcctaggttgacaatcaacctggtacgctagtttcgatcactataatgtgaatttttgtccaagaattctctcagaaatagtcaaaaaacaaggtaggagaccttgtcctcaagttcaagaatcttggaagtgctaaaacgaaaactcgaaagctccaacaaatacacacccaccgcctaggttgacagatggcctgatgcattgggttatgcttatccaattcttattctgtttcaattgttcatttagtttttgacaataaaagagattcatgaagtcagaataatcaaattcacaacttcatatttcacttttcttacaaggttatttactcgtaaactgtgtagtttcgagtctcccatttttggaaaacagcaacatctttgagaataggtga

SEQ ID NO: 128904 - DNA, 1009 bp, Cannabis sativa
gatttaatgatataaagaactcccaaatcgttcggaatcaaaagttatgaattttcgaaaatcaactctcgaaactgcctaaaaacacgagggcgagccgcggcatgcccaaaccatgtcgcggcacctgggaccaattcccaggttccactcagaggagcaggcagcggcatgctccagagcctgccacggcacttgggttccaaacccagaatccatcatgcaaaactcgaaaattcagcaatccaactcaaccaaatcatcccaaaactcaaccaaatcttcaaaacaagattaccatttatcaagctcaagcatagggcaataaaatacatacaacaagcattaaaactcacactttaccctaacaattcaaattacataattgactcaaaaatcatgctcaaacccacaacattcaagctctcaacttgaacttacttccaacacatccaactattttccagcaataatcatcatcgtttaatcttaatctcaagacaaggaagaaaccctagaatcctatcaagacctcaaacaactaatacaccaagaattcaagcaaaacacaatcatatcaactaaagagcactatcttaaacaacataaacctatcatcatcatcaccaccataatcatacattttcaactaaaattcagcaagcaaaagagaatcaaagttataaaaactacctcaatctcttgcacaatcaagcctcaagctcccgacacccttttccaacaatcaagcttcaacatcaagcaattcacaccaattaagctttgaaaatctttgagagggttagggggaagaaagagggttcgggtgagagggagaagcaaccaaaaaataaattatcaattccctcaaaagtcacttttccaaacatagcaattagaggtcaaatgagcaaaatgaccttagggcccaaagcacacatattcacccacacaagggtaattttgtcatttcatgcataaataactcacaaataatttcagattatca

SEQ ID NO: 128905 - DNA, 751 bp, Cannabis sativa
aaaccccctctgcaactggggctccatccacaccaactgatgggccctgggctcccacaactctagaagaaagagggtacaagcagtatttctaaatgttggcgacactgaccaatctaattatgtttcatttctccataggaagagacaggatgtgattcgccctatccctcatctataatgtagggatagagcgcttgtcacattataatatcccattagtgttatcccattttttccactatgatgtggcaacacacaatggtgacacgtgctactattctctgcatttggctggagagatagtctgaacagacctcagccatgcatatgcacagacaaagtctgcttgaccgagcaaggcaagggcagatgatccgaacaacaaacgaagtcatttctctgagtagtatatcaagacttagctacttcagttttgatatcgtgatgctcacacacacaagcaatccctacaatcatgggatcgtatcaaagggatatggctagctgtttgaatccctcaatttatgtattctaactatgtaatatatgttcttacaaattatagacattgtaagcaaaagggaaaccttccctcatgcatttagccctatagtgatccattctcactgtaaaaggggtcaaaagaattgattaagagagatctaagagaaaacactcagagatttcattgtgagagctttgagagaggaaacactgtattctttgttctcaagtcaatacaatccaa

SEQ ID NO: 128906 - DNA, 655 bp, Cannabis sativa
tctctctcacacctatcaaggcatggtatgatgagtgactactattatctatataataactaatgaaattatttaatggggcgtgtgtttaatacgaggttgagattgtgattagaatgagaatgtaaaatttaaattaaatttgaatgacaaggggtttgtgtttctaagtaggttttagtttttttaattataatagtagtaatattaatctgctcaaatgcatagattttatattttctccaagtctatttctttcaatattttactctctccaactcaaacacacataacaaacaccttattaggtgatgtttggttaaaaggaatgaaagcatagatagaataagaatgacattctattattttaaaataaaaccaaacaaaagaataaaataaaaattgttccatattttttttctattctatttcattccctccaattaaacgccacgtaagagttaagagtttataaatttacatgtatgtcaatatgatttgtatggttgaaaatggttgaaaactatagtatatatatatattcttgtgataattatgttagtttctatatcactcataaaatatgcaacaataaaattcaattctatagataaacatattacatataattataagtgtataactatagatctaa

SEQ ID NO: 128907 - DNA, 607 bp, Cannabis sativa
aatcccacaatatcaggaccttgtcccccgcattagattatgagagtgcacgtaccgccgaaggagacttgccctttgtccaacatccactacactgatgctactgtgcatgaatgtcacgagttgggcatcactgaatcgaccaatgtcaatatattacttgtattcactctatcagtgggccatgttcacatgtgaaccctagcaggtccgggtataatcatatacccgactctaacctataaatttaatatattaacccttcatgcaaagagtttgaatttcattatttacacactaatgttatagctaaggttcgtaaactaagcaagaatacttgtgtaatactctaaagttcttttagataaatatttattcgtagattaaagtttgttaactatgaaattatgtaaagattcttgtctctttaattatttattttatctattttcttaaacttttattatatttaaatcgattttcaaaaatcttaataaacactcataataaaataaaatgtattatgtatatctttacagaaactaatagtgctgttaagttatagtgtcataattaatatatttatatatatatataagagagagag

SEQ ID NO: 128908 - DNA, 1427 bp, Cannabis sativa
  modified_base (1372)..(1382): a, c, t, g, unknown or other
cttcgtccaaaaatcacagttaagtgccacggtagactgtccacgtgtacacacttgtacacgtggcaaatttttattggtccacataattttattattttaaatattagaaaattaattaaatttttctttttctttttttcttttttctttcttttttttctgtaaccctcgacaactccttctcttcttcttcctttcttcttttcttcagtaacccttactgtaattttccctctctttgcgtctcaccctccatgattccctctctcttctcgactcctattgccagcatcgatctccaccaatcttctctcttcgtttcactcatctctctccccttcttggcaatcggcatctcccagcttcgacctctccattttctcggcagtatgaatctctatttttcttaatggctctctaattgaagttgtgccaagtaataatattgctgggtaatttacaataatattttaaaatttaaaaattttgtgttaggaaactgtgaaggtttatgggaatttgggtataggactatttagagtgctgactggaagatggaaggggctgcaagggaaatttatttagaagaagaaagtgatgatgagaaatatagtaaagattttgaggatgatgatgaacaatattgctatgcttctgtatcagtgtccaaattacagcctaagtaaacattaatcattatagtttatataattaattaaaaaataaccaagttgaatcagttttatttatttgttaatggttttaggaaagttttatcaaagggtcgttagatttgtgaatgaattgtttgaatcaagaaatgatatctcaaaatttaaggaccatattcgagactttctcctacaatctaaagagttttatgaccaggtaaactaaattacagagtacactacagtgtgccattgttacatcccgtgtaaatttgattgtgcttaactttctttacaggacaacaaagatctttacgtcgaggaggcagccgcttaaagagaaagagagcggcaaagaatgctttctattccaggccttatcgcctccaacgatccaagacgagatgttggactcataattagtgggtagcctaactagttattaattgaggagcctaatttgtgtaatgaggcagagttgttgctgtggtaaggtggtggtgagccttagattcatatttcattctctcaaaaatcttttggatatgaagaaccaacaaatggcgattttttttctcccttgtttgttttcggtggtggtaagatgagagagagaaagagagcctgggagggatctgtagattaagaagaagaaagaagaaaaaacaggaaaaaaaaattaatttttttaatttttnnnnnnnnnnnaaaaaaagaaaaaaaagaaaaaatattttaaattttttttttctg

SEQ ID NO: 128909 - DNA, 1050 bp, Cannabis sativa
tatatatatatatatatttgtagtctgattttcccagttgattgtcttcttttgtccactttgtttggttatttctctttaggtaatttttattctgttagtttggataattttagggttaagtaaaatttctaggttattaggttcttagatttttgggttaagttgaatttatctttttcaaaaattaggattatactagtctataagtaagacccaattttttttctgaaactacaaccccagaattttttcattataatctaccttccgtaaaggaattttgtgcgcaaaatttacttactagagaataactcggggtactgcttccacatgtccgtctccaactcccatgttgattctctattagaactatcactgcacaggattttgactaagggtatagtcttatttcgttagacttttgttcccttttctatcatgcgcacagggcatgccatataactcatgtcatgctcgaagttcaagttctcgtacttaagcacatgtatcggattaggtacatactttcgtaacatgaaaatatggaaaatattgtgtgtttctactaatgttgacagtaaggccaagcggtaagctacatgacctactctgtctattatctcaaaaggacctataaatcttggggttaacttttccctttttcaaacgcataatccccttcattgatgtacctttaagaacattaagtcccttacaaaaactcaacctcccgtctctttagattttgcataactagtctgtctacttcgggcagtgagtatttcttgtcgtatcttttcaactgcttctaaagcttctcttactacttttggaccatttataacatctccgcttcaagcctccattgggccttctcccacagactaatggctcttatacacgggtatgtcacttttggttgctttttggatctaaatactatttttctccaactttatcctagtgaatcggtgatcttcattttctcccatacaacatctcatatggtgccactccgattgtggcttgataactattgttgtaaga

SEQ ID NO: 128910 - DNA, 1238 bp, Cannabis sativa
acatccaacatccaatcgaactaaattgtattttcatttagtttagataagtaattagattttatattgttatacgtcaagtctatatgtatagatgaaaatacgtcaaatctatatgtatatatgaaaattaacattaaaattttattctttttttcttggattggatagatctagtccaatccaatacatactggacctaaaatattggatggatctgatccgatcaaaaaaatactaggtctaaaatattggataaacccaaattaaacagataaatatatatgaaatatatccaatggatagaaccggtctaatccaacatccaatggatgttggatcgattggatgactgaaattgattggatcggatccgatagtaaaatctatatccaatatatgattgaatcggatctggataggcataaaaacattagatgtgatccaataaacacccctactagtatattaatgtatccgaaaatattaggtttggaagtttttttggctaatgtgataggtgtatatatgggagtgtacatagtttatttaatttaattaaaataaacatataataaagcttttcttaaaaaaaaaaaaataataaagtatattatattatatattttatggtgtcaaaactgactagtaagggaagacagtgcatagttttgtttataaaagactagtcactgactcactgtagtaaaccacccatgttatctataattccacctaattctaaatgtatgaggaattccactttgtggtcctaaatattaacaatatcttatttctttcaagttgtgattcatagaaaaattaaaatatcaagctcaaaaagtaaatataaataaattaattatatttgaatatttaactatttattatacacaaaataaaaataattaatatttttatttctcaatttataataatattaaataatatgtggcttgttaaaaataactctcgatataatatattgtagaaatattacaaatatattgaaaataaagagaagtttatttttatactaacacattgagaaatttacaaaaatactgtcctacacttaaatttccaatctaattaaattttcccatgaataactaaacacaataataaatgggaaatttgatattatatgcttaaaattaatttatccactaaaaatatgctagcatattttgcatcatgcaaaatatactcacactatttttctatccaattttacc

SEQ ID NO: 128911 - DNA, 1307 bp, Cannabis sativa
caattggatatccaatgtttggcggtcggttgtaattggatcggtcgattctcattggattggattgatttatgcacacccctaatctccaagaacgtgcggtgagacagacacaataacttctagagtaggaatccatttatccaagtagatagaaaaagtagccccatcacacaatcaccaaatatctctaccacgaaagagctccattgcccacaaaatattcttccaaacaaaagaactcaatttagaagacaaatgtgacccaaagaaagtcctctgatgataaagacctttgatcactttagcacccaaagagtgaggaaggttatataatcacctggttaaatagatgcagattttgaaagctcatacccccaacttgcttgtgcaacaacaccgatcccacgtacaccattgcatttttttcttcacatccgaaccaccccaccaaaagcgagcacacatcctatgaatatctttagtgaaagcctttggtattttaaatatatttattgtatattattaaatattattattagctagtattcaaaaatattaaagtaaaattatttgttcaaaatatttaatatgcaccgtaaattttaaattaataataaaaaaaaaagaatgtaaactatatttatttcaccgtaaagatttaatattgctaaaaactaaacattcagagatggctatttggttgtgtttttaattttaagttttcagaattatatttttaaaaattagagtaggaaatagttttttgtcattttaaaaatttaaaagtatttggctaatattttcgaaaaactacttttagtttttttttcggcaaaaaaaataaaatactacttcaatattctcacaccataccacgataagaacccaaccccacgtcaaacccagacctaggacctagacccaaacccgacttcgggtcctgggcctgggtccaaggtcggtctgagtcctagttcaagggcatgtcggggatgggttcgggtcccaatggcgggttcaaatcctaagaccaggtacagatatgggtcccgagtcatggtgatggttcgggggcgggtttgggttctagggtcaggcatgggttcgggtctcagggttaagtttgggtccatgtagaaaatgtaaaaaaaaatatgttatacaaaaaaataaaaacaatttttttatataaaaataatattttgatgttttctgatttttaattttttgtaactcaaatttttagatttttttaacatatattgtatttaaaaaaatggttgtaagaggaaagaaaaaattta

SEQ ID NO: 128912 - DNA, 1281 bp, Cannabis sativa
taaatataagaataattacataaaacatcaacttttataaattttttacatttttatgttcaagattacttttttaaaattttttacggtattatatataaacatacaagaaaacaaaaagttaatcacataaaaataacaataaaacaatataaaaaataatatacaaataacaaaaaaatcaataataattcaaataaaacaaatatatcaatttttgtatttttactaaaattgtctataatatattacataaattatgtttaataatttaacttattttacaatataaagtttgtactttatagtgtttaattataaatttggattttttaattgataattttgattatatttaaatattgaagctaacatttagaatctattttttttagataataatactttaatgtttattcaatttatatttattctatgtttaagtttttaatattaatttagactataatgattttaatcttgaaatatatactatatatatttttaaaatctaattatttaaacactaaaaattaataataataataattggtttggacaggttaacacgaccaaattaatgaaattattgagtggttaaactttttattttatatataagattggttacaattagatatttgcaactcatttatactgggttagaaaaagtatagtacaacccgatcaaaccgaccaatatacacccttaatatatatatatataaattggccgagttggcttgcgggttacgggtccaacctgaaactcggtctgtccaaaaaaattaaacagaaactcacttgttaggtccatcaggttgaacctgacccacccgcaatgaacaggttttttaaaaaaaaattagatttttaaaaatataataaaatattatatttttaagtgatataaaaaattttgacactctttaaaaagactgttatttgatatttatttatttttacttttgtagtaacatgattttaataaatgatgatgactaattataaaataaaacaatacaatatacttttctaaatagtagtcacgagaaattaaggtgatgttcacctcgaatggcacagtgatatatgtgattggttagtgatacttcttaaaagttattgtattaaattatatgagactcaatactaaattgcatcaataataatattaacatgtatttgttaagcgatctgcaaatagggctgctcattgtcttgctagagagtcttgtttttcgtcagattgtatttttaatcagcataatgtttctgctg

SEQ ID NO: 128913 - DNA, 689 bp, Cannabis sativa
  modified_base (50)..(71): a, c, t, g, unknown or other
tatttttattttttaaaaacaaaactttaaaaaacaaaaattttactttnnnnnnnnnnnnnnnnnnnnnnaaaacaaaagtgttaccaaacaacacttaaggttctaattttcttttattattggttttttagatttttgtattgtgcaatttatgaaaatttgtttggtcttcagctataaaataataatgttgatttaagtattggattttctatttgttttattgtttaaatgttacttttaagttataaataagtgtgaatgtgattgtgttcatattcttaaaatttatgatatttagtatccattgtgtttgtagctgtgtggtcggttaaatatatatctttgcgatttaaatatgcatcttttgtttgagatgagaaaatgtctatttaataattaaagaatttttttttttcctgttgtctccatattgttttactgtttttaacataaattaataataacaaaggtaaaataaaaattattgtaaatatattttgattataataatataataataaaaatttaattttaaattttaatatttgtagaattacgtattattaatttaattatcagtatttttttttgaatgaaaataatctttaatagacagaaacatctgctaaaacaatggactgaagagcaagaggaacatcactctcagtaaaacgacgacctga

SEQ ID NO: 128914 - DNA, 901 bp, Cannabis sativa
  modified_base (72)..(84): a, c, t, g, unknown or other
  modified_base (200)..(224): a, c, t, g, unknown or other
aattataaattattactattatggtttgactaaaaggtccgtaattaaaaatattagttacaaaaattacannnnnnnnnnnnnaaatgtatttttagtcacaatatacttgttgtgaataaaactaaattagtgacaacttgtatttaaatactatattttagttaaaagtaactctttgttgtgattaaaagtcacannnnnnnnnnnnnnnnnnnnnnnnngactaaaaaattatcactaaaaaagtaatatttttttgtagtgaatgtatagtaggaatgtttgtgtttgatatgcatgtggaataagttgttttaattataattttaacattttaattattttatgtagtgttttgccccttcaattgcgacttttgtagggtttttcttctaaacgtcgcaaaagtttctcctgaactatataaatcgttgcaaatattgtccttcagttatattttttttttttttcattttttaaaacaatttacttatgcggctatgaaataattataataaggacttatttaataattttaaactgtctagctaaaatccaatttattagcatttaacatacaaatagtagttctaagaatgaacatgcatactctaatatatcattagactgttatttatgtatttattttttgccttaacttttaattggattatattaacattatatttgtgctatattaacaaattatttaaataaagaacaaaaatgcaacagcatggacaaaagttgagccaatagttaatactaagggccaactattaaagtttttagaagatttatactacacttccttaaaagatcgtattggtacacttatttgtttcatccaacaaaagtttttagtttatttttttttttataagcacgtacttttttt

SEQ ID NO: 128915 - DNA, 1088 bp, Cannabis sativa
ctcttctttccaacttgaataatgttaattttcgttttgttaaacgatctgctaattgtgttgctcatgcttttgctcgagtttcatggttacatgctgattgtagttattcattttcctccattccgagtaacatctttgatgtaattgagcaagaaatgcattaataaaatcatcatcttttattcaaaaaaataaaaaagaataaattatattaattaaagttatttttgttaattgaatatatttttagtatattattaaaaattttcctaaaataaatccataaatattaataagttttcatatcttaaatgtagataaaattctcgccatgcatgaagggtgcttcataattttggctcatttgattcttcactgcagtttgtcgaatttaaatgccgaggagatgcaatgcgagtggtggtggtcagaacagaggcagcgaccgcagcacatatttaaaatctactcaaatagaaaagttaaaagagattgcaagaaactcaataaaagataagaagaaacttaacaaacgataacaaaaaattgcaattaagttaggtgttgttcggtaatcattaaaaaattaatattttgattaattaattaaaaaccataaataaactacaagattttgttaagtaaaatttaaaaaaaactaaaagtaaaatgattgccgaacaggcctttaacaaacgataacaagagattgcaattatggttatgtatttttagctctttaatagttataatctgaatttcttttcaggatggtgtatattattgttattgaatattatatgaatttttgaaaacataaataatttatagtgtcacaaatataggtgtatatttctcttattgaaatattatggaatttttccaaaaggcccataaaatcagcccaccatacactacaggtgtctttgataaagcaagtaaggagtctaccaatatcaagtgcacaaattcttttctttattcttagtagcccatttaacttccttatgcaatgaggtaagaaggggtcatacactacatttcctttatatatttttatatgattatttacaccacatactgaa

SEQ ID NO: 128916 - DNA, 1159 bp, Cannabis sativa
ataataaaaaaataattaaaaaaatgtttagctaagggtaaatctattaagagcactcccatcaatttctttactctattatttaaatatatcatcaaaactctgctttatctattttaccaaaaaattttacattatgaaaataatattaaaatatagttaactcaattagttatctctacatttaattaagcactattcattaagctaaaaaatatgtaaaataattaaagtttataacctcactcgttgaaagctcaattttataattttttctctataataaaaagattgaactattttagctcatctattgagagaactctgagctataaaatattgagttattttaactcatctattaaaagaatcaatttaagagtacataattgtggaattactattttatatatattggcgagtagtcctattttattataattattgtctatttgtaataggcgttattttattattttaaatatgtattttatgctgattacgatcgaccataggcgagggaatcatatgttttggatgaattgatattactagtatatgcagctcctagtgtagacttgtcttcttttcgtttgtctccttcatcttctagtttttatttgtggcactctcgccttggtcatgtttcagagtctcgtttaaaaatttttagcttctaaaggaactttaggaaatgtgcaacctcatgatatttctaattgtagtggatgtaaacttgcaaattaaatatttacctttcaataaaagtacaatttgttctgttgcatcccttaatttagtacactctgatgtgtgggaaccctctcttgttgttacaaaagggggttatcgatactatatttcttttattgatgatcacactcatttttgttggatttttcttatgaaacattgttctgacttttatagtatttatgatcgttttcgagcttatgtaaaaactcaacttgatgctgctattaaatgttctagatgtgacaaggtagtgagtatactttaaataaatttgttgattcacttgccttagatggaaatgtgcatcaaacttcttatactgaacacccaaataaaatggtgtggctgaaaaaaaagtataggcacattgttaaaactactcgttctcttttgttgtcatctt

SEQ ID NO: 128917 - DNA, 1156 bp, Cannabis sativa
aaaaaaaatctattttaaagtataaaaatgaaaaaatctcattaaagaaatgtttggtctttaagggaggtggtgccattcgtgtagtgacaactcttaggtggcgtctagttggaggtaataaaatggaatggaataaaaagaaaataattttcatttcattcctttgtttggttgcatttcaaagtattagaatatcattacaatggaatagtctttctgctattttggtggattgactattttattttaaaatggaaggaaagatcattcgaatgtaatatttgaaaaaaaaaattattaaattttttatgtattttaaattttattccattctatttctattttaattgtcattcacattcttatttttatatttacattcctctcaatcaattgctaccttaatgttactaccaatgacttaattaaaataatttcagattcagatatgaggtcctataactaatacatggtccctatattattagaatgatccaaaggatgaagaagggatcaaattatctaaacaatgtcaaatataaagaaattgaataatctcaatcgtaataaatatattgggccaatgtgggaccgattacctcattttgtgacgacaaatattgaattattatacccacaaatttgatatatttgtagtctgtttaatagtgctatgaatggtgaaacctctatagtccccactcatatgtcccggatcactgtgatcgtgatttgatagccccaaaacacactcacaatagaatggaataaaagctacctcaaattctcaaaaataaaataaaaattaaaaattatatatttttagaattatgatagtacacttaaattaaagaatttgtaactattctatatcatacaattaaaaatgatcttgattctcacttgaatttatatgttcaagaaggtaggcaatctcattagggtttaaaggattttcttgcatttcttttggagattattgcaggataggaggttaaggcaattttgtggcactaggaaattcgaacttttctgaatgccttatgcggggttctaatcctatctctcaaattcaacaaattcttttttcttaaatataaaactccttataaagatagaaagaaacaactttatgttagacatttatatgtat

SEQ ID NO: 128918 - DNA, 1331 bp, Cannabis sativa
attatttttagaatttggagatttatttatttacgtaaataatatgtgtctttatatatatacatacataatgtatatatatgtataatataatatatatatatatatattagttatgtatatatgtataataaatatttaaattggtttatgtatacatatattttattatatatttttttataattttattttgtttttgtaatttaaaatgttttaattttgttattttcaaattgattaaaagggtacttggatttttagtagcttggaaaaggtgtacacaaattttctattgtgaaatgtatattttttattaatatgtgtattttttattttatttagatgtattaatagtttttagattatatttgatataaatattattttttgtatataaaaatttaatactatatttatcaaagcaatactagtctagcagttgggaaatcagttcttatataatgcaattagagtaatttttttttttgatatttacaatgttatttaaaaaaaaaaagagagagatcaaaatctctaatggtattattggaaatatgtatcaaatttgggagaaaaaaaaaacaaatttacaaaacaaacaatgtattaattagtatgataatgatagatgggggattgtgctgccatggtaactacatgcaatatatatttaagctaatttagttagtgtttatttgtgattatataaatatatttatattattattatttatattatatattatttatattgtttttatttacatatttattaatttgattttattatttttaaaatgcattaacagtgggcattagtgggggaccctcccgctaatgttcaccgctaataatattattagcggcagagtcatattctacctcgaataaccattattagcgatagactattatcagggatttattagcggcggagtggtccaccgctaatgaagataattgctgtaagtcgcaggcatttgagaaattaatcaaaaaacagaggaagttgttcttacatttttttttgaacgtttgtattaattaaattatgtacataaatgaaccaacggtcctgtcaccaacaaaaactgtcatcgggagcgactttttttgttcaagaatacctcctaattcgtttcaaaagattatttagcgtgactagtcattcctgataactcgtgcctgaaaattgatatcaggaaaaaatatagctacgttgctgatgctaaattatttggaacaaagatgagttgttcttgaaaaataaaagtcgttccaaaaaattaagctggcagcttagtttttacacattattaggaacaact

SEQ ID NO: 128919 - DNA, 526 bp, Cannabis sativa
  modified_base (495)..(501): a, c, t, g, unknown or other
aattattcaaatgtgttccctcaaaaacaaggagagcaacacaagtgaaagaaaccatttcccaccatggaacaagcctagccgaccactgccatatttgttgcacaatgagtggcagtggtcggcgatgaaaaaaggggatgagatttcttactaaaaatatattttcatgaataatatgtcaaaaccaattgaaagaagccaccaagtagtgttgaaaccacttggcgaccactgtcacacttttgggacaattggtggtagtggtcaaccaccacaaggggtccgagaacatgcatggctgggcactaaccatttggctatgtcagtactcgcaactggggcaaaacaacataaactacctttagtaaaagggtataactctctctatctttatctaaatgacctggttcaacttactttggaaagataatttcaagtcaaatcttagtgtgtctcagagttgtagccaacactacaagaaatgtcactttnnnnnnnacatttttgtgctggcaaaagttgg

SEQ ID NO: 128920 - DNA, 1100 bp, Cannabis sativa
  modified_base (1055)..(1057): a, c, t, g, unknown or other
agagagagagagagagaaacttacgaggaagaccatggttcagtccattgacgagggagatgagaagacaagagagagggtgcaaggagttgagctttggtcgtggctcacgaggtcgagcgatcctttgctgatccgtgtttgcatgaagaaagaagctccatctgtggctcacgaggtcgttcgacgcctaagatagatctgaatagttggtggtctgattcttttttttgctaaggctagcactgcggctgaataatagagacagaataaagggtttctttaaggttatatgggagggagtagtttttaataataataataataataataataatagcatccagctgaatacacatgtgatacaatttttattttttaagtaatgttacaattttcattttttttaagtaatgtcacgtccatcatagttggacggcaaatagtaccaattttattttcttaaaaaaaaatatatatcacttcactactaattttttatgtccagcattattggacataatgaattttttttccaagtccattaatattagacttgaaatctccttaaacatttttcaagtccaacactatttttgttggacataaaaaagagacataaaataggttatttgtagtagtgcactaacactccatgttatattataagtattgtaggttgtcttgataaggcgaaaagagacaggaagcgcatgaagagctcgatgaatgatgtaagagtcaggaaaaggaatattatgatcttttaacttggactgaacattaataatttttaaaaataaaacctcgcactcctttgacttatcatattgaaagattgtcatttcatccataagatgtctagttgcagcgtttttaccagtgtcaaatagtttttctaccactttgaaaaactcattagcatttgtagtgtttggcaaaccacttaataaatgtttaagaattgaactttttatatagcagtgagactaagatgatttgaattttgtaatgaccgctctagtaatttggattagtaagggcaattagcactnnnttttattattttattattatatgtgaattaatttaattgtgga

SEQ ID NO: 128921 - DNA, 1240 bp, Cannabis sativa
atatatataaaaataattaacaaaaaaggaaatgaaagtatgaagttatctatatacatacacacaacactatagatttacatatatataaataaagacctcgtgaatgacagtaacaagactggaagtgacttttgcattagcaagggtgtttttggcagtcctttcatccaattgaatacgcagaaagaggtccaaaatctcctccttgtccgaagaaaagctatctttagtcgctagcggcatcccttacaacatgcatgaatttaatggttattattatgtacagaaattcatagaacttcaagtcaaatttattaaaagaatttatagacacaacaatttatactgctaaaaacccaaaatcaagtagcaagatgaggaagagaaagagaaaattagtaaaattagactaaagaaaacaaagagaagaagttatttgtgagctaccaaacaggcacccctttttaaaggcaattgcagaaacaatcacaacttggcaatttgagaaaaaattagcatgcttcccaaaaaccagaacaaccacaaaaagacagcctaacaacacccaacagttgtacccgcgaagagattaaaatcttagaactctgggataacaaaaacaggaccatcaccctcatctccccagtccaaaagacaaaaagatggaaacccccagcatcgaaggagctttcgccactcctccatgaaaagcacaattcctggcactcctcagaccgtgacacgacagagaagcatactgaatgactgaaacccaatccaattaaggatatcacttctcagctcctaattaaggagattagatttagggtttctataaataaaaaaacaaactgatgttttttagtaaaattagacagtgaacatgaaacgctaaacttccataaaagtactgaatagcagcttcgtcagctgccctaactgtaaccatttcttttcacacagatacatcatatatatatatatcaactacaatcaatatcaaaatacaaatagccaaacaaaacatggcatccaaattgaattcccggcctatcaattcaaaactacagaaagctcaaatttataaatattgtgagtttaagttgttgggacaatttttcgtcctttagtggtcgctcgctcgatctaatcaacgccatatagtcgaccctcttgggctccccataaaccctaggtctatcatcaacaagggcaggctcaacggcgtcgttcgaac

SEQ ID NO: 128922 - DNA, 703 bp, Cannabis sativa
  modified_base (442)..(447): a, c, t, g, unknown or other
atttaattttgtttgtgtttgattaagaaaatagcatttgtgaaaagagtggaaaagaaataaaaagataatagaaatgaggtccaaagtattgaaaaatggtatttttgaaactgaaacaacccaaggaaaaagcccaaatcccctatccacccaacagcaccgctacgtggcgggctgtcatttgcttgcagaaggcgcgtcagcgccttgtcccctctgaagcccacgcgcgcgtgaagcgcacggaccctcctggtccgtgtgtttcgtccactcgcccaaccgagagtgggcttccttgttcttgctatccaaggctgagtagccttttccttctttctttcaacccgtgaaaagtggcacaaaattggccaactcgttctcttttcagccaacaaacgaacgacacgtggcaccgactcatcaaaggcagccaatnnnnnngtgacacgtggcactccggttgtaactttgtgtatttatatttttacctacatgcaatttgtaataaatttaattacatattagtccttttacccttctataaatagaagcttaggtttttataattcagtttgagacagaaaaatctagagaaaatgttcagagcgctcagtgttagtttactgctttcttagttaattttcttatgagtttctaagttcccttattattaaggaggacgatgaaacctagtgta

SEQ ID NO: 128923 - DNA, 627 bp, Cannabis sativa
  modified_base (532)..(533): a, c, t, g, unknown or other
atatagaatagatataaaagagaagtatgagccggtgatgtggcggtttaaaatctctctaaatactactatttgttctctctttaattctccgatttttataatttttttattaagcttataaatattaatataaattaattaattaaaaattctaattaaaaactacactcatctacctaactaaatctatattgatatattatacgtaaattttaaaaaataatatatatatgtatctcctattttttttaaatttttttaactcatttacctatagctaattactcatttaaatgatctaaccctaacactaatattacttaactcctctttctctctctttttcttttttaacgccgatttaccttttattctcatcttttttttttcattctttttttagaggtttgtcaagccgttcaaaaatgtttcctaacaaatttcatggtattatttattatttttgtttactatatcacatttatgtgtagttgtacatattgatattatatgtaaagcccgcttagtnnatttggaaattagcagttaattggcagttatttatgttaatcatgaaattatttatagccatttaaatattttattatggatatttatggaatt

SEQ ID NO: 128924 - DNA, 1755 bp, Cannabis sativa
gcataaaccgcaccgcaccattttttgcggtgcggtttttgcggtttttaagtttcgcggtgcgggtgcggtttgagaaattaaaaaaatgcatgtgcgagttggtgtaaaaaaataatcaaaaaccgtactacctgcaccgcaaatacccctaatacatgatgaacagtaactgtaggaaagttagagagaaaggacacaatttgactaatcaagtctgaaagagcagacttgtctttccacctatgcttaactttaccaattaacacgttacaatcactctcaatgacacttaaaggaaacttaacagtcaaacaccagttgagagccgaaaccaaggcttttgcttcaaccaaaagaggagacaagttaccattcaatggagaagacaaagccgcaacaacctctcctctaaaatttctgactgctgccccaatccctattttacttctactattatccacgatagtatccacgcttagtttataataacctggtgcaagggtattaccatcaactagactcaaaccaccttgagttgcatccatactagaaattgtatcctgaactaaaggatttgcagtatgatcctgagcatcatcaaagtcttgtaacaaagtcccaacctgaaactcagcagaagaaattatagtctttttttcgttaaacggagcaacattacgtctattttaaattttccacagaatgcataaaaagattctaaattcatccttaaggcaggatacaatttcaaaccgacctttggtcagaatcacatcgaatcaccaacaggcgcatcgaacacgtgccacccgttcagacacaaattcaaactaagtgaagtctacgcgcgacttcggaagtcccgtgcagacttgggggcaaatattatccaatttttcgcaccatgacatggcaatgcgtactagtgacacgtgtctgttattctctacacttggctggagaaaatgttccgaacagacttcaagtaatgtatctgcacggacaaagtctgcctgaccgagcaaaacaagggcagatgatccgaacaacaaatgaattcattcctccaagtcgtgcattaagacttaactacttcaggattgatatcgtgaagctcaagaacaatccctacaatcatgggatcgtatcaatgggatgcgacaagctgtttgaatttctcattttatgtactctaaatatgtaatgtatgttcttaccaattataaatattgtaagcaaaaaaaaaaaaaccttccctcatgcatttagtcctataaaatagtgatccatcctcattgtaaaaaggatcggaagaattacgttagagagatctaagagaaaatactcagagatttcattgcgagagctttgagagaggaaacactgtattctttgttctcaagtcaatacaatctaatgggagtaggctattaccgaactacaggggtcgaacctctttaaaatgtattctttattgcttattgatttttactctgtcttaattatatttcttatcgcttattaattgactcattgtcgttagctaaaagcaaggtcgactgtgtcattttggcacttccaaggttcttgatcttgaggatgagatcttctaccccattttttgccaattctaagagaatgctcggagcagaattaatatttagagtaatttgcggcaaaacccccataactatcaatttacttgcaaaaaaccatctaacctcatattttggtgggaaaaccctccaaagt

SEQ ID NO: 128925 - DNA, 904 bp, Cannabis sativa
gtggttcaattgttagttaattgcgttctatggtttcatgagctggatgaaaataaattgaagtgtgtcaaaggcgtaattgaactgaaattttggattgtatacataagtgaaaattttcacaatcatgttattgagtttactcgaaaattactcttgttctagagattgacttgtttaacttttatttttcatttagtgttttactcgagaacaagttaaagtttagtttagggaaatttgttaggttatttttagtattaacattagattaattttagtatacttttaatttagttttacttgtgtttggagcaattctacgcttgttatcttttatttttgcagatttaaaataaaagaaaattagaaaaatatcagaggaaaaagatgagaaaaaagataaaagatcacataaaaggataagagtgcagatggagtatgccttgcacatgacgaagccttccttgaagacgtagggaaaggccacacaggtcgcgacccagcaaggagggcgccgcggcctgcccatatcaagcagcaaatcctatcttttctcaacgtaggcttggtggcttcctaattcaaagatgaataggattttcagcatgtgcgtttttctatcattttagtccctcaatgactatataaggagtgaacttcagttgatttcgagaagtgattcgggaggaaatagacagcagaagatggagtacgaatcttagagatcaaccgcaatactggaggcatccttcagagggttttcagcattcttttcttctctattttcttctatcttctatagttaacaagtgtgattttgcttccatgaacatgattagctaaacacttaattagggtttagatggatattgttgacattgttttatggttttaatatgat

SEQ ID NO: 128926 - DNA, 2334 bp, Cannabis sativa
cattatgtcaaaaaatgctagtgggaaaatggtttccaatttgcaaagaatgtccaaaataattttttccatgatctgcaagtctttaacattaaacgttttagagcacaatttctgaaaaaatacacacaactcaattattttatccctaacttctttcttgaaaaactttccaatgccccctggcatcaagctttgtaacaacacatgacaatcgtgagacttcagaccaaaaatattgtcttcagtcccattcacattattctttaaatttgaagcaaatttgtctaggaactgcacagacttaataaatctgtaaaattcacgtcgttcaggaagagtaagtgtgtaactagcatggggtttcctccaatttttcattacggtcttcaaacaacacaactcacaacgtattttaaggtcctctaaatccaatcttactttgtctgtatccttagacttgccctcgatacttaaaagagttccaagtacactttcgcacacatttttctcgatatgcattacgttgagattatgtccaagagacaagtccgtccaatactctggttcaaaaaatatacttttctttgactatttaactaacctacagaacgtttacgtttgactccaccaaattgcttgtgttttccaggaaaatgatattgtatctgctcaagctgagctaaaacattgtctcctgacaattttggaggagatggtcgtttctcaatttttctatcgtattttttacttctacgccttggatcgtccatttcaagaaactatctgtgcccaacataaccaatcttcatgcgcgatctaatggaaggagtgtgttcgttacaggtggggcacgccttgtaccctttggtgctccaaccagacatcatttcatacgccgggaagtcattaatggtccacaaaacagtagatcacgttgtaaatacagtcccattgtaagaatcttgagcttggacacttgaatcccacaactctttcaattcttcactcaatggtctcatgaaaacatacatgtcttttccaggggcagtgcgctttggaacaaaaagagacaacatcaacgactcagctttcatgcacttccaagggggtaagtatacgggactaagataacaggccatatactgtaagagttacgcatgttaccaatcgaattgaacccgtcagtggccgaacccaacctcacatttttgggttcaagtgcgaaggatggatggcgtctgtcaaattgcttccactcttctgcatctgtagggtgcctaagcacgccatcctctttgggtctcttagagtaatgccatcgcatgtcctctaccgagtgtcttgaactatataacctcttcagtctcggaattaaaagaaagtaccgcaaaacttttcaaccaccttttttttctttctccctttctcttttcccacgaatctcgccacaaataggacaaaaaatctatttttcttcattctctttccaaaataaggcacagtgatacttgcatacatcaatggattcataacctaaaataaggttacacaacttcatcttcgactcataatggaacttgggtaattttgtaccctctagaaataactcaatcaatatagtgagtaacatatcgaaagaatagctactccgcttattgagaactttgcagtgcatcagcttcaccaaagcattgagttctaattttttacaacccgggtacaatttatttttcgtgtccttaaagaaatcattttacttaccaccaccattcagagggggctcgttgaaggaagcagtggtagaacttgtatcgtaaaaactaggatcttctcttaaaatatcagccatcacatctgccatttcttcttcatcgttgtgtactatttctacaactggttacgtgaacgactccccatgaaaataccaggtcgtgtacgatcattggatgccatgcacaaacagatgtacctgaatattatcgggagtctcgaagttcacattcagaaatctcatgtaaggacatcgtgtaactccaacagaagttatttgcaatcggcaactccaacaaactcatccacatgcctacgaaactctgtagacgcttgtttaaagtcatccaactttcgtcgctcgccatatttctacacaatataaaaagaagaagttcaaattaaagttgaaaatgtgcaagtgtcctagtccaccttctcactccatttctaaaaggttaaagaacttattccattcaggtttgtaatatacatatagtgcaaactattctcttaagattgcttctttttctcaaaattttggcaggacctccccacaat

SEQ ID NO: 128927 - DNA, 2081 bp, Cannabis sativa
  modified_base (2033)..(2056): a, c, t, g, unknown or other
tttttgcctttgtccgacccagttgactcgcaagggcattaagtacttgtctgccctgttcgtcctctacgccattcaaggatggggtgtgccgtccccccacgaggttcacaggctttttgacttgaagtctacccctaagtagagcagctcgggatacttctacctctctcagtcagattgcaagtggctgacgggcaccgtggacaaggatgttagcaagatcaagggttttgttgatgagtactacttcgtggaaggcatggataccatctatactcggtttcaaaaaatcccaatgtaatgatgtccacccttcacattggcacttagggacagggctcaaaagatgctccagctaccggatgctgctcagaatatctctttattgacctcgcaggacaactttgtgaagtacaagctttatccggcagactttataccccagcctgtgaaggggaggaagaagttgtccagggctggctgagttgagggagttgagcaagagaaggagctcattcaacttaagcttgaggctaagttgaagggtgatgctagagccaagcagtatgctcaggaatattctgagcaggaataggaggcacaagaatattcagagcaggtgaggccaatcaagaagaagaaaaccctcttgactgagcagaggcccatagaacatactatccgattaagggagcctggtgtacctgctcgcccgtcaacccttgtagagggaaaagggaaagccgtcctagaggagcaggaagactctttggatgatgacgccccatctgtgcttgttcgggaaaatgctcctgccagtgtgtagagtacttcatcttgcacttatttttcttgattttcatgccttcatatattttataccttcttcttactgtattgtttttattccgtgcagaaatgtctcagaagataattcaggcttatcccctttggcaaataagtctaagggcggtgagactctgtccaaagagaaggcagcagctaaagaggtcattaatctctctgaggaacaacctgctgtggaccctcttgccttaaaagtcacaaagtccaaaagttcccgaggagggagtttagatggacctgagcaagctaaggctggctacgagctgttcaagagcgaatctgaacaaattagggcccctgccccacctttggtattgtgcacggagactaagacaggaagagacatgctcaaccattatgtgagccagaggtgaatgagtagctgactgaggcagacaatgacttgtcgttggagttggtcttcagaggagttcgaaaggaactttcatgggtatgtcctttctaactcttttcttttattcctctttgactttcgaattttaatgccttttttcagcatgaaattcctgagcgagttttaggttggcaataagggcttcatattctacttcattgttagatgccttaaatctaaatttgaatgcgtcgtgcaggtgctgccccctaggcgtgactagcgtgattcctacactggacagttgatccgtagccgacccgtctacatgcagcttccagcttggcttgtcttcactattgctcggctgaggtacatgtactggctctaggttgttttctggagtgctcttttctttacccgtacattcaaccacaaaatctgctaaggcttcacctttaatcgctgttcagggctaaaagataatttcatattggcccaactccactgcccatttgagcaaccgtcaagaggcatccgatttttgcaatacttgacgtaataattggtcaatgtatacccgaataggatgagcttgaaagtagggccttggctttcttgttcctaggattaggcaataggtgagattttctatcaatgggtaccggccttcagcttcaatgagttttttgctaatgtaatagagcaggtgttggatattgttcttctctctaatcagtacgacacttactgcatgttccgtgacaacgaagtatattccaaatgtcggaaattattttaccaggannnnnnnnnnnnnnnnnnnnnnnnttattaacatcctaaataagaactt

SEQ ID NO: 128928 - DNA, 545 bp, Cannabis sativa
taaagtgtaaaaataaaaaagctactattaaaaatataataccttattttcgaatattgaaggacacaaaagattttatttacatttaaaagatatatttatttatttatttaaatatacattgcataaagaaatgataaactcataatacactaattatatgtcattaaatcttctcttaactcttgaattatagttatctcaaaaaaaaaaaaaaatctcttgaattatagtagattagtcttaaatcattcttatattagataaattatttataaaaataaacaaaatgcagctaaacagataaatttactaatatatccaaacttgaagaaaaaagtttacataaataaataataattcataagggaaaattaggtgttgaatcaaaataataaatgtaaataaaaatgtggatcttattatagtaattctttattaaaagaaaaagtttttcgtaattttctctaaaatctaccattgttttaaaaagggataattgcggcaaaagtccccaaaatcttgaggttgatgccgattagtcc

SEQ ID NO: 128929 - DNA, 1718 bp, Cannabis sativa
  modified_base (27)..(28): a, c, t, g, unknown or other
  modified_base (416)..(429): a, c, t, g, unknown or other
aacatgattaactgctaatttctaaannaaactaagcggtctttacatattctttgtccccaaaaagataaccaaaatcaataagcaacattttagtttcttttaatcactaagactatctctaatagaagatctaaaatttatgctaaaattggcacaaaaaatgagttggtgttatatttggcctactatttacaattgtgctccaatgcacaagatgtaaaataagaaaaaaaataattaattatattaatagctattttatattttattgagaatatacaaaaataattattttttattcttttattatttaaataatgatattatggtaaataaagaatattatagtaatttatgatatttcttgatatgttgaatattattaagtttaaagttttattattattattatnnnnnnnnnnnnnnttattattattattttgaaagaagtgttctttattaaaaattcgagcaatcgctcgtaaggatagacatcaaatccaaaggaacactgttaatggaaaacatacgttcagctaaagacacagagtgccgggcaacatagtgcgcaacacaattcgcagaacgcttaacaaaaactaaagaaacattactcatactatgtagaagagtcttgcaatcttctaccacaaggccgaaagctgaagcaaaaacctcagcactacggacagcttcagcacagactaggctatcggtttcaactattgcgtgggaatgggcatgatcttttagccaacttagggcctccctaacgcccatgatctcagccaattcaggagacactctccccatctttaaaccagcaaagacaacaactaactcacccaaggtgttcctcacaacacataacaaaatatataaaaggaacaaaaaagttacttttaatattagtcatcttttttcggagacaaaaaaatatatgtttctcacatattaaaatagttattttattatttataaatgtgtaaaattctaagataatttttttaatagaaaagtaaccaattgatatcttcttcacatcaaaagcaactaaatgattacttttttcaaaactcccaaaaaacaaaaaattttagaaacgaaattttttattttcaataattattttaaattttgatatgtatgctatgtggcacatagtatttacgcaaataattttcttaaaagtatttttataaataaaattaaacttaagtataatattgaaaaaaaagcctaagaatttagctaagaaaccgtgcaaaatcacatttagcaaagctagtgtgcttcaaaaatattttatttttttagttattattatttattctataatatgtacatatatttcatttactttgttctttcatatatatactagacgtgaggatgttttagaggcacgtaatctctgtcaaaaaatatgtggaattataattatatatcttatttttattaattatatttaaataattataaaaatatatatatattaaaacaagaacatagtgtggtataggttcgttattttttactatagatgatgatctaacagtgaaaattaacttctgaagttgattgtcgattttcaaagtctggattacgacagcgggacccgctccgtgtaagccaaaacttatttttgttattcccttggggtgaaatttggggctaatagtgtaaagaccgcttagtttaaatttgaaaattag

SEQ ID NO: 128930 - DNA, 1796 bp, Cannabis sativa
ttcatataaccggttattttttttatttatatctgagacatttacttctggtaacttttccagtgacttttctagcgatgttgactttttcgacgacttttctagcaatagtgattttaccggcgacttttctggtgccggtgacttttccggcaaaagttattgttgttttataaatatgggatttctacttttttttataaaagtatgtcataaaaaaacttatataaatgtaaataaataaaaaaacccataaccttatagtgttatttatttatgccataaaaaagtaaattatactctcaatacccatatttataaaaaaaattcctatttttaatcatttgtatcagttattcaaaagaactaaggaaataaaaataaaataaatttatgtgatttgcggttttactaattatttaattttttttttattttttcattaaaataatatgaagaagaattaacaaaacataaattaaattataaaaaactaatttttaaaattgtaatattatcaataaattaacataaattatataccatattaattttatacggcatgaatggtggctacgttatcttgcatattgatatgtgccaaatcgtatagattaataattaattataattatactagtgaagctatacgtgctccgcacatgcatagcacacataagattttgaatattgagattataataattttaagtgacaggtttttaatgttcgaaaacctatataaaaaaggagcacatccaagctttttactacatctaatcttcattagaagcagcctagtggttcttttcatcttcacctggaatattcatcagtaactttatgtttcttatttatattatcaattgcaagcctatttatgtttcttctttcaccatgagctctaagcttaaatatacatatatcgaggcagtttcaatggttacatttttttttagccattgaatcactattaaatggttgtgattaatttggatattaaataaaaataaataaaaaaaaacctgtaatctgatattaacctgttaatttatttcttgataaaacttcaattaagattaagtatattttaaaattaaattaagtatagttattaatttattttttgcaatttattattagataagaattttttaccaattttttttacacttatattatttaaattttataacaaaacactttataatttaaaattatatacatattgttatacccgaaattcggtaaacacatcagaggaagacacgtgtcgagctgggaagaacgaagaaatcaaacaggcaaacgaaagtacacttagcatggaacaactcgttggaaacataattcgcagagtatgtttataactcagctggttgaatagccttctgctagacagaaacgtacgaactgctaacttatgtattgacgagaaatcatgtgggtgcacgtgtgccttacgaggcctcaatctcgctgcgtgaaagaggaacgataacaataaaaacacttagcgtatattacacgttgtacaaactaagtgtagataatttggcgagtccagataatagacagcgaggcatttatcttgctggaggatggcatccatgcgaggaagataatctcgacactagaaaatatagttatcagagttaaaacaatattagtctcgggaagtcagatgacaagcaactgcttgccatccaagttaacttagctccattcttagcgagacatccctatgggataagatttaccgtatatctgtaattacgcgttcatctcagcccaat

SEQ ID NO: 128931 - DNA, 673 bp, Cannabis sativa
  modified_base (95)..(96): a, c, t, g, unknown or other
ctacagaagttttaaattataacttaggtattattaccgccaaaaattaaacttatgtatttatttgcaactgaaagttaaacttaagtatttannccgcaaattactctaaaataaactcgaaaaacaacctcaaaacaattataatacaactataaataaattataaaacaactaaaaaaaatgatttactatttttactagagagatatttttgtaaataaaaaatttcaaagagtcaaaattaaaaaaaaaaaattgtgttaacgtatttttgtaattttttttttttttcaaaattttaatttattatgtaatttttgttagaatatgtttgatagagatgaagagtgtaggatgggtgagtttttttacttatacatttaatcacatcaaaataacatctatcttaagattggtattaagaaaagagaggaaaagaatggtttaaagtttaaatataaaattagtataaaatatatctattttctttcttattaaacaataaaattttgctctccctaatctcactctccatccctctatatttcctttatacttgatatagtgttggtcataaacgtttaaattataacataaacataattttacttttttagtaacaaaatttaactctaaagagccaaagctatatgtacatatataaaacaaa

SEQ ID NO: 128932 - DNA, 653 bp, Cannabis sativa
aaaaacttcaattaattagaaaagtctatactttttttctaattaattagattttacacacacaaatgctaaattaattaattattgaaactcaataaataactatctaaatcaacccatattttattaaaaccaataaaaaattaatataaattcaaataaaaagtctgtgaatttacaaggaatccaaattcattttgttcttctttttcttcccaatcattttacctctctctcttaatttgttccgtgtttggtcatgtcaaatttatacaaacacaagttcattcatatatatgcacatgtcaaatctggctgagacctcaatttatttgtatgctgataatatatttacaaaatgattctgttgggttatacatgtttcattagtttaatatactactctgttacatataatatatagaatatatgttggcatatatatttatatgaggttgattttcagcttggaatcgtcaaattagtattggaatatagttagttgataaatattggcagcttttaagttcgttttatacaaaacgttgtgtgtaatctttgttacataatgtttatgtgcaaataatttattaggtttatattacactttttgataatgtttggttggcatcaatcatcaatatatatatata

SEQ ID NO: 128933 - DNA, 887 bp, Cannabis sativa
ggcggagaggtccgccgctattagtgttatatgttgtagtgggagtctaggtttgggtccgagtccagggtcctaggtccaagttcggtcctaggtcttggtctcggtttgaggtccggggtctagatccgggtccaggtctaggtttcgaggccaaggttcgggtttggggttcggggtctaggtctaggtctggggtccaggtccagggtttgggtatgggttcgagtctgggtttagggtttgagttcgggtctgagtcttggtcttggttcaaggttcgggttctggtctaggtttggggtttgaggcccgagtctggggttcgagttcgggtttgggtctaggtacggggtccgatctgagtctaggttcgagttcgggtctaaggtccgagtgtgggttcgagtccggggtcctggtccttggtcttggttcgggtgcagggtctgaattctagggttgggtccgagtcaagggttcgagttttgggttcgggttcgggctctggggtctgagtctgggtttagatttggggtcttggttcgggtctggggtttgggtctgaggtccgggtctggggtcgaggatccatggtctgggtccaggtccaggtacggggtctagggtttaagtcttggtctttgtctgagttcggatctgggtccggggtctaggtatgggtctgggttcgaagtccgagtctgggtctgaggtctgtgtcctggtttaggtcctggtctggagtctaggtatgtcagcaaaaatataaaatatatatcttagacaaaaaggaaaattatttttaaaaatagaaaacaacatttaaatttttttttgttttctagttttaaaaacttagtttttaaaaaatttgaccaaacgac

SEQ ID NO: 128934 - DNA, 547 bp, Cannabis sativa
tatttttatttaatttccaaattaatcacaaccatttaatagtaatccaatgccttaaagaaatgtaaccatgatggttacaataaaaatgtaactattgaaacccatatttatatatatagaagaataggttttttctccttttctttattaaatcatttttgcttttgttcttttagttttttaattactacaagaaatgacattaaattcaatggtacttgtagtagaagtgacaatccagttggcatgtttcttatttacaagactagagacaggttgagatgaggttggtggagttgataagacttaaaattgatttggatcaagagtatatataggccattgtggagagtcccaaacaatattattgctttggtcacctactccttgacatataaaataagagggtgaaactcaaagaaaatattattgtcaaaagcaaatttagaaacactaaggccacctccaatgggacactaaaaatactaaatatagtgtagtttcacaccatatttactccaatagaacactaaacctatcctca

SEQ ID NO: 128935 - DNA, 968 bp, Cannabis sativa
aaaaaaagtttttatcaataacgactttgcagtgtcatcactaatagtggacatatcaataacgacactttgtcgttattgatagcggcgtccctaatacatgctattcttgtagtggagggtgctgttggagagaaagaaacgatagtatgaggggggtagcgttattggattagcttaactatgagctttttttatttaaatgttttgagttggttttttatttagataatgccatatagtatcagttatgtagctgactcaattaatataaactgagtatgattttaaaattgatgcaattaaaaaaacgaaaaaaaatattatgttgattttacgttgttattgatgcaaaaaaaaaaaataacacaaaatctcttttcttgtagtaaaattaatgttccaacatgtaggtcatgaaattgaagtttattgacttgttgggaccaacatagattgtccattgcggggttcaaattggtatgacaaagagtcattgaatctattagtggggatggtttaaagaatatttaatgatatgaatatatttttgatattttttaatagatgcttactattggagtaaaaaaaaaataccaagaaagaatatcatataatgacattctttatatcttttttatcttatttttctattattattttatcgtaagaaaatttatttaatatatattaaataataataaaatattattttaataatttttagaagtgcttactaatattttcataatattttaaaaaaataataaaaataatgtgaaataaagagaaataaaattaaatattatatttttaggtgatgtataagtttttgactcattttaagaatgagaaatgctaaaggacatttatggtgagaattgtttactaattataagatgtcatgttattggtgccctaacacaatactcttaataaataaaaaattgttaaaaaatattattggt

SEQ ID NO: 128936 - DNA, 1223 bp, Cannabis sativa
  modified_base (930)..(930): a, c, t, g, unknown or other
tcattaacgccccaaccacgtaagaatccttctctcactttcttacagctcggtaattttataatattttattagttgccgaaaatctcggtcaacaaatccaattcaattcaattatatcatatgttttaaaatatatataacttaactctaattaaaatttagactcgtatgatattcaaatttaaaatttaaataattatgtcataattttgaaaattatatttttttgtacggcgttataagtttgagttgttaactctaacgaaaaactaacataaaaacgataatttaataatttctattagataatcatattttgtatctatttaaattaaatacgtattaattttaaagttaacttttactaaaaaaaataacataaacaattaaaccaacaatttttatttaataggcacaagatattaattgcgtgaagcatttgaattcttagttgataactttggtgatgaattgatttagacagggacattatttgcatgaatttatatgcatgcatgcatgcaaaagaagaatagaagagtagctataagaaaagattatgcccaagcaacacatgcatatatgatagcatagtaagaataatgtattataaaatgtgtgatgagcagccgagtaccgcatcgtccacactatgcatagtatcaaatatcgcgatcgtatgaaaaagtaaagaaataataaaaaagagggagaatcttcatgtatatctgcgctacgtgataacaagtgtcaaagatgaagaattttcaagatcatttattattttcaattaaattgtacatccaacccaactcgtctttaaacttatacttttttcttctttgaatggattacactttttactatatggatcattttttaatgggtattactcatgaatacttattaaataaatttaactataantattaattttaaaaatattaaatcatcaaattttgatctaataacgaataacaaaagaaaaatttgaatttttatgcttagtttaactacttacttaaaaaaatatcaaaaaatatctttttttatactatatcaaaaatatgttcatatacaaatatttaagtgaaactcaacttttacttatcttttctttttttgctaaaaactttttaattttttttttccaaccgatagaacaatcttagcccatatgatgtaagtgagaaatttttttatttagatagaaaaattaa

SEQ ID NO: 128937 - DNA, 955 bp, Cannabis sativa
atattattttgtttacataactagaaaaggtaatcggaatgctttaatttgacaaaattgtcattattagaacatgtaattattttctgttcatagattttaaggggtgtatttttctttttcatttttaattaataaaattaaaattaaaataaattaagtaaggaaaggaaaagacattctctataaaaatgggagagaaccttttcctttgttttctccctaatttgtgtgagtcccactagtttttcccattccaaaatttagtaaacaattgtatgggaatcaataccattcattcctattcctttaagtaaatatgccacatttctatttcaccaaacttaacaccactttaatcgttggggcatggccttcgtactcacttaattaaaaggaaagtaattttatttaactattgttagggaattaaataatctagattcatatttgtaaagttgggcagaataatttgttataatttaattaatttcctaattaagctatatgcttttatcggattatgcagaagaactaactaaaaatgaatttccaagtcttaattacaatattcgaattattaagagttgagttgctcttgtctttttttgtttttgattaacagttgagttgccttgtcatggcagctttattgcaatagttactcaaaaaaaaaaaaagagtcaaaaattttttagtaagaaacgaccaaaaaatggggtcattgcataaatttgtattaaaagaaaagaattgaaaagaccactaaatagtaacataccccgccgcgtcatgaatgacattttttttttctttaaaagaaaaagaaagaaaacagaaacaaaaaaaaaatgtcagtatgtgaatgatatttgttatccccaccattgcaagactactttttttttttttttttttgaaataaagtaattcattagatagcaatatccgctat

SEQ ID NO: 128938 - DNA, 961 bp, Cannabis sativa
gttgattgacatgtaaaaataacttattcaatgcaatctacacatatttatacaattaacattttaatataaaaatagtaatttaaaaatctaaaacatgtaatacaaatatatttttaaatttagtagatcaaatatatattatatttttatatataattaacttttttattctacgtacaatttaaaacaaaattaaatattttttctacatacatttttttttttaattttcttttaaatttgttattggttattttatttattttaatttgttgttagagacataaacaacaacaatttgtaattgttgttttttttgttagttatgtaaaaaaaaaaaaaaacaatatatgttctaacaaatattcaatgatttaatattgaaaagtaactaatttaaaataaccaatttaatccgcatttttgtgggttgaatttgagctattgtgcggattagattgaatctaacatttgaaattcagacttagtgcagatcagatgcattataaacaaaatagtacggattgaattgcatgaatatctctaaagaaaataatggatggttacttatcccaataactaaaaaatgaatatttttatttaaaaaaaatatatattttatattaaattcagattttttttcatagaaaatgatgattccagttaatggataaaatatttttgaagtttaagtttgaagtttacattcctaaacttttaactaaaaaataaaaatttgatgttatacatttttttttttttggtaaaagcacttccaacaactttataatacctaaagctatcaaaaatttaaagaaatgagttaaaaaggatctacagtccatgaggtatatgttggaattttatgccctaaataaaacttatttcaatgtaatctgatttcttatcaatagaaggttagaagtcatttatctttacatgttgttttcatgtttat

SEQ ID NO: 128939 - DNA, 945 bp, Cannabis sativa
cacgtacaaatctcttgtgtcaagtgatttaattttctgcaattatttttatattctgctagttctgatttgtttctgcagtaacaaaattatattctgctgctgcagacgtatacagttttatatatattatatttctgtaatatttattaatatttgcaaaaattcaatttttcaagaatcaacttccagccaaaacgtatataatttaaaacctgctatacaaaataagcttaaaattaaaaaagtgaatataataaattctaaactgcatgcaatgacttttaaatttaatcaatgaattgtagctataggtggaaaagtttaggtattgaataatcaactttatggacttgtttttcccatgcattaatgcatggtattgacatatagagactagagtcaagctaatgacaaagtcaaaagttccatgctaatgaaaataagacgaagtcatataataataacgttacgttaagaaaaattaaagcatatttgaatattataaggtccgcatttgacatttccaaaatcttaataatgttatatattatattaaaataataaatggtttttgcattaatcagtactctattcaatattcttaaatctatatataaatgaattaataagtggatatgtaatatttcatagtaacacatatataacccatatattctcccatttaattaagttcaccacaatatataattatgataagagttccaataataattgttgtccttgtacttgtattgatgctagccactactatttgtcatcatgtatggagtagcaatataagtgggcaatgcatagagagtgagagacaagctcttcttacttttaagaatggtcttgttgataatgttatattattttataatataataagtgtagattaaaatgtagtaatatatattattatgtgaataatgtgtatta

SEQ ID NO: 128940 - DNA, 541 bp, Cannabis sativa
ttttcacatgagtaccattataggccataatccccatttggtattgaaatttatctactttatcacctctctcaaccatatataaccaaatccctatatatctattataagagaaatatagttaaattccaacaagttcaatagagtgagtgcagttcctagtatttaataaacagaagagatattgagaggcaataagttattaaaattaagaatgatatatacatttgtatgttggctaacatccaatattgtagcaataaaataagtgttagaacacctttttttttttttacatattatggaaatctagaaacaaccaaattaatcaggttgtcttttgcaaaaatctttgtatggtcagactctggcaattgcaatttcagtactgcatctcccaataaatttttttttttttttttttttgaaagagtcatgtgttacaacacacctacaaggaaggtagagaaccattccaaactaactcattatctaatccaagacccatcctagctaccctatgagctaaaagattaaaatc

SEQ ID NO: 128941 - DNA, 823 bp, Cannabis sativa
ctaaaatatgtaattaaaataaataagacaaatcacacaatcagggaggaaaattaatattcacattaactaaattaaagaaccgtcacgtacctaacaatcatcatattcctaaattgggaatttagttcatattcatatccataacaacactaaagcagaatttaacataaaaaaaaataaaaggagaagaaagaaactaatgatggaataaattcaggttgccgctctgctccttgccgtccttgactgcttttaggtctaaaattcgcatcttctgctctctttctcgcagtctatattttatcccttcagtctcaggcttccaaaaataaagaaaagacgaaattgacctcaaattgtacgaaacctcgtcacggcgaggttgttggtgatgatttcgatcctccctggcaagttctcaccgcggccatgaataaatccacaacgacgagtgttgctttggccgcggccagctttggcctcgctgggacgactgggccaggttaaatccccccattctaccaccttttggccgcgaccatgaataaatccgtcgctgccaaagatgaaccaaatgttgctttttcgatttccattcactcgccttggtcttttatcacacttttgaagccccgaactttcacagctataggaaacctaaaaacatagaaaacaagcataattcagtcctaaagcatcacaaacgactcaaaaatgactctaattaacacctaaaaactaggttgaaaatagcctaacaggtgggagaagaagagcgagtgtgtgtgagagagagagaggtgatgggtgcgaccagggt

SEQ ID NO: 128942 - DNA, 1248 bp, Cannabis sativa
  modified_base (27)..(39): a, c, t, g, unknown or other
  modified_base (913)..(922): a, c, t, g, unknown or other
aggatgttaatgaaacatacatggtannnnnnnnnnnnnctggtaaaatattttcaacaggtaacttccttattctatgcaatttgataaaaacataaactatactaggcttttaggaacacgttgtctggccttccagaaatgcagtattgagattgcttccaagtacaggttgtccttggtagaagctcgttttagcaaggaacgaagataccttcccagaagttcttgttgaacctggcttggtccaagttctcttctgtgggcccactagtgggtttttgatgctgacccggaatccacgtgtcccttgtatttgcccccaagcttccagaatgttgtggattgtggaagcttgtttcaatatgtataagcggacaaatagagactaaaggtgaaaattttacagttttctaaacgaaattaagtatctaagataggttatatatattttgtttttagtatctgacatggcattgcttcattggtttgtgaggtatgcattcaattattgaggcgtgcatggcaaccaaagcattttgatagctatttacttatacacaatcttcgaggagcataacaccgtgcatttttgcattgttctaagtgatgcattaaatgctggatagaaggctctttcaaccgttagatctattttgtctttttggaaggtttattttatccatagattcggaattcattatgagtgtgctttgcgactataaatacctctgaatgccacttttcatcattttttcttttactttgaattttcatgtctttacacttataatttttgagagtcaaaactaaaacccagaactcataataagatgaactagtctggactgtgatatttgttgggatttattttaccagtatttagatttattaacaagtatgtttcattaannnnnnnnnnatgaattctctaatacgatgaaattaaacacataagagtttagaaaccttacattgatggcagcggaataatatgacttcttttgctcagatctctaacccttgttcctttctgtcatggaataataacaagatctgagcttggatctctttctctccttcgggttggttaccaccgtcttccgcactatgattgagtacttaacttgctatgtatatctctatcactatgggcgaattggtgaaaaataataaaggaggtgtcgaaatcactatagaaggtgtctctcatctactagttgtcagaaaataaaaactaggtttagg

SEQ ID NO: 128943 - DNA, 713 bp, Cannabis sativa
  modified_base (651)..(676): a, c, t, g, unknown or other
tttagtcatgagttgtaaatttctctttttttaaactttcgtaactcatatataatctatttaatttacaacattaaatgaggtgtgggatgtctaaatattctttttattctaaataataaaataaaagtagcctacgtctgaagaaaaaaacagtagttggggtccctttcttttgttgctgtctaaatttattaaggaagaaattatttagttataatgggtcaataattattagaatatttacgacataaaaataagacacatgaattaaaatgtcacctcacatattcaataaatgtcacctcacatattcaataaaaatgagagcaaaaaattccaatctcttttgtagtaatttaaataattcactgcaactactctctctcgagatgattttctttgccttacccttgaaggtttttttcctgttctttgtgtcattttcagctagggaggtcgttgccgaccttgccctgtccgagaggagctgatgctcacttgggtgttgtgaagtggcaatataagttggttggtggtcgatcgttctagggattcacgcataaccgagaggtgttttcggctttggcaaagttttctgctagttcttgtttgggatctatggttgcttctgttggaaattattttacnnnnnnnnnnnnnnnnnnnnnnnnnngttggattaacaacctaatatgagatcggaagagcgt

SEQ ID NO: 128944 - DNA, 1562 bp, Cannabis sativa
  modified_base (64)..(65): a, c, t, g, unknown or other
  modified_base (215)..(224): a, c, t, g, unknown or other
taaaaatacccctgaactattgagcttgttaaatttaaggatttttttttctaattttagtaannaagtctaacatggatgaaaatttatgtggtataatttagtatatgtcaaagttcgagtgatattatttggtatatttcaaagtttggagagcatgatttagtacataaacaatcattaaaatagtgaaattgaatgaaattagacaaaannnnnnnnnnccaacaatctcaatagttcaatgggcatttttaacgaacttaaaagttcagagggcatgatttggtacatatcaaagttcagggggcaaaaatcttaattagtcaaaaatatatttggtatgttgtgcttttaataatatttaattgttattttatatttttaaattatacatatttgatactttaaaataaatttaattaataaaatattattaatttaaccaaacagatctaagttgcatgtaatcaaataattaaatttgaattcaaaatttataaaatttaagatactttgattgtattgataaaattttatcaaaataatttgaatttagggtatgtatgattttaaaatacagtgtcaaataaatattattgaaaacatagggtacctaacttgtatttaaataaaacatagggtaccaaattactaaaattactttatttttaataaaaaaaaactgtataacccgatagatccgatataggcccgattttctttaaatattttacatataaaaatttgtaagaactatatgaaaacctgtttatgccacaaatgtttaataaagtccaacaataattcaacaagaatacataatagtacagcacataataatattaaatttaacatttatttttaatctcggtaggcgcaagattttctattgtgccccttgccaccaaacttgctacaagttcgttttgccacaaccctttcaccattacaagcaattctgtttgacttaattcttctaaccttttactttttcggacgccctactggtgacttctcaacatgcactccaactgtcatgttctttatgtcatcaggcaattcccaatcatcctcgtcacaaactgtcataattgtgccttcatatgtgttcctctaatattctattgtgtaatatggcgagcatagtgcgtacatgctaatactctgttgctgagctgcatcacatacatgaggacaaagaaacttcatgatttggaacaagctgcaagtgcaagtctattcctgcaagtccactacgacaccagtctcaactgatcttctagggtggacacgttcaacgtgtaaggtccacatgtgtcaacgttcaaatactgagatttctcaaactgcaattacaagtcctcctctatttctggtgctagggtcttcatccacttgtcagctttctctttcagtatagcaaaccactattggatttttgacctcaggaatgctacagaagcagtgatcagaaagtctcttgtgtccgtagttgtgtggttaaagctctcagtccagttattcatcattacattgtaacgtacccctggaaagtacga

SEQ ID NO: 128945 - DNA, 1093 bp, Cannabis sativa
tggttgaattggaaaatatgacatttgtggaagaatatgataaatagttgaaaaatagcaaaattgcaagtggtgggctggtcggcctaggaatggtaaacggggcgggtctgccccgacccgctactgacctgacaagccattgccccaccctgccccgactcgattacctcagaagtttaatcgggtttgacccaacccggcccaactgggtcgtatttgacccgacttttttttttacaaacactcaacaatagtttcattgcccaaaaatttgcttcatgttaatagtgtcagaaaataaaaatttggactaaataatgagtatatgcaactttcgaacaaaacattttctttgaagtattgggtcatcaagttcattaaaattgatgacaactcacccaaaatctgcttcatgttaaagtgtcagaaaacaaaaatttgcagtgaacaaaaacaagaatatgttatttcggccacaaaaaaaagaaggttctaggaacctatctaaccagattctaagatacaacacatggagatttgtctttttaattattattatacttttatcttttaagaaaaatccaaaataattagaacggagagttgccattcgttcataatttagaagtaaaaaatgatgaacaaacatacctgctgcctcttgaagggaatacacagttagagttttcagcaaagaaaatagattaattaattaagtgaaagagagaagacgaggaaggagatgagagaagggaaagggaaattttcaatttagggatttatggactgaattttgtttttttttaagttaatacagtaccggattgagtcatccccgacgcaataaaaacctaaccggggcggggcgaagacccgaatatcgatctgattgtactgggacgggactgccccatcaagtcggggccccgacctaatctgcgaaaaagccccaatttgctattcctaggtcggccactattgcattattttaccatttatttatcaatttttttaatgccaaataatttaaacctgaacctagaaggattcctataaatagatagttatggactcaaaactaacagcctaa

SEQ ID NO: 128946 - DNA, 973 bp, Cannabis sativa
  modified_base (559)..(559): a, c, t, g, unknown or other
atatactttaatatacatatatatatctgttgtctctatttttgtaagcgtgacacgtggattttaatcaaagaaggccaaggagtcattaagcctcccaaatgcttcacttagtgcttcaagaggataaagacattaacctcccgggaagagctctgtgaaggaaggctccctgactgttgaccacacgaaggacatccgtgaaccaacgactcattgcatttaaggagccgaggccatgtactcccacaaggaatatggatcttctcataaaggccaaagcacttcagggatacaccagtccggggtatgtctttggtctgtaaaggattagcccatgcgtgttcgactatggacctagtaactaaacttttccatgtacgatgtcagaaattgtctcccacaatacgctaacatacagagaatgcttgtccttgtgtaatgagctaaataatccaacggctatgaataagataaattcaaataagaatagccctgaggtgacacgcgcctaaggcccaacctgtacatctggtacgatttgacacccttaaatgcnacatgggaaatatgccacctaccaatccaacggtaggatttcatccctacggtgatccatccaatacagcccatgcaaaggagttggcctatatataccccagaagaagcacaagagaaggggaccttctccttcagatcgaatactttcatcatcccaagcaaacatttatgtaaccctattattaactccagaatatttcaactaagctttctcttcttcaagaggaacatggtggaaaagaatcaaagtctacagtatttatttttgtataaacagttattggccgatgagcctaataaaatagactcgtgtagggctgttcatataaattgaaaaactgcggtttaaattcggaccactacaatccgaaccattataaaccgtaacccgggaaaccgtttttggtggttt

SEQ ID NO: 128947 - DNA, 1517 bp, Cannabis sativa
  modified_base (1429)..(1456): a, c, t, g, unknown or other
aaaaggccttaataacctaaagcttttgacaataatcctctgtgaaaaaaaatacaaattaatttcagttttttacttaataaactcaaatatttttttttttaaaaaaaaaaaagagaaaatcagattaaataagaaaaacaaataataataaagcatacctcctatttatgggacctccaatgtaagagccgtctagggtcagtgcttggttggaggctaagagatagctggccaatggagctcgagtggaaggaaaagagtttttaatataatgaacttttagtgacgacaaaaataacacttttagccgctacaaatatcgcccctaaagttatcaacagtaaaaatcccgcgaaaatacaacaaatatttttcaaattattaaatgtgtcccctaatacttttaggggcgacactggcgacatttcgttgcctataattgtttacaaattaaaaaaaaaaaaaaacagattttttaaggagctacacaatgttataattgtttgaggcctctaaatttgttgcccctaaaacttgagtttgttgcagtgattctctatcaccattttcatctggcttctccaccatctctgtccactcacctaattgatacgttcttctccatatcaaatgattcttcggtttcgcaggtggaggcggcagagcaggaagaggaggaggcgtaggtggtggagatcgagctttagtgaattctctatcaccctcacaattttcgtctagcttctccactttctctgttcttctcggaggcggcggaggaggaggaggaggagccggcgacttagggggcgtagaaggacgaacaacaaaagtatcaattgaaacttctttaatttcatcttcttctgcttcgattcgttgccttgatcgatgtcgatggtcaaacgacaccgtttggcggtacttcttgatctcgaaatcatcaaagaatcggaactgaaatttctgatcgtgtctgttatcatcccaaaccgattgttgccttagatctggatacgagctactactcctcctcaaccgaagtgtggcagtatccggcggcgtccgattagtttgcattgaattttgatttgttggatatatttaattttattttcgtttggttggaagggagggaagagtagtaaatggatggtataaagcttatagcttttgtcaagttgttgacttgaagcttttcttcgggagcacacacagatagatactgagctgtatgaattatatattcatatatatatttacgtgttagaattaaattaattacttaattataatgttatgtaatgggtttttaataatgaatttaagtcaattagaatttttaccaaaaatctatatatctattcttctatataaagtgtatttttagtttatgagaaatgtgactttttatttttatttaatnnnnnnnnnnnnnnnnnnnnnnnnnnnntaaaataataataaaataaatctcattaatatttgaattgatattttctttttataaaaca

SEQ ID NO: 128948 - DNA, 1351 bp, Cannabis sativa
atgagtaagaacgttccataccagggtatagccactataccacatacactacgtagctctctgtacgagtggttgtagggtgtgtttcataccctaagtacctgtgagtgatgtaccacacacactcagtacctctccgtacttatgctggtatcatggtactcttagacaacaatcactatatcaatatactctataccttaaccgtatggatcaactgtaaagtttgttttcactagtagaagttatgcaaatttagtaaatcgatccaccacaatcgaaatagaattgaacattcttgtggttctaggtaacccaaccacaaaatcaatggtgacatgttcccacatccactaaggaagagtcaaagtctgcaacaaccttccatgtctctagtgttcaaccttaatctacttacatgtcaagcatcgagatacaaattctaccacatcttccttcgttccacacaaccaatagaagggttttaaatcctaatatatttttgtagtgccaggatgcaatgaataaggagtggtgtgagcttcctcgaatatcatttttctaagttctacgttgtttggaacacaaaccattgttttatacaacaacatcccataacctgacactgtaaagtctttagcctgacttgccaaaatctcttcacgaatttttacatactttgaatttaattaactaagttgctttaattcttcctaacagatcatattgcaatgtcaaattattaaatattcctacaaaaaaactcaaaacctgatctgaccatatgtgctatgtggggtgaaatcataataagactggttacttgctcgggacccttcatgtttagggcatctgccaccatatctgccttcctgagattgtagaggatttcaaagattcaatcttcctttgatcaaccttgatcccatctttactagaaatgtgttcgagaaagaacgcataagatagccaaaattcacactttttaaacttggcatacagttttatgttctcgtaatccttgcagaaccatccgaaggtgttggtcatgctccacttttgattgagagttgttataccctaagttccgtaagcacatcagaggaggacacttgtcaagctgggaaaaaatcaaacacacaaacgacaagtacgcttagcatggaacaactcgttggaaatacaattcacagggtaggtttataactcggctagctgaatagccttgtgtgagacagaaatgtaggaactgctaatatatgtattgacgagaaaccatgtgagtgcataggttcatgacgaggcctcaacttcgctgcgtgaaagagaaagcgacaacactaaaaatact

SEQ ID NO: 128949 - DNA, 811 bp, Cannabis sativa
ttgtttgtgtgttgatttggatgtgttcatgttgatttatatgttatttgatgaatgtatgtgaattaagaaatttttccattaaaataattttattttcattctaacgataatttatttggattccttgtgaaaaattaagcaattttaatttttacgaaactcaattccgataaaaattgagaaagttatagttgtttgaaatttcaggttgaaattgtgtcgagggatgcccgtcgcatgcaccagtcactaagacgaggtgctcgtgcgcgcgcacgtgcctaggacaaagcttgtctgaagtcgctgatgccgcccacgtgaccctgcaagcgcccgtgtcccaggctgcaggtgccaaattttctcggcgtgataccctgctaaagccccctcccgcgcgcgcacatgggctacgtgcagccctcctgagtaacaacacccctaacccaatttttgtgggatttttttaattttttcgaattttccctatttcaaaccctaaaaattcaaattaaatattatttttaatatattaaaacttaaatatcaattttaaattaataatatttaatttttaaatagatcattattaatttttgatatttcgaagtttaaatttaaaaattgattattttatttttcttttatttttggtcagattttaaaagtttgttaacctatttaatatttatatattatttaattataacatcagatcttttaatattagccatacgttaaattaaaagataactttatccttttaattcaaaatattatattaaaattatcttatatgacaaat

SEQ ID NO: 128950 - DNA, 1888 bp, Cannabis sativa
cattgttttagaattcatattgggatgttaatgaaacatacttggtagtaaatctagattctggtaaaatagttccaacaattattctcttctcttatcagcacaacacttacagcgtatttagtaactgctaggtatatacctaattcttctttgttcaaaggttttaagagtataggaggccttgcgagttgctttcttagtttttgaaaagcattttcacattcctctatccattcaaacttcttgttacctcgaaggatgttgaagaagggaagaaacttgtctgttgattttgaaacgaaaataataagtgcaggtatctgaccagttaggctttgtacttccttcacttttgttggcgacttcatatctaggagggcttaaattttctctggattagcttctattcctcgagcattaacaatgaatccaagaaacttacccgagctaaccacaaaggaacactttaaaggattgagtttcatattatattttctgatgacttaaaagcattcatccagatcctttatgtacccgtagccttgttggattggatgagcacgtcatccacatatacttccatatttttccaatttgatctttgaacatcttgttaactaacctttggtaggtagctcccgcattttttagaccaaacaacatgactttatagcagtatagacaaatatttgttcagaaacttgtgtgttcttggtcaagtggatgcattcttatctggttgtaccctgaataagtgtccataaatcttaagatttcatgttcggttgttgcgtccacgagttgattgattcttgggagtgggagacactccttaggacatgtcttattgaggtcagtgaagttgatacagactcgccatttattgtttggcttgggcactagtatggggttagccacccaagccgggtacaaagcttcgatgataaatttttttgtgtggagcctttctacttctttttttagtacttgtgcacgctctttgtccaacaacctcctttttgctggacgagaaaaaagtttggatcaatatttagggcatgagacatgacaaatttgttttcccaagttagggatccatgtcttcgtccccaccttaggcaaattcctattgggcaatgcttcttcccttctctgaactctggctagaagtacgttccttttttaccttatatagggcaaggttgtagtattgagtgtaatcctttgattttcctttagacaccccactccacttttagttaggaacttaatgcataggtgaaagattgatgtgagaactcttaagtcgtataggactggtcagctaacatgatgttaaaagttgaagggacatcaaccactaagaactgtgtcattattattgtgctcatcggaccttgtcctactgtaagtggtaggtgaatttatccaagtggtgctacactttggtcgaagaatccgtagaccagttgagtgcaaggaaccaaatatttaagttgcccattttctcatatgttgttttgaatagaatatttgaggaagccccatcatccaccatagtccgagccaccattttttttcgtgatctgcacctcaacaaccaaagggtcattgtatggaaaaaggacatggctagaattggcttcagtgaacgttatgacttgttctctaacacgtggcaattttaggttttctatcctccatggctaggactgcatcattttattcatattgtaaggtttgggcatacttttctctagctttgcccgagtctctagcaggatgggggcccccaatgataacctaaaaaatacttgtccattggtggatacctcttgatgtgtgtgggcactactctatcactcaaggctatttcgaaattgaa

SEQ ID NO: 128951 - DNA, 740 bp, Cannabis sativa
  modified_base (32)..(35): a, c, t, g, unknown or other
ttgtaattggatcggtcggttctcattggatnnnntcgatttatgcacacccctaccattaatacatgtgcaagaggtccgagaggtgagaaagtaaaatatttaagctgaacaaatcgtgtcctgaaattatttgaagttaatgtgtaaagttaattaacaacatgtttatatatgattaatgatatatccaacagaagaaggaaaaaggaaagttgtttttttaactgaacaaaaacaaatgctgggggtatacataatatatagcaacaatttgtacttctagtctctccaagttctaactatcaaaaaaaaaaaagtctctccaagttctagcagcatatctaattagggtgcattaaaaatgagatgattttttttatgttgataattttaaagttaatctttgattgatttggagtaattttggaatgaggacttttatagaagatatcttgaactggaaaattgaaaatctgaatttgtaaaaattgaactttgattggcaaagtaactaatccacatatatttataaaaaaagtttttatatataatttttttttacttataatttaaaataaaataaatatttttaagtgattttacactctgatgcacccttaatttttttcggtatttaaaataattttttagtttaattttttttttacatttatgtacgttatatttattattcatgtacgttatatttattaaagatatcttacaaaattttaaga

SEQ ID NO: 128952 - DNA, 1418 bp, Cannabis sativa
cttaaatcagcttaaataaccttagaacaacttctgaaaacataatccatacacaatcaaacacgcaacacctaaaccatagaaaatcatacaaagaacctaacttagaatttaagaaatcaaagagaagtgagcttgatggataccttggattagatctctaaaaagctgattagaacagcctaaatcaagctgaggaaatccctaacccctattggtttcttgagagggagagagagagagaataagagaaatgtgattttttttttctaatgttataactttgagcaaaagaataaatcttattaactatctaacatatattgacttaattcagattatctaataattaataaccactaaaggacaaataacttaaatagtaaaaagacaattttgcccttgcctaagcccaaaaggcatccttaccacctaggggtaatttggtcaaaataaatacttcgaatatttttaatattctcaatgtctatctatattaccccgctattactagaatactaaaccataagaaaatatgatcctatcgaccaaatgccgcgttccaatattactgggcataaaatatgaaaaatataaaatttcatatatagcttaaataatacacctagaatttaaatatgtcaccatacattcataaatcataattaaaagtataattataaataaaaccgtaattatcaactaatttctataataaaattaagcggtctttataattatccccccgttaaaagaattttgtcctcaaaatctagcctaaacaattctagatattgagccctcatgtcaaactccaaatcccaggtggcttcctccacgttactgtttctccagagcaccttgaccaaagctatggtcttgtttcgaaggactttatcttttctgtctaaaatctgaaatagttactcttcgtatgataaatccggctgaagttctaggttttcataactcagcacatgagtaggatttgatatgtatttttgcaacatagagacatgaaatacgttgtggactgctaaaagtttcggaggcaaggctaaacgatatgctaccagtccaaccttctcgagaatcttgaaaggtcctgtaaacttagggcataacttgccttttttcttgaaacatttaatcttcttcatcagagatactcgtaggaatacataatttcctacttgaaattctatgttttttcattctaaatttgcataactcttttgccttctctgagaggcaagcattctggccttgatcttttctatagcctcattggtccgttgcattgattccagacctaaatatttcttttttccagtctcatcccacagaattggagatctgcacttcatgtcatacaacatctcatagggagccatccctatagtactctgatagttgtt

SEQ ID NO: 128953 - DNA, 1261 bp, Cannabis sativa
  modified_base (1206)..(1212): a, c, t, g, unknown or other
ataatatcaatattttacatcctacgtgtagcgttactagtatatatataacattacatatttttaatttacttattatatatgtatcatacattttcttttcagtgtgtggttaattttaatattttattttataataatacttacaaaatatgtgtgaaaaaatatttaatattaatttatatacatttttaagtatgaatcattttttttctctaacttaaaaagaaaagatatttttacccagttaatttttcatcttagtcttgaattttagtgtttgtgtatattttagtacatttggctgtatatttgtttaacacaattaaatataatccaaccaaaagctcaactttgtttcaatatcaaaaggggaaggcatattcctttactagtagataaataaaagagtaatttgcggcataaatatttaaatttatcttccaattgcaattaaatacataagttaaaattttggcggcataaataccttccgttacactttcagacattctgtaggtaccttgctgttgacttgcacactgaacaccagatgacatgccacatcatttaaaataatgacacgtcatcttattaaatagccacttaatattaactattaaagtaaaattttaatttgatttaaaaaaaatatttacataaaattaatttataatttaatctgaaattaaataataaaaaatattaacttataaaaaacatttaaactgtcctaaaaaaaacaaaaacaaaaccctaagagtgtagcaccagagtcggggagagagaaaaaagtggcggctggaggttcttctccgacgatgacggcacgacccatcagcttctggtgagaccatcttctccgaccacggcaaccagctagcagcgacagtacgttcgaggttcattttctccgaccacggccagcgacggtacatacccatcgccccatttttctcagcctgctccctctctccccggcgctgatggctcgtcccgtggatattcagtctacccaactcatatattcagtctcaccttcttctgtctccctctatctaaatcttccatctttctccatttcatttttttttttgatgagtttctccatctccatttcatttagttttatatatcacaccttttaacgactcttatgggttctcttttattattttcataaattaaggtgccgtttggtaacannnnnnntttctaattttttaatcacaaaataaaagtataatttttgtttttaaaa

SEQ ID NO: 128954 - DNA, 1011 bp, Cannabis sativa
atctagatcctggtaaaatatttccaacaataacgaacgacctttaagagaccacaagaccgaacgtgacatttgaaagaatcccacaagaccgtcacattggccgaaaggtcccaagtagaggttaaagaggggacagcggaagtatctatttggacggaccggtgacactttgggctcacaacggatcacaagtggctctgttaccatattagaatttgggataaggtgaatggggttccatctcaaaaccaattggcaatgggaggaatagcccattcatcttatatatcacaatttatttacacacattagcaatatgagactaactcttaataattttctcaaccttccatctgggttctctgtttcttgttccccataatcacgccacataatcttgggcaagctcgaagaatcattttttggggccatagatgaataatcccttataaagatcacacgaagacctttgtcagaggacgagtcatctccaatctgatcaacgaaaaatatttcaggaattgctacaactattatctcacaagatggggcaaaatggggcttcttggcaacggcataacggggagattaatcgacatagcttatcagcaacggcagaatgagacttctcgacagtgagagaatggggagattagtagacatatcttgattgacatatcaatggaggtgacagaaaatgattaattgtaacgggaagctttctattttttagccttttattttttattttttatataagtttaatcctaagagaagcttttaacttttaatgttagtattctgtttttaaaaaaaaataaaagaaatgttaaaaaaactattaaactaacaaatgttcttagataatcacttttttatatataaagatattattttcatatatattatataatttttaaagaaagtgaatataagttatatatatagttataataaaatataattaaaataaatattataaataataattatttatttttttttttt

SEQ ID NO: 128955 - DNA, 1037 bp, Cannabis sativa
ctactctcaattgattcttagaacgtcactagtcttccaatataatgtctttctagcgtgctctgtcctcacttgcacgcttctagaaaaaatttcttaagaaattacccatcctgagattactctaagttaagtacgcttaactctagaataaactcatggtgggctaactgaatcacaatacatcttgttgttcccaaatgtgacaagtatggcgtaacgtaaaagttgtcaagtatttctcacttcaatcttttcatcatctgaaacctaaagttaatctttattcttcaattatctttctctttgctacatcatattaatcccttccaataaatctgactgtccaatagtgttaattactcttttcaatactaaactatgctcctacactagtcataccctttgccaatgacagataaattgctccaaccattaacttttcaattgcattgacatataggcaatgccctttccgaaccattttaaaactcaatgtagcaccataatcaatctctgtttcaacttagaaagctttactcgtaaaaccttatttttacgaatcttcttccataatatccaattaacccatgagaatttttgtcttcaataattgattcatacctcgctagatttcaaattattttaatcaacaccaaattcttcaagcgtaggaaggctgcgatgaccaaacggtcattgtgggggaaatgaacgtgtttggcattatcctccgtgaatgtgatgggaaagttcatggttcttggacgttgtgctggtgagtgtacaactacacacatttccccctcaccatctaatttcctcaagtatatcttttgggaattccttataaatccagcaatatgtggtcctcctaaaatcgtggctacgtgttcatctactcgtggcggagctagaccttgaaggtatgggttcctaggtcccagagctattactgatattgcagcttgagttggtagagtaggtagggctcgtagttgtgttctaggagcttgagggtggcctaccccctgcaa

SEQ ID NO: 128956 - DNA, 733 bp, Cannabis sativa
gtcgggcgaccgcaacaccaaatttttccatgcaaaagccagtgctagaaactccacaaataaaattaaatcattgaaggatgctgatggtaatactgttactgatcgagatgggatttcaaacatcatttctcattatttccaagaactatttactgcaaaagaggaagatcactgggctctctctcatgtactatctactatcgctactacgataaatgatgatcacaatgagtttcttcttcgtgactttactaaggaagatatctattttgctctaaaatctatggcttctgataaaagtccagggttagatggtatgtcggctatgttttaccaccatcagtggcacattgttgggaatcttgtctcttcggtagtcctacatatccttaatgaaaatggagaccctactattttcaacaaaactcttcttactttgatcccaaaagttaagaagtcgaactctatgaaggactttcaccctattagcctctgcaatgttgtttacaagcttgtgtccaaaatgattttcttcaggtttaaggatgtgcttccatttgttatctctgaaacacagagtgcttttcttccaaatcgtttgatcactgacaatgttttagttgcttttaggatgattcattcacttaaacatcgcaagaaaggttctaagggctatgctgctattaagttggatatgagcaaagcttttgactgtgttgaatggtctttt

SEQ ID NO: 128957 - DNA, 1825 bp, Cannabis sativa
  modified_base (1028)..(1029): a, c, t, g, unknown or other
ccataaaccctatatcctaatcccgaaaccttaaaggctaaacccctaaactctaaaccctaaacctgaagccctaaattctaaaccctaaaccctaatcccccaaacccttaatccaaagccataaaccctaaactgtaaaccctaaaacctaatcactaataccaagacctataccctaacactaaaccctaaatcctaaactctaaccctaaaccataaaccataaacactaaaccctacaccctaacccctaaacccaaaaccctaaaaattaaaccttaaactctaacccataaacactaaacactaaatgcaaaacccaaaaccctaaaagctaaaccataaaccctaaaccgtagaccctatgccataaaccctatatcctaatccctaaaccgtaaaggctaaacccctaaattgtaaaccctaaaccttaagccctaaatcctaaaccctaaaccctaaacccccgaaatccttaagccaaacccctaaaccctaaaccataaacttaacaggctaaacccaacccctaaaccctaaatcctaaatcctaaactgtaaaccctaaatcctaaacccaaaactctaaatcctaaagcataaactcttaaccctaaaaaataacccaaaatgcaaaacccaaaaccctaaaacttaaaccataaaccctaaaccctatgtcatattcctcatattctaaaccctaaaccctaatgactaaacccttaaactcaaaaccttaaacctaaagccttaaatcctaaactgtaaaccctaaacctcccaaaccctaaaccctaaaccataaacctcacccaaaaaagcaggaaaccctaaacctaacccgtaaaccctaaactgtgaaccctaaaccataaatcctaaaccaaaaacctaaaccctaaaccctaaacctaaacacaaaaccctaaacccgttacctataccctaaatcctaaaccctaaactaaataccataaaccgtaaatcctaatccaaaaacctaaaccctaaaccctaanncctaaaccctaaaccctaaacctaaagccctaaaccctaaaccctaaactataaaccataaaccctaaacattaaaccttgaaaccttataccctaagctctaaactataaaccccaaaactctaaacactataccctaaaccataaacccaaaaaacctaaacccaaaaatataaaccctaaaccctagagcctaaatcccaaaccttaaatcttaaaccctaaactctaaactgtaaaccctgaacccaaaacctataccctaacactaaaccctaaagcctaaaatctaaaccctaaacccaaacccctaagccataaaactaaaccttgtaccctaaacgcaaaactcaaaaccccaaatgctaaaccataaatcctaaacactaaactgtaaactctaaaccataaaccataaaccctaaaccctaacactcaaacccaaaccgtaacctctaagccctaaagcttgaatgcaaaacccaaaacgctaaaccataaaccctaaaccatataccctaaaccctaaatccaaaacccaaaaccctaaccataaaccctaaaccataaatacaaaaccctaaaccctaagccccaaaccctacacccaaaaccataaatcctaaatcctataccgtaaattgaaatcttaaaacccttaatcctaaaccaaacaccatcaaccctaaaccctaaacgctaaaaactaaacccctaaagcctattcgctaaactgtaaataataaacaactaaaccctaacccctaaacactaaactattgggttttgtgcccta

SEQ ID NO: 128958 - DNA, 827 bp, Cannabis sativa
tcggatgctaaaatagataggggtgcatcagtatatccatttaagggtgtgcattgtagaattttccaatatatatttttaataatttttaaaaatgttatattttttatataaagagttcaataattttgttttttttttctcctaaggtcgatccaattttagaagtgacataatatctcgggctttgtgtggaagtcactgcgagagtggttccatctcaacttaattgaatgaatatttgaaccagggaaatctcactttgatgaaaaatgacacagcgacatgtttcatgtaggggttagactatttttttcttttttttttttttcataaaaaaatcatatttcgcacacatggtataaaaacctataaaatgtgtaacttcctataaattttcataaaaaaaatcatatttcgcacacattgtataaaagcttctctaacactcatctacaaatctgaaaaaataaaggataaataaacgagaatttcacactttttttttatatatatttttttttgaagtttttagactaagaattctaaaaataaagtataaaaatacgttaatacgattaacggagaaatttttatttttacaattaacattttttatttacaaaaatgtacttcagtaaaaataataaattattttttgattgttttataatttatttatagttgtattatatttttagtacctttatagttcatttatagttttgtaatttttttttgaaaaataattttgtaattttgaaattttaaaattgtatttttataaataaaaagttggggagttaccctatatactatttttttaa

SEQ ID NO: 128959 - DNA, 929 bp, Cannabis sativa
  modified_base (480)..(481): a, c, t, g, unknown or other
gtctttgtagatgaccttatcttggtggatagggcaaatatataggaagctaaatggctgtggcaatgccttgagaaattctgtatctagtccgggcaaaaagtcaataagcttaaaacatcaatcttctttagtaataacacgagtgatgatatgagaagaggcataaagtaggtccttggcctcaactatgccacgggcaacattaattacttcggacttcctttgttcaggtcccgtcttaaggatgatgattttaacttcatcttggaacatcttgtatcatattttattttattctaaataattaaataataaaatcattaattgggatgaaattaaatattgtatcatatttattttattttaaataattaaataataaaatcattaattggggtgaaattaaatattgtatcatatttttttattttaaataatttaataataaaattattaattggggtgaaattaaatatnntatcagattttattttattttaaataaataaataataaaatttttaattggggtgaaattaaatattttatcatattttactttattttaaataaatgcataataaaatcattaattgggatgaaattaaatattgtatcaatttttttttttaaaaaaatgttatatcagttttactttattttaaataaataaataataaaatcattagggtacatatagaaaaggttctaaccctaatttgaaaaacctaattcaaaacaccatctctcacagccgcacatctcaaatttctcttggtcgcacgcagcaatggagaagacaaagatggctttgcacagggcatggtggaggagacatcgacgggctttgcgcacggggtggtggaggagatggttgttgggttttgtgctctaaataaaactcatttcaataagatcggaagagc

SEQ ID NO: 128960 - DNA, 676 bp, Cannabis sativa
tggtcttgttgatcacacctacctacaacaaatgcatgcaccaaccaagtaccttctgcgttgcgataatttctctatccctcctgccttggagtacaaggaaactctccgtgccacaacatttgcccagcataaaaggaacccgtttgagctatctaattctattccttatgaggagtactttcctcgaaccaggactgatgaccaaagcttacaacaagccgttgaccaattccttcgtgtggatacccctgttttgcatccagcttcacaccctgctgctgtaactgttggtttcaaccatccttaaatttctgtgccttcatctttggcccactctaccattcccccaccaattatgactgaatccgttacaacccacattgacaaaggcaaaactattgttgtgtctcctcccagccctcctcctcacagccgtggaagcataggtgtggttatcagtgaaccacgccccacaacttctccaggcatttcctcaggaaccaggtggcctctcacgcgtcaaactgcccaagttggagattccgttcgtagcatgctgaaaagagcacgagcagttgttactgaagacgttgtggttccttcaatttcagatgatgagccaatggcgggtgctgatacgcgaccccgtcgagaaaaatgagtctctgcagtt

SEQ ID NO: 128961 - DNA, 836 bp, Cannabis sativa
gctgctcataatccttcagttgacgagaggcataggctatgactctgtcagcttgcatcagaacacatcccagaccatgtcttgaggcatcataataaacaaaaaaaatttcttgatctgatggtaaagctaacactggagctgtaatcaatcgccgcttcaacttttgaaaactagcttcacacttgtcggtccacaaaactcgctgacttttcttggttacttagttaagggcgtggaaatcttaaaaaaccctttcataaaatgacgatgatatccgtataaactcagaaagcatttgacttctataaccgtcttcggtcttggccgattcctaactggttcaatcttccccagatctaccataattccatctttactgacaatatgaccttagaaaaatacttatgatacctagaactcacacttcttgaacttaccataaagtttgcgttcattgagttcttgtagaaccatctatagatgtttcacatgctttgcttctgattgagagtacagaaggatatcatagataaatactataacacgaatattgagagaatccttgaatacctaattcatgagatccatgaaagctattggagcattggttagtctagaggatataactagaattcataatgaccatatctagtgcaaaagtctgtctttagaatgtctttctttcgaattctcagctgatgatagtccaagtaaagatcaattttagtaaatactatatttccttgaagttgaccaaatagttcatcagttcttggaaaaggatatttattcttgattcttagcttgttcaactctctgtagtcgatgcacat

SEQ ID NO: 128962 - DNA, 510 bp, Cannabis sativa
  modified_base (469)..(473): a, c, t, g, unknown or other
tacaaaccgtaaagttcaggtggtttagccgccaatatcccttatttttataattagtttgcaattagaattttgtggttttaacaattttatttttgtaattagttatgatttctttgagtttgttaggatagaattatgtgttgtttcacaattagattgtaaattttgttgttttgcaattagcctgttacctttactattatagtcttaaacaactacttatgtggtattagtcaacctccttatttgtaaaggatttgatgttatcacctaatcggtgttgtaggattttgtagatttattcattccattctcaactatattactaaaaaaattgttgctaatattgttgttaaataatttacagatgcattacattaatacttcacatccaaactgttggaaatattttaataggattttagatttactaacaaatatgttttttaacatcctaaatatgaannnnnaaaacgatatgaaataaacacatacaaagtataagaa

SEQ ID NO: 128963 - DNA, 937 bp, Cannabis sativa
taaagttaagaatcaagttaacaaaagaataaagcaagttaggtgtgaccgtggtggtgagtactatggtagatatgacagatcaggtgaacaacgtccatgaactttttctagatatctagaggagtgtggaattgtcccacactacactatgccaggatctgtaagcatgaatggtgtttttgaaagataaaactgtactcttgaaggtatggtaaggagtatgattagttcttcaatcttaccgatatcactctggggagaggcacttaaggtagcagcctacattttgaatagggtaccaactaaagcagctggaaaaataccttatgagtgttggacggggtggaagcctagtcttaagcactttcatatttagggatgcccagctaaggcaaggccttataggccaaatgaaaagaagctggaacccaaaactgtgagtagctactttattggatattctaagcaatcaagggatctcaagttttataatcccaaagtaaggaatatttttaaaacgggaactataaagttctttgaggatatttagtttggggagaaatattgttaaagaatttattttggaggaggatttagaatcaactactcttcttgaagatgaatttatttctattccaatagttacttttgacaatgttcaggattccaatcctgatattgataaagttttagatcaagagcaaccaaacatagtcaatcgaacccccaaaaaaacaagctcaacaacctcaagaacaagttcctttgcgacgatccactagagaaagaataaatactattaatcaagatgaatacattgtatatattcaagaacatcaagattccattggaatgatggaagatgatccaattaactttcattaggccatgaaaagttcgaactctcaaaagtggaatgatgccatgaatgaag

SEQ ID NO: 128964 - DNA, 1494 bp, Cannabis sativa
ttgattttttgaactgtgaaattaactttcctcatttggggtcaaaaaaagactaactaaaataccaaactcacttcttgtttctactactctaatgttaataaacatcccatcttatatatcacatcccataactaaataatgcaattcaattatatttatatatttgtcttatttgataaaattgttttttttttcttttaacagaaacaattggcaattatggttgaaaatgcttcaattgatgatgtaatgaaagttctattagcttcaagaaagcaagacatgcatcaactatggacaacttgttcacatctagttgcaaaatcaggtcttccttctgaaattctagctaaacatttgccaatcgatatcgtcgcgaaaatcgaagagcttcgcctaaaatcatccttggcgcgccgctctttgatctcgaccgggagccacggtcacggtcaccatcacggccaccaccaccacgatctcggggcagcagccgatctagaagatcaaaaaatccgtcgaatgagacgggctcttgactcgtccgacgtcgaattagtcaagcttatggtaatgggagaagggctaaacctagatgaagcattggcattgcattacgcggtcgaaagttgtagccgcgaggtggttaaagctttacttgagttaggagctgcagatgttaattacccggcgggtccagctggcaaaaccccgctacacattgcggccgagatggtttcacccgacatggtagcggtattactagaccaccacgccgatcccaatgttcgtacggttgacggtatcactcctctcgatgttctccgaaccctaacttccgattttctatttaaaggcgcggttccagggttaactcatattgaaccgaacaaactgagactctgtctcgagcttgttcagtctgctgccctagttctctcgagagaagagggcaacgataataataacaataacaacaacaacaatgatccgccttcaacggcggtttttccgccgttgagtgatgatcatagtagtagtagtaataatactactaatcaaatgggttcgagaatgaattatcttaatcttggccatcaaatgggatcaagaatggacggtactgatgatgaaagtagtcacaatagtcaacacagagatcatcaccatcatcatcatcaacaacatcatcaacatcatcaagccatgaatccaacaatgtatcaccactctcatgactactgaatcaaaactctctttctctctctctcttttaatatttatatatataatttttatttttaatattataaatatatttatataagttggattgtggaaattgaatgaatttaattaaggccaaggaggttatatatatataatttataatatataatatatatttaatggaatgaaattattatctctctcacttttctattttagttataaaattctctgttatttggtggtttttttttttttttt

SEQ ID NO: 128965 - DNA, 1820 bp, Cannabis sativa
tgccaagatctaattaggaattatggtaggaaggagtctaagcctaattgtatgatcaaacttgatcttcaaaaggcttatgacacaatggattgggactttttggaggaaatgttatttgcttttaagttcccagagaatttcataaggttaatcatgacttgtattagaacacctaggtactccttaatgttcaacggatctattcatggattctttgaagcaaaaaggggtttgagataaggtgattcaatgtcccctttactcttttttttggggatggaatatctaagtcgaatcatgagcaagattggaaggaaaaaggagtttgaatatcatgagaggagtgcagaattgagactaaaccatcttagttttgcggatgatgtactattgttttgtagaggtgactttaaaagcatctatttgttgatgcaatggctcaaattattttcaaacacctccggtttgacaccaaataaaggaaagtctgctattttctgcagtgggatggaggaaagggagattaaaaaggtactggacatgacaggattctcgagacaggaagcaccattcaagtatttgggagttcccatccgtgcaaggaagattacagcctctgattgtgtcacactcactcaaaagatgactggaaaaataagggtatggtcaactcgaaatttgtcatatgctgggaggttagtattggtaaattgtgttcttagtacaattcacatgtataggagtcagatcatgattctccctaaaaaagtcattaaagaaatagagggagtatgtaggtgtttcttgtggacagggaagagcataatggaaggggctggaactgtttcttgggaaagtttatgctacccgaaaaaagaaggtggacttggcttattgaacattgctcaatggaatgtagcagctatgtttaaacacatatgggctgtggcaaataaaaaggacaatctttgggtgaaatgggtgcattgtgtaaatataaagaaccataattggtgggattataaagctccccaaagtagtagttggtattggaggaaaatggtgtctattaaagatttagtgaaacaaacaatgaacgttgaagaattttcgaagaaggactataaagtggcagcagggtacaatcttttggtccaagaacatggaagagtggattggtgcaatgaagtttggtctagaattaataccccgaagcatagctttctcacatggatggccatattacagagattgaaaaaccaaagaacggctctgcaggttcaaagtaattgattctccggtttgcagcctctgcaatgttgcagatgaaacaaccgagcacctgtttttcaggtgtgattactcccagcagtgtctagtgtaggtgaagagcttgctttagtggaacaccacataccctgcaggttgttctcaagaccataagaaaggctacacaaactaaattcaagaagtgtgtcaaagcatcaagtattgcagcacttgtatacttgatttggaagtcaagaaatgatctcatttggcaaaagaaggttctgaaggcagaggaattggtccagcagcttcaaaagattgtcaaaattagaactatgcttgtaatgccataaaaactgaaactcaaagatagagaatggtttgattgtttgtaaataattgtatagatttattgatgccaaagttggtgcttttaggatgtaaataaaagttttgtgcaatgaacacttcctggttcatcaaaaaaaaaaaacacaatggaatataatcatgattatattttcaaaagtttaattccctgattt

SEQ ID NO: 128966 - DNA, 600 bp, Cannabis sativa
ctcattgctcggcaagagactcttgtttctctacaagttgtgtgcttcagttggaggatctgaagtacgttctattattttgaacgagtttattaattaataaagctccttttttattcaaaaaaaataaaaaataaaaataataaaacatacgttgtattaaaaattttggtcgtaatcattaatacaatatattactttatccaaacatagtgttatttattatttacagcataccaaacaagccctaagtgtatcattttgcactatacagatttcatgtggcgtactcttcttttttggcttactgtctaagtttaaatctaatgccaattagggatacaatggcaaaaattataaaattccatctcaaaattattatcgttaaataaatcactcaatatttttatatttaattaatatgaaacagtattaagcaaattgaaaaaaatatatactcttttcaaaaataccatataattataactctctttaaaaatatatctattctatataaaatgtgtctatataacagaattattggtttatgagaaattattgggtgacttttatttaattaaaaaaaagggaaaaaaacag

SEQ ID NO: 128967 - DNA, 1019 bp, Cannabis sativa
ataattcaaggtattaatcatatgcggtctttacaatagcattgtctcatcagcaaagagttttcttaaccaatggcaaaacacacaaaaatcaatcatggagactacattttctagttttctacccgaagatgctgctgtgtgttgggtgcctccacatgttgatagtgttaaggtaaatgttgacgcgtctttgttcaacgaaacccgacaatttgaggttggtttggtggctcgtgattctcggggtatgttagttgaaggctgcacaaaattgttccacggacaagtttcccctgttgcagtcgaagtcatgcgaattcgagaggcgttaagctggatcaagatgcaacaatggacacatgtagttcttgaaacggattgtcttctggttgttaagccttacgaagcacaattgatatgtgatccatgtttggtcaagtggtgaatgtttgtaaggatacgcttaaggatttaaaaaatgttgttatttattttgttagacgatcaactaaatacggcagctcataactttgctagagcctctatattctatcctgattgcactttcagtttggaggttgttccaactgacttgttacttattttggtaacagagatagttatttaataaagtattatttccattaaaaaaaaaatattttttcttcttgaacaaaaataatcaattaactaattaagagtgaaatttattttcaaattaattattctcttagaaataagggtgattatattgcaattttatgttaattaataaattaataaattacatataatgacaagaccaaaacacataataataaattgataattcaccaacacccaaccataatttaatgaaaactgtcttatttagacagctacaaagtatctattgtcaaatttgtcttaattactaaaaataaaataaaaattgtgtcaattttttcaactttatatattatctttctcaaaaaataaaaaatattattcacccctttcataaaaaaaaaaaaaaa

SEQ ID NO: 128968 - DNA, 1226 bp, Cannabis sativa
  modified_base (1164)..(1187): a, c, t, g, unknown or other
actaatcagattgtaaagagttttatttagggcataaaacccagcataaacataattcaatctcgaataataaacaataaaacataaataaaaattagattatttaagttaattaaccttcactaaaagacaaaacacataaaagtaaaatgaccattttgccattcccacactaaaagtcataaaaggtcacttaagggtattttagtcaattctaaaatctcaactattcccgaaaatccaaatgtctaaccatattgccctgctatactaaaaacagtactaggatgtgattctaataacgaaacaccacgttccaatgttgcgggacacaaaacatgcaaaattatgaaatttcatatatgacatataaaatgcattttgaattcaaataaatcttcgtaaattaataactcataactaatatggaagtttcataattaaacactaattatctgcttatttccaaattaaaattaagcggtatctaccgttagagttatttagatgtagttgttgctttttgttattcctgaaaccgattttagctgctatatatagctagctcataagctgtaagtagttaatgacaatttgatgaatgcaactacattttccttctctttctctctgttttctttttgagtttctatccggttttcttgctactatggtatcagagaatattcattcatgagctctcttcttcttctctgctttttgttgcttccacttctggtttgtgctaatggcaagaggaggagatgctcgaagatgatgcaatcgagatcttgaaaacaatccgaacgattccaatcatttttcagttcttagtgagaattaaagttctacgaatgcaaatgatctttccaatccatattttctgtccaatagtgacagtctaggtgttgttttggttccaaaaattctcacagaaagtgagaattatagcacctagagaagatcggtgatgatatctcttgttgctcgagaaaagatcaaatttgtcaatggtaaacttccacagtgtgatgaggatgatgaggattatgatagttggtgtagatgcaacaacactgttatttcttggatacttcatgctatttctggtgaaatcgcagatagcataatgttgttgaaaattattttaccagtatcttagannnnnnnnnnnnnnnnnnnnnnnncaccctaaatatgaacttctaaaatgattatgaaataaa

SEQ ID NO: 128969 - DNA, 503 bp, Cannabis sativa
atccataggaagaccctgtacggaattctagtgatgtgttaggacaactccttagcaaatgagtcatatatgcatacatgtatatagtactatttgtttagatcttttagtcatataatgaaggtaatttgttttgtactttgggttttttttttctcttgagtttagtttaagtgttgtgttggttagaatggtaatgataatgagaaagaggtatagaagaaaatggagagaagaatgaaaatgatgaagatgaagatgaagatctgtacacacatgagtggacatcacttcttgttttgtttggaccataaatcaatatgccacgtggaaaattattagcctaccacttggcattccgtttaattattagtcttgactttagtaatttaatgtttcaatgaaacaatatatttatcatcatactttgaaattcataatatgattttatttagaaataaatattgtaaaatttatatttgagcttttttcataaatgtaca

SEQ ID NO: 128970 - DNA, 717 bp, Cannabis sativa
  modified_base (27)..(32): a, c, t, g, unknown or other
atcccacttgaccttccccaggcggtnnnnnnttgcacaacttacccggtatttccccttacggatcacgagactactgactgtcacaattagttataatttttaatttattattttgtcgtattaagaaaagtgtgttaaatactaaaaaatctatatatttatataaaggaaagtacaaaagaaattgtgtggtattttataattttcattctatttttactcatttgtgagacttttctattttgtgaagaaagattgttgatacatgttttaaaaatagtctcacgttatttaggaatcatgttaggtgttatactatatagtataaataaagtctaataatcgccacttttatttataataaaattagttattattattatgggaaatttacatgtgagtatgtgtttatttatttaattctaataataacgtgatgtgtttaattattgatataaacgttattttatacctttttttttttatttaaattatgttaggtgggctattaaacatgctaaagggattgatgagggtgaaaggattgatgacgtcagtaaatactaatttgatgttcatcaattatctttttttacatgcttaattttatttattgttttttgtgaacaacttaattttttttaactctacatatatattatgaatatttagattcaaaatattttctctttcctcactttttttttttttttt

SEQ ID NO: 128971 - DNA, 566 bp, Cannabis sativa
gaaagaactccacagttaagagtgtataagagtcatcattctgttggtgtaagggcccaatgaaagtttgaagcggagacgttacaaaaccgttcaaattgtaccgcattgtatcgtatttttgcgatacaatttttgttgttttaagatcttgtggtatggttaccgtgtaaaaaattataaaactggagtttaatgtgaaaaaaatgttacaaccaacatcacttatatcgcaaacacctttaataattagttaccaattttttataatttttattaaaagaaaaatgcaagggggcacaatattaaattaaaccgaaattattactgacaaggagagtgttctttaccaattcttttttggtcacatgttataataggtggacccctgtcgtccgtatcaaacgattgcattcccataaaatatatggccctgtctaacgttatttttcgcatctgtgcatattgcatcttccactaataatttgatcgtgcgtgacgtatgtattgtataaatatatatatatatactaggtcattgttacgtgccaagccacgtagtgtta

SEQ ID NO: 128972 - DNA, 686 bp, Cannabis sativa
agtgaagataatattttggggagaggcagtttcggtgttgtttacaaaggagagttggacaatgggactaagattgcagcaaaaaggatggagtccaatgccatgggaacaaaacggttgaacgagtttcaggccgagattgctgttcttacgaaagttaggcataaaaatttggtatcccttttgggatattgcatcaatggacatgagaggcttttggtatatgaatacatggcacaaggaacattgaatcaacatttgtttgattggcaaaagaatgggatttctcctcttacatggaagcaaagggttactatagcattggatgtggcacgaggagtggaatatcttcatagcttagctcaacagagttttatccatagagatttaaaaccatcaaacattcttcttgatgacttgatgagagcaaaggttgcggattttggtttggttaagcatgtccctcatggaaggaactctttcgagacgagattggcggggactttcgggtaccttgcacctgagtatgctggtaagaaattctcactgtatatttacgaaaaaatgtatagtcacctggagttttcggtagactctatctatttcgatattcataagaatttttagttttttttttcatgattgataatttcaaacatctttaaatttttagaaaatttcaatta

SEQ ID NO: 128973 - DNA, 1623 bp, Cannabis sativa
  modified_base (277)..(278): a, c, t, g, unknown or other
tacaccattaattacaactggaagatatatatattatgagcacaaattaaataatcttgaataaattgaatctcacttctaacttaaaagcatattatattatatataataaatcgacaaaataccactattggcagaatgcagtaaacgacatacaatataataaatacactaaaataattaatagcctaacttacataagaaaagcatgactgaatttatatataatatactactaaatttagaataaaaattagaagatgaagaacaatttaannatgagatatggagatgaagtacaaaaaaaatcaatgtcaataacagaaataagaattacaaaagctatattctaacctcatcaatattactattctaatacagttatttttgtcactaaaataagtatagataaaatagcaataagagagaaaaataacaaagtgtattttctactctctataaaatctgatactttttacaatgtcaaatggtgttatttataatgaaaatttgctttttacaatagcatttttgtgtacacattagtgggaaatatgactaaaaattgagaaatgctaaagggcaccagtggtgcctagcaccttccaatgtgttaatatgttaatatcgctattggtttaactaaatatcgggtcctacataatttaatataatagcttctaaggagtattgctagtcaatcgcaacgcgacatgtcgagaaagtgctaggcaccaataacaatgctcctaaaaattctaagaatagtggtaccttgcgacacttttagctggaaaaatgggaatgcgagacaagccaggagagttggtgcgcttatgttgctggcgtcaggtacgtgggccatgacatgggagttggctggacgaaggagctacatcacaactaattgaacttgggctgttgcaaattggaccagcccataaaatatctttttgataacatgatgactttagggctccaaatcattaacgtgtttgccatgttgtattattgtacaaatttgagaagccttgacatatatgattgaaatttcgggcttggacgtgtcactctaagatttgggattatcactcaatttcatttataccattttgcttaaatttaaaacataatatagaattaagtaaattaaatattttccataaaaataaatttaccattaattaaaaatttaatttatattaattttatatacataattaaggacttagaatgtataaatttgagtcttaatcacaacccccaactagcttattgctagtctttagtaattcaagcgaagaaaaataatgtcaataaaataattttaggtcaaaatttaaaaatgacacaaatattcaagcaaaatgttagtaacaagcgaataaaaactatacaaagttaccttgaataaatctaaagttgtgagtgtgtgcaccaaacttaaaccttcttaccacaaaccataacacataaaggctttcgaaaatataccatgtagaaatttcaactccattagcctcacatgtatttgaaaatatttatttacggctaaagatttcactcatggagttagaaatttaaaagtgagcacttcaaatggatagatcaatttaggacaaa

SEQ ID NO: 128974 - DNA, 797 bp, Cannabis sativa
tttaatttttttctttaaatattagagaaaattcattagtatatttaaaatttatatgataatatgaatataaaattttaaattatttatataaaaatatgttatgattcatccatatggaaggttagttaagtataaaatatctaaataaatttaaatttatttgaatagaattaatgaggcataatttatggaaagttatttttaaatatttatattaatatttttaataattttttgaaattaaagttattttttaatttgatatttatatatattttttagaaaataattaagtttaatattaaaagaaaaataagaaacgaagcaatgcattatttttaattatattattttagtattgttaatgatatttgtgaattaagataattttttttattgtgggtgatatttaattttttttttcaacttacacaagatgattgatcattgacaacatgcaagacatatctgataaaatatatgtttaaatgaatttaaagcaacaaatctttatgaataaaagaatttttagtttgtaaaatctgtataatttcattgatttacaactgtcaatgtatttatatcttttataaattcaaagtatattcgttataaaataaataataataatatttgataaaatctcattttgagtaaatttgggccaaaaaatactttctaatactttttttaaatctaaacataggcaaaacacttgttttgaaagtacttaatgttggactttgtgtcctaaataaaactctattttaatgtaattttttctattcaattat

SEQ ID NO: 128975 - DNA, 760 bp, Cannabis sativa
tccaaaccccagtagcataaaatcttgacaagctcaacataggcagagatttcatgtcgaaatccggcttcctccttgctccggtgaaaaaacgcgatagcaagatcgggttcggccctgagactacgaaggatttctacaactctgaagctatcaagatcaggggacaaatgaagagtttcgtgggaggcaatggaactagacaaagaagaagaatccagttggttatcttcatcagaggaagcggagcttgagttcaactgggaaaccgccatttgagagaaaagggaagaaccccatttgaaagaagccccaccgccatggacaactggcataaaacgaagaaacttttgtggaacgaaaagtttgcttgggaaagccagtctgagactggaagagaaaaacagcatggaaattgaagaggcagagttgaaggcggattattaagaagcattccacaattgaaagatgagttgagttaaaccctcaaaccgagagagggagagggtttaaaaggagtaatttgtaattttttttttatagtagctctgtaactgtttagtaatatttttgtttattattttaattttttaattacaaaaataaaaataaatttttgtttttgaaaattttatttttgaaaaataaaaatgcattctataactattttagttttcaattttaaaacagaaaacaaaaatatattttgaaaagcttattttcatatttattttttgattttatttaagtcagatttagg

SEQ ID NO: 128976 - DNA, 842 bp, Cannabis sativa
  modified_base (727)..(730): a, c, t, g, unknown or other
cattttacccttcttttttcaaaaacgggctctttctcttcctccctttctctctctttctctaactctcccgaacccatctgagcacgaagatatcgaccgaacccaccatctaagcaccacttgaccgaacccaccatctgagcacgaagacccactcgagccaccaccctcgtctccctcgctcttagaccacgaagacgaccaaaaaactcgacccaccacaacgcaatgttggccaaggtaagatttcctccctatggtatttttgaatgtttttcttattgatttagagttaaaatgttgtttattgatagatttagggtctgatatgtgagttttggattagattttgtatctgtgatttttgggcgagaaaatataattttaggcaagcccgatgcatcctaatgcaaagatggatctagggttgaagataaaggtctgatatagggcccgattgtttgcccattttttcaaaattttgagttggcatggtgggtccaatataaggtacgatggtaggccctgattgattttctcttttgttattttttagatgagggtcttataggcccgacataggacccgatagtaagcccgatggtaatgttgaattttaattttttgttatggcccgatatatggtacgatattaggctcgatgaattttctctttcgtaatttttaggtgagggtccgatagtgttgggattttataccctannnnaaactcatttcaatataatctgacttgttatcaatagaatattagaagtcattcatgtttacatgtagtttttatgtttatggtttaatatatacaatttttgttaagtcca

SEQ ID NO: 128977 - DNA, 957 bp, Cannabis sativa
  modified_base (158)..(158): a, c, t, g, unknown or other
ttctgaattcaaataaatcaacataaataattatttaaatattaataaataatttttataattaaaccctaataatctgctaatttccaaatttaaactaagcggtctttacaggtagcttgctatataggtaaaagaaaaatgtaaccatgatggtnacaataaaaatgtaaccattgagttgaaatttatatgtttcaaactccctatctataatttatatattcaaaattttatcactctttctattctatttttattttcaactctattattttgtaaattttttttttatttttaattaatagtttatctaaagtaaaaaaaaaaataagtattctttatttatttatttttttgaaaaaaatggtgtattataatgtcaaatattaatagattttgattgaaatgattatatattataattacaatattattatatattagaataatttgtttaaggttaaattattatttattatattaataaattattatttttttgttgttataaaaaaaattatgatagttctgtgaaaaatagctttattatctaattgaaaatttaattttattgattcaaaatgtttgtaatttatgcatcaataaaaactataaacattaaaaaaaaaaaaaagaaataaaaataactaaaaactggtaaaattataacaaacacccaaaaattaacaataaaagtaaaaaaaaattataaaataaataactaacactaaagattaaatctagttataactaataatactaaagataaaagcttataaaaaaaaaataactaacactaaagattatatctagtaactattaacactaaaaattatgtgcagtaactaataacactaagtatattgagtatttattctagggctatttacaaaaatatgggaaaataaagataagttttgatatatatggcataaaaacttaattacactaaat

SEQ ID NO: 128978 - DNA, 1893 bp, Cannabis sativa
  modified_base (58)..(62): a, c, t, g, unknown or other
  modified_base (1832)..(1846): a, c, t, g, unknown or other
aaccatgcaacattaaaatgttatttctgatctttattaactaataaatctgattatnnnnnaatgggttttatttagggtataaaacccaacaatatctaggtcacacctactcgctagattggcaagaatgaattatatgttaagtaaaaatataaagagacataacaatttatagtagttcactcccggtatcgcaacagtaatggagctacgtctactttgagttttatatctctcaagatggattatagaaaaatggataagtctggatactataatttctagagagagaaactagagaaaaatactctaactttatggctactttctaaacataaaaaatgagcttgtgtagctctccttttataaagaatgaggtcatattaaaaggacaataaaatagtccaaacaacatggaaaggtacatttaggatatttttgacagtagatgatgatctaatggtgaaattgactctagaggttgttcgtcaattttcggagcttgagtcgcatttgtgggacccgctctaggtaagttatagcttaaatttataacttccttgtgataaaatttggagtcaataacttcagaattgtgatttaaatgtgagtcatggcttgatagagcattgaaatagcttcgaaatgtaagttgaatcgcgtcaatcagatcaatattgggtgagttatggccattttattgaaagttgttctaggcccagtgcccaagttgacatcccagcgcctaggttaacatcccagcgctcatcttaacatctcaacgcctaagttgacatccaacacccaggttaacatcatgtcaacctggggactaggtgagtgggaaaacatgttgaggatgtattttttgatgccaaagtgatattttgacatcacttagtctatttctgtgttctagtaaagttcgtcattagttctcgaagatgttgctattttgctgaattaagagacttgaaattactcggtttccgagcaaatcaccttgtcggaaaagtgaaaatatgaagttatgaatttgaatcttctaacttcatagctctcaattactatcaaaaattagatgaatggtcgagatggaatcaaaattgaataaccagaacccagcgcacccaccaggccatatgtaaacctgggcgctaggtgcttatttcgaagcttccgggatgtcattttgatacttccaagcttatggaaattgaggacgaagtttcttaccctatttttgactatttcagagagaatgctcagagcaaaattagcgtttgagtgatcaaaactaatgcaccatgtcaacctaggtgcccgtctcagttttgaagcctttgcaattgtggttttctcctcaagtttacttgtatctttgttatttctaaggacaaaaaaatgttcataacactttttcaaaaaactgattggaaacagtccaagttgacaatatgtcaacttgggcactgggtccagtttatggccacctacaaattctgcttggtcttcaaaaatagtcgaatcttaatgaaaataaagaatatgcctgaaagacttttcaaaaaaaactcattggaattggttcaggttgacaaaaatgttaacttgggcgctgagtcagcactaggtgtcaacatgggctctagtcccttgttctggcactcaggttgggttgtttcttccccaaagcacttgttttcccatttttgacgaagactgttagaatattagatgtatagtggttgtaaaaattaggagaagttgtatttagtagttttttatttagtctcctaactttgtatataaatacagtagaacctctnnnnnnnnnnnnnnnattcaagaataacctctaatttattataaaaaaatcaagtaccgatt

SEQ ID NO: 128979 - DNA, 771 bp, Cannabis sativa
gataacattaattttttttcattacaatttatggtgtcgtataaaaataacaggaaaataacagacaacaatacaactaacaagaaaacaacaagaaaaaaataggtaaataatatgaaaacactacaatgtgaaatgatagtccatatttttgttaaaaaattataaaccgcaaaaatgtaggaaaaatctatagtacaccctcctaaaggggtgttttggtagacactcctatctatttcgacagttatctacgttataattatttaggaccattggtaaactcttaaaaaaaatttaataatgtacaatgtcgaaattcaagcaataattgcgcgtataagaaaaaaaaatcatgtgtgcaaaaaaatattcaaatcttagaacatctctaatggaggcactatctatttggcacattttttttacgaaatttattccaatggtagaaaatcctaaaagttgccaaaagtatacacatttcttttgattttttttatgacaagtgttttttttacaaaacaaaataataaataaaatgaaagaaatgttgacatggacgttgtttaataatggcaacacttacattgattttgcttttacttttattgaaatttggacaaagctcaatatgtgtcatgtgcattttattgagcaactttcatagagatgctcttattttcgacatataaaccattatggaggcgtttggttggggggaatgaaaatataggaataggaatgggaatgggaatagaaataggaatggaa

SEQ ID NO: 128980 - DNA, 1352 bp, Cannabis sativa
  modified_base (1164)..(1166): a, c, t, g, unknown or other
ctttgcatgaatgctaatcacctatgttgtgccattatagttctattgtgttttttcaattctaaagatatttaatagcaaacatggtaagaatctgattggcataatcattattattgttatttacttatctctaaggtggattgacataatctttaaagcttttttttttcccctcttcaggtagttgtgcttgctcttttacactccactcaaatctcaatattatcctgaacgatataagcgcacgggcaaacttcattataaattcctaatgacgattaataccggctagcaaaataatggtaggaataggatcttactttggtaacactttgaacttgtttgtattagtgtcaatgacggcgggataatatcctctatgtcctggcggtgcttcaatggcagctctgaacaagttctctcattagttggtgtttgtgatgaggatgatcaccatggcaatgataatgagtcttgttttgttatcgaacaaattatgttgaaagtaaaagaagttgatcattttctcattgtaaaggtttcattcacatgttgattagttggatttggataattcatcatctaacattgatagagtttatgttattcaggggatctgtccttaccattttgccacctaacttttaggatttgaatttgggtatgatctccaatgtaatgtttacaagtatgctaaaatctttagtgatgaattttatgagaacccaatagcctaatgtttacacactacaaattaaccaattcctcgagaatgatcaaataaatgcaatgaaaaataaataaaatataattatgtattatgagtagtacacaaaaattgatgtatattacaatattctaacttattttaagctttagtctttctcatatgactattgatatctcttaaaacttttgccgaaaccaacaaaagtctcaagtgaaaaatccatggtttgtcaattggtctgcaacttgatttccttaacgtatgacattcattcactaaaatggaattctatttctttgtttggctgcatttaaaactattggaataccattctgatggaaagacctttctatcattttggtagaatgactatttcattttaaaatagaaggaaagaccattccgatgcaagatttgaaaaaatttaatannntttttattaatttttttttatgcattttaaatcttattacattcctattccagttctcattctcattactatttctatattttcattcctaccaaccaaacgccacctaaaatccttgtaaagtttgctcccactcgtctttaagaattattttcaaaatttatttaaaaattaaataaaataaaa

SEQ ID NO: 128981 - DNA, 1061 bp, Cannabis sativa
atttgatccaatggtcaagaataaaatacccatacatgggtaatacccattaaaagtatacccatacatataatacatttgttttaatacatgaaataaaacaatagctattatctatatatatgttaattacattgatgtaaaattcagagggagctagggccaccctgaatttattactatctctgtttttggtggtgccgcctcttatgagaattaggagtattctctagagagtctatgaattagaattttgcatatgaccattaacggtgcaagagcgagacatgctatcgcaagtgagcattagtaagagtgtgtgttatcaccgatttgtgcttaaagaatagtagttcaatgctacgtcaactaaaatttcatcaaactttgtggtaactacactgagataaaattaaagtcgaaagatattttacctaatccacataagtaatactactataatattatgtttttattcaatcaaagtgagaaaatattatatttgattgattaaataaatattacaagtgtgttacatattttattctagtgggagattgttatattatttaaaaatataatatgtatattaaagtgtggtaatatatattattatgtgaataatatatattaagtgtttgacaaataaattgtgtaacatgtgatttatttaacctacaaattgtaaccttcactttgtaacatagagaggagttataagattaattatttttataactttttttggttgatcatattttggtgtaataaaagagatgttacacaaaatttatgaaatatagttgttacaaattatattaatactcatttatatgagagaaatgaggtggtgtgtgtgaatcctaagagtgatcacctaaaacattatataaatgaatataatgtgctcatttggatgagaaatattctatatataaaaaaaaaaaattgttagaaaatcgtaaagtttgataatttctgttgaccgaggttttcggcaactaataaaatatgaatataataatgagctgtaagaaagcgagatgaagactttttacgtg

SEQ ID NO: 128982 - DNA, 1639 bp, Cannabis sativa
ccccgggctgaccctatggccagcataggctggccaacctccagcaaatgaagggccagacagcctttatcctgacatgcacttggccaaccagcttggaccttagcaggcacttgatgtggagctttcatttgggacagcaacccaagttgcgaattgggcttcaataacccccaaaaataggggtaaatatcaactatttacctattcttgtgggatagctaacctatttattatatattattttattatgtaataacaaatactttataattcttattttttatggatattaggttattattctctcgtaagctctcctatataaagaacatcaacctaaacctaattcctctaagtctcaagcacccttattttaccccccaaaccttagtttccaacaaagcaacaaatccaatcttattcaatcaacaaacattcagtatggatttttgtttattgactttattcatgcccctaacatcccaactcataatattacaacactccatctagaagagaagtagatctaggaccactctcatccataggctcttgcaagaccttatagacatcactagttgaagcattcaagtcagcaccaacattacaatcatcactaatctgagttgtcattttattgattctgtttctttggggagtaatctattgaccaccattgtttgagctctgatgcacaagcagtttttcaacctttgtaccaatatcatcaaccatctcgatcttttgctccatcagaccaatttcttctaatgccctttcttcaagcctccgttaggcatactcccacgaacttatggctcttatacatgggtacatcactctagttgtttcttggattgacgattgaccctacaaacaaccacgagtgtttccaacgtgctttatcctcacttgcacgctttcttggtaaacttctcaagaggtcacccatcctaaggttattccaagtcaagcacacttaactttagatgtaacacgctaactatattaggcatgttaacgtgatttttaactaattgtgcagctcgttgctaatcaacgagtttattgaaaatagtgattaattaaaattttgcttaattaattataaacattaaaataacatacttatataaaattgggatcccgtttataaaaatatttacaaaattttcattgtgcatacacaaaagttcgtcgcctagcgactatacaaaataatccctgatgtcccaaagattgtatgctccaggcctaactgccccgacatgtacaatctccatctgctcgctctcacggctactcacccttagccttgcccttacctacacatgcaaataataaatgtgagtcgacagactcagtaagaaaatcataaataataacatagcagtatcctggattatgatcaggctcccatacccccaatcataatcatatctccgtgtccaacacggtgttgagtctagaacgttcgtacggcagtactattgaccataatatcatcatatactcagtttgctagtcgttcaactagtcgtaccaatgtgatactgtcaagtagtacagtactatcgaccataatatcagtctatactcagtacgctagtcgtactgtagccgtaccgatgtgata

SEQ ID NO: 128983 - DNA, 546 bp, Cannabis sativa
ttataaggtactggttcaagagcatgaaagggtggactggtgtaatgaggtttgggctagaattaacaccccgaaacacagttttctcacatggttagccattcagcaaaggctaaaaaccagagatcgattatgcagattcagagtaatagactccccagtctgcagcttctgcaacagcgaagatgaaacaactgaacacctgttcttcaggtgtgtattttcccagcagtgtctggtgcaagtgaagaattggctgcattggagaactcaggccgatacactgcaggcagttctcaaagcagttaggaaagccaagcaaactaaattcaggaaaaatgtcaaagcatcaagtattgcagcacttgtttacttgatctggaaggcaaggaatgagttcatttggcaaaagaaagaccccaaagttgaagatttagtccagcggctacagcaggtagttaagaatagaacaatgcttgtgttgcctcaaaaagtgaaaatcaaagatagagattggtttgatagtttgtaaataattgtatagat

SEQ ID NO: 128984 - DNA, 914 bp, Cannabis sativa
ggaagggctcccttcggggtaaagtcctacaattctagttctaaattttttgggctactttgattttttgttgttgtgggcttcgaattctgttgggcttatattttgaagagcccatttgatggagaattcttaatacttttggtatcatatttctcatagattttgtgttgttgtgggctttgaaattagtttccgaaaaaatcttttctccatttttttctacttcatatgtttttgtgctctaattacttatgttagtctgtttattcaacttgttctaactagggtgttcattaaatgaaatggttttcgaatttaataattgcgaacaaatatatgtaatatatatttagactccttgctgttgttgctagagattgttttgttgggccgccactgctagatttgatttttctgactctctttgtggtgaggctgcgttgcttggctttaccgataacgacaaagaagagatgtaattttgttattgttgagagtgattctgggtggtgattaactctcttttggaaatggagtctaagtgggatatcgagaattacactcggcaatgtttaagcatttcttctttatttgcgggttataatttctcaaatgtagctcgttcttgtatatttttgtgctcataatgtagcgaaatggacttttacacaaaatcgttatggttgtctggatgctaatgacattcttttgaacctaatttgtaatgaccttacggtctaactagttcgtttgtttaatataacgattttttttcaaaaaaaaatatatatattataatatgtttcgatttgatgattagtatagggaaatttgattttctatacttaaacattttcaaaatttcttttttgaaccaatacattttacactatgaaaaatatgactctttt

SEQ ID NO: 128985 - DNA, 792 bp, Cannabis sativa
ttttttcaagaatctattgatgtaatttttatttattttggtatttgtaaaaattgtttagtttaattttctttataattattaatattgtaattatttagaacatcttgtaaaattttaaaaaattcaaaaaaaattaacatgtcaaaaatagggttcaaatagtctaattcacacgcgtataaaataaaacgtgacacaaactatttgaaccgtatttttagtttggtatatattgtggaaattttacaaaatgttttaaataactataatgtagacaactataaaaaaattaaactaaaaattctcttagataccaaaatagatagatgtgcataaataaacttctttaggggtatattgtaaaagtaggggtatacatcggtcggtttggtcgggttatagtgtatttttaccaacccaatataaatgtcgggttgcaaatatctaattgcaacccgtccaatgaaaaaataaaaaatatgtaacccgctcaataatttttgtcggtttggccgggttaactcgtttaaatcgatctttatttttttattttttttattgttgttaattttttgtgttcaaataattaatttggaaaaataagtgtataatgtctgcctttcaaaattaaaatagttatagtttaaattaatgttaaaaaataaatataaattgaataaatattaaagtattaaactttatttttcaaaaaaatagaataaaaaaaatatactcatatgtaatttctaaatttcaacttcaatattcaaatacaatcaaaattatcaa

SEQ ID NO: 128986 - DNA, 721 bp, Cannabis sativa
cttgcatttgaggcctccatgtataaaatggttcgcactatcaagtctactcttttgcaccattattctggggattctatgcctccatctgttgacatttctgtgcctgagtttcatagagattcatttggagcatcctctgatgcgtctgggagtaccgcacatgtgcagggggagccatctgtattttcccaagtctctagtccaatccaacaggatctgcatcatacagctgactcgtctcaagtaaccactgcaacacccttggtgtcgactgggccacctttctagggggagtctaacaaagaacaggaacaagcagctcatattcaatgaagggggagatgtttgtacttaagtttttttttgaaatatggatttatgggttgttatgtttataattctaaagacatttttcttgttgcattgattctgtgttaatggatgacttttgaggtcatttgtctttagtttgtttgtgtcattgaacataatctgtcaagggggagattgtaagtgtcgttatttttaatagattatttcaatagaatgtctagtcgtatcaagcgattttagtctgttacatctgcacacctgccttctgttaaagtcaggttgtgtctgttatgacttaacggttagagttagttgtggttaggtcggctgatctactgcatataaatagtctttgttgttctcactacaagaatttcagtcatta

SEQ ID NO: 128987 - DNA, 868 bp, Cannabis sativa
  modified_base (42)..(52): a, c, t, g, unknown or other
  modified_base (810)..(824): a, c, t, g, unknown or other
atggggttccaactcaaaaccaattggcaatgagtggagtannnnnnnnnnntatatatggctcaatattcttacatttgatccatgtgtgacaatattgtccaatactcaaaagggtattttagtcaatttaagcatgctgattactttttctgataaagtaaacaagataaattactataattctattttcgagaaattttagtaaacaacatattataaatattgattctgattattcttcattattttattttgatttcaaatactgtatagtaaatatgccataaaagatgtactttaaacgtagttagggtgcgtttagaaaaatacaatataattaaatttgtgtgtaattaaagatatttaaaaataatagctttttttttttttttcttttctttctctttttaatctattatttatatatgtacacacaatcacacgttaaaaaataaaataagtataaagtcaacaaatgtggccgcgtgcatccacaggaggaccaagatacggtgcaccagcaactactagatcatcaggcaactctctttcttcaagcactgaataacctgatagcgatgatcaagacaagagattgaaccaattaataatcccattaatttacatttcaaataatatatttttttctttaatattctaaagtacagtatattatcttttaaagaaaataatatatattaaatttttaggaaaaaaaaaacatattccctttcaaaaaaaaatgttaaaaaaattgtaattgttaaaaattaaacaaaaataataaatataggtgccgtttggtannnnnnnnnnnnnnnaattttttaatcacaaaatgaaagcaaaatttttgtttttaaaa

SEQ ID NO: 128988 - DNA, 2370 bp, Cannabis sativa
atgaatcagcgataaggtatacttactggaggcgttgatagatgattctttatgtttttaaaggcttcctcgcactcgtttgtccatccattcaaaattttttgttgttgcctccctcgcaacacattgaagaatggtaagcacttgttggttaatttcgagatgaaattgctaaagagtggctcgggaagtaaacccagtactatcttagtaagcaccgttttgacaaaggcacaatccaggtggctctaacaccaagagaaaagatgactctagggaatcagccaaagataagaaaaaacaaaagaagcacaataaatacatgccaattgacactatgtatactaagcttaatgaaacttgggaaaacattttcctcgccaatgagcacagggttgcatttcgcaagcctgagcccatgagacatgcgagacataaaagggatgcaataaaattctatcgatttcataaggacataaggcatacaacgaaagaatgtcgtcagttgaaagacgagatagagagccttatctcacatggttatttccagcagtatgcaagacgatagggtaatggacaaaactagccaaatctgcccaataatccagtcaaccaaagattacaacctcctcttatagaaggagaggacattttggtcatctcgtgagggccgcatctcgctggagaaagcagtaatgcccaaaaaagatatgtcaaggaaataaaatacgagcggtcaattttcgctccagaatcatctaaaagatcaagactaaagaacctctagttgtatttttggaggaagacacaaagcacgtgaggtatccacacgtcgaccctctcgtcattacaattcggctcgtcaacaaaagaataaaatgggtgttggtggataatgggagctcggtgaatatcctatacaaggatacactgaaggaaatgggattgcaaaatgcaatgttaaaaccttgcatggtgaatttggtgctttcatttgagaattactctttagagcacccgtttggtaagcgggaggtcttgagttcaactctcaatgaaagtactaaactgttaacatagactttcgttaactaatcaataagcctttatcataataaattagacacagaaactatacgaaatttgagaagaataataataacaatagtgacaccaggtttttttatgtagttttgcagttaactgtgcacagtccacgagtctatcttattaagatatttttagatacagaattatggttttacaatcagtgatctttttcctctcaaagattttttgtccctctttctgtataatctgcccctatttatatgaatataggtaggcaattatttacatttgaatttgaaatacataactgtttccatgaaacgtggactttgaccacgtcctattttaacacgtgtatagctaaaaattcgtataacagtttgttattctcatctttgaagtagtggacatggacgtgggataggagcatctcgctagaggcatctcgctttgtacatagatgaatgaatgacttgacctatgtgtattccagcaatgggatgagcaccagtgttctgagcaaacttaagagctgttgtttgaccataaggccttgcagactatacaatcatgtcctccatgtttccagttgttatacttaattattatttatataagtgtttcaacagccgattttcctcgtcaatatcttcttacatgtagcgagttaggtgtcttgctatgcactgtttgtagctccctcgggattatgccttccgaggcaagatggtttctcgtcaatacacgaattgatagtttgtgtatccgtgtcttgcttaagactatacagtcagcgagttatgaatatattctattaattccatatttaatgagttattccattttgcatttaatgatataatcattattatatctgttggttcacatttcacgagattgacacgtgtcactttctgaagtacagtcaaatttcgggtataacactctacgatatgaattacataaaatcaatattgttgtgaactttttccaaaaaaagaaaattataaatatgaatttgattatattaatcgaactaccactatatatcttttgtcttcagaaaatataacaaaaggtgttttctttccaattgaagtaaggtgtgtactattattattattgactgaacttacacgacactagactaattataatttgattgaagttattcacttattttgtgtattttaattcgattttatcatacataactgttgaccgaggttttcggcaaccagttaagtaatatataagaagagctgtagaaaatttaatgcatgggatttttacgtggtt

SEQ ID NO: 128989 - DNA, 2636 bp, Cannabis sativa
agaacaaagcatccttttatataggctcaatcttaagcataggcgacctaggcctgtggctaagggtcatctagtccagagactcaatttttttttttcctttttaaaaacataaacctttttttttactaattttaaaaaatatcatattttttcctaaataaaggtctaaaaatattttgttttctataacccgttaaattttagaccggtcctacttttttatagatatagagctgaatattgactgttacaagctaacaaatttacaactgaaagtaactgaattaactaacaaacttgagtgtccaatcttgaggtgtcttgagttgtgccatctcatcatagtttttagaatatgtaaagacatataaaacagtcaacaaaatatcacacatgaatagatttttttttttcacaaaaaattccaacaagagcaaacccaataagaaaatgctcaaaattaaataccactgataaacgaataactatttcttgtcacaatcagtgaatcaaaatagacatattttgatgaaaattagctaaataataagatttttcttgaaagagtgctcacaataccagtatttgccaataagtagtatttacatatatataaaagaatcatgcaaaattaaaaaatttactgaaagtgtttaagcaatttgaataaataaatttacatagggagtgtttcaaaagaggtttgtgttacaaatgagttttatttttttaagtttaattaatggtattgttaacaattttttacactttcatattcccttaagccaagcaccctctaactcaagttcgaccttgagtacaggcggactaagcttgtatatagagcttacctagcttaggagtaaaaaaaaattcctcttaaaaatataccttttttttttattgaatttaaaaaatatcactctttttttttttttaaataaaagtctaaaatattattttttttatgaccaactatattttagagttgggtcctcctctaactttattctcttgaagcccaactcacataaaacatatgacatgtttactaataagtaatgggaatcaatggtaaggtaatcattctcttacatttgtttacttacattatttaaattaggaaaaagagaacttgattaataagggaaaaaagaaatgaaaaactttccccaccaattttgtaaggaatgtcattaagagtaatggattttaattatttttattttattttttaatattaaatataaatgacaattatgtcctttaaaatatatcttataaaataactaccatataatatagtttaactcaaaaggacaatttagttaatttaagcatttcgattacgtttcctaataaagtaaacaagatgaatcacaactattctatttccaaaaaaatttagtaaacaacatattaaaaatattgattccgattattttccgattatattttttcattaatttattccgattccgaataactatatagtaaacgtgccataagtgtgatctaaaggaaagactcttctattgccaaaagacttgctagtaggagagccatcatgcactttactgtgagtaagcaccaagtgtttataaaaatgaaattagagagaacaattagcattaaaaaaaaataaaacttgcaaagatgatagataagtaattttgcatttaattctacttcaaatggaagaaagaccatctttcacatcttaaaaattcctaatgcttatttttcaaaaatacagaaaaaagtgaaaattaattaataaaataacataaaattaaatatatttttaaaacacacattcttatttcttatttttgtaaagttagtaagtataaaataccacatagtgtaagaacaaacctcatgtatctcccaagaactatttatgaaatatatgtgtagtaaaataatgatttaaaaaatatctaacactcaaagaaataaaatattattactatttattaaaaataacaaaatcctaacttgatgtacgaattgcaactacaaaacctatgagataacttgagcctaataattcatcttgtgaattcgttaagttatctcataaataatgtgtgtacttcatatatagaattatcaattaactttattaattattaataaatatgtatacttcttatataaaattattaattaaatttatataataatgataaataaatgtgtatgcttcttatatagaatcatcaatcaaatttattaattattaataaatatgtatacttcttagaatctgttcgatttgttattttattattaacgaaagataatagttaatagaattaattttccatagaaagaaaaaaatagaagaaaagaagtgataaaattttagtccaccaaaacataatcttaataaataactaaaaaaaactttaaatgtaaattaaatactgggataattatataaagagaattgctaaaaggatctattggtgtttaacaccctcttcagtattatattgttaagtgttgtgcaccaataacaatgttcttacataaaacaccaatttttataaaaaatttaaatttttatgttcaaagtttttttttttatatatttttacggtattctataaaaaatacaagaaaat

SEQ ID NO: 128990 - DNA, 892 bp, Cannabis sativa
ttgtaatttttaaaatgataaaaaaataggagtatgttatttttaatataatttttagaatttgaatatagtttttagtataaataaatataaaaaaaaatgtaattaattctttaaattgaattattattaaattttatttctagttattggaagacatatagttatataatgaaatttccagagaagagagagggtagaatattgtttgataggagggagattttttccttgtaaatttaaaaaatgtaatcctccatttttagaatgatataagaaaaagataaaatgaatatacaaatatcaaaatcatcttttaaaaaaaataataaatattaatattaaaaagagtttttggtagctaaaattttttaactattattttacttatatttaatttttcaagcataaattttggcggcaaaatttttaaattactaaactattagtaaatttaaggtgtgcttcagttaattgtcaccataaattgtttatgtatacactcttgtacatgacacgtttatattggtacacttgatattattatcttaaaattaaataaaattataaaaagagttagttgcagcaaaattcctagctaatattttttactttacttacacttaacccccaactcaatttttggcactaaaactctcaaaatcataataccgttagcaatttacaatttcttagctgttaagtaccatgtggacatatgcatgtgtacacaggatattatctatgtagacacacaaaacataattttattggtccatttgaataaattttttaaaactaatctaaaattataaaaaaaaaataaataaaaattcttttttttttttctttagaccctaatttcctaaagtaaaaatgcaaaaaaaaaaaa

SEQ ID NO: 128991 - DNA, 902 bp, Cannabis sativa
aaaaaaaaataataatccaaaataaaaattaataaattttttaattattaatatcattttattttttaaaaaaaataaatatattattataatgtgtataaagttttaattgtatacgagcagttttatcgtaagagtatatactttacatcataataaatcaatggtcaaaaaaagttccctaccaaagaaaacttttgctaggtcctataccatagtcttgcccatatatataaaaagaaaatttaattgtactaaaatatttttttaaaaaaaaaaagttaaaaatatataaaaaaaaattattatatataaaaaagaatatcataacaaattttaaattgtgtacatttttttttctttttcaataataaaataccaagtaaaataatatatcaattataactgcagaagctgattttatttatttatttatttataaaaattgaagcaatattaaaataattatattaagataataaattaataaactcattaattctatgtaattaaaaattaattttttaacaaaaaaaattagtaacattacaagtaccaaaactcatatataaactgtacatgctttttagaagctccaagacttcaccaccaacccactaccaaaatcaaaaccaacacaagaccaaaagtactaaccagttataaattttaagaagctttaagactcgaccatcaactcactacacaaaacagttattatccactaaaataaaatattagtcgcaataaaaatagaaaatagaatgagaatttttgacaaaatttctatcatcgtcggaaaattcgtcgctcctgaaaaatcactgtagtactactataaatattaagatttgtaacggtcctaaaaacgacttttttttggaccgtcgctaaaaaaatta

SEQ ID NO: 128992 - DNA, 536 bp, Cannabis sativa
tgttttttgaaagctgcttttaaaaaacaaggccaaataagctaaattgttttcaaaaaataattttctatttttaaaaacaaaaaatcagtttttagttataatgccaaagctacacttaacctctgcaaagtaactccctatccacataatgcatctctactattattagaatatctctaatgaagaattatatatgtggtatattgtaattttttataatattttgttaaaatttaattttaatggtaataaaatgtgtattaaatttagcttaaaaaattgtacaaactttaacgtaaacaataggatgtactaaattttaacccacaataatactactttttttaattacttttttacttttcattattactatttattaataaaaatatttttatatttatacaatattaaaatagtataatataaatatagttaattaggattttttctcccgaacttcgacatgtaccaaatcatgctccctgaatatttttggccgttaaaaattccccctgaactattgagattgt

SEQ ID NO: 128993 - DNA, 552 bp, Cannabis sativa
tctcaaaattactacacaatcgccgccttcaattcacctaggatttcagacaatactcataaattgtccaacctttgctaatgctagatcactcctaaacataatattttgttatctgaatcaattagattaatacctccattgactactcatgtcgtacattccacttgggaatatcaacaatttaactcattttgttatttctctaatttgtccattcggtcaaatgggttaccactaaataacatacatgcacagtccattcagatttcttgatgtctctaactgaatgtacagtatttaaaataattatcaattgaaacaacaattgtaatatttcccataaaattctaatttgagttggctgaaggactgatacccgagttcccttgagtcaataccagcacttctaatttgagctggccgaaggaccgatacccgagtcctcttgtgcaatgccctaatgctaaggcacggtacagtgctttttcaattacagtgttgtctttgctaatcaaagaattttcttgaaaaatgtgtcaaattaaaact

SEQ ID NO: 128994 - DNA, 611 bp, Cannabis sativa
atgtcaggattagtcgagattttagagttgaccaaaatacccctaggtggtaaggttacttttggtgtaggcaagggcattatggtctttttgccttttcagattttcgtcctttaatgagaatttatttgattaagtaatctgattttatatgctgatattattagataaatcatgttttaatttcattttattaaattagaggaaaacacaaaattgcattctctctttccattctctcttcctctctttcgaaccccatagaacccagctagggtttgagttttaactgcttaattcaaggaattccagtaggttattaggtgatccaatccaaggtaatagctttagcacttctctctttaatttccttatggtttttaattgagtttttgcatgatttgtgagtttagatgctgtagtagttagggttgtttgaaattgttttttggagtatatttatgatgtaatatgttgatttgaagtggatttaggggctgttgtggtgtttgagcaagctttgagtctaagagctcaggctttgctctttaatggtggattttgattttgagcatgttaggttgttctgttgcttagaatatgtttattgg

SEQ ID NO: 128995 - DNA, 824 bp, Cannabis sativa
tataatcctagccatggtcgtggtagatctggaaacaactataaccatggtcggggtaataatcagcaccctagaatggcttgaggaggtggcacaagaggaagaggaagagggggcaggcacaacaattccaaacccacatgccaggtgtgtggaaaatatgggcattctacttttgtgtgttacaacaggtatgatgaaagctacactggtcagccaccaaacagtgaacactcacaggaaaaacaacaccagtatgccttagttgctacactagagactctacatgatgaaggatggtatgttgacagtggtgccagcaaccatttgacatctgaggcaggaaaaatcaacaacaagactgactatggtggtaaggagaaagtaactataggtgatggtactaagttgcatatttcaaagattggaaataccactctcactactcttactgactcacctctagttctcaaagatgtgttacatgtgccctctattgcaaaaaacttagttagtgtttcaaaactaacacaagacaacaatgtatcaattgaattttttgctggtttttgttgtgtgaaggatcgaacagggaaggtgattctgagaggagctcttaaagatggtctctacagcttgggaacatcaaccaattgctcatctgtttgtctcaaccaatctcatccatgttcgtattctgtccaagttcaacctactcaaaatgttttttaagttccctaaaggatacctggcacaggaggctaggacatccctctctatctgttttaaaaatgtctaatttaaagagttcaattaacgaaaag

SEQ ID NO: 128996 - DNA, 963 bp, Cannabis sativa
aaaactggtttgaaatgtaaaaataaaaaacctctattaattattaagagtaaaaaaaagtttagaaaaatagttactcatattattaaaaaaatatatataaaatattattaaaatttgaaattgaatacaattttataacttaattattactaaataaaatataatcgcacgcgaaacgcggtttgtttcctaattacctaaaattacattaatatttcaacacgtacgaattttttttttattttacgttttgaacttttttatttataaaaatatctttttagtaaaaataataaactgtattttcggttgttttataaattatttataattacattatagttgtcataatgttatttaattttctagttgtttatgattcttttatagttgatttatatttgtcggtatgttgatttctcattattttttatttatttttttttttactttttgctaagcaaagtgtatttttgtaaataaaaattttagactgtaaaattgtaaaagacataaaaataatagtatttatgaacattctcatcagaaatagaaaaaaaaaacctggtgtcttaatttaaatttgaattaggagactaaataaaatttaaaggccttaattcaaatttgactttctaaaaaagattcatttaaattaaattggatgcaaaatgtaatgagagaaattgaagaatacttcattttttaatacattaactaaatttactttcaaataaaatttaattcaaatatactttttttttatgagtactgtacccaaattatcctcacatactcaattaagacacaatttcaaacataatagatttgtgttctttgtagatggatgtgtaggtttgtaggaaaattcgggcaaaaatttgattagagaataataaaaactattgtgaagtgatatgagtaaaattggtagaatgattgaaaaaaaaaaaaaaaaaa

SEQ ID NO: 128997 - DNA, 1654 bp, Cannabis sativa
  modified_base (1624)..(1628): a, c, t, g, unknown or other
ccacgtggtagtacaactcactaacaagaagtctaagtcagtacctcagccaacggggaccccgacactcaaacgagatatcaagtgaaagaccagcttcctcacagaagctgacaggccacccctggctggccctatggtctgttagcctctggacaacaccaacgccgaccagcttgctccctgtaggtgtctggctggccaggagaagacctcataggattttttgtataattctacacgtgggctgcgagttgggctgcaaattgggccctaatagtccaatataaaacagttggagaatatctatgtttaagggtatttttgatcttttgtaattaactaatttaatatacaaatatctaaggattttagttataaattaggatttaggctttcctatataaaggtctcaactctaacctagaaaggcgaagtctctaagtctcattctagcctccaagtgataaagttctaagcctaagtctgataactctctctcttacacgcccatagaatgctagccttgattcctactttgtatcttcaaggaagttatatcagatctcacctaaagtgatatgaatagtattatctcttagtatcaatataactaaaagaggagtaggttattacccgttattaaaggagaccaaacttctataataattatgtgtgttttttacatttttattctaattatgtaacatgtaacaaatattagattcatactctctcttgctgttggttgactattttttgaaattaacaatacccattcaaacctgtaatatatatgttcaggggtacaagtgtaaattttttaatggggttgagcacggacccataactcacgaacccgttcagaccagattctaatcggtgtacatcctctctcatactcaatacttatacataagcaaaatcaaaagcttaactaaacaagtaatattttaatttatgagttaaaacaacaaataaacttttgaaaactaaattattggaagatttaatttgcactcacacatcaaatcaattaaattaaatgaaagtagaaataaaaatagaatcatcaagaataataagagtcggtggtttcctaatattatttgtagatatatccataaattgaagatacgcgttttttttctcccaaaatggtgaggggcattcattcttaatgtcgagtgtcggccattatatattttcaattttatataattaagtgaaactaaattgtgggaaattcaattaatgaacgcatatattatgcatgagttgagaatacgtagcttagggcggaccaacaaagaggcgagacggaacagtcgtccctcgaacaaaaaataagaagaaaaatatatatttaattagttataacatatatttttaaataaaattgatatttataaacataaaataagctttggtataatgataaagttaatttttacacataatggacatcatgagttctaatctaacataagcatatttagtatttgtattttactttttgaacatctaccattattttctttttactgtccactacatataaatttgctacctttagtgaaactttttagtaacaacatagattttttgtgactaaatatgactnnnnntcacaacaaaatattacttgtgacta

SEQ ID NO: 128998 - DNA, 589 bp, Cannabis sativa
ggcataaaacccaacacccatgtccccactactatttgttttagatatgtaatacctctctaggattatggggaaaattagagagaagcatgatttcaaattccaccatagatgtgcaggcatcaagataaaccatctttcttttgctgatgatgttctcttgttttgtaatggtgactttaagagtctttattatatgtttcaaggcctcaaggtattctctttaacttcgggtttacagtcgaacccctcaaaatctgctatttatagtagtaaaatgccaagatcagacctgaatatgattgtaaatgcctctgttttcacaattcataagctaccatttacttacttggggatcccaagttgctcgaaaagaatttcaggtaaggaatgtgagattccagttgaaaaaatgacagctaggattaaaacatggagttagagaaatctatcgtttgcgggtagagtaaccctcataaactctgttcttctcactattcatacatattggagttagcttttattactacctaagaaggtgatgttaggatttataaaacactcaagaaatatatataaatcacagatc

SEQ ID NO: 128999 - DNA, 1309 bp, Cannabis sativa
  modified_base (205)..(230): a, c, t, g, unknown or other
  modified_base (438)..(442): a, c, t, g, unknown or other
aactatttatttaataattataattaaatattatataaaattttcatgtatattatttattaattagactccacaaggtctcctaattaacaaataaaccctaaaatcctatttcttcacaatcaactcataccttagtgaaaaattcataaataagacatattataatttataattatcatcgattaattaaaatcaattaacnnnnnnnnnnnnnnnnnnnnnnnnnnctagtatggggaccacgggcctatttaactgagcttccaatatcaattgaatttacaaactaggtgatattgaattgaacagatattacgataagtttattatatctgatccaatttcaatatcggtcccttcctatgcatactccatacatcaaacccaagcttactttaaccaatgccctcgaaaggacatagcacttatccaagnnnnnagtaaactacattgtagattatcctagcagttaaaccctgtatactataaatcataggaatacatttaattccacaatcttgattaccttccactgtgttgacaacacaataaacaaaaatatcaatgtgataaggatattgatgaattcataaattaaataaataaataaataatcacattaactaaataacacattaaaaaagtaataaaaataaatctatttctttattgataaatgatttaaaagattacattgaaatagaattttatttaggacataaagcccaatagaccctgctccacctgctgtttcagcctctgaatttcttcttcttgttgattaatccgggcttgtatttctgcaaacctttgctcccagttcagtggagctggtggttgactttcatgaccacccctttggaaccttccatggctctgccacgtccacagggattcaggggattttgacctcgaccacctctagtctcaaccacattaacctgtctccttatattttgttgggtctccatataatatgacttagcctgcgaacccataagtcaggtaggtcaaatagcgatctcatatgctttatatatcatacttattgattttaagacaatgcataatcataaactattatgcttcctaaaatccttttctaatcacataaataataaacaagtaaaaacttactgaaccgttagtcaagcttttctctaacgatgatagtacatgtcttgacgatcttccgtagataacctggaatgtataaattctattaagtctagaagatatgtatttgttcatgattatagtgttgtcaacacagtgaaatataatcatgtttatatgttcgaaagtt

SEQ ID NO: 129000 - DNA, 529 bp, Cannabis sativa
ctaataataatttaaattatgtaatccgcttctatatttattttattgtgattcaaattacttaatttattaataaaaataaaaaagaaaaataaaaaagaattgagatatctttatttatatcacttatttatatccttatggctactttaactttacaatttattacagctacacaccaatttattaaaattaatttgctctctcatttaattttatgtgaagatcaagataagagtgatgatctttccttttgtggaatagttttggcctattcaaagaaaaggttttgctttattaggctttcactttggacttactagctagttgtactctccatatttacattattaacttttcttttctttgcatactttgcatcaaaatttatctcacttcgatcaaagtgccttttgtttatttcacaagattcttcttttcttttcttttttccatttgttctctcttttaaaatgctcaaaagtttatatataattatttagataattgttaaaaaatattattagtg

SEQ ID NO: 129001 - DNA, 895 bp, Cannabis sativa
  modified_base (64)..(70): a, c, t, g, unknown or other
  modified_base (849)..(856): a, c, t, g, unknown or other
ataggtaaatatctatttttttttgcttaattatctatcttattttaaattttgattattttannnnnnnttaaatttaaggtcagatattattatttttgaaattaatctatttttttttaataaattgacttcatttaaattttaaaataagattattataatctttaagttgagttttgctcgagttaaagagtataaattttgataagccaaatgcccaaattataaggtccattgtcgaaatagattgtttaaccggttgtgctctatgttaaatcgaattagagaatctccggctagcatagttgaattcttttgtcactttaaaatgtgaatattgtattatatggtgcatgtcccattttgcgggcaccttagcatatgtgttaaaatgtggatgaattttttccattcaagcttgtgtagactgatttcaactacgaccaatcaagatttacggagtagttgaaacgagaaacttgactcaagggaatggtgtcccttgcttttatagtagcagtcacattgatatttaaaagtttgaattggtcttaaaaattattataatcgttgaaactcaatttataagaaagtattaataaaaatctatgaaagaaataacattcaaaaaatatcattagtggagtatcaatcaattctccaaaaataatgaaataaatagcaatcaattcataaaattgtatacaacactcaatttatttgaaaataaaaaaatagcactcagcttatagttatgttatagagaaagtagcaatcatttaaagaaataggttgtaacaccctaaccagcataggcgtgttaacgtgatttttaacgtactgtgnnnnnnnntgctaatcaacgaggttattggaaaacgtgaataattaa

SEQ ID NO: 129002 - DNA, 903 bp, Cannabis sativa
  modified_base (88)..(90): a, c, t, g, unknown or other
aattagataaaagtccttaaatttaacaatcttaatagttcaggaggaatttttaacatccaaaaaaattcaggggcatgatttagtnnntgtcaaagttcgggagaaaaatttgctaattaaccttttactaatgtgacgattgtttatgtactaaaccgtctctcacgaactttattattattatctactaaatcatactaactgaactttaatatgtaccaaattgtgccccttaaattttcatccacgttagattttctttagtaaaattagacaaacgtttttaaatccaacaatctcaataattcgaaaatagtttttaatgacctaaaaagtttaggggaaaaaaaatctacattagccttatttttatatgacaatttatatcatagctatcaaagatttttttaacttattgaaaataatgttcaaactatttgtgaattataattttgtattgtagccctgtttgaccgagtttatgttttttttacttttagctttcaaagctcttcatgagaaatctactaaaattgttttttgttaaaacagttttttaaagttaaaagctgaaactcgttagttatccaaccattaaaattatttttaaaagctcaactaactagggtctgtaaaaattattttaaattttttaaaatttgtagaatattttatctaattataatacatattatcatataaaaaaaatgagattttaactatttaaatataaaaaacacgaagacatatattgagacaactaattttaaggttgtatagcactatagaagcaccctgtataataagaaattgtaacgccccagtattttgccttattttacaaaaatactattttcatgcataatttgaaaagataaaaaaaataatttaaatacaaca

SEQ ID NO: 129003 - DNA, 679 bp, Cannabis sativa
tatacagtagcataatccttcctaaaagtagcttcttagatctgtaattcagcattcaaaagattctgatgcactagagtttgacaagcatctaatttctccttagccattgcattagcagcaggcaaatcagtaaagtattgcttatttagctactttaaaagaggcttcagacctttcaacttagagaccacttggtacattttagtaccaatattcttttcctgccatcaactttcaactagccttcgatactcacgatgagaagaccacaacctgaaatatcataaaggtttctttcctcaaggagaagctgtaaaaaattgttaatacagttggggaatggtcaaaaaggcccttattttgaaagatagcctcacctggagggtagaagtttagccaagttggatttgcaaggaccctatctattttagaataaatcctctcatctccaatctgcttattacaccatgtaaaagcacaaagcaagaccagttgcgaaaggatactcacaacaatacagagtcgactacaacgaaacatttgctccagttgcacgcctcgacactattagggctttaataggtctagctgcacaaaagaaataaaagatttttcaactcgatgtgaagtcggcattccaaaatggttatcttgaagaagaaatttatgtggagca

SEQ ID NO: 129004 - DNA, 1314 bp, Cannabis sativa
  modified_base (352)..(361): a, c, t, g, unknown or other
gggagtatgtaaaaaaagaagtaaaaatgatagaatttaaaaaagaaggtaaacataaaagaagacaataaaaaaagggtatagagtctaatttcctctaatttaaaagttcatatctaaattttgttaaacttttagtaccctacatcttcaactacacattcatatttacatttttttccttatcagatttcctattattttttcttttttttaacccttctttattattttatttttttaaggtatttgtattttattggagttttttcatttataattttataattaattttttatttatttatattgtaacatcaaatttaattcacaattattattattattattnnnnnnnnnnttattattattattattttttgataattgtacacttctcttgagaactcattatatttgctccataaaatctaaatttctaaaggagaacattttataaacccaaagttaggaatcataacctgaaaagagtttcaaacatataatcacttttacggtttatacgaagaaaaaatattattattattgtattctagcagcaaaaataatttaaatatagaaataatttaacctcaaaaaataaaaataatttaacatcacaaaatacaaaccgtataacctcgaaatggaaacaactagcatttaacctcatatatcaatatatatttttaaatggaaataactagcattgaaaataaaaacaattcacattgaaaatagatcaacataactttgaaatagaagcaacttttataaaaataaaaatagcataatctcgaaataaaaacaatataatctcaaaatagaaataatttttataaaaataaaaatagtatacttcgaaatggataatttttataaaaataaaaaatatgtaaaaaaaaacatggaaagtgaataaaaaattccaaaatgacataaagggaagatttcccttttatttaactataatttttttttatttcttttttgttttttttttcatcaactttttatttttctttttgttcatctcagtgtttccttagtccttttttttttcattctgttttcttacttattactagtgagagtactcgtattatgcacgtgaggcattttttagtttttctttaaaaataattattttgaaagaagatacattacttaattgttataataattaaataaatattttttaaaaataattatacagttttacggttagctatatacacattttaatatgaaagagtttatattatctttatataagtttaattgttaaattaataagttaacgaattattaagc

SEQ ID NO: 129005 - DNA, 1515 bp, Cannabis sativa
cggatcggattggatccaaaatatgaaatccgcacttagtgcgaattggatcggatgaacacccctaataaaaatataaagaatttacattaggtcgagttttatatatttctttacccgaatgtttgtatgtctttcatttagtgaggaaaattatatttttaattgcattaataaataataaagtggatagcagagaatataaaaatttctaatttcttgtttatatatttgaattaaatttattgttcttgtttttcattaaaatttgtcattcattattttcaacaatttcaattttgattgtcaaatagaaaataaaataagctattagtacttgataatcagtctttgtggaacgatatcggtcttactgaattaaactataaaaacgattgcatatacctatataatttttgcaacatccaactataaattaattcaagcctcaaatgaataattattgcaagtactcagggtcagacttggattaaggcgaattaggctcacacctgggatcaacttagctcagggacaaaaaaaaaatagtttatctttaaaaatacatatttttcaataattttcaaaaatactacacactttttaaataaagagtctaataatttttattttggaatttttacaccacatactgtaacttctaacttttttactgtgagtagaatttttttcaaaaatactgtgtaagttttatactgtaaactgtgttaagttttcattgttgttccacaattatttttagttgttctattgttgttttaattgttctgtttggttgttgtataaaaagatagtatttttgtaaaaaaattcgtgtgatagtaaaattataaacttttgcccaaaatctaatatttttgtaaaaatcctttttattttcctatggcacacccaatctcaagactgattttacaagtactattagagcatattcaatggtaaaattttaaaatatgcttggtgaggtggacatattatgtgacaaaatattgagatgttataccattggagagaaaatgatatcattctaaaaatttgcatggatgctgtttattttttttaataaaaaattgaagctaaaaagttattgtagctaaaaattagaatatatattaaataataatgtgtgagatcataattatagcatttttaaagagtgttattttaaagagggaaatttgattttttatgcttacatttggttaaaaaaataaataataactaatatttgtaggatatgacaacttttatgatatccctaaaatacctccatttacatcacccccatttacaccatcggaccacccatcggaccacccatcgggccacccattgggccacccatcggaccaccgatcgggccacccatcggacccattggaccaccgatcggaccacccatctgctaccattttttttttatgtttttgtacatacaaaagtaatatcaggtgaccattggaccttattggactaccaatttttttttttttt

SEQ ID NO: 129006 - DNA, 1861 bp, Cannabis sativa
gccaaaaaatcatattcagactcctcaaggggggaccctaaacagtttaaaatatgattagtagcctcagcatcacaaccatcagagtaaaaaagagttgagaagaaagaagagattatttcaaacatagcctcaggatcactggtggaattaccaacatcatcccttaaatacctaatggtattattctttttcctatgggaagcaaatctatgaaaaaacttggtgtttttgaagccagttaacacgagcccgttgcttccaataaatctcttctttgtaaagaagagcatcaagttgagattggagatacttaagttgaacattagactctctactatcagaagtcaaagattgaatcctaacaatctctttttgaatatcctggattcgagattggaaaactggcataatagatttatgccaatatttcaaagcagagacacaggagttctgacgaactagaaagagaccaagagcatcctgattaacagaaagatgagaagaattcctccaagaatcctggacagtagtgtaaaaactaggattttcaagccaaatattttcaaaatgaaagcgatttttaaaaacaggaagcctattagagttattatcacgatgaaggacaaccttaagggctcgatgatccgaaccataaaacgacagatggtacaacatagcatgaggaaataaagtcctccagggctcagaatcaatagcccaatcaagacgctcacacacagaactattatgccaagtatatttatctccttcaaaattaagaggagaaagactaaatttatgaagaaattgagcaaattgatccatatcagtaaggttataataattactaccagttttatcatcaaaacccaaaaaactgttaaaatctcccataataagccaaggtagattaggggaggtataaaaaagtttatccaataaattctaagtaacagattgagaggaagaagaaggacaaccataaaaaccagtaaaatgaaacatatcattatccttaaaacttatattacagtcaatatggctactagaaaaggataaaatatttacataaattcttccgagggacctccacaccattgtcaaaagccaaagcaactctaactcaatctatagccctggcacacaaccgagtttccatcaaaaaaaccacctcaggacattgctctttcaccaacagggagagtctcctgaatgcacgcgtactccccaatccacgtgcattccagcttaatagactcatttttctgagcgggtgtgcaaagcatcacctgcctgttccacatgagcagtaccaacagaagactcatcctccctatcactagagcgagcacgcttgagttgagacctcatagagcttccaaccacaacaaggtgaggctggaatgaaggccgctttacaccagaagcagaggccaaacctttcccacgaacatcaggaccaggttgaccctgggagaggttaacgtccatgctagtactatcagcaggggcaaaagacaaaacatccacttgactaacatggctaacaacctcatgggaagagaaaccagcaggcagagcggtcacagggatagtttggctagcagccacaataatagagtcagtcgagtatgaagtaaaagcagagggcctcaatgaaatgttaaaggtgggtctagtatagggtgggctaacattcgaaagattgggattgaatggggtaggcatcatgacaaagcatcagatggttgaggagcaaaaggtctagtgaaattggcattgagattcagaaaagatggaaaattaatagcctgaccagaaaagtgttggggggtaaatgttggaaatttattttacc

SEQ ID NO: 129007 - DNA, 1411 bp, Cannabis sativa
  modified_base (792)..(793): a, c, t, g, unknown or other
ttattcggaatttctcaaaattttataagttatcttaaatagttataacgtaaatgaatataaaaaaaaaaattagactaaaaaaattttcttgatactgaaacaagtcaagggtgtatcaatacatcccttttaagaggtgcattctagaatcacccaaatatatttatgtttttattataatttttgttcagggaaatattacattttttttttactaattaggatttttaattaaattttggcatgtatcaaattatgcattataaacttttctgatagttataaattacccttaaactattgagattagttaatttaatgatttatgtgtaatttcattcaattcaatgcgccaattatctatgtacaaaatcatattttcagaacgttaattttttttatattccagtctactactcgtcatgtgtttgctaagtcacttaattattctattaaatgataatataaatgttatttaggattttatcctgaattatgacataagtattattgtgctcctgaattttttagactaatttacagcattaaatatagtggaccatttttaaaaggctaaaaagttaagaggcacactaatacataagtcataattcaaaggtaaaatcctaaataacatttaggagaaaaaatagatgggtaaatactatttttgaccctgtattttacaaaagttaccaattagactctttgttttgttaaatgacaaaattgaccctgtattttctaaaattgtacaaataggactctgaactgattttttatcaaaannaaacttaataataatatgatctagagatgttatgataaaactggttacattttcttgtattagaaattttcttaaaggtgattatattaaaaaataaaattgttaaaaattgagctcagggtcctattttaccattttgaaaaatatagggtctattttggtatttaataaaatagagggtctaattgataacttttgcaaaacacatgatcaaaaatgatatttaccaaaatagattaattactaaatcaacaatgatttagagatgttatgataaaactggttacattttctgtatctattcgtattagaaattttcttaaagttgattatattaaaaaataaaattgttaaaaattgagctcagggtcctatttttaccattttgaaaaatatagggtccattttggtatttaataaaataaagggtctaattgataacttttgcaaaacacatagtccaaaatgatatttacccaaaatagattaattactaaatcaacaaaaactttaaacagtttggtacgaggtgttcaaaataatttgattatagaaaatattatgaaggagaatatgattatagggaaatgtgtaaactgtgtttggttgtgtagggta

SEQ ID NO: 129008 - DNA, 719 bp, Cannabis sativa
acccagcacaatattttggggaacttctataaaaatctggcgttttcttctctatttttcttttttgaattttcattgctgtgtttatttgattgttgtttgtgtatatgacttctgggttttaattcgatttgggaaggaactaatttttggggtttgtatctggttattgggggttgactttgtgttcttcagagaagaacaacgaaggagaaaaagggggctctgctagggtttgtgccgtgtgtgtatatgaatcataaatgatatataagtatctaggttatttagggtttcttaggtgtgtgttaaacgacttgtagcttataggaagggggttatcgtttgggttttcatttctggagtcaacagtgggtttggctgcggtaaaaggtcgaaattgaccttggtatattgattaacctatttctgtgtgtagggtaaatgtggaataaaattccaactctaagcattgtcatagttttacttaagacaacttaattagaggaattgatatttaaatagtatgaacgaaaaaaaaaacctttatagtagatcattatttgtgaatatatgcctccaccacacgcgtcatggtcaacggccttgttcattagggcgaaagaaaaaataattagagatggcatatatggtctaattgttgggttttatgccgtaaataaaactcatttcaatacaatcagatttacttattaata

SEQ ID NO: 129009 - DNA, 683 bp, Cannabis sativa
ctcatgtatggtagttattttctcttattataaaactaggtaacaatgtcgcatttcgagcaactgttcaaatatttatatatatttatttttaagagatattttatatattatttagatcttatgtagttatattttttattaattttattaacttatttctataaggatattggttgcagtcatagattctttaaatatttttataaactctctgaataacttaccgtgttcaagttatagttcaaataatttattacacatatttttcttagaaaggtggacaaataagtgtattgaatcctagtttcaacactataaattatttagaatttcttaaatttttagtaaaagcgtgctatcattacaattaatatcatcataagaaatctaaaaaatatatttaaatacctcaattgaagttacatttgtgacatttctcatcagcacatatacttaagtatatatgtatgtatgcgtttcattctttttttttaattcatgctataaaattggagaatttaaattgctttacaataaatacatgttaagtattttacttaataattgtggaatatgataaaatttatagggatatgattttgtcctgttattgtactttcacggattgtaatctgtgatgtacggcagcagtcagatgagggagttatttgatctgacgg

SEQ ID NO: 129010 - DNA, 1221 bp, Cannabis sativa
  modified_base (48)..(49): a, c, t, g, unknown or other
tagttaggagtacattcctcaaaatttttgtaattttttttttaaaannaaaaaaaaaaaaaaaactagataaaaactcaatgtcaactcaatacttctcgacgacgaatcttgatgtattcgttaaaaatgcataatttatcacacgagtgtctttttgaagtgattttttttaattagggtatttattttatctatacttagagttgtgtctatgcacttttgagaagtataaaattttaaaaaataacaaatagcatctcaaacatgaggtatgatcatctccaatgtgtaaatctcgaacaaaagcccaaattattaataatcacttcaaagagtcaaatattatgcattttaactaattgtatcaagattaattgaggagcatcaattaactaatcgtgcaaatttttaatgtttttgattgaaaaattggatgagatatagatgcatggtgatgtacgtagttttatactccataggagaagagagaggagagggagagagcaaggaaatagtacagagaaataaagtgtggctgttatttagagaaatgtactttagtcataagaagctagaagctgaatcatgcattatataatattgtttagatagatagagagattatatatgttggatatttttgttatgggatgtcatgttaaggatgaaacctcaaatttcgtatttaaatttaattatgtataacttagaacagtttgattaaattgataaacaatttttaatcaaatttaaatttaatgtactaaatatatatactaaacttgtgttatcaaaacataggatactaaacgactatagtttcttctaaaaactaaactaaatggttaagatcatatatattctacatataatcacccttaaaaaatatcttaaaaatataatttattatataatggcccctctagcttatgtgatgatcacattaattatatgtaaggtcagcttttgcctagggcgccttaaattttttaaattattattattgtttttcaacaagaattatttaaaaatgttattttatatgcaaaaattgaaaaaataacaaatttttcattgagtcttactatatgcagtatatgcactaacccacttggtatgaaatgataactttatatgcataaaaagagaggagacatttaattttagtttgggaccctaaacacaacacttgcattcgataattttattaaaaaaaaa

SEQ ID NO: 129011 - DNA, 762 bp, Cannabis sativa
tttttatgcatttaaattttattccattctattcatattcctattcctattcacattctcattcctatattttcattccttccaaccaaatgccaccttagtgtttatttccatgtacgcctcaggacaggaagtatctgaataaaagaggaagttttcatttcatatttggtctttgaaagttttatcatttaacaagtatcaaaagtctcaacttttaatcacttgagggtaacatacattatatcgattataaagttatacctctttcacaagaaataactaaatttaaagacaattataaaagtaaggagtatggcctaaagctagaacctcaggaaaccaaaaatagccactaccttattacatttgaaattaatctagcatttaaccaagtataaaagtaaggagtattgcccaaaactagaacctcagagaactagaagcaggggcggaggtatatagcaccttacgatggccctggcccccctagttcaaaatatttgttcttattatatatgtagttttatttttacggaaagttactacgtgactccttaatcaattataatagtgaatgaaaaaaaatatcaaagaacattgaaacaaaaagagtatatttatagaccataatatatttatatctatatatatataaatagtgtcttttttcgaaaaaaaaagtgagtttttctttgtaagccattcattggttttcatttattattaaatttataaataataatatatatgtatatagaa

SEQ ID NO: 129012 - DNA, 1271 bp, Cannabis sativa
  modified_base (31)..(34): a, c, t, g, unknown or other
aacacagggtccaatctgtaacttttgcaannnncatggtccaaaatagtatttacccgaaaaaaatgtggttaacataatttttttttagaacattacagagtgttataatataataatataaggagatgtttggtaggagatttttaaaataatttgattataaagaatattataaaagaaattatgattgtcaaaaaatgtgtaaatcgtgtttaactgtgtaggataatatttaattatatatttacgttaattgaattacattatttgattgagtacttgaatcttgtatattattttaaaaaattcaaataattttttattatatttatttaatgtgctaattatacataaaaataataaatataattttttattaaaaaaatatatttattaattagttattaaattttttcattgtcaaaaaaaaaaaaaaatagttattaaattttattgtattttttattaaataaaatgaacaattctatatattttatcactatattatttatttttgttcgctatgttatttatgtacatcatttatgtataatatatattattgctaataacataaaactaatccaagttaaaaaaaataatctcacagactaaatatatagtaatattttatttataataaaacataatattaatgatatttaagtttatttattattttaaaaatactatttaaattaatataatagaagagaataattcaatttcaccattttttaaggcatcaatattattctcttcaagagtagttatattactaaaggattaacattatgagattaaaccctcaaaacaaataaggcaaatgtttcatattactattctcttgctagtattaactcattccaaacagttcttaagagtatttttattactgcccatttggagcttaatattgaactgaaaatgattggatttgatttgattaaattggactgaataaaattgaattatgctgaaagtaatcatgcatttagtttaaaaataaattgaaaataaattattttatctatttcctttttaaaaaacttaaattaaaataaaaatatataataataaataaaaaataaatgattcccataaaaaaatgaataataaaaataatttatcatatttttatttaataaataatagaaatagtaaaataaaaatactgaaataatataaaattatttatgctaaataataatttaattactaatttaataaaaatattaaatttataaaatattgatataaatttttta

SEQ ID NO: 129013 - DNA, 1211 bp, Cannabis sativa
aagtaatcccacctaccaccactttccacgcgggatttttttcccccaaaatttcacgtgggcggtcaagattcccaccaaaatttgctaacttttcccggtgcaatgttgcgccggcaaaagccttacagaagtggacatgtgttctcgccatttagcggttcattctggtaaaagttattgctgaatctaatatgaagttcagcaattcatttatgctgacaacttttgctagcgcaattgaccaattgcgccggtaaaactaggctttcttgtagtgagtcttgccaaggtggcttgcatttggggagaaaattcttcttgtgccaccagttttagcttggtttcggcgagttctttggccatttcaatgactgcgggatcaagctcgtaataatatcgctcatcatctttttctttcccatcatcttcgtcttcgggaccttcctcctgtccctcattgatgagattttcatcaacgtacatttcatttcgtttagtcttttttgcaggatgctttgttgcttctgttggatctccatcgactactgtcttcgcctggatgcaagatctacgttgcccataagagcatctccatcacggccgacagttctgtttagggtgagtaccatggttgcagtatgcaacctttcatggtatcactgcttctgtcaactctcattcaaagcaccaaaattttaacccaaatttttagtaaccgataaaatataaacgaaagataaagtaatagataaataatgaatagataatgctaaattttttatgtggttggagcattaatgagtttttgtccacgagccaatattattatgctaagacgggaaaagccttgggatttatagaagtgttcgaaccctagaatttgcatgagcaattgatgaatgagatttcgacaatttgcatgggttggtgctcttatatatatatagtgatatggttcttattcgttttctcactttgccgactgatagtaaatacaaataacatattgatttggacctatttggtggagcccgacccatgaggtgacgattgtatgctgatgtagatgccacaccatattaatagctatccaattcgtatcttacaattaaggataataaagacacattaatttaatcagcattgctattaggcaccagtggtgcctagcaccttctcgacatgtcgcgttgcgattggctagcgat

SEQ ID NO: 129014 - DNA, 1497 bp, Cannabis sativa
  modified_base (1461)..(1467): a, c, t, g, unknown or other
tctcgtctttaaataatgtttctttaaagtttgttaaacgatctgcaaatagggttgctcattgtcttgctagagagtcttgtttttcgtcagaatttgtttttaatcagcataatgtttctgttgattttaagcctattgtaatggctgaaagtgtttaaataaaattttcactttgactcaaaaaaaaaatatatatatatataatttatcatataattatattttatatattctctaatatattatccattcattacttacttttagggcataaatctcaataatcccttcagatcttctttcttcatcttctccttgagttcttcacactttgtcgacaccaagcctccattactcaaacactattgatatatacatagctatcaggaataagagatcattctcttttcttgctcccatttgtgtgttgttcctaagaacattactacgactattattatatggtttatggtattgggtctcctatgagccttttacccataagcttagatattgatttggcttagaaatttctttttgtactattatccacacacttttgagaatataactctgttgtgtcgaattaaattgataaaaataaagtagacgcaacgtgacttgatggtgaacaactataaatcactggtgcccttttcatttatggtgttttatttagcaaaataaatttttcataatcctcttgtttcttacgattttcttagaaaaaatgacaaaaatcgcatcaacaattttatttatttcatcaaatatatttgaaaaaagaaaatgctatatagagattaacttgtaaaaaaaaaattaaataaaatttgattcctatttcactcaagagtactatattatttgaaattaatattttaaaaaataaaataaaatcagtgttatcttctgagggctagtttggcagatatgtgctgtggcggaaaagcagctatagctgtgctgtgagaaaaaatagctgtagtagaactgtagaaaaaagctaagctgagtgtttggtaaattataaattttaaagtgctgttagttgttaagattttattataataatgagaatattttaatctaattcattataatcataaatatatatataaaaatgtgttatataaattttttttttctatatatttttaattattttttcatagtgtaaatgtatatgcatttgataaaaataatttttaatatttttatattatatttttatcacttgtaaaaaaaattataatttatgagaaatataagttgatattatttgttcataataaaaaatataaatataaaatatattttaaaactaaataaaaagagaaatttaaatattttttcattcaaaaattatttgtggtaaataaatttttagtaaaagataatttattatagtcttttaatcaaggctaattaggatttttttttccccgaactttgacnnnnnnnaaatcatgcccctgaacttttttcgccgtt

SEQ ID NO: 129015 - DNA, 1861 bp, Cannabis sativa
ttcatcacaacaataaaataaagaaaaatcaacttttgccaacaattgtgcaacattattgccaagtataagacaataagaaaatgaaagatgactaaaagaaaaataaaataaaaaaagaaatggtgtctccaataatacaaaactaataaggtaaaagttatcatccaaacacttaaaaataacgttaataacattaatgcatccgactcaataaataaaacatgcaaatagccgagacgactacaaagagtgatcaaccccaaattaatgcacaaggcttcaacaacaaaaggagaataaacatgattgaggtaaggttctaggttgccgaggccttgacaaggacaacaataagaccatttcattttgagagactttattcagaccagcatcatagttgagtttcaaaacacttagccaaggccttctctaaagggacaccgtatagcacctacctgttgtgacggaacagtcaggctatcttgagcattagtgtagcttggaaacaatcgagcaaacccaaattctaattaatcaacaacaaggctaccttagatgagagatttattattgacatgtttattcatatgttacaaatactatatttctcaaaccaaaacatttgtaagttcatccataaattagaaaattcatagaaatattaactcagaataagtataacattcaaaaaagagagttcctaagttaaggcatcacagcaagttgccctctagcttgatgataactttttggggaatttgccaaactagcaatgtgaagtatacaataatctcacttagtatattttatgtgactatgatagttgcacaatgtaaatttatagtcgttttgcaaccataatagtcttttatagtcacatagtgtaatttatgatcgtttctgcgaccatacaatattattttactaataaatttttttgtaaagttattttgctaataaaaaatttcataaactaattttacaagtctttcagcaaaataataacctttataaatacttttactagaaaaatgacttttaagtatttttcttagtaaaataattttgtatggttgtagaaatgactttttaatgaattatattgtgcgatcataaataactattaaagtcgcaaaatggttataaatttacactgagcggtcatcatgatcgtatagaatgtattaaatgagattatttcacaaattttaatatttcacacatatttttaatttaacaaatttcatatttttataaaacactctaattttttaagtaattttatgatatatattgttgttataacaaacaaaaaaacaaattggaaaaaaccaaaactatctaatacattactgatgacatatggaatacagataagattttttttgaagaaataaagggatggatccattagtggatgagttcttttcatatattattttagtattatttttaatatttttttagtcaaaatctttactgtatgtaaccatttacgaaattataatttatatctatatataggaacaggatggacacattgaagatgtactcttgcattgatctcctcttcaaagtcgtgtagaagtaacaaaaatataatggagtttggaagctctcatgtgattgttccaagtgtgcgagaattggcaaatgatcccaatatggtgaccgtcccacctagatacatccgccttgatcaacatcaagataaaaccactattctcagccctactgtctcttctgatcaaattccaattatcaacttccaaaacttgttgcttatgtctacctctgaattattatatgaatctgaactcactaagctccactcagcatgcaagaactggggcttctt

SEQ ID NO: 129016 - DNA, 954 bp, Cannabis sativa
agttgcaatatgagtttttatgtaaaatttcgtaaaaatacaaaaaaaaaaaatattttgaagtgtaaaaatgaaaaagtctatttttttaaaaaaaaatggtcgggtcaacttgccaattcgctcggacccaacctgatacctgcaaacactgggataagttgaaaaatatctcttttttgtattcattaatcaaaaatacccttatattgtttttttttattaaaatatacctaattttttaagtagattgtctaatataccctcattctttacttaagtctagcatataatttatataacctaagaggtctaatagggacatcatccataaaagtgggtatatccaaaaaaaaaatacgaaaatagaggtaaaaattaaaacaaattaagtaaagtgagtatacaatgttattttctcgcaaacacagccaactcggtccatacacaagcagttatcgattacattttttgtactcaaacccaaaccttggtaaatttgccagttcttcatctctaatttctttcattccaaattgagttatttgcggcataacctccttaagtggccaggtttttgcatctaacccccaattctaaaattttggtggtaaaccccctaaactcgtgttctgttagcacttacccttttccatccatttttggctgttaattgccatggtggaatgtccacgtgtacactgtgtacacgtggcacaattttattggtccacgtaaataaatattaaaaaaaataattattttaaaaataaaaattaaaaaaatttctttttctttaaaaaaaaattaaaaattaaaaaaaaacctaaattcctacatttcctcttttctcttctgccctcctccttcttcttcttcttcttcttcctctatcttcatttgcagccctgaccaccaccaccacccatggcaactcaccaccatcgcaaccca

SEQ ID NO: 129017 - DNA, 503 bp, Cannabis sativa
  modified_base (32)..(61): a, c, t, g, unknown or other
tttagaaagttcttatttaggatgttaataannnnnnnnnnnnnnnnnnnnnnnnnnnnnntaaaataatttccaacaaaaagctagattaatagtttccacgcgtctaaatccaaggtcacccctcatcttcgattgacacagtgagctccacgcaattgtgtgacaggtttttcgcttctccgtatcaccccaccaaaagtgagccccacgcaattgtgtgacatgttttccgctttggttgacacagtgagacccacacaattgtctcgcacatatatttgattcaattcataatgttttattcataacatattccttctataaaaataaaaagcactcttcttatatttcgcaaagtaaaaaaaatcttcacacacatatatatagctatgaatacttatatataaataatttaattttattaatttagtttatatttattattttgtgtttttttcaaaaaaaaaataattaatttataatttatatttttatgaaaa

SEQ ID NO: 129018 - DNA, 702 bp, Cannabis sativa
tgggatcggagagggatgcagctcggttggatcctgagtcggaggcaaaacttctactggagattcgatcgaagcaatgaccggagctgtagccggagatggatcagaggaggaaggaccggtggaccttgttctcgccattgacagattgaagcgaaagtgtaatagtttgcgtctaataccataacagaaatagagaaatgtatttcttattattatgtgaaaaagattacagagaatagggaaaaatccctctttatatacccatgtccaagtggtaggaattagttaggaaaaactaactgaattaccgaactaacaactatattaactctaataaagatcctcataagaattactaagaaatcaaacgtttgacatatcagtccaagaatttacatagggatcaaacgttggatttgttgtaaatcagttgcgagcttcgtaaatcaaagtaacattcagaataagcatagtaattttacaataaataaaacatttgatttatacataaattagttgcgatgcctcgtttaatttactcaaaaataaaatattttatttatttgtaaattctcgatttacaaagatcgtaactaatttacaaagaaatcaaatgtagtcagtccaagtcttgggtcccaagtccgactctgagtttgagacgggtctaaggcaacatctgttgggttttgtgcccta

SEQ ID NO: 129019 - DNA, 623 bp, Cannabis sativa
  modified_base (596)..(598): a, c, t, g, unknown or other
gcaaaaaaagaagaaggaatgggggaagggaagatctgatggttccagtagtagagcacttaacatagtcttttgaatggaagagctaaatagctaacacaaagtgaggtttggagggtaaatcagtttatgtggttaagtgtcactaaccataaagttcaagtagttttgacgccaatatcctctactaaaaatttaccacgtgtacacttgtgtacattgtggcatgtccactatggtacttaacagagccttttgagcagaagggataaatagctaacagaagtgaggtttggaagattttactaccaaaaaattagtttatgtggttaagtgtcactaatcatatagtttaagtagttttacagccaatatccctaaaaaattcatatataataactaaaaatactatcacaaaataaataaaaatcaaatgagattcgttacggcggagagtaatatccccatccgtgtcccgtttaacattcattaatgaaaaattatccttgtacccacctgttaggttatttttagtattaattttagattaagtttagtatatttttaattaagttttaatcgtgtttggagcattnnnacgcttgttatcttttatttttaca

SEQ ID NO: 129020 - DNA, 701 bp, Cannabis sativa
ttgagaaatgagaacaatatacaagtttatgttaggatactaacatatgccaattaaaaaaatttcattctgtaatcaaatccaggattgaatgaacgaagtacagaaaaaggaaatggaagaattcagttaaaaatgacatgtttttaatcaagtcagagttgatggcaacatataaaaatgaactggtttttctatagattttcaattatatgtaaatcaactaagtgtattattaagctcttaaaacacctaaaacaaataaataactctactaaatatacagtctgcattggttagtaataatgaaatgagagcaatgacaatcgggtatatatatatatttatttttcttgtgctaggctgttaaatataataaccacaaacaagaagtgtgaaaatgagttccaatacagacccaagaattaacaacacaggtatgggtgggtgattagtaaacagcaaatagtataaaaataaatagcaaagagtataaatacatgataaacagtagagagtataaaaacaaaaccaagatagtaattagtaattactaagcaatatatacatttaaaagtagtaactagtaccatatatcttctatttacctgagttggttttaattgctttaccaaatcggtaacttcgttgttcttaacatattctcgttttgcagtagatgaatttggagaatacggata

SEQ ID NO: 129021 - DNA, 1230 bp, Cannabis sativa
  modified_base (1198)..(1204): a, c, t, g, unknown or other
agtgcagtcaaaagttaattaaaactttataaaagttaataaaaagcagtgtattgatgatatatagtactaaattttaggttctactttccatttgcagaaagtttgggatccttgtagatgtggacataaaacagatgtttcaacaaccaaccaatcaaattgtagattctaccaggcgtttttaccaataatagatcctaattccagtcaatttaataaataaattaataaaattgaaaaatatgcaagaccaattttgatgctttacttaaagcccaagcttaccttataaagtgcggtaagttgaaaaatacttcttttattaataaattaattaaagctctgttcggcaaccattttgttttttgttttcttaaattccacttaacaaaatcttgttatttattcatagtttttgattaattaatcaaaaaattgattttttaattcttaccgaacaatacctaaatttatttttattttatatttaattgaaacataccactttttatatgtattgtgcccaaaatatcctgacataagggagtcacatagagagtatcttgaaatgacaaggtcaaaattggtacaatatttaaaaataaaagaggacaatattaatatttttatagtaatttaattaagtttttattttttataaattttaaatttagatttctttttaatgttttatatagtttttttttttaaaaaaaaaaaatcatatttttagtttgattgattagataatgtcatatataatttcatttactttttatgccatatttattataaccttaataattttttccatattttttaaaatgccccaaaaaagtatcgagtctaatagtgcagtgggtagagaaactgaaaacactagtttgcttaatccaacacaatttgtatgaatattgaataatgtctttttttttttttgaaaggatgtgtaagtaatgttagagagatagatttaaattatacatagtatgtttttacacatatatagtgatatatttaatttcaatcataaatactatctcagaattttgttaatttgataaatattatatttaatgtgatttataaaagaaataataattatttaagtgggtccacattgatggttttttttttttttggatggcaaaatatatgattgatttatattcaaaatatatctttatatattaannnnnnntatctaacggcatttcttggtttaac

SEQ ID NO: 129022 - DNA, 866 bp, Cannabis sativa
  modified_base (835)..(835): a, c, t, g, unknown or other
tggacaagtagattgatgtaaaatactattttcttttaaaattattaaaatagtcccattatcagctcgtaaaatattgattcatgtttgaaattcggtttcaatcatttaaaaaaaaatggaaaaaatttattcaacttcagatttctaacgcattaaataaactaaacaacaacgagtatggttgtctataaaagtaacaaaatcatttttttccagaatttgtagtaacctttgaaggtctccaaacatcactataaaacaaatagaaaggtttggaagattgataagaatttttagcataagattttcgttggctcttagccaataaacaaccttcacattgaaaagataaaggaattaatttcttaaataatactataactaaatgttttaatttgaaaaactaaggtgaccaagtctataatgccaaaccattatttggtcatgaacagaacgagaactaatattactaaacctttgagtaatttcattattagaattcttatcttcaaaatagtagagaccattaatcatcctagaactgtcaatcgtctttcccaaactctagtcttgaaaaaggcaatgagattcatagaaaattacacaacaattagaatctcgagatagtttgctaaccggtaagagattgcaggaaaattgaggaacatggagaatagatgtaagatctatccccttagaaattttaatcaaacattttcctgcaaataaatgagaaattaccatctgctagcttaacttttttactacccgaatagggtatataaaagttaaaaaatttagaagaataggtctgtaaagcccgcttagttantttggaaattagcagttatttatgttaatca

SEQ ID NO: 129023 - DNA, 598 bp, Cannabis sativa
ctctctctctctctctcaccaccgtgtgtccttcctcaatccttcctctcttgctcacaacttaccagacatcaaactcaactacatcaacgataccagcccgacgacaacatgacctcagaccagacactagcgtacgagtcaccgacgacgaccaaactagcccaatgaagacgacatcagatcggacaccagcgtacgggtcacctgcaaagggagaaggaagttttaaagaagtgaatcaatggcacaaacttcacatagagcagcaatgccatggcaagcttctttcccctctgcctcatcttcaaatgcagcgagaataattagaagaatccagatctaatctaaatagtaaatgggttcttctatttggcatcagcgtggctcacacatgaagaaagggaaagacgaaagggagcaggccagattgagagagagcttcgaggttctaggtttgtagtgcacggagaaaggggtgtgcagttgtttcgacagtggtggtgacggtgggcagttgtgagggttgttgttggtggtggtggtagtcaccaattgtggtggatggtgatggtggcttcgacggggatggcagcta

SEQ ID NO: 129024 - DNA, 963 bp, Cannabis sativa
tttgaactttattacatataaaatcattacacaaatttagttgtctagttttatgaaaaaaattgattaggaaaataattttataaaaaattttattagcaaaataattttttatagttgttaaattgtattgtgcgaccataaataattattttagtcacaaaacgattataattttacattgtgctatcatcatatggtcgcatacagttaattaagtgagattatataacaaattttagtatttgatatggttagtttgacaaatttctcaaagttgagagagcacaatttaatacatgtcaaaaatagtttttataaaaaaatttattagcaaaataactttacaaaaacttttattagcaaaataatcatttatggtcgcaaaaacgatcgtgagtaaattaagtaaggttatggtattaagttagaatgtaatgtcaatgactgtgagactataaacaattattatggttgcaaaataatcataaatttacgtgtgaccattatagtcacaatgagtaaattaagtaaggttattttgcaaattttaatatttcaaatagtttgataaatttctctcaaaaaacttgatgacataatttagtatatttatatctgcaaaattatattgaataagacagatattctctcaatagtacaaaaaaatcttttaagagcctgaaaattctttccaagtaatacttaaaagagtcattgacattacattcaaacttaataccaaatacaaaatgcataatttataattgattcaattttttagagattttttaaacttgattgttttagtttagcattaattctcttaacaattttgacaaaaaagggttaatggttgaaaaggccctgaaaatgagtggctgagaaaactaacccttgggtggaaaacacttgaaaggttgaggcctatcccaaaggaatccacactaaacaaacaaagat

SEQ ID NO: 129025 - DNA, 1132 bp, Cannabis sativa
tttttaaaattaatatttaaaataaatttttttagtaattatataccatcctcatatcattataccatgtaattatatagaaaaaaattgaataattaattaaaattacaattggactaatttaacaaaaatttattcttgtctcaccaataattaatatgaatgaattataaacaaaataaaagaagcacaaagggccaataataataataagtaattaaaattccatcaaactatacattacaaacaaattacaaaaacacaataaggataattaatcaattaaaacacatccaacaacaacagcaattacaagtactcgaactcaaactagttcgattcatactagaatgtttttttgtttcttaaacattaaattaaaagaacttaggatcatatccattgctagaagtagccaagatataataagcaacaatatgaccaatagaaccccaagccaaaacatcaacaatattaaacccaacaggatcatttgacttaagcaaactcacatactcttttgccctaacatcaccagcctcaaaatgggtcactccattctgctccggcaaaccttgtttagccacattctctctctgaaaattgaagaacacaaatctacccaagaacagagataaacctgtgcttaaacttataaccacagatgggttaagaacctcagattttatggtggtcaacctcaaaccacttggtcttgttcttgtgttggccatgatgggtttgagctttgggagagctctgaggccttggaatgagatggtggttggtgatatcagttgggttgggttagccctttggagggtcgccggtgaaatggctgagaatgatgatgatgatgagactgccattgttgaagatgagtaaagattggatttttaatttgtgtgataatgtaaagagtggatttttatttttttgtttatatgagattgtgaggatgtgagtggattttgggttggtgatgtggagggttgtgattggttgagatttggattagagttttttttatgagataagagaagaaagtgtggtttgttttatggaattggaatatgatatgatttaaaaagggttgattgttttcaaaaagggatccgtggcgcaatggtag

SEQ ID NO: 129026 - DNA, 566 bp, Cannabis sativa
cattgacaattccaaactatagctaatgattttacactcacttaattttattagcgacaggtactccaaataagaattttgaaaatcgacaaaaatagtattttttataacagtgagtgatatttttaatttattgaagggctaaattaaaaaatttaaaattaataacttagctataaagttatatattgataagtaaccttaaaaaataagagtgctttattctcatctttcttatcaaaagagaattagaaaaatcttaaattttattttttgaaaagatcatttcttaaaatcactacaaaaattatacttattagatgaattaatatcattattatttttaaattaaggtatatgtaatatgcttgtttataaaattaaattttattattgcagtgataagaatcttacaccactaattccaaatattcccccaaaactcattgaaatcatagacatatagtgaagtaactactttttacagtttggagcgggtgtttagtgttgtctgtatgggtcaaaggagccgctcaaactgactatttttattttattttatttaa

SEQ ID NO: 129027 - DNA, 697 bp, Cannabis sativa
  modified_base (630)..(637): a, c, t, g, unknown or other
tttttagcgacacggtcccaaaaaaaattatttttaagaccgtcgcgaattctgatatttgtaatttagcaatagattaagaagagatcgcaacttttaatttagcaatttagagattagcaatatcccctttttctcaatctttctattgtttaatcatcgatcttcgaattatgtatctcatcattttgagtttcttacaaaggatgaaatagggtagggtgtgatttgctgctacttaagatatcatagttcaaacttaatctatttatatttatttattaaatttgacaaataaaattagctaactatattttcatattgttttcttatgtagttatttatatatatttagcttgtcaataacaatagataacacttgtagatgtttgtaaattcaaattaagttacaattttgacaactaatatcatgacaaccgaattagtttcttggtgattttttttttacttttcaaccaacaacaattcatggttgttctttgaaatcttgggtaaacttaattaataagtatatatattataagcataataatataatcaaggtcggccctgagttgaaatgggccataggccaaaaaaaaatttagactcttactataaagataaatnnnnnnnntaaaaattattaaaaaatatatatttttttaaaaagatatttttttatttgggcctctaa

SEQ ID NO: 129028 - DNA, 1103 bp, Cannabis sativa
taaaatcagagtattgaaatgggttttatttaagtagtttttgatgcttagtgttgtgttgagcaaggtttgagttttagaactcaaactttgctcttcaatggtgatttatgtttcagtgggtgttataggtttcattacttgaattatgtttgttggggctttattaggtggtctagaaggtttaatttcatttggggtaaatttgtattgttcttggtattttttggggtcagttttgttcagtggaacaggtgaaccggttcccctcaggtagattttgaaacacggttaccggttgggaactagtctaccggttggggcattttagggcaccttagatttttctcgtttttgcgatatttagggtatttccatgttatccatcgatagggaaacttttagttttgattttaagcccccaaaaagtgatttagtgtgtcactcctcttttgcaaatattgtgaccttaggggcttataaatcgtcgagcaactgttctactcaggttgaccgacacacattaattcggaagctaggcaagattagtataatgatatgcatatgtgattacatgtttagcgtgcatgtttattaagcctgttagattacatcgatagcgatatcaatatacgtagagttgtattggatactgatatatgtatgtttggctcaagtactaattaacactatcacatcggtacgactagggtatgactggaataccgcgtataggctcatagtatggtcaatagtactgtcgtacgttctagactcagtaccacctatggtgcggggataggattagggttgggtgtatgggtgcctaattataattcgggttatatttatgattatgattatgctttttttactaaatctgtcaactcatagatattctttgcttgtgtaggtaagggcaaagctaaagttgagtagtcgtgagagcgagcagatgaaggttgtacatgttggggcggttacacctagagaatacgatctttgggatagttctgttaggttttgtgccctaaataaaacccattttaatataatcaaatttactaattaataaaaatttcagaaatcattttatgttgcat

SEQ ID NO: 129029 - DNA, 1296 bp, Cannabis sativa
  modified_base (1053)..(1053): a, c, t, g, unknown or other
tgtagggtcagtcgtcagtccatgaagcagtcggagtgatgtactcgtgtataagagacattattctgtgggtgtaaggacccaatgaagacttgaagcgggcatgttacaattagggcattaataattgtagccatccgaccaattctatcactgcaaattcaaatagttggtccaaccactataatcaaaatttcaagctctgaaacccaaccaattaaactctgaattcaccactttagcagagaagcaacattcaaaaaaacaggtggctatgtgtaaagaccgcttatgaattaatattttggaatattaaataattagggtttatgcatgagatttaattattatttataaaatgcatgttgtggaaatatatttaagtatatatacgtttagtatgctattttatgtaaatttcttaatgtttgtgattgtgctcggaagcggtggaaggtgacgttgggcctttagagagtcgcattttatttattttagaatattagtattagcagggtatcgttgttaggttttggaataccgggtttagacgggatttggtaatgaccaaactatccttggtatttttttaacctttagatttattagaaggataattaagtcttttcctatttaagactttttggcttgtagtgaacattagaagcaaccatttacttagcttagtcatttaggaaaaataaaataataatagtacagttaaggaaagaaaggaagaaggtgagaatagagaacctagaagcttcattctctctctctttttcgtgcaacccaaagaaccagcaaggagagggattttgttgttggaattttagtattttaaccagaataagaagattcaatctaaggtattgattcctagcttttcctctttctttttattaagcataagttaggttttgaagcttgattttgggaattttggtgatgtggttataattattgtttgaattgaagttctgaagcttaattgtggttacttgagttgtttaatattgtttttgtggattgtagtgaggttttggcaaggtntgagtttgagaactcaaaccttgacctctaatggtgtttttgaatttgttgtgaatggttgagttctgttgcttgatttgggattgttggagtgtttacaggtatactggagagtattagaaagtttgggattgatttgagatatagggttcgatttttgggttcccagcacagaaccgtcgaccggttggtacccagatactgggattccggttgggaaccgatctgccggttggggctttt

SEQ ID NO: 129030 - DNA, 1754 bp, Cannabis sativa
  modified_base (801)..(805): a, c, t, g, unknown or other
  modified_base (1437)..(1470): a, c, t, g, unknown or other
aaagtctttgaacagtgaaaggtcaaaattgaccttaatattgatttgttttgtttgttggtgtaggggcaagatagtaaaatcatatcttaaaattcctacactttcaataaatatttttaaaatataattacaaagataacataataattttataaatttgattttttttttgttatttgtggtttttgaaaaagaacacgttacattctcgattcaaaattaatcatctaagacctggtcaaaagtcctaacaagataatgggcccagtatgtacgtaaggatgggtctcacaccttttcaagagctaggctatttaagtccaagaccgactttctctagatccagaagagcgtcccttccaaacacgaagatgttagagtttatgccttgaaaagcttgtaaaaatatttcttaattattaataagagttgaacattttgatatatgcatgaatgttaaattatgaataattaatattgaaaattttatatataaatatcgaaaaaattcttattcatatatgaggctgtgacttgtagttctacgaaaaattaaaatcatttagccatgaataaaatagttagcaatatattaaagtttgagaatctttaatcaatggttgctaatacagttcaccgatgcccattcttcgatgcaagtaatctcagttcgaattagtgatgtagtatgacatttaagtgaatgtgttgtatattatagagattatatatgaaagggatcgacatgaatgaagttgtatttatcaaacttactgtttactataaagacctaattcnnnnnataacgatgatcaatagtagatcgacctaaatcctgagcaatcatgagctcctgttcatgttattagtttctttgattcactcgtaaaagtttttcaaagaagataattcttacaatttctgttttaggaatctaataatgtggatagttgagaacatgatctgcaggaatcataatttttctaacgaatcgaatgttggttctctttaggtgtttattctagaactgaaaagttacacccaaatttaaatgatatctaaattatacttctactagtgaattaatgataataaaagataaataagtaatttaaaaagtaaaatggtaatttgaccaaaactaattacgaaccaatacaaggagggttaatcactaaaattgataatattaatagagactgtagtaaaactcaataaatataattttataattactaagagttcaattttatattaattgtgaagtaattatagaattaataaacaagattatttggttgatgagacttaataaataaattagtttgttggagcttagaattataggtccatgatccccaaatcgccaccttaaaacactgtcaagagtatggataaagaattgtataatgttgttcgaaaaaatctattttnnnnnnnnnnnnnnnnnnnnnnnnnnnnnnnnnntaaataaataatttttttttttcaaattaataaataggaaaaaagataaaatttgtcaagacaataattgttaagacaaaatttatcaagacaaacgacaccatccttatcttaattaagacaaggtatgcacctaccctattgtagggtctccttattattttgtcttttggggttaattaatcaattaattagttcaattagataaatatttaaagggatatgattttgtcccgtgatgtactttcacggaatgtattctgtgatacattagatgggtctca

SEQ ID NO: 129031 - DNA, 569 bp, Cannabis sativa
actctgctgataagagaatagaacgacatccaacatcgagtctattatataagcaaacgtctcattgaacctgaaggatggtatcttttgatagagaagctcacttactgcctaatcttagcaacaaggaagttaaggccttatttctaggctcaccatgtttgggcatacgctggccaaccattacgccaagtattgcaaaaacccaacacctctagacgttactaaaatgggcaatagagtcgggtcaatgtgaaataatcttccaaacccaaatagcagtcaagagacaaactttagaagactttatagtcgagtgcataggcaaagaagaaagtaacataagagacaacccggagccagtacaaaaacccctgccagatagtaggaaagacagacctacctggaaattgcacgtagacaggtcggctacagaccaactttctggtgtaggagttgctctcgtcacaactagggtgtaacatctgcacaaagtagtcaaatttgggatcaaagcctctaacaacgaagcagggtatgaagccctcattgctagactaaaatttgct

SEQ ID NO: 129032 - DNA, 699 bp, Cannabis sativa
  modified_base (194)..(195): a, c, t, g, unknown or other
  modified_base (327)..(332): a, c, t, g, unknown or other
aattgagaatcaaaagtttaaaaaaaaaaaaaaaaagtctttttcaatatttttttatacagttttttttttcttaatcaatattttggactctaaccagacttagacccaaatccacccccacggctctggtagtgaactcggcctctgacccgaaaccgaacccgaccctggacctagacccgacttaaatnnaattaaaaaataaaaatgaaaatgaactttatagaacacacttttgttttttgtttttaaaagtaaagaacaaaagtggttacagaatgcatttttgtttttcaaaaacaaaatttttaaaaacaaaaattnnnnnnttattttgtgattaaaaaattagaaaataaaagttttatcaaacgacacctaagtaaaaaaaaacgtaattcaaaaacatgttgagaagttgatattgttttctatattacaattaggtcaatgtttgttatttttctaatatttatagttgtctttttgttgttttatagtttttttttttgttaagttgtttcagagttattttttaattgttttagttgtttaaaaattttattttatcttattgaaacacaatatttttgtattttagaattttaatacaatattttttgaaaatttggtacaacataaacataaacataaatataaatatggaagaggtttcaatggttacatttttattgt

SEQ ID NO: 129033 - DNA, 1771 bp, Cannabis sativa
gttttagtaatgccacgtaatctaattttaagtgatatgacaatagcgtgttgacctgacatttagtttattaagccacataggtaaataatacggtcggacaacagaagtggttaattgctaacaaaatacaagttttgggagttttactgtcgaaaattgggtttgggggctaattgctagtgagatatgacttttggagattttgctgcaatttaccatttttctcatgaaagttgtttgctacagtttcatacttctcaactttttttccttctttttagagttaatgacaactgaaatgacaatttattttttataaataaaatgaataatgactttaataatagatataataatatcttgtaattttaaaattgagtaatacaatggtgtctatgctttgttgggctctttgaaaattttacaatgaccttgtttggtcgagtatattctacgaaaagttgaaaaggtagtctcattaattaagcgtacttttgatcaattgatttttgctccaactaatttttttttctcataatgatactcttgatggtgaggaaaaagagcagtagattaaaccttgaacaaccatgatcaaagtcaatgtggatggggctattatctctcaagctaactattttggctttggccttatggctcgtgaccatgagggagttcttattgaaacattttaagaatcaagaccatgtgtagtgttggatgtcattgtagaagtagttggcatcaaagaagcgcaaagttggatcaagcgccatagctggccaaactaacgtggtggttgagacgagctacattaatgtggtgcacgacattcataataaagccaatatgatttcttcatatggcaatttaattaatatgtataaacttatattgcttgatttatatagtatatctgttaattttgttaaacgatttgcgaataaggtggtccattttcttgtaagggactcttgttcaaaagctgattgtaccattaataaagattctatccctattgatttattgtccttattgttgaaggacatttggttaatgaagttgattctttcttcacaaaaagaaaaatggggtaatacaatataataggtaataaataattaaaaaaaaaataactagacaacaatacaattttaatgtgtcaatatttattagtgcacattttgttaattcagaataaaaaataaaaactaaaaacttatcattatatttaaaaaaaatatgtataaacaaataaactaaatatatatatctacatcaagcaacacacatacaataaaaaaatttatcaataataaactaaaaatatacaccatacaaatacacataaataaaaaaaataacaaaaacatcaacctaatgacaatatgcaaatcatcataaattaattctaaataaactacaaaacacaatatatatatatattacttttattaatcaaatattaatcacttcaaatataaacaacaagtaaaatacatgtgtgcaacaaaaataacaaaataatttaataacaaccaaactttaaccatatatttgatataaaggaaagagaaatgaaaatatagaaaaaaggagatagaaaattgaagtgatagaaaagaaaatatatttctttttatcatgtttaaaaagagagaagcaaagaaaaattacataaatgtgcaattataatttaataattttaattaattttgtaatatgggttaaaatgaaattaattaagagtttttttttttttaaaaaa

SEQ ID NO: 129034 - DNA, 1189 bp, Cannabis sativa
tgataccatgttagaatttgaggataaaataaatgaggttccatcccaaaaccaattggcaatgggaggagtagctcatttctcttatctattctatcatctttccacacattggcaatgtgggattctctaacaagatttcaagtaattataaataatttcctgtaatcaaaatgcaatgaaattagtattcagcaaaactaaattaattattaaaatataattaaactatgaaagtaagtgagatattatagatcaaataactattttagagattaagagaaaattaaattatgagagagagagatagggagatagaaaattcattacttgtaattgtaatatagtattgaaggaaggcatagtgcttctatatatactactttttgtttatttatataataataataataataataatatatttgagtagataatatgtagtagtattgtaataaaatttggacggttacaactattagtctttattaaaaaaattgttacaattattaatggttacaatgtgttaaatagagatcataataagaaattttgagtttctcattatcttctaaattacattaattatgtaagttaaaaaaataaagtaaattttaaaaaatagaataaaaagctaataaatctaaaaatttaagaaaattatgattaagaggtaaacttgttgccacatggaatggaatgttttaaaccttcttttatataatttttttatatatttatattgatatatatatattgattagagggaaatatagtggaccataaaaaaaatactttggggctcttttttcaaaaaaaaaatatatattattttttaaaatcaattaaaaaatatataatttcaaaagaaagttttctttttaagtttctggattaggctcaaatagaaatatcaaaccaacaagattacaactctatgacaaataatacaaaggacaaaatcatgaattaaataatgttacaagactaaacaaaacatacacataaaatagagaatatagagagaagagaagaattacaactcaaagcaataagctaaatataaacacaataaataaatagcatatatgtgagagcaatctcaacaccacatacaccacatgtgtataataggagaatcaccaaacttgaacaagattttacacctttgtccaaaagcttatttccc

SEQ ID NO: 129035 - DNA, 1054 bp, Cannabis sativa
  modified_base (987)..(992): a, c, t, g, unknown or other
cattttaacaacaggaagacatcggcccaccatcgaaccaccatcagtgtaatatcctcaaattagtaaatggattagtaaccctaattaaattaattatccataaatgagggattatattattatataatcaattatgtgaaattatttgagatttatcacatttaagatctcatttatgagtaggggtattttcataatattggcctgagaaaggtaaaatagtaattttgttatatattgtgctaatgggttatattattatatagtatgttcattttatattattgtaagtgatttttgacaagttagcgtgatatagtcacaatcgggtattttgtctcaaactgggttcaagctcgaaaatttatgaactttgtagttagggcaataatttgaaatatgtgtgatcatgtgaatatattgtgtgatgtggaatgtcgaaaatgcccttacttgttaaatatgtggaattttagccctaggggaaaaatggtcatttgaccaattattataaatttgatgtatatgttattttgaaaaaatataaataaccaaaacttcattttctggttgtaaccccctcaccaacgacccttctctctctttctctttgactttaatatttgaatttctttgtttgttcgaccagttaaagggtaagacagtcttttcaaagattggccttccgtctggttatcattaattgaggattcaagaaagaggacatcccgaagactgtgttttcgtactatgtatggacattatgagtttctagtgatgtcttttggactcactaatacttcgacaacttttatagatttaatgaaccaagtgttgaagaagtttttggataagcacgttatagttttcattgatgatattctggtgtattcaaaatcagaagaagaatatgaacaacacctcaaattaatactatagtgattacaggatcacaagttgtatgtgttgggaatattttaccannnnnnagatttactaataagtatgttgaattaacatcctaaacacgaattctctaaaacaatgaaaa

SEQ ID NO: 129036 - DNA, 649 bp, Cannabis sativa
catgattcttctatgtggcttgcttcagctcatgttgaagccttaccaagatctagttcaactttcacttggtctaacaatcatgatggagatagcagaatttactcaaaattgatcacgtgtttgctaatgtggagtggtttgacacatttcataattctaaatatttgtttagttgggagaccatctcagaccactgttcttgtattatttctaatgctacctcggacaagataggtcacaaaccattcaggttttataatttttggagtaatcactcaaattttagagatgttgtgcttcaaacttgggggaagctgattgttgcaaagggtctcaatgcaatacatctcaagttgatgaggttaaaccatagtcttagaaaatttaatcatgattccattggtgacattggcaagtcttttcaagattcaaagactaagtaccttgaagctagaatgcaagcccaagcttatccaaaggaagctagttttctcgaattagagaagaaggctgctaattttcttgaccaagaaaagatgtatctgataactctatgttatagagttaatttttatgcttttaaactaaagtattgtgaggagagtagtgaaaatgtgtttattttgcttaattttaattagtttta

SEQ ID NO: 129037 - DNA, 545 bp, Cannabis sativa
taacctaacctaacccaaaccctaattccctggctataacccacctcggtcttggaaacaccaggaactcgatggagaatattgcttgttttaatatctcaggcgaaactaactgttcttcttgtaattggtcatcatcatcatcacgtccttcatcaacaatatcaacgatgacgtgacattgggattgcatttctatctcggctggtggtcgttgtttgtattgagcgttgtcaagtctatctaaaaaatcgacacggcataaggggcaagttatgttgttcttgagccaaccaccaatgcaatctgcgtagaatacatgatcacacttagggataaagatacacatttttttcatggtctagtaatccactgaaacacacctcacaattccttggctttactgttgggtccaattgggtatgttgggtttgattactgtttgggtctgattggttttgtggggttgaatactgtgggtagtggctgtgcgaaaggaggtttaggttagggttttttttagtagagaagaagaagaagaagaa

SEQ ID NO: 129038 - DNA, 907 bp, Cannabis sativa
ctagttcattgggatgagaccaaaaaaggaaatatttaggtcctgaattagtttagaggaccagtgagacaatagacaagataaaggcttagatgcttactttgaaaagaagacagaaaagttattctgattctaaccacaaagacatagaattttaggtggaagaacatattttcctgcgagtctcactaatgaaggatgtgaagcactttggaagaagggaaagttaagccctaggttcatagggccattcgagatactcgagaaggttgggcaggtagcgtctcgactaaccttactgcaatcattatcggttgtacataatttatttcatatttccatgttgaggaaataaatgtcaaacctgattcatgtcttgagttaggaagccttagaactacaaccagttcaaatcattgataggaaggagaagcttcttcaaaacaacactataaccttggtgaaggtgctctagagaaatattaaggtggaggaagccacctaggaattagagtctgatatgaggactaaatattcagagttattcaggttagatttcgagaacaaaattcttttaatggggggataattagtatgacctcatgattagaacaaggattagttagcattaataatttatatttttatgataatatatgttgtgggcactacttttaagaagttggcattagagttataatttctcaattctgaatatattattaaactctaagtgtattttatatgtcatacgtgaaatttataatttttatgatttatgctcggcaacgatggaaaatgcaactgatagctattagagtcacatgggttagtttataaccttttatctagtgggtcatgttgggattttatgccctaaataaaacccattacaatctaatctgat

SEQ ID NO: 129039 - DNA, 546 bp, Cannabis sativa
  modified_base (498)..(513): a, c, t, g, unknown or other
ttaactttatattatcataaataaaaaccaagaaataacacactatatatgatttaaaaaatatatcaaattttttttcctaaattttaaactatcacactatcaccataataaatattttgttttttttttccaacaaatcatgcacataaaaattccaatcatatatgttacaaacccaataaaatatactaattaacaatatctctaactaaatctaataaaataaataaaaaatatccctaaaccatataatatacatgccaagctaattacttttctaaagccatatatagtctccttctcttatcattgttctttagtttttgttcactttgatttttttttttatactttaaatttttaaatttttaaattttgtatttaaatacttgaataatttttaaataaaatatactataataaacttattaatattatataataactctaaaaaaacaaattcatatatgatgaaaagtgtaaagcccgcttagnnnnnnnnnnnnnnnncagttgtttatgtttaatcatgaaattatttat

SEQ ID NO: 129040 - DNA, 1048 bp, Cannabis sativa
ttatttgtatattaaaaaagatagcccctccttgtttttgtgctgtctgtttgtctctaaaaataaattaattaggtgttctttactttagagaatacaaatgtttagtattgtagtgcctagagtattggtgctcaaaaaattacttaaattagccttctcaaaccattccattcatattgtgtagtttattttgaactttttatgacgagattgagttgtatgccatgttatacatttgttgttgtcatgaaacatgaggttccatctcaaaactaattgttaagaagtggagtagtccatgttcttatgtatgactcaatatttttacatttagtctatgtgggatatttttcttcaatatctcccctcaaaatgatggttatttttgttcactaatcttgattcaccttatcataagccatgccatttgctcgctttatttttgttcggatcaagcatctttgcaccatctagatctttacttgtaaaaatttgagtcaggttgtatcgacctaagtcatgtctcaagttatgccatatcctattgggacaaatcattttcataatgacatagattatttgagttaaatttagtccacataaaaacaaaatagtatgtgtgggatgcatctacaaaaaaagatagtctttgagtcagttgggtttacttggtctacattaagactcaagactagtggagttataaagctccataaacttccagttggtactggaagaaaattgtgatgaccaaggatatgatcaaaggatgaatgaacatgactgagttcaatagctagaaccaaatttagtatctctactatgtgttttaaactctgaccgcgagacaatgtggagaagaaatggttttctttcatttgggatagattgagtatcccaaaaacaaaattcatcaactagttggcgtgttggaagcaatttcaaactagagagaggctgtccagattaggtattgtgggaaatttatttatttagggccacaattgtatatataaaatgtgtgtaagagatcggaagagcggtt

SEQ ID NO: 129041 - DNA, 664 bp, Cannabis sativa
tgaggacttttgccgcaattatcccttattattattattattttaaaagaaagtaatattattattattataagtcaactttttagcaattactttagggattaattcttgtgatcttttcatactattcaaaattgaggaggtggtgagttgtttgttgtacaatatatttttttttctaattttttagtaaatatttaaagtcatatttaacttatattaatatagggaaattacttcatatacatttttttttaacttttttttcaaatttacggtttgggattctaaaatgattacaacgctagttgcaataggggtttctatataattttttgttgcaatttaggttgcagcgctagtttcaatagaagtttctatgtagaatttcgtaaaaatacaaaaaaaattattttgaagtgtaaaaataaaaaaccccattaatatatttattcttaccttatattatttttttaaaattttaactttctaattttttttatataaataatattaattgtagttctctctttaatgtaattggtagatatttgactaaaattttgttttaataaatctttatatattaaaagtgtctatctaacggcaattcttggtttaacagaatatacttaaaaataaaaaaatattctgttaaatttaa

SEQ ID NO: 129042 - DNA, 883 bp, Cannabis sativa
ctttagttcagcttgaatgaattttctggataacttaaattagttattgaactagttagaaatgagaaatgatggatgctggatattctaaatctatctatatttagtaactatataactgtgggaatattattgctcttttatattgatgggtggtcatgattttgttactgatattttcttatagatataggagttaatctattatttttaaaataagtatttttaatataaattaaaggatcatttataagtattatctttctataagagtcaaagtgtgatctttgaccaccagagctatggatattacatatctgtcacggcctagagctcgagtcgtgacatcttgaatctaacaattcttaatagtttaggaaaaaaatttaatagcctaagagttaataggtacgatttagtatatgttaaaatttgtaggacaactaattagcctaaagattacaaccaactgatttatgatggttttttgcttcactctttatgctttgtcactattccaagtaaataatatttttttcccaacacatttctaaattcttatgcaaagaattgtttttctttttaccgacttttgcaaggaattatattatatgcaagaaaggaattttcttttataaaacaaaaatatgctctaactttatttttttctttttttaatttcttcttcttctatcatttttcattttttttttcaaaaagtaataatttagacaaaataagtataataacactacacagtatcacgattattattattagtattattatgaattccttacaatttgtaaaactgattaaatattgtaaagtctttttttggcaagttagttgataaaataatttttccatttatggtaagatt

SEQ ID NO: 129043 - DNA, 809 bp, Cannabis sativa
ggtttgcctaaacctaaaaattagacagacaaaataaaacttatgaaatgcaagtgaccaagaatcgaaagtcttctcgcttagagcaactataataaaatatatatttcaaacgaggaaaatattcattatgataacaaagcaagacatgtctaggattaaaaatatcctggccagccagttgtcttaagcaaaatgaacaggtggaaaaagtttaaaagtattacaccacatgagtcccaggctctttgtattgatcagatgagtcttcaacgacaatagttgaatcttcaacagtaggcatctcatgctcttggacggtagtggagtctttattagccatctttgcttctcctgtgcctcacaaaagccaagaaagctagccttgttttccttgagatagtcaaagttggcctctggattagtcttccaaagctcatataagacgtccagggcagctgtttcaagattctcaacttcttttcgaagtgcttcccgttcagcaccaacaattacccactcaacatcaagggtctcctataaagtgtttttctctccgatcagcttagtgatcttggcttcttggtttttaaggagagtatggagattgtcgctttcatccttcaaagcattaacctccttagacagtgcatcaatgtcctcctcaagcttggtcgtggatgacatatccttaatctcttttcttaagtcttcaatgagcttgtttgcagtagcaatctgcttaatctctttcacttttcccccagccgatcagggagcccagaattgggagttacggtttgcggaaa

SEQ ID NO: 129044 - DNA, 611 bp, Cannabis sativa
ccattttctctctgtaaagctgatcttgcatattattattatttcttttaattatatattaaatattttgattttaattatatggcggtttgggaaattattatatatatagatcgatcgtgattgattataatggtagtcatatatgtagtaataggtttgtggaattattaatatgatcatgatgtatttctgaatgagttcacaccttgattatttttttattgaatttgtagttataaaattattgacgatttcaatgagtgacattatataattatatttcttttttatgaatattcaagtagaaatatacttataggcatttacgtacgtacgatttctaagtaataagatttaattacattcatccagttccttccttaataaagtaccaaattaatttatacttcttattgattttttttgaatgagtttaatcttatattaattgtattaatcaagttaataatagtctcatcttttcaaatatcattatacaacattttgctgttatacatacacgcggagtgtcacgggctacctttttaggcagcggaacacccgtgcggcaccttgacttctctaagccaaggtcagccttccaacca

SEQ ID NO: 129045 - DNA, 1850 bp, Cannabis sativa
tttatataaaaattttgtatcataattttagccgcaataaaccttgaagatagggctcacaattttcttaaacgacacaaaataatcgaatttttaccatggaacattttgaatgacatttttactttttttttttttggaagaacaaacaattcattaaagagaaggatagatgggaatcacagggggcattcccttttcttggatacactcagcaccgttgctagaaatcctagcaagttttgccaaaccatcaacagaaagacaagccaatacaattaacaaagaaaaaatgacaattagaaaagttcttaactaagtctaaaatagcaatagatagattggtaagcttccaatttggaatatatttcccttgctccaaagcttgagtagccaccttgcaatctgataaaacatgcacctcttgccaattttcatgaacagcccacgagagagccatatgaactgcttttgtctctacttctaaagctgaattagctttaactctttccaacttggcagcccaactaccagtagtcaaattaaccatcacagctgctaaacccgcatgcatctacttctaaccaagaggcatctgtcatcgaaattatattaacagagcccaccgttctctgcatgccttcaggaatcgacgtaacataattcttagccctctcagcattggagacttcattccaaagatcagagactttcttatgaataaggggaaagaaagtattagttcccttgaacagcttatcattcctcgcattccaaacattttggaataaacatcccatgtaattgatgagagaagatctgtcactgccagggaaaatggacaataaattctctacatattccttcatattgttacctagaatgttagtgcaaaagattggcatatcccccataatccaaagaatcttaaccgcactacactccctgaaaatatgtaagcagcttttcaatccttcaccacaaagaaggcactctttatcaagagaaaaatgtaatttgtctctagtaggaaggacttcattgagtaccctccacataaacatagccatccaaggatgcacatccgatttccatatcgaagtccagattttgcttcttggactgaatttaaagctttgatctgcacagcacgcactcttcactataaaaatcccatttaagttattcctccaaacaacctgatcagggtggtttagaagaattctcggtatctccactattctctgacccagatctcccctaaagatttggaagactaattctctgttccaagcaccatcacaagagatatcagcaattgttcttgcagtaatccaacgtctattcaaaccttccattaaagcccgaaactcttcataactcaaccactgaatccatggttgaatccacatatctctagaatcgcctctgcctgccaccaccgtagaaccccgaagcacaacatctttgatttctagcaaacttttccaaatatacgagtcattactctttggagagactgactaaaagttttgctgattacagtatttattaagcaaatagttagcccacggcttgtcctcctttcgacccaaagaccaaaccagtttggcaagcaaggctttattcatatcttcaaatcttctcaagccaagccccccagaattctttggttcacaaatcttgtcccacgatctcagagcgagaaaccgattcttttccaagtgaccaagccaccaatatcttctaactgaggcgtccaaacctcgacagattaaaattgggaccttgtgttggaaatattttatcaggatctagatttactaccatgtatgtttcattaacatcct

SEQ ID NO: 129046 - DNA, 1996 bp, Cannabis sativa
tataaaataatctcacgattcaatacggtaaacaatttgatattgggctttgccatgagtttctcttcttcagcctaatacggtacccagcccatttcatatgtttcaaagcccaatagaaagaaagaacacaagagagacaccaagcccactaagaacttctcaaatcctaattcgttttttttttaccacatactaaaatttctatttttttttttatttttttttaactgtggggtaatttttttaaaaaattactgcatttttttttcaaaaatactgtgtaaattttataccgtgtactatgttaagtttttattgttgttccacagttattttttagttgttttactgttattttaattgttgtgttttattattttacgattgttttataaataacagtatttttgtaaaaaaaaaaaaatcaaaaaaacttaagttcgatgggattatttggtatttaattaaaaaaattataaaaaaaaaggattttacaaatttcacatttttttatggtcatgtttttttttttttttaacaaatatacaaacgattatttttaccttgtttttaatgttatttttattacgtttattttttacaaatattatatttttatgttattttcttattatttaataaatttaataaaattataatttaaaaaaatgaagaaaaactttttagaccgtatcaatattaaaattactccaaactttaatactttatttaaaactagaaaacaaatcgtgtatatcgtctccggttatagtttatttagtcataataattcaatcataaaactatatcaaatttcaaattttgatattttttatttaaatttttaataatatgaataattatgctattaaactttcattttcttttacatggataaataaattaatattgtgaaaaaatcatcataaaatagagatatcttcaaacattatagtaaaaagaatattagaaattgaagaatttttacacaaaatagagatttaaaaacataaattgataaatttataaaaaaaattcatcatatgatttcaaaaatattattatcatctcacttatagtcgttattacatttaaagttgttattatcaccgtatctcatttatggtcctcaacattcattgtatatattttttataatcaagttttgtaattaaattatttgaatatataatttcatcaagacattttttaataataaaagtaaatattcaatacaatataaattatatatttttctaatttattttaattaaaacaaattataataaaaaattatagaaaatatatgtaatgtcattgtctcattcttcaattttatgtctatatatacataaataaatagtagtatgtgatactttaattttttttataaaaaaaaatatacttgatttattttattaatattataggaagttaactgatttttttttttttaaaaaaaaaattagtatacttcattaatttgtttttaatagtttttcttagtaatgttaatatttttaaattatagtttttgcactataaaattaatttgttttaagtaataattaaatttttatttatagtttttaatttttttaaaaaaagatttaaattataaattgtatagtatatatagttggtttatagatatttttttttataaatcagttatttttgataggtttttgttaggtatatacaaaaaacataactatattaccaaaatacagttgtcgaatctttaaacatttatacagctcacaaactaaatattacaataatacttttttttctaaaccttcagtcgcacgaagcaaaaaaattcacctacgcaagcttcgatcgataaacccagcaagccaaccgaaacaaactctaactatgcggagaactaccattaatttagacgacttcacttgagaagaagattggaatcaatctaaacacatgttgttttgtattgatgaaaaaagtgcagaaaaactggttc

SEQ ID NO: 129047 - DNA, 1525 bp, Cannabis sativa
tattaattaatataaaatatatttgtataataattgtgaaatccaaattactttggccacgtctttcatatttttcttttttaaaaaaattaatgattctgaaatttaaattatatagccacgttttattctcttttttaatttttaattgtactataaatcactttaaccatatatctatttaaaatcttttaaaatatattaaaaaaatgtggtataagattttttagttaaatttttttaaaatttacggctagctagctttaatttttttagctatttatttgttcatttttttttaagagttatagctatttatttcaataaaaaaaaattctcaattttttaagtctaaccctaatattaactttacattcctaatatttttttttctcatttctcatagcaatcattctcttttttcaaaattctactataaattcccacttaggtttttgttaattgctttgtttatgatgatattcaactcgacggtcttagctccataaatattacggtgacaatttctacaataaactcggttgtggtaacttcataaatattgcggtgtctctaaaatggtatatcaaagttaactttataatttttaaaaaaatttctaatattaatacatatatagtactttgaagtgtttaaagttaaaatacatgtatagttttattatttttttaataaattaaatgtttgaactacttcatcctgtgactttctctaaaggaatgagagggtaccatatataaatattatgtgtatatataaatattgatatataatcatcatttgttgtttttgtaatttattgatggtctaactaattaataaaaaaattcacttgggtcttgtcagttttgacatggttgtgagttgatacaaaaagtttagttttgttgttattcgtttgtgatcttttaactgggttgacgatgagtagtagacagccccaaattcatgatttaacagagaactattcgagttttactgttgatgacgatgatgaggaggggttactgttcgaggtgggggaagatggacttgctgaaatagatgatcggtggctgttggtggggcgtttcttaaccaatcgctcaattgacttccaggcaatgcaaaataaaatagccactctatggcaattgggtcgaggcttatatgtgaaagagcttgatccgaacctctttctttttcagttctaccatgaagtggatatagagcgggttattgaaggtagtccttggaccttcgatcgtgcgccattaataatggaaagggtctctcatggtgttaatccgcgatcaataccgctaacgaacattgaactttgggttcaactccacaatttgactattggatttatgtcagagaaagtgattaggggtgtaggcaattacattggtacgttcgtcaaatcggacccaaacaatttctcgggagtttggcgtgattacttgagaattcgggttaagatcccgattggaaagccgctgaaaaagaagaagaaattaga

SEQ ID NO: 129048 - DNA, 1032 bp, Cannabis sativa
tgatctttacagtaaaatctgattatattgaattaaattttatttagggcagaaagctcaacagtttggctatgacaatagtggtggttgtgatggttggggcggtgatgcaatggtggtggtggtgatgtagtagtggtggtcgaagaatgggattgaagaagaaaaaagaaaataaacaatggtgggaatggatattgaatagtgagcaaggaagaagaagaaaaatgaaaaaaagaaataagaaaaaaataataatttttatgatttttaaatcattaaattattttttgattaaaattatgatgtgcaccaacaaattttttacacaaagtaatatcaagaacaataaatagagttggtaagttgggtactaacagactaacacgaattaggagcttggggattattaccgctaatttttcaggtcgagaactaatctgcatcaaactgaattttttggacattatttatgctgaaattttcctacctcttattttaacttttgcgttcgaaaacacatttcatgatattttcttttttaaaaaaaaatttaggcaatcaaacttgtaaatttttaaaaaatctgaatagtttacagtatcgacaacagagttcgtaatatttcaatttaccattcgtgtttaaaaaatttcaaatttgttttcgacattataaactattcataattttttaaaattttacagaaatgatatcgtaattataataaataccgtcaagaaagaaataaataaaaaaattgtttctgatatgtgttttcaaacttggagatcgagaaaaaatgtatgtaatgggatgttgtaatttttgagaaataaaaaagctataatagtagtttcaaagtattattattattattattatatgaacttccatttaataaaattaaaaagtacacgaaaatacactgtatagtaattacgttgtatttattacgaactgtataattactatgtagtgtaattactagggtaattactagggtagtaattacactgtatagtaattaca

SEQ ID NO: 129049 - DNA, 816 bp, Cannabis sativa
gggcgggccgcggcatgctcagagcatgccgcggcacctgggtttcaaacccggaaaccaaccacgaaattcacaaaaatttagcataactctcaatcaaactcattcaaattcataaccaaaacttccaaatcataaaccagagttgctagcaaacattaaggatataaaaacgcataatcatgcatcaaaattcctcaataaaccctcaattttagattgtgaaattaacaccaaatttatgcctaacacacaacccttcaagctcaacaactcaagctttaaatccaacaatccctaacattttccagcagccacatactcaaaaaaataacatgaattgaagctagaaaataccctataatcctactctaagttcaacaaacataactctcaacaaaatcatgcaattcccactcaattcatcaagatcacaataaaaaccatgaacatgccacttcaagagctaaacaactcaaaacatgcttttccaaagaaaatataatcagctagaaatcaatcaaattcagtaaagaactacctcaatttcccaagcttaaagttcttcaatttcaaagcttcaaccaagctaaagatcacaccaatttttccccaaaatacaaatttaaaacaaagagggttgagagagagaggggggtcgggtgagagagggataaacaccagaaatttctttagttttccttgaaattcaatcttaagtcaaataaatcaaataaggtcaaaagacaacacatgcatactatataataatatagttccattaagcacgtaattatattaatttcatcaatttac

SEQ ID NO: 129050 - DNA, 872 bp, Cannabis sativa
ggtctttacagttatgatatttttcccatcttgctgctataaataaagatgctgaattggagaggattgtatgcattatgtggtgtatttggtctgaaagaaacaaaaagatgcatggttctaagcctaagattgctgaggttatatgtagttactctgctacatatattactcaatatcacaaagccattactgctgctataccgccctagagtactactgctacatcttgtagtgcacaaccggccattccctccccattgctggtccatctaaggtggtagccaccagaacaagatttgtacaagatgaatatagatgttgcctttgactttactggtgcaataataggtgcgggtgctcttatacgtaataatgaatgtgcaattgtagctggtctctcaaaagccttacaaggatgctgttcaccaaaagaaatggaggctatggcaatgttctacaacttgcaatgggccttgatgtatcaatttcaaatacatttcattgaatctaattctcttttattaattaatcatgtcaatagtttatcttctactaggtgtgtaactcattttcatgatttggtagaagatattaattatcttttgtcctttttttctagagtaaaggtatcttgtgttaaaagagatgctaatcaagcggcccgtgacttagctaaatttgctctttgattggatgaaaatatgttttggttgggtaaaattccatccccaatctgttttgttgttgttactgattcttttctttaataataatcgtttctaaaaaaaaaaaaagaaagaattttttttgacaatatagtctcatattgaaagaagagttgttgcaagtgttggattttgtgccctaaa

SEQ ID NO: 129051 - DNA, 994 bp, Cannabis sativa
ttgtataaatattttttaaaatattttaaaattacatgtatattttttaaaatgtttaaattatttataaaataatatcctaaatttttaattctaccattttttgttggcaaaaagttttttttttcttttaacaataattaatataataaaaaaacttcatttgttgaaaattaatttgtgccttacaaattaatttaaaaatattaaaaaaattactattttttcataaatatggatcaggcctattgcaccaaatgttgtgaaaaattaaatttctgaagtataaatctaaaataattctacttcacattatcatacactttactcatatcaaattttaacgccatgactccttcctttccagacaccttgcgcttcaagtagtgcataatcttaaacgataccataatattatcgaaaatcaacaaatccagtataaatacattgtttgtcagaaattacatgtggcatcaccactttaaatcgattaaccataaccttagaaataatcttgtagaccacattacattaagaaattagccttaaattatccatcttcacatgatgcttattttttagaataagaacaatattggtttcgttaataccaataggaaactcatccgaagtgaatacatgttgaatcaacttcaccacatccgccccacaatatgctataatttatgataaaatttcagactcatcacatcaaaacccaggccttatcctgatgcatttgaaacacgccctgtgatctttctattctaaaatagatagcaccaaatcttcattttgagaagctgaaacggaagcctgaatatcattaaactggggtattgattggatcacattcaatgaatttttttaatagaggtatttttatattattaaaataacatatatgtattcattatatataaattttatgaacatggtgtacataaatgacattgcgaacaaaaataaataacataatgataaaatatataga

SEQ ID NO: 129052 - DNA, 1405 bp, Cannabis sativa
  modified_base (27)..(33): a, c, t, g, unknown or other
  modified_base (675)..(683): a, c, t, g, unknown or other
gttaaaccaagaaatgccgttagatannnnnnnttaatatataaagatatattattaatttatattttatgataaatttaacacaatattatatatatatatatatatatatatatatgaaattagagatgatcttaactttcatcgtatatgtggaaagttacgaacaacaaaaataaatgaaccattgatctgataaatgcaataatattatcaagaaatgctagaagatactctatatctcacattatccaaaatataatattttattttatttttcttccacattatttttgacacctttacttctaaaaatacttcaataatataatacttttttaaaatgctataattatgatatcacacattattatatatatatattttttctttattaaactattatatatatatattacacttttaattttttattgtataaaaaaacatagcatcaatgttattgtgtggcatcaatgcaaattttaaaaatagcatttttttatctctaatgatatatcatccctatattttgccatataagctttccacctcatcaagcattctccaaaatattaccattggagatgctcttagtagtgcctaataccttcttatatgttaatatataatgttattagtctaagtaattattgagtctcatataatttaatnnnnnnnnntttaaggagtatcgctagctaatcacaacacgacatgtctagaagtgctgggtactattagtacccatgacaataccctattatcaattgtataaataataaatgtccattatcatttatctaagatggaaaagtgttaagtggcacttaaagtttcaagtaatatatagtatattattattattatattagtgtatttattatttaatttatatcaaaaaatattatattattatattatttcaattcactaaaagctcgtttggtacacagaattaaactggattagacagactaatttatcgagtccagtacagaattaatcctttgacattgcaatcgagagataactccacttacaatttgtgctgcatgtttcatataattagttgaattaaatatttatatattacgttcttttatatgtatatatattaattataatttttttgaggccttaaaaattgtggggtatggggtgaagatcccgactgtcccaccctatggacggtcgtgcctcttacgtgttaatatttttataggtgtaattaagtattgagtcgcatataatttataaataacttttaaggagtatcgctaactatttacaaggtaacatgtgttggattaaaatcctcaatatgggctcatatgtatattagtgtattgctatttgaagtttgacccaaaataaagtgatcattttagtaattatgggtcat

SEQ ID NO: 129053 - DNA, 1035 bp, Cannabis sativa
  modified_base (534)..(541): a, c, t, g, unknown or other
ataaatttatatatatatatatacccaccaaaaccttacagccttttactgtttaaatgtgatcataattaactttgttattcaaaaatattaataatgataacagtgtatatataattatgtaggaaaattgtgtggcagggaaccattttttttctatattggtagggatatgttttatctttaaatttgaagaaattataactgcattttttcttatgcataattgtgtataatattgtaattataatatgcattctgttattttttttaattcttttaataccccaataaaatttaaaatttatatatttagttacatgcatacatgattattttaaattttatttttatttttaatattataaataatgtagaattttttaaaaattgacggatataatattactatattatgagtcaaggagattaaagattaatactaatattgtattatcaatattgtggacattgtcccacgtgaaataaatggtagagaattgagctatatataagaacatgagctactccacnnnnnnnnaattgattttgagatggaatcccatgattctcaacatggtatcagagccatacacacctatacagacatggaccaattagaagatgagggcaaattgataaaataacttttagaatcgagggctacatgtcaaagtgtgattttaaagataaaactgttaatttacaccgtcgaataattttcttagaggttaaatgatattagttttaattattgccctagaacagttaatgagaggtggctcatgcacttgttaaatatgcgagtaaatgtaacttttagttaggggttgcaaaacgggtttcgacacggcacacgaacacgacacgaattttacgggttagggtcggaaaaattagatgcgggtcgacacgatttgatacgaaataaaaatcggtcaaacacgacacgacacgcttaacacgaatgtgacacgatttttttaaatataataaaataaaaaattaatgataataatataattatataaaaat

SEQ ID NO: 129054 - DNA, 1618 bp, Cannabis sativa
tattatagatttgaatatggatgacaaacatgatttggtagatgatgaagtcgtagaggtaccttccttgaggttaaagtgtgcaccgagcaaccatggtgcacagagacaacgaaaaccctgtattgaaaatcgcaatacacttggaactagtagtagccgacaaggtagatcagaagaacatgctcctcctcgccatgcatagttctcaatgttctcatcatttaaagtttgtaccaagttcaaagctactacgtggacaaaggacgatataataaaaaatcatgagcttattacttctttacaaagtaaggaatcatgggaaatacagcttggaaatttgtacaaaaaactaggaagaattgagacaagtagcggctaggtttgcaattaataacaattttgagtggatggtgaagaagtcaggcaccaatgggttgtacattattggttgtgtgcttggtgttcaagcataaatttatttcatcaacataagcaagataaatcactattgaagagtattgtgaaaaaactcgccagatctctaacaaggatgaaatcgattgtgttgaagaactttgtgtggtgatatcaactcataaaacttggttagtggtttaaaagaaaaaaaatccatgggagaaaaaaataaaaaaataaagattgtacaacacccatgctaattagtatagggtcccatacttaggaatctttttagcaactaaaagaagaccacaactagagtagcgtcccactccacaagggtttcttacaaaaaaataagaaaatctatggtggacgctgcgtcctccttccagagagttttcttaatgactaactatgcatttcttttcttttatttttgtgatccgcataggagcacttacactagaactttaaaattatcattcaatcattaaatttctgtgtgacctcaaacgtttatatattaaattataatacttcttgactcttatgtgcaaaaaatacatagctcgcgtataacatgccttatgcatagctttcatatactatgtctttttaaatgctaatatccacataagtcaagactgaggacacgtgaaatacagccttgttaatagtaggacaaagtctccttacaaggcatggtaaaaccttcaagcaacaagcgaaaagagttaagcaatccatcaagaaattgtacaatcatgtcttggcgactaaggtgagtacataggctggctagatgaagcttgtattgtcggccagggtttgagcacaagctggctggcaaagagtgactgtcagacccaaaagggtctgtttgaccaaggaagcctaatctttgcaagaaaagttgtacaaagaagctcctaagggtggccaaaacttactaaggttggccaacacctactaaggttggtcaacaaactaaggctggccatcacttcccaaggctgacaggcacattgaaaagctagcagacacatagaaagttggcaggctcatcttgaggctacaagagcaatacctggccggccatggtgcagcataggccggtcagcctccagcaaatggtaggtcagccagctcctcttctcgaagacacttttggtgtctctatagctttcaacct

SEQ ID NO: 129055 - DNA, 1120 bp, Cannabis sativa
ggtatcttatgtcaattcctctccattctttaaatcccatcaaaatagaataaattctaatttagagtttatattttcgttacaaaaatttattcaattttgagttaaaaagtgcaacatgttgagtattaacaataaaaactttttgtttatggttatgacatagccaaggaaattttgtttttgcaattatttatttccatttcatttattttattttattagtttagttgcatactaaaaatttgtacaggaatattagttattgcttttattattaatatatattgactatctccatatgatggagaattaagtttataatttttattttcaaaaaaaaaaaataatcatacattttctgcctcttatctcttctaattttttatttttgtatgttttattcggtaagagacgaaatttttgaaatgaagaaggcagagataataaatatgatggtagaagtttattacagaagcttataatcacaaaaaaaaaaaaaaaaaagaaataaatattggtgaaaattgatttgatttttattgttgagaagttgtataaaaataattttctccatttaatattttctcaattgtttaatacttaaaatgttccatttaaaaaataataatgcacgcagcaataaaagaaaattttattctttatgtttaagaactttttaaatgaaagtttcttactttgttgaaagattttgagatacatgaaaatttttgaaatagtatattaaattatttagaaataaaatttgatagagattatggtaatgttcttaagagcaaaacaaattgttttcaattatgatgattgaaaatattgaaacaaaaatagttattagcttttaaaaataatatttagtgttaatttatcataatagttttttgtgttagttggttgagttgcactttattatctgtaataattatttatttttaattattatataagtctttaatttttttgattttttttttcaatattagagatcccttattctaagggataaaaaatttaaaacaatgattatagttggaattaagagataattttttcttaagttaaaaattaatctaattgtttgttacataaataattgcatctt

SEQ ID NO: 129056 - DNA, 2008 bp, Cannabis sativa
gatcgtggaacacaatacacataaatattaattttttatttaactcattcatatgtttatgatcactctacaataattatataacaaccccaattaataaataaaaaatgttgaattaaaggtaccacctaaaatataataatattgcaattagttaaattaattaagtatttgagtctaacatgatttaattaaatataatgaaatatcgactgctagctatatttgcaatgtggtactggtcaaccatctcgtgaaggccgacttgagttgaaatgggttataggtaattttttttttttgactcctactacaaagataaatgatatttataaaaattattaaaaatatatattttttaaaagatatttttttatttgggccccttacctaaataggtcctaggtgcaggtctagcctgcttatgtttagtctaattaagtatcgggtcacatcatgtcaaaaaaaaaaagtatcgggtcacatataatttaatgtaataactcttaaaaagtatcgctagccaattataaaatgacacatttaaaaggcactaagcactgcaggtgtctaatagcattaatgctctaatcacaaagcaatattaacaagattaagtacaaatttaaaaaagatctgccataacttttgtgttattaattataatatgtgtgaacttccaattcattaaaattttcatatccaaacaaccatattataagttaaatctcagcacactaggacgtgagtacaaatatgcaaaaatacaatatattaattattcttttttttttcaatgattctcctatactattatattcttattgatgcacagatgtaataaaaatttaaagtgtaatcagcaataattttatattatttatgtttttattaaacatagataaaatttataaaagaattaaccaacataatttgtttaatttgatttgaaaattttaatttattttaattgttatataaatatatataattttagctaaatattacgtgcaagcacataacttctacagcataattatatataacttaataataaatattaataattaaccaaatagttccatggctgatcagctataaaaagatgatgaaaaaccaccagagagagagaaagagaatatataagtcttgatattgatcataggatgaagggtagtattaatattattattattagtgtgattaagaagaataaacatgttacaataataaggtatttggtgttaatgatggtattattattattatttgtgagtaatagtactacttctgaatcatcatcatcatctcagatgttcatggtttctgattatggcaatggaaggaaactattgtaggtgaaagcagctacgtactacttcaaataatattcatctattcatgtattttatatataataaatatgtataattatggaattatttttatataacaaataaataaatatattcgtttgagacatatttttgtgtatttaatatattaacttctaatatatatttttcataatattcttatttttcgggtagatctagaaactaattattgattataatacagatgataccaaagtctgtaatttttgtaaatgaaaaagttgaaaccctaaaaataaaaggatttctttgtgttaaaatattttttttttttaaatttttactttattaagtaaaatattctaaatttaattgactacgagctaattaccaagcttttcatgccgttgacacaatgttcaacacaagcttggattgggtaaataaataaataaaaaattgtggaaattgatcctctaaaccaacttattatccaactccttaaaccaactaactttcggttatgttagttagttagttggtgctatccttgtttgagttggggcctatatataagtctagtcttttcattttttaagagggagaacagagggtagaagagagagaataagagagaggattagagagagttgcttagggttctaagctga

SEQ ID NO: 129057 - DNA, 1897 bp, Cannabis sativa
tctggaggctaaaaataaaccctagactctaacagggagcaaaatagctaaatttcagatttactaagatattcataagtgtgagcaagaatttgggatgatcatctctaaactggcgagtattcataatattcaacgagaaatgtgcgaacactccaattgttcttcttgaaacccatgattattcaagtttcaggcttatatttccagatatatgcaaagttttgttagaaaacaaaatttcacatatgtacttcctattgtcacatgcattttctatctcctaaaacgcagaatatagattgattctcaaattaaaaggaaaataattaccaacaattttctactaaccttgagaatgttgatattctttagagaatcagaagcttctaaatccctttgtggaaaataaaagaaggaaggtggaagaggttcatgtggtttcaaaaatcagagaaaaaggaagagaaaaacaaaaatgagagggaaaagaagtgaaggataattttgtatctggaagtttaaataccaatcccttattaattgggatggagacacatggcaagagaatgcctaaggtctcacaatcaaacaattatccataataacgcctacatggactctaaagagttttgatgaagtggcaccccaaatgggttaagtataaagattacagccgtctttttgaaacactcgattagacaaccaaaagtcaccatctcgtgacaacccttcgcctgcctctcgcttatagtttccctcaagacataagctgtcagtcgcggaactaggggatctgttataatgagaatttctcacctggaaactcgagactgggttcctataagaatgacacgtggactcactctcctcgaggatggttgagatgtcagttagagatcccttgagtgcaaacctcgcctgaactagactcagcaagatgatgtgaccttgatagtgtctagtcgcagtcgagtagctcgcatggagcaggactgaagaccgagttaagactcgcatataccaagaagtatgcaaggactataaaggtcttcctgggaagaggaaaagattgctttcacattcatcgagctggtccggatgacccaataacctcgataactcgataaggactcgcatgtcttaagttatcgacctattacaagatgtctgtataagcgacttgaacaggacgcagacatcccagacccgattagtcttgtacggatcttaagcttgcaagcttatgcaagaatatgaacagataactcgcactatagaagtcacatatgttgttgcatttagtgaattgggctgaaactgttcttcatttattgtgtttacttttttgttgatttaattgttataattcaatgtaaaaacggattgataatgaattcaatctctgtgtaatcaatggacacttgctttataaaacggagtaatccaacgtgaataaaacaagacaaaaaagccttgcaacagtggactaagcaaacagtggactaaattatcaacctcagaaggacatgggaaaagcttcagctcgttgtcagggttattattgctatcccaaggagatgacccagtgagataccctttgcagcgtatctaaacccacgtcagcattgacctagtaaaagtgaataaatcacagctgtgtgattttcacataataaccgcaattattttacgtgagacaaaatcaaattccataattttagggaaatattattgtgggatatgaatctaattgtaattcacttccaccctatataactataaataggggcaaaatgtagtgaaacatggacaaaaaatccttgagagaaaaaaccctagtttgtatcagagaaatctaataagatagactcatggactatgcaaaattttaact

SEQ ID NO: 129058 - DNA, 653 bp, Cannabis sativa
ataaatatttacactccatcttgaggggggctattaggattagtctgttactccaactgtttaggagttagttatttcggctataccgttatgcctctttggttaagttgttagtggtaaattagtcattataacttgcctatataaggcctattgtattagcttcaatttaataagagagtttcatttttgatttttttcataaaaagtgctcttaatttttttcaagagagggaaagagtgttaaaaaacgaaatataaaaatatataaaaaaaaataaagaaagaaagagaatagaaaaaaaaaaataaagaaagaaagagaattggaaaaaaaaaaaaaagaagtagagagagaatagaaagaaaaaaaaaggtcaacaattaattttaaaaaaaaaattagttaaaactgactaaaatatataaaaaagagaaagaaaaaaacttttaagttggaaaagtataatgttaaaattttgtaaaattttagaaaaaattaatatctagtgtaaattttttaaatttatttgcagtgggtatcacctttaatattgtagggattattttacaaaaacataaaaataataaaaaaaattacaaaaatacggtttcatgaaattttaaaaatatttacgatttttttgatttta

SEQ ID NO: 129059 - DNA, 604 bp, Cannabis sativa
accaagtttgactaagtttctacaggattctggctacgacattacttggatcatctacgacttcgcttgttactggctacctccactcgccatccgcctcgggatcaagttggttttcttttccatattgaacgccacgtcgagggcgtttatgataccgcccccggaatctgctagtagtaattaccgtagccaaccagaggattttacggtggttcctaagtggtggaaggatatgccctacgacgttgcatttaagttgcacgaaatggaaaatcactggaagggcatggacgcagatgtgtctgattttcagcgggtgactgaggtagttaagggttgtcatatcatgctcattcggacttgccctgagttcgaacctgaatcgttgagtcttctcaagactctttacaataaaccggttctaccaattgggctattgccaccgtctgaaccacgtgacgatgaagatcacgagagatgggaagctctaaaactgtggctagattgcaagaaagacaagtccgtagtttatattgcgcttggttcggagtttagcctgagtcaagaattgatgcatgagttagcttttggaatagaaaaa

SEQ ID NO: 129060 - DNA, 620 bp, Cannabis sativa
  modified_base (69)..(75): a, c, t, g, unknown or other
gtgtttattttcattgttttagagttcatattaggttgttaatccaacatacttgtttgtaaatctagnnnnnnntaaaataatttccaacagtttcgtctagataggcaaaggtaagacaaagagaaagtagtgttaaggatcgacagagatgatcgagaaagagagaaatttgcaaagaaagaagagttaggattttagggttctatttttatttttaatttttattcttttatttatttagtaagaaaactaagtaaatactttttgtaattcaaaataatttttataatgtttaaataatttcattatgtggagaaaaaaattatgccacatgtatatggtgtccatgtgtagagtacactatacacagacaatttgacatggcacttaactagggatgcacattttccccatagagatgggccccacgaggacccccccctccccctcctaatggggaggggatttcccgtctaaatggagaacatggtggggacggggattattttttgtccccaatgttaaacggggcggggacagggatcgcactcctcgctccgatagggaccagtttagtattttattttatattttaataataatttataatttataat

SEQ ID NO: 129061 - DNA, 699 bp, Cannabis sativa
tgttctttctctctggtgattcccagtcagaaatgaatcaacccatttaactctccgttcctccatcatcaattcgcttccccccctcttcgacttctttgagatcgtccatctcctcttctgttcttgttttttcttcttttttatagcagattagtgttttaggtcactgacggttgggggttttctttgcacctagctgtgcttgcttcgacgagcgacggccctttctatcgcacccatcgacagaggacaagttaatcggagttgatggctgaaccaacatcgtccatgatactgggcatttaatttgcaattttttctggggttgacagctaaaccaacagctcggttgagttttttctggggtttgatatttgcagttaatatgtaattttttttgtttatagatttagggattagttttgatttatattgtatgtttgtgtgttatgaagtttatattgtagttgaaataatgtatatatttttgattaattcttactcatttttgttgctgttggttgatgtatagattttttgcaatgaattgatgtatagatttttgatttatttgatttttaataaatttatagtcaaaattaaaatatattaatttataattgataaatgtatacttaattaaattgtattattaattaaattatttttataaatttataatatataatctgaatt

SEQ ID NO: 129062 - DNA, 1180 bp, Cannabis sativa
tagttcagaggaattttaacggctaaaaaagttcagggaagttcaggggttatgatgggttatgatttgttatgatttggtacatgtcaaagtttgggaggaaaaattactaattagccttatttaaaatttattatattatattcatttcaaatatataatattaatatatacacatattcatatacaaaaataattattaaaactaaaataattaataaaatatatttagagcaacgaataatattctataaatgtcgagcaatgaataaaaaattttaaagcaattttaaaattaaaaaaaaaaataaaaaataaatttacagtatccgttgtagcatgtttttagtacaattttttaaattttttaaaatttctttattttaaaaaaactgttacgagtgatgggttaaatgccaagtgaagatgccaagtaggatgtgaattgggattgccacttatgtacatggcatgtatttattgtgatatatttggtgggaataataagatgatggatatgtagtggtacaaattcaaatgagcattgctattaggtaccagcagtgcctagcatcttcacgatatgtcgcgttgtgattggctagcgatattccgtaaaaactattatattaaattatatggaacccaatacttaatttgatcaatagcgatattgacacataagaggtgctagacaccactagtaacctttagcatttctcaattcaaataatgtacttaaaatatatttatggtttgttgtttgtggcacgcaatgaaagaattattgagccaatcgtcttaaaactcttccaacaacaaaccaaaaactcacactctggttgtgaaaccgacacgtactgccacacggtccctttgctactcactagaaaatatatggacataaaggcatttaaattttagaatccttatttttagaaatatgtaaaaaaaataaaataataaagagtattataagattcaaattcacactattttaatgtattatacactcaaccaatcaagttatgaatatttgttgtttataatgcatttaattttatttaaataaaagtctaatgcaattttttatgggaattttgattttatatgcttaaataattaaaaaattttattattataccaaaaacttaaaccataaaaaaactatacttttttt

SEQ ID NO: 129063 - DNA, 1386 bp, Cannabis sativa
taaaattaataaagaatattaatattttgttaaaattaacgtaagaaattaaaaaatatcgttaaaccaaaaattctgttatatagaatagatatattttttaatatggtgtacacaaagatatttttaatttagtagttttatttgtcatttaattaaagtctatttatagttcacgtcaaaaaaaaattctatttatagttaatttttttaataatctaaaagtattctatatatgcttagacaaaaatgcaccccacactagtgactagtgactagtgactatatgggtaatatactgcctaaaccacacactaaaagaaacgaaaacaacacattatatagccttatagatgttaggtgttgatttgtaacttgaccaaaaagttttagaatttatatacatattatattggaatttagtaaaatttttcaaaagtgaagtttgtgatagtgcattgagttctaagatagaaacacttcattattaaatatataaggtgtaactatgagatcatagatttggactctaatggtcatccagttctgtgcgcatgagaactcgcgtgcgtcgccatccgagcatgccgagctagcgggttggttgttatgtcgttttattctttatataccgaaaaattaaaataaatattttttatttattacttaattaattctataatgttaatcaattaaagcagtaaaaacgatcaggcaatgattcacttttcattgccatgaactaattaatgttcttcccacaatcatatttattgttttcttatcattttattgtgatcgacttctctatataagtcgtatcagaacaaggggagagcacatctttcttcgaaacacaaaaaaaaaaaaaatctttttttccttatgatttttcgcaaagtaattattgaatgtaatcgagcgatatcgttcggtacagagcgattcatatacaaaagttattttatcctgagcacgttggttgatagactgtcgtgcacacttcgggaaaagctgcaaaacatcttaaagagagtactaacatagtctgcgactcaaccagaaatatcgttccataatttgttccaatttatttaattctgcagaataacaatatatatatatatattctatataaagtgtgcttatatatcagaattttttatttttgagaaattcataggtgactttttattcatattaaaaataagatggtttattattaaaaataaaatgttttatgagaaatttatgggtgactttttatttatatataataaaataaaaataaaataaattccattaaatccaaccaaaaaaatagggttctagaatttctttcattaccgtatttctaaccctatgatttattattaaaaataaaat

SEQ ID NO: 129064 - DNA, 921 bp, Cannabis sativa
gattgaactcatatcaaagtcgcctttctccaatgctgtaaaggatgttcgatcttttcttgggcatgatggaatctagattctataggaggttcatccagattttctcgatgacaactcgtcatttgtcgaacctcttagcaaaatatgtggtgttcaactggacaccttagtgtgaagatctttcaaaacacttgtcaccaaactcacttctgcccctgtcattctgccaccggattggaacttgccgttcgagatcatgtgtgatgctagcaattacgttataagcgccgtccttggtcaacaaagggaagggaagcccttcgtcgtgcacgatgcaagtagaactcttaataatgctcaaatgagctattttactactgagaaagagttgcttgccatagtattaacactcgacaagtttcgttcctatttgattgattcccttatcacggtcttcactgaccattctccccttaagtacctcctttccaaaaaggatgttaaggcacacttaattaggtggatccttttgttacaagaatttgacttgaccattaaggacaagaaatgagttgaaaacgtggtagcggaccacttatttcgtcttgagttttctgattctgttgattggccctgccattcgagatgacttccctaatgaacatttctatgtcgttactaagttaccatggtttgctatattgttaattacttagtgactggtgagcttcccgcttcttggaatgcacaaaataaacgtaaatttttagtcaaggttcgtaactttgactaggatgatccatatcttttcaagtattgccctgaccaaatgagatgttgcattccagatgatgaaatttttagtggcttgaactttttctataacgaagcatgtggtggtaattttttttttttttt

SEQ ID NO: 129065 - DNA, 1458 bp, Cannabis sativa
  modified_base (1419)..(1430): a, c, t, g, unknown or other
caaaacagtctatcgcaggggtacaatggcaccagacatggctgaagctttagctattaaagaggcgttaagttggatcaaggatcattaatggcataatgttgaacttgagtctgattgtctctcaattgtccaagctattcgaagtaacatcaccacggtttcgcttcttaggggagtggtgatgaactggcgaaagcttctatctattttaaacaatgtttctttattttttattaaacgatctggtaatatgactgcgcacaactttgctagagcatcatattctttttcagatcgaatttcagtgggagggatgttcctactgaattacagtcttgtcttttggttgatttagcaaattaataaaatttcaatttgcattaaaaaaaaaagatggtaaaaataaaatttagacaattaattgcatgtttgcctatttttttttcttttttgggtgtataattaattattttaattatatttttttggaccaaaaataatttagaaattttttgaactcttatgtgagaaatatttctcttatccaaaaatgattaatgttgttgatttcattttttaatttttttttttaaaaaaaaattgttggttatcagcaccacgtgaccgaccttattccattggatccaaccatgtgatgccatttgtcttagctatcaaaagtccactattttagaatatctttaataaaagtattgttagctattagagattagtggtgcctaatattttctataaataacgttttacgattagttaacaatattttttaaaaattatttttttaagatatatcagacccaatacttatttgcactgataacagtatgatattgaagagattgcaaggcaccagtagtactattaattctctatctctaatagtggtatttttaaaggtgtcaaaaatcttctcattatttaaaaatataatatcgacaatacttttttacattttttattctaaaatatttcaatgataagcatctctaaaaattttaaaacaagtgtaaaaataaaaaaaataaataaataaataaataaaaagaaaatatcctttttttatactatttaaaaaaatatatttataatgcacaaaaaacattatatattatgtaatatttatttatttttacaaatacaagtaaacacaatatataaaaataataaaaaattatagctaagcactaaaataaaaaaaataaaaaataaaaaaatctaagtacatttaactaagcactatttatgagataaattttgagctattttaacttatctatgaatatacttttttgatattttttaactcttagctatttttctttatctctagagctattttacattggttattgtgagtgctcttaatatatattggggtaaatactattttggacnnnnnnnnnnnnaaaagttacagattggaccctgtgtttt

SEQ ID NO: 129066 - DNA, 934 bp, Cannabis sativa
cgaaggactcatgggttgggttttcaacgtagtacgcagtggctgctactatttacttcatcagtctatttgtggttcgctaaggttattagtgatcaaattaaattttctctcaaagcctagaattaagagttgtaatatgaaatcattttagcaagaaagatctcaaagtaattgctagaatcgaaaacatgtaaggtgttgggatagctgctttggcagtgtgttttggttggtgattgtttgaataaaaagttttctttctttaaaaatatataaatatattttcttttaagattagtctaaatatttagagattgatataagatttgtctttgccttacaatctcgtttgtcgtttttggtttacaaaagcacaaacaaaatataaaaccgaataaattaatgtactaacaaaattcactaaattcgctttattgattgatacaactaaaattgaggatttaggctactcaaatttgatgcgacatatatgcacaactaccacatatatttctaatcatatatagaaatagataaacataataatttttttttaaaaaaaaaaatagagagagacgtgttattttatatattcatcattaatttattttaaagcaataaaaaaagttattgattttacttggaaaaaaagtcctttgatcatactatatatgtgttcacaattactataaaaaaaaaaaaaaactgctaaaatatcgaatattttagtcgaaatttcatttataaaaggaattttatttataatttatttatttttatacttttgtttcacaaaatatcacatatatatatatatgagtggttctacaattattacaaaaaaaactattatggctataacttttagtcacaatataatttattttactaaatgtgatttttagtcacaacgaaatgttacttgtgacta

SEQ ID NO: 129067 - DNA, 1146 bp, Cannabis sativa
  modified_base (26)..(29): a, c, t, g, unknown or other
  modified_base (56)..(59): a, c, t, g, unknown or other
  modified_base (86)..(89): a, c, t, g, unknown or other
  modified_base (932)..(934): a, c, t, g, unknown or other
taaactcaatttttaacaattttatnnnnatataactaactttaagataatttctnnnnataactaactttaagataatttctaannnnaacagatacagaaaatgtaactagatttgtcttaacatctttagaccaaatcatattattaagttttattttgacaaaaaattaattcaggatcctatttgtacattttcaaaaatacatggtccattttaaaatataataaaacatagaatccaattagtaacttttgcaaaatacaggatccaaaatagtatttaccttaaattatatgaaatacaaataaattaatcttaaattttcttattaattattgataagaaaataaatttcttaaaatttcaaattattttttatttaaattatacatgtgacacttatgtgacaatgacacacaagtctcaaaactatttgattagtcacattggataaaacttattaaaagtcttatattttagcattgtgacatagttcaaagggaatagtaaataaattcaaaagacgatttgataatcgtattaattcgagggacaaatcctacacataacctttaaattaatataagaaataaaatacacctatacaacttgtatataatataatacacatctatttatgtacattgaggtaaactaaactaattatatttctttaataactaaattcaatttttataaattatatatattgaaaataattctccaaaatatactaggggtggggtatggccaccccataccataacatagttccgctattggtattagacctctattacatgatagagaactgtcaatataccacacttaaatattacggcctgaaatacatatcataatataaaactgtttacaatttttttttggataaatactattttggatggaccctctgttttgttaaatnnnaaaatagaccctgtatttttcaaaattatacaaataagaccttgagttcaattttcaacaattttattattttaatattacaaactttaaaataattttaatacgaatagatatatgaatatgtaaccagttttatcataacatctgtagattggattattattaagttttatataaaaaatcagttcagggtcctatttgcacaattttaa

SEQ ID NO: 129068 - DNA, 661 bp, Cannabis sativa
tgtttatattggttgtttttttagggaaatgccttctggagattggttagaaatgtgctgagaacaccaacacaagagcaaatcaaatgtcagcatccaaagcctgttcttcttgatactggggaaatgaagcagccgtatgattgggctgttagtaacttattgtctattttttttttcactttaatatgcaataacttttactatcatgaattgttacattctatttattgcatgcagaagatgtttatctacatttaatggttttattcttttgatcacgaaaagatttaacatagttaattagtagcgctttgaaatgatatttgttgcaatttatttgaatacgagggatttgatgttgctgctcaaacttatgtcatgaactgattttgcagccttcaatagttccagttcagattttgcagattgggcaacttgttattctgagtgtacctgcaggtacaagattacatatagcattagtaattcaaaacaatgtaatagaaatgaacactattataattgttagactaattaggatttttgcccttttaactttgacatgtaccaaatcatgcaacctgaacttttaatgtcgttataaatgccccctaaactattgagattgttttttaaggacttttgttcaattttagta

SEQ ID NO: 129069 - DNA, 1166 bp, Cannabis sativa
ggcctgtgttaaccagtggccaagctgagatgttgatggctgatttttcaaggaatgaagtcaagcaagttgtattcagcattcctggaattaagagccctgggcttgatggttttggcagttttttcttccaagacaattgggatctgaattggaatgatgtctttgaagttattacttgtttccttcagttagggaacttgttgaaagagattaattcgataatgattacactcatccccaaagtcaaatgccctaataaagtaagtgactatagacctatatcatgctgtaatgtgctttacaaaatagcaactaagttctagacttaaaaatatccttccttatctagtagctctagatcaaactggctttattaaagattgatttattgcacataacatcatgatatgctaagatttgattaggaactatggaaggaaagcaacaaaagccaattgcatgatcaaccttaatttgcaaaaggcatatgatacaatagaatggggtttttttagaggagatgttgcaagcttttaagttcccagggaaattcatcaagcttattatgagttgtgtgaaaactctaagattttctctaatgttcaatggaaccatgcatggtttctttgaagcacaaagaagattgagacaaggagatcccatgtcacccttgctctttgtcttagttatggaatatcttagtagaatcatagttatagtgggaatgaagagagagtttggattccatgaaagatgtgaagaactaaagctaaatcatctcagtctttcagtgttttatcattctacaaagggaattttaagagcatatacatgcggctgcaggggctaaaactcttctccatcacatctggtttgcagccaaatagtgcaaagtctgctatattttttcgtggaatggaagagagtgaagttagaagggtgcttgatattttttagatttagcagacagaataacccttttaaaaatcttggagtgccaatcagtgctaaaagaattttagcaattgactgtggtactctggtgtagaagatgacaacaaaaattagaatatggagcactagaatcctatcatttgctggtggaatagtgcttattaactctatgcttttaacaatccatacttactggagtcaaatcatga

SEQ ID NO: 129070 - DNA, 570 bp, Cannabis sativa
tacaattaatgatgctcaaaagtgccgctgcaaccataaatcggtcaacaagtgtaagttttcttattcattcatattacatactaagcatgccgtttaagattcagcataggaatccaaccaagaagtttaatcgagtttaaattcgagacaaatcgatccctcgtggtgaccaaataataataagtacagaaaagaaaagtatatttaattttatattaaaaaccccaaaaagacaaaaacgtaaaagaaataagatgcccagaatatgaccgttgaatccagctaacacgccacgtcatcaaaagtatgctctcctcgtggatcgctcctttattaaataacccctttctaatttacaaaaagacccctaagcttattgcttttgttttaaaattcccacacaagaacaaaaattttatagtacaacacttctaaaagcatctctttcagggtattccttaattaattaggatttttttgctccttaaattttaacatgtactaaatcatgttctctaaacttttttagtcgttaaaaatttatcatgaactattgagattgttaga

SEQ ID NO: 129071 - DNA, 596 bp, Cannabis sativa
tctttacagtggtagccagtggttacgactcaggagaggttggtgagagaaagggaggaggttgattcatgatggtgaatggaatggaaatcagtatcaaaatgagaagatcttgtgggtttctttcttctctgactgaatggatggattctaatcgagtacttaggcaaatcttgatatcattgttagaggtaatggaaatttttggttatttcgactgggtcgccaaggctgcacacacttccctaaagagaaattatcggtatcatcgtgatttttttgttttaatttttatatcatctatcactattgcttgttttatatatttttgtttatgatcttaatggggtagatgttgaacgggtttatattagaattttgatgaccgtcaagcctgggctggccttgagcttgttattggcggccattgatgcttgaactttacgctaccaaaatattcatgttttttcattaacgtaatttaattgagtaattaattttgaatttatatttgttcatcttttgtatctattatatttatttttaggggttttttatttttatactttaaaatagtttttttttttttttgcatt

SEQ ID NO: 129072 - DNA, 846 bp, Cannabis sativa
agtggccataggtgggggtgtgagtgttggaggtcctgggttcgagtcctagataaaacatgatgtaatatataaacgcttgaatcaaaaaaaaaaaaaaaagaacactcaatgaagaatcattgaattcccaccaataaagctttgataaattcaccaacccaaatagctattctatatttttgatagtaactccttctcatgacattaatggaatccaacctctgaccaccattctctctctctctcttcttcttcttctgctctggctttcttctttcttattaccttcccaatataaaaccacctttctatgttttgtttctttctcctttactaatccttctcccaagaccttaaaaaaaaaaaacctttcttggtttcattaaaaaaatctttgttgggttttttttttcttttctcttttacaaataaaaaaaaaacagtaaaaacttgaactttacatgttctatggtcagagactcagagaaactgaaagacaaaagtgcttcccacctttaattgtttgtttctgttggcttttctcttcatgaatctgcaaaccagacaaggtgagatcacattcttcctttagagtccccccccaaaatagatgcttcatactcctcaaaatctcacttgttatccaaataagtagagttatagcctaaaccaaccatcttttgattttaatggagttgcagaagcagtgaaagtgatttctaaggtagacccagaaactatttatggcaatatcatggtttagttgaaaaaaaaaaaacaagataatccacagataagcttctgggtttgctttgtttgtctcattcaaaaaaaaaaaaaaaa

SEQ ID NO: 129073 - DNA, 910 bp, Cannabis sativa
aatgataggaaattcctatcagaaagatggacagaagttgtgtgcctattaatttttgttttaattactcaatgacatgtgttatgtatgtttacagtttaggagctaatagttagaatgcttagcctttatttgcaatgagtggaggacacataccaaccaatatttagcactctagttagaggatactttggtaggttttctgcatgaaaaactttgtaatgctttatttatgtctggattttagttatttgcatagaaatgaaaataatgaacttgatttttctatgcgtgactaacaggagcacaagcataataataagaatgtgttttttattatgtccagtgttcgtgtgagttttgatgagtttgattaaatgccctgacccttaaaattatctattttttatcattatttgtagttgaaattgatagatgtttaggttaataaaatagagaaaatgttgtttgattttttttataaaatgtagttattagatttagatgtttttgcatgcctcaattttgatatagttgagagtgttttgttaatgtaggtccatagtgaacatagtaaaaaataaagctcctccttcaatatcttcaaccctaaaaatttgaatcctgaaacacactaaatttgtgcaccttaacttcacgcctgctgcggagggttcatggaagcgctctccggttaatgataagagcttaaaattgagcatggcaaaataaaataactgtttttttttttctgggcttcattacattagccaaccatatggaaaatcttggaaatgttctatcaagcttttgcttgttaatgacaatttatgtgataatcatcctgttgggattttatgccctaaataaaatccatttcaatctaatctgatttgttatcaataaaaga

SEQ ID NO: 129074 - DNA, 774 bp, Cannabis sativa
tgtgtacatggaccaatgctagaagttttgctctttctctttaaaaatttatcctgtgagtcttttgaattgataataattactttatggtggatttggtatgatcgaaactcaatagtgtttggtaataagaagtcaagattagatgttgttctagagtaagctcataatcacttttttgaattcaaatcggtggggccttcatttgggattgcactattcaaaccctattgaaaacccttggtggatgcctcctccttctcattctttttctcttgcgactaatgcttcaatgattcttgggaggggctttgtcagattgggtgaagtgatacgggacgtcgatggtgtagtatggatggcttagtcatctggtgtgttaggtgaattttctgtcaatgtagcagagctgcttaccattagactggacctaattctttctcaccaatttagttttagtatttccattattaatattgattcttcagtggcaattagttagattaataatcttcactcaaattttagttttcaatctattttattagatattaattctttattagctgctgttagttgtggtttttgtagtaccatttcacgacttgcaaataatattgcccacaacctctattactagttagaagagtatatggacaaatacttgtctatactttttaagttcttatgtatcaacaaatttatgtgcgtttggaaagtaataatgtaattggaggtaattacataatttggcatgtttgtctaaccatgtaa

SEQ ID NO: 129075 - DNA, 859 bp, Cannabis sativa
tcctatgttgtgactaaaaagtctgtagctaaatgtattagtcacaaaaattacaaattgtaaatttgtgactaaatataatttcagtcaaaatatttgttgtgactaaactaaattagtaacaacatatatttaaatattatattttaatcacaaataattttttgttgtgactaaaaattaaatttaattacaaaaaaaattatattataacaaaaaaggattgcttttttaaagaaccaaagcctttacttataacttattaattaattagaacctttcaccctaattgacatgcaaaggggcatttatgtaactatagcttgactaataagagatactaaccgtcaaactaagagcattgttattaggtattggtgatgcctagtactttctagacgtgtcatcttacgattggctaacgatttcttaaaagttattacatatctatgtataggatccaatacaactaatagcacgcgattaaagagtgctagacactactgatatttttttagtattttttttaaaactaattgtgattattagtaagtaattaaaaatacttttctttctgaacaaattaaaatgaaactttttctgcacaatgcaacttttttatcaagtgctactttaattgcttaagaggttcgacatgcatctatctcttagagctagctgatgagaaaataacaaagcaatgtcttgtcaagttgggccggcccgtgagtaggcccatcacccaagtaaaatttggaaaatttataacattactggaatttgagtgagtttttacaaaaatactgtcacacagaaattttttcaaaaatacaatgtttttataaaacaccagtaaaac

SEQ ID NO: 129076 - DNA, 646 bp, Cannabis sativa
tcccaagcaacagctccagctccatggaacaaagctcggcctttccacaaaaaggctctacagatagcttctatagatttgatcaccttctttggcataatcagcatctgactccaatatgcctgaatagctattagtaccgagttgagtaaggtaattctacctgtaaaagaaaagtttcttgagctccaacttttaatcctagcagtcattctttcaacaagcaaatcacattctttaccaaccattttctttgcacaaatagggaaggtaagtgaaaggtagggtctgcctcgagaaaccagatacttgcattaactgtttcacactatcttcatgcatgttgctgcaataaattacagtcttacttgcattaggatgcagcccaagtttgagtgagaatagttttagagcctgcagcatataagaaacactcttcgtatctccatgacaaaacaacaatacatcatctgcaaatgccaagtgattcaatttaagttccaagcatctgtcatgacaaagaaagtcctccttctcacctagcttcctcatgagtctagatagatattccatacccaaaataaacagtagaggatgttgggttttgtgccctaaataaaacccttttacaatctgattagttatc

SEQ ID NO: 129077 - DNA, 820 bp, Cannabis sativa
tgttaatgaacaataatggatagggcctggagtcttgccttttggttggcattaattgcttgaagaagagggcagatgagatctttccaaaggagctaacaagtgttactatgttagtatcacctcgctcacctatctatacttcatctagctgcgcttcctaagctacctaaaccactaaaacagctaacaccatctatgatgttattgggtaaaaaaatgagaattgttaataggtactattagtgcttaacacccttctcagtgtcatgtcgctattagtataattaaatatcgagtctcatataacttaagaaaataacttttaagcaatattgtcaattaatcgtgagactacctatgaaaggtattgggtaccagtaatgcccaataacaatatttatacataatagcaacataaaaactaggtgccataatcaataaactaaatgtatattttttaataaaataatagcaatattatgattgaaaaagtaggttaaagtaagtcattactgatgacgataaagtaaataaaaaatatacagtaattatgtgttaaatttaatataatgctataaaatatatcaaatttaactcatttttttagcatgtatcaaatttaatataagttatagtatacaattgaaaaagaattttttctacaaaaatatcaaaatataacattacactacttatttaatatttcttggaaatgctctaaagggcaccattttctgttataataaaacaactcccaatacaagaaagggcattttacaattttgtatacattattttaattaataacaaaatatgt

SEQ ID NO: 129078 - DNA, 841 bp, Cannabis sativa
gttttgagaagttgaacctcaatttttttttttccatgcgatgaaatggttaaccgtttttgggttttttaagagaattaaaaatcgtattttgaccataactttttacttgggtgtccattttagacgttctatataccactttgaagcttgtaaagagctctacaatatggcatatgttttaaattcaaagtataatttttattttggagtgtttatacaatgaggtttggtagaaaatcctaaattgtttaatgcaaatattaagtagtgttttgggataaacacttattaatttatcgttgttgtgacatagggctgagatcatcggatatttttttctccactcgggttggttgacatagggctgaacattgggcgggttggccaagttttgggttcgtgggttttgggttcaaaaaattgtacccggacccgacccgtgaaacggtttgggttcgtgggtttcgggctcgcgggttcgggttgaccaggttgacccagtcaactcttttttcaaaaaaaaatcaaattctcactaaactaacatacatttaataatgtgggcattatttttttattttattactaactatttttatttttattttaaaatgagagccttaagtagtggaggcctaaaccgggttcatatagtaatactaaattagaaaataatatttaaggcttatggcttctttgtgggtttttaatatgttaactctataatatataacacaaacatgttattcatttattttatttatttatttttaatatattatacatataagaaaaatataaaaaaaaaacaaataaatttggccaggttggcgggcag

SEQ ID NO: 129079 - DNA, 907 bp, Cannabis sativa
aacaccacaacgcataacaacgctcgagaagcactccagcaagataaggatctagtttggaggacttaatttctcctcctcttctttgtaactatattgtgtttctttgtttctttgctatacagttacttcaaaaaaatcgatgtggtactttaacacatgtgatataaggcaagttgtatatctttttttaggacattaataaagtaagttagtattgaatttatagagttaatattggattagaccgacaataacaatggttaaaataaagtaaacttactattatatctattctaagttaatatcatttagttaattataaattaatttgattcgaatcttgagatgattaaactttaagataattaaattttttaaattttttgacttgttcgttatctacttactctacagactagttcatacttacatcttaggaattcgatagtgcaattgagtagaagcgctaattataaatatttattgagattttgaaaactaattataattatattaaagcttaagaaatatatcaaaaataaataacaagacaagagattttacgtagtttaaggattaataacctttagtccacaaatcaatgttatttgtcttgaaaagcctttgagtattatacaaatgtttgccaagtttacgaaccctataatttgccttagctgtcaagtattgagactctaaccccttgtatgcatgatttttcttatatttatagacttagggttctagtctgtgaaccttctccattgattttattcttgatagtgactttattcagttcccgatagtcgatacacatccaaagtgacccatccttctttttcatgaataacactagagcacccctagggagaataacttggtcttataaatcccaagctaagta

SEQ ID NO: 129080 - DNA, 2127 bp, Cannabis sativa
taataaacatacttgttagtagatctaagatcctggtaaaataataaccaacaatatttgagttgttcaaaactagtgggagttagatgttcggttatggatattagggtttgatttcggagtttggataagttgtttattaattttattgttatggtataggacccgagatcgtcgagcgtaatttcactcaagtcggcccacacacctgatttctggattgaggtaagaaaagtattatgcatcacttagggttaagtgattaatagttgcgtgattatagtctcgattataatcaagaatttgaatatatgtttgataagcctcggttataactgagggctggaaacagtcattaccgttacgagtaattactcttgaaactgcggataggtttcttacttatcgttcgatgtatcaggcaacgatagtgacatatatagctcgtgggtaacgagtggtaagggtactttatgaagtaccaaggttgtgtaattacgataatgtgtatttgttaaagcatgattaatatatgatgtgactaattgaatgttgtattgtttatagtttgattcacttttcttgctgcgtctttgtgactcaccggtgctaaatgtgcaggtaaaaggaaggctaaagttgagcagtcatgagtttgaggtcgtatcagcaatttacattaagggtgcacatgggtcgggtttttggatttttggggtttcgggtttggatttttgggcttcgagtcttggaaatgcataaccgaacctggattttgggtgttcgggtgcattaggtatcgggtcgggctttttcgggttgggtgtagtcgggttcgagtcctattgggctgagcctgaaagtttaatttatgggctgaaatgaaatttaatttttaaaaatgtcatttttttttaaatttttaacattggttggatttttttttataattaatatttctgcattttaaaatttttgtacgtctacgagttacaacccggccaaaaaaaactacttatacacacccgaactcgaaacccgttttaggctttttcaggttgaacccgacccgactacacgggttttccggtgatcaatttttttggcaacgggtcgaggctggtggtcatgtttttcgggtgtgcgggtccaaatgtgcagccttaatttacatatcagtcgcgatgccacggcccagtgagtagggtgttctattttgattgtattttgaaatataaacctatgttgtaaaagtactgttaaaccagtttataaatattttgaaaacagggggttcccataaggattagtaattatcttttacgaaaattatgtgtttatttaaattacaaaattttaattaaccacacttttcgtataattatacttattagtaaatgtaaattttataaaagcacacacgtgattacgatgatgtgtatttgttaaagcatgattaatgtatgatgtgactaattgaatgttgtattgtttatagttttattcacttttcttgttgagtctctatgactcacatgtgctaaatggtgcaggtaaagggaaggccaaagttgagccaccttgagtttgaggtcgtagcagcaatatacatatcagctgcgatgccacggcccagtgaacagggtgttccattttgattatattttgaaatataaacttatgttgtaaaagtgttgttaaaccagtttgtaaatattttgaaacgagggggtcccgtaaggattagtaattatcttttatgaaaattatgtgtttatttaaattgtaaaattttaattaaccacacttttggtataattatacttattagtaaatgtaaattttataaaagcacacacgtggcgtcaaacattaacaaattagtaactttaaaatgaaaaataaagtgttaattttaataaatagaaaccttaaaatgataaaataaattattaattttaacaagtgggcaactttaaaatgttgaaaattaaattaattagaaactttaaaatgattaaaaaattattaattttagctaattgaaaacttcaaatatgataaaaaaaattgttaattttagccaattgaaaacttgaaaatgataaaacaaaaaaaaaaaaaaaa

SEQ ID NO: 129081 - DNA, 1172 bp, Cannabis sativa
tggtagaggcagccatacttgtattgtctttctttagtttccaaccttttgtgactggttggaaaccatcagaatcagttacaagttaattagctttaggaacattactcttttttttctggatttttcaacaccccttgtttttgtttccttggttctttctttctacattcatctgtagagtgtcccattccagcaaaatgatcacaaataacaggtttccactcataagtaatggccactattgtgttgcaaccattctcatcctcaaactcaatgagtttagggaggtcctgtttaatggccacttcaatgagaaccctgggaaagttcagcttgtcccttcttttagttgcttcatctaccattattggtttggcaacctatccaattatcttcaataaagatttttctccccaatattttaactctaaatcatcaagatggacctaaattggaaccaccctaatatcctctttcttgaaattaattgagggatcccaagctttcatcacaatcggtctcctgttgaaaaatatgtaaccttcaagcttttatttccacttctaaatctttcccaatcatcaatttttttgttggaagagtgggatcaatctccatttcttacaattcttctataggtccaaggttatctgtgggatccccaaagcaatgatctatgttcgcttccccactttaggctgtacttcattaccttttgccagactcctggtcagagctcttagcaagcatcttctctctttttgggctttaggttaagccaggttgtaacagtgtcaggaagattgttggtctccccttaaaaatcctaccccacaccttgttgagaactttaagcatgggtggtagatggatgttactaccttcaggtcatatagggcatgtcgacctatcattgcattgaagctgaatgggcacatcgattactacaaattgtaccatcaatgttctcattgtgggattttctttgattgtcaaaggcagtcggatgtatcccaggggtgcaatgccttggccaaaggagtcgtacattagttgagtgcatggtgctaggtctattagttggagccccatattttcataagttgatttaaaagcgatgttggaggagaatccattatccatcatgcacctagcaactgtcatgttcc

SEQ ID NO: 129082 - DNA, 632 bp, Cannabis sativa
aggtacaaaacagtcgaggcgagattctctattgagttctcacaaagtgtttcaactcttacacttttcacctagaaatttttttcatttacagaaaatttttcttacaaaacttaaactcaatctctctcttttctctacacctctctctctactctcaatcttatctgaatagagtactaaatctcattcttccagttcttctctagtatgataagcgcggtatttataggcttagaattaagattgtaaagttggtggttgcaagaaacaaggttgttaagttagttagaatagaactaactaacttaaccaattcctttttgagcaaaatcttcgtgttagcttacgtgccatggtctccgggaacgtgaacgagcttttggacacacagatcaaggaaatttgctgaaaatacttctagataggactaatgaattggcatatatcagaatgggatttaattttcttatatttcactctgaacgagtagcttggatacagaacttgaaaattgtagattttgtttttatatttttaaaaataaaattatttaaaattaaatttttatattattttaaaaaatacatcattatatttagggtaaataccattttgtaccctgtgttttg

SEQ ID NO: 129083 - DNA, 632 bp, Cannabis sativa
gtaaaatcattttatatctttttatgataattagtactattattagtaccatggtattcaaataactttgaactccaacaaaataaataaataaacattcgatattaaactatttatgcttccatttcaaaaatacatattaaaatcattcctgccaacaggttttcttggtcagaaaagcgtctagatgttttcttcctcccaggtacgtaactgatctattaggttgtaatttatttttactaattaattatttaatgaaatttatatcatttttcctgaaaagaaaggaaaaataatgagaccataatatggcagagttttaaaattttattgttcttatcgtaatttcattgaaggtacccacatggttttcttcttcctgaatgtagttgaggcaattggagttgtgatgacatttaaaccgtttttaacaacacgttgagagttagtgttgtgattaaatgatcaatatggcctaggcaattagatatatttgtttcatggacccatgtattaatgtactacttagaaattgtgaaactatttacatatatatactagaagaaagttacgtgcaaggcacgtatatttagttttatgttaggtgctctataatttaattgagaaag

SEQ ID NO: 129084 - DNA, 1182 bp, Cannabis sativa
  modified_base (639)..(639): a, c, t, g, unknown or other
gattatatttgcctcctgcttgtttcactttatccaaaaaggaaaaataaatagtttacaaatcatttgcaaatatgaaagtacctgatggttatttgtctaacatcaaaaagatgggaaatgaggttgaattaaaactaatgggtccgaaatcacatgattgtcatgcgttaatgcaacattttcttctaattgccattagatcagtcttgccgaaaaatattcgagtctttgacacatgttagcattttctttaataagttgtgcgggaaagaattagaactggataagttagatgcattacatgaacatgtagtaaaaacattatgcaacgtggaaaagttttttctgtcatctttttttgacatcatgatacaattaatggttcatctagtgagagaagcaaggttgtgtaggtcggtttgggcgagatggatgtatccatttgaaagaaatatgaaggtacttaaaagttatgtgcataaccaccatcggccaaaattatctatggttgagtgctacatatctgaagaggctgtggaattttgttcagagtacatggccagagttgaggcaataggaattagcaaacgaagaactgaccgagatgaggttgatagaggattaagggggaaaggnacaatggtgacagtgtccaagcttaaactagatcaagcccaattagttgtgatgaacaataatgcagaggttcagccatatataacgtaagtagcttttcctttgattaacatttcttaagacacgataaacaataacttgattcaccttacttgttttaccgtgaccgtatggagtcgttacaatcaatggttccaagaaatcataaaaataaagaaaaatgggttgtaaaccagcatcgtcaaactttcattgggtggttaaggaataccattatagcaaagttgaacgaaccgaatcatggagtatctgatgttttgagtcgtattgtacttggacaaacttttgcggtagcaaagcatgaagcgtacattatgatgggtaaacatttttgtacaaagtcaggagatattgctcgagaggttcaaaatattggcatacgtatcgtggtagaaaccatgcattttgcaagttcaaaagatagaaaccctgttttaggtactatgacgtattatgggattattgaagaaatatgggagctca

SEQ ID NO: 129085 - DNA, 996 bp, Cannabis sativa
aataatgtgccagtaaaggtcttaatactggtagaattcatgaattgtaccggaaaaactagtgaaatgaaccaccccatggcgcgaatattttccaatggttcgttaacttttaccggcgccattatgagctaacaaaaaagaaaaaaaataggagatttttaccgtccgactaaatttttttgggggaaactattgccagtgcatatttgcgtcggcaaaagtgtgtcaggaaaaataaattttgattttagcagataaatttaagttttaccggtgcacatatgcgtcggcaaaaagtcccaaaaaaggtgggaaaattcccgtgtgaaaaggtggtaggtgggaatacttttgccgtcacaaatgtacgcaaacaaaatttttgcgaaaacacaccgttttaatttatattaattttaaatgctatgttggcataacaaaatgcgccgaaaaaagtgtatatatatatcaagggggacgaagcctcccttcaccatttcttcttcttcttcttcttaaatttttttccataaccaccgcaccaccaccacggcaacatcatcgcaccaccgtacgaccaccatccaccagtaccattctttcacacacacaaatatgtctctctttctgtgtgtgtgttctttatggcatcaccaccatcgaccaccaccatatagaccaccgcaccacctccatccaccacctctctgattccatgtatttttttttttatgatatcaatatttgtatttttttatataaatttaggtacaatattaggtatatatgtgtacacatatgtatatataaattaaattagttttttttttattttttttattttgaatctgtttatatctgtgtatatatgtatgaatatatatatatatgtatgaaaaattatatagatatatgtgtaaaattatgtgtatgtatgtgtaaaattatgtatatgtgtgtatgtgtgtatgtgtatatattgttgggttttat

SEQ ID NO: 129086 - DNA, 1718 bp, Cannabis sativa
tgctcgccacagtttccaggaaagttgctcaccaataggacttggtgggcattgtcaacaccctcgtcaggtcattcttcagatgatcgtctggtaaacaccgttgttttgggtaagagcttcgagatattggcttaagctgtcaatgaaatcaccaaactaaaatgttgactagttttttcgccaatcgacacagagtcgtaattaatgagaataaaacaaaaacatgtaataaatgttaataaagaacaccataatttaaaaaggttctgccccaagtgttggtaatagcctactccccttgtattttattaatctgagttgcaacaagaagttaaaatcgcagagttttggcttgtgaataatggatttttgatcccctctctaggtcaagtatgaccccttatatagggagaaggatgatgcacttcgcttcaggaggcacatcctaaggttcagttgaatcccaactacatgagagaatatctgaactattatttttgattctcggaatgtattaagacccgattattttggtgatatacaactatttttgtggatttgtaaccacttttgagctttgagtgggattggacattgtgagcgtgtgtccttatcaggtgttgggaaaataatcaactaggcaaatgtctgtatgggacttgacaaggtccgccctagggggacactcagcctaggttgacccctagagggacactcagccttgtgtcataccctcgggacatacacctttgcttcttactttgatcaaattctaggactcgacggtctttttcatgtgttactttgacacttgtagttgtatggagattgaaccataggcataaacagatgttgagtacacgggacgatccttggggccctgagcaaatagaccatcaccccttatccaagtggggattagatttggtaccaaagttgtaggaggatgggtccaacacccctttggtgacggaggactcgacttaagctgacccttagggggtactcgtcttaaaccgacccctaaagggatactcaacctaggccaacctctaatgggggggggtgaatatggaccttgagcaagtaaatcacaaacgatgtgcaagtggagacaaggcattgtactacagttgtatgaggacgagatgggagccaacacctctcgttaagggtggactgagcctcggccgaccattagtgggggactcaggctaggggactccgcctaagctgatcactaggggggtactcgacctaggctaatccataaaggggtgagtgtgtcctagtccattttcgaggacccttcatagtaaaggttcacctttggtgtataagggttgtaccttttgcactttagtagttatcctttgtctaaggaaatcttatatcttcgtcaccgttttatctcttctaaccttatatcacatgtcatcattttagctacatcactcttaccaaaatatgggaaaatagtttattttcgagttcatgctacttcaaagtaataaaacttttaattaaatatatcaaaaaaattgatataaacagaaaaaaaaaaaaaaaaactatatcatcatacccctacttagtggcaaacccattaatgacaagggcgggctatatagcctatgctattttttttttttcacttcatcatatttaacaaaaaacctaaaaaaataatgggaaattgcttcatatattatttt

SEQ ID NO: 129087 - DNA, 722 bp, Cannabis sativa
  modified_base (232)..(238): a, c, t, g, unknown or other
gtcgtggttgagttagtattagggttagttttatataatttttttaatttataaatataatgtatagttttaaatatattttctatataatattaattcataataataatttaaaatatttattgataaataaatattaatttataattaaagatattttaaaaagctaataaaaataagatgaataaaaatttttaatatttttttaattaatcaatttataaaaaataannnnnnnaatgagaaaattaagaagagaataaatagatgcatttagagtgattttagagcgccacgtcaccaactcatacttctcctttctatatatatattgatattgattgaagttaaaaagtaaattgtaaattataaatattaaattaaatattagataatatagcatgccaacttaatgtgtgtaaattaaaacttgtgtgtgcttatcattattgattaaaaatatcaaataaatgagctcagtactattttatataatttttaaaaaattttaaaaaattacagggttaaattttttattttacaaaatgattaatttaatcaataatttatataaaatataagattgaaaatagtatagaccctttattataatatttagggctcgtttggaacgtgatattaagtcgtattgtattgtattatattaaattgtattttatccaatatttttatataaaattatatatggtattaacttttat

SEQ ID NO: 129088 - DNA, 513 bp, Cannabis sativa
ggccaaaaagtgaaatttcccttgatattttaccaactaatagtatttagtattacatatattttttatataaatatattcaaagataaagtgataagaacgtttttcatagtctattggttaggattgcacgactcttccccaaagcaaaattaaaaaaaacgtgtattgctatcacactctctatccataacaccactacaaaatcatattgttgtacaattagttaataatttttcataataattgttaaaatagttatataaagtttgatattataaattatacaattgtaacataagtatgaaaaataatattatcattaacaactaaaaaattgtaacttggacatctgacttcaaaacactaaatatagtgtagtttcatactatatttactttaatagaatactaaaattattcttataaataagtttgtctacagtgtcccaccaaatttagtgaggtactgtataccacactatttttacttttaagtttttaataattaaat

SEQ ID NO: 129089 - DNA, 664 bp, Cannabis sativa
agctagaaaatagtcaaattagcaaaacataagttacgtagcattatccacctagaaaaaaaaccaaacagcagcatcaacttccgaaaaggaaacataatagaatacagaataggtaatatccctgaacagcaatagcgacttccaaaaataagaaaaaaagaaaccaagccagctgacataacatggtagatttctcattatgattcaaagtctccaaatcattatattgaccatatggttcacgttcacataacatacaacggccatattgattggtgttaaaaataaataaacgaatcaactaaatcaaaaccttttcaaacacctcaagaacaattttccatatatcaattgaagattaatagcagagatgacagcaaaacgatgtcctgtaaagggaaaaaggatgctaggcctttgttgtttttcttttttttcggttcacatacccttattaccatctttgaagttgatactaaagtctatacattaatgggcaaaaccgatcaaagaactaaagccaaaatatcaaacaaaagtagatctatttttttaatacaaatcaaatgcataattcaaaccaaatctagcttgttgcaatacaatgcagcattgacctctttttttaaaactaggatccccgcctaaccctacaatattt

SEQ ID NO: 129090 - DNA, 714 bp, Cannabis sativa
  modified_base (651)..(679): a, c, t, g, unknown or other
tgcattgggctcaagaatttctttgaaacttcgaacatagtcaggctccgacttggccttctctctctcaaggacagatgaactctttaccttctgatgagattggtttgaaatggtctcctcctttggctggttctatcaaggttaatagtgatgctgctattgataaaagttgtacttgcatggccttggtatggtggtgcatgatcacttgggtactgttctagcttttaatgtatggcgactggatggttgtcttgatcctgaagtggcggaggctttgacgcttcagaatgccatggtctaatgtcataactttgggtatgaaaatatcatctttgaagtagattgcttaaatgtttgttttatgcactgtcctaaagattttaatgttgttgcccacacgttagctaaagtcgctattacagcatcctctagcattatttggtggctgatttatcctagttgtattcagaacttattagtagctgatgctactcagtaatgcatcctcacccccacctttgttgagattcatttccttaggtgttggtggttgagaatttttttctcaaaaaaaaaaaaagtttttatctttgattagcaagttctaatttttatctttcagttttatttttattattattattnnnnnnnnnnnnnnnnnnnnnnnnnnnnntgttgttgttgttgttgttagttgttgttgttgtt

SEQ ID NO: 129091 - DNA, 677 bp, Cannabis sativa
atgtaacagaaccagtaaacttaagaaagtgtgctagacaacactggtatcttttagtatttctctttctccaattaccaaaagaaaaatactaaaaggcacccataccctccaacgtgtcttggaattttggaggtcttagaaaaaataaatcaaatatttttggagtctaaaaatacttgaagtaagatcaataaaggaggagaagaagaaatttctcaacaaaaaaaaaaaaaaagtggcgccgaaatttttttttttaaaaaaaatctaccttggcatgaagaacacttgaaggcttgataaagatgaaatttcaagaggcttattaaagggttgggtgtgtgggatatgaatgagaagtgagaaaatttgattgacaactctcttatttatagatgagttcaatctcctaatcctaaaaatattgggaatcttttaaatttaaagctttaaaggaagatgtaaatgacaagaaaaagatagaaatatatcttttcccttttcctttaagtataattcgaaattcctatgacaataggaatagaatttttttaaatttaaaaggtaacatcaattcctaatgctattaagattaaggaaaaattagagctttaaaagaaaaaaataaatgataagcaaaagatcaaaagtcttttttttctctctctctctct

SEQ ID NO: 129092 - DNA, 1109 bp, Cannabis sativa
aattactaattagccttttataaaaactggttttaattcattccttttggtcaattatgttaatggtgtttgatggaactggtttcagaattttttttgtcaattaatgtgttagtttttagttgatgttaatgtgatgaaactggtttagtattatttgtttattgttgattatagtgttaaaagtttggtttggttattttgtagcattactatattttgtgaattggttaaaactaattttgtatgatgggtttttagctttgatataaactctttgttatcttatttagattagttgaaactagtttttgtttgaaactggttttgcaggttcgaaactgatttcacattaagggttctgtaatgaggttgctcaattttatgaagttattgtatattttttaattttaagtttctttttattattttatttctaggtttgaaactacttttatacttatattttgtttttaaatttttgttgtgcattgtatgttattttaattatatttgtgagttttaaattttttttgtttgtgtgcatgtgttttttgttttttcatatggttgattgatgaactggtttaagttatcttctttatttattatttaatgttttgttatactttttgttacgagggttcacaagtttgaaacaaatttgttattgtacgtaattaagctttaagttttgttttttcttttgttattttagaaatatagtttcgttgtgtaaagttttcaaatagctgataagtgaaattggttctgataatttaatttttaagctatttgttaaaaaaaataaaataatgtgctacatttttttactaactcatttttgtgttgcaaattttttttattgtttagttgttttatgtttgctcaatttttttttacgtaattggcttctctatttaagatttttaattggttgtttaatgtaactggtttctttgtgtcagatttttaattgtttgttcaatgtaactggtttttttatacgatattcatttggttgtttatgtaactgatttctctgcatcaaaaatttaattggttgtttaatgtaactaattgttgggttttatgccctaaatacaact

SEQ ID NO: 129093 - DNA, 1504 bp, Cannabis sativa
tattttatgtaaataaaatcgtaaaaatgtttaaaattccgtgaaaccgtatttttattatttttgtggatttgtgatattaatcataaaaaaaattcctataaaaaatgggcctttaaaaatagggatcttgtgcaatggtccaagctgccgaaagcttgggccagccctgtagagatcattaggagttttatttacttattgttctgtatatttacacctaactaataatattcttaactaatcttttaaaatattttaactaatgattgttttatttttaattaaataaatatgtagtttcaaaatgtgtatataataatttttatttttaaaaattaaatgatcatatagtttcaaaaatatatatcaaaatttttttatttaattttaaatatcaaacattttttaaaaaatgtcaaatgttttttaaggatcttttatttaatatatattaaagcctaatttattgtaatcctatccctatattctttagttttttttttcgtttctttttgcctatcaaacattttttaaggaatttttttatttaatatataatacatttttttttctttcaaaatttaattccaatgataagttcttagtagtattgtgatgatagcgagtagcgactacaagtaaaagtttttaaatcatatgataagttttctatataaatttattgatttttttttttttataaatttctattttgtgtgaaaaattttaaattgctaatattatcttagctataattattttgaatattgtggtggtgactaaaagtgacaaacaatgatgatattggttttaaaattatatgacttgtgtttttttatacattaattatcaagtattttttatgaattgataatgacttcggttttttaatttatatttttttagatatctctttgattaaataattattaaagattaaataaataaattaaaaatatgtaactcatatactatttaaatttaaatttgattagctaggtataattgtatctactttctcattattaattagtggaatttatttagtatatttgagtagttaattcactatttttttatatagagagcaaactcattttttttatgtgagagagcaagcctattgaaaagaaaagtgaggactacgagatacaatgattaccattaggggtgcacataatatgggccaaaccattcaactcagtcaactcaacctattttttatagtagagagttatgttaaaagtgataggtcatgtaattatgggttagttatgagttggacacattttaactcgatataactcaaaccaactcatttcttaaaagatgttccaaatttgagataattactttcatacataaaatatattttacattcacaaaatatatacaaatatatattttacattttcatacatatataaattatattatgataactatataaagtaaattaaccaaaacacatcactaacacgcaggcccggccctgggcata

SEQ ID NO: 129094 - DNA, 762 bp, Cannabis sativa
tgtcatagaaacttcccctgtgaaagtgttgtccccttatcctgatgccatcttttctctgatcttgttttttcctgcttccccattaccctgattttttgttggccgagttcccttctttgtaacaaatttccttcgtttttcccgtgtccctttctgttggttattgcagcctccatcaaagcttatgggaacttcaaagagtgtgttatccagacccttgctatcatattctgtctccatggttcttgccttataagtctgactccccatttgattcatggctgtgtcaatggtgatatcttcacccaatcttttgcgtatcccattgcctattggatccttttgcatatcagtagttgctgcctcattcatctcatccagcacaatgggagatggaataaaattggtgttcagattcgtattattagtatgtaacatattatgtttataattattaatgttagaattaatacaattgataccttttggtgaattgttgattaaaattgcagcccttttctcttcgattctcgcttctgccatgtgaggaggataattgttgttctgttcgtgactgtcttcatggttggattgatttggttctttgttggatttagtttcagtcctttcggtcgagtcgactttgagccaagaaccataagttggcctcactattccattctcttggatcccagtagcttgagtttcattgcattggcgcatctcatggccaatttttccacaattaaaacacatata

SEQ ID NO: 129095 - DNA, 876 bp, Cannabis sativa
atatcaagaagataattaattaatttttataaaagtaaataaaagttgtacaaatattctcaaaagaagtaacagcatgcatgtgctgatctgttaaattaaaccccattagtgattaatttattaattgaaatcaaaagaagaagtgagagcatgtgctaatctgataccattatcatttccttactgttttgctctcactctcttcttcctctactaagtactgagcttgttaccaatggctgagcttgtgattggtgcttttctcttcttttgactttgtgcttgaaaagattgcttctccttatgttgaggaattcttctttaaggccaaaaatgaaagtgcatctgttgtttctcagaggcttttcaagatgaagtcaacgttcaattctcttgctgcggttcgctttgaagtggagaacaagagaatcaaaaaccccgctgtggagaagtggctggacgatcttctggatgttgtcgatgatgctgaggacttctttggcgatattcaatacaatgctatgaaacccgacaaagctgatgagtcgaagaaagaaaaacgaaaggctattagtaagttactctcttgtttctccaaaccttctaattcagctgatcgtgtaagaaatgccaatatggaagtgattcttaagaggttggagtacgtagccaatcaaattggaaacttcaatcttgaaaagaatgttggtgaggtgaaaccaacagaaaggttacgtttgaagacttctttgccagatgaacctgaactttacggtagaaagaatgatgaagatgttttgatgaagttgttgatgttcgatgatgtaggtattttaaagatatgtgtcattccaatattgggaatgggcgggg

SEQ ID NO: 129096 - DNA, 897 bp, Cannabis sativa
tccatccgggtcaaatttgacccaatttcagtcacatgggtccgatggactcgacccaaacccgatcgaaattttcaattccggtgaccgaaatacccacattaattccaaatgatactaaatgcaaaaattaaggcattcacatatatttcatgcataaaaaatacataaaataaagactttaaattcataaaaaatctcaggtccgaacggtatttttccaaaagatttgagatttttttattcaaattagtttttcataattaaaaatgatctctaatactatataaatgtattgatgcatatattaattgaaaacaccaaaaaaacaaaaattaaaattagagcaagaacttcacaacccagaaaaaaaaaccagtgtatataaactctcatataatcattacactgtacaaacatggtatatatatatatatagaatggattattataattaattatatgtaatgaaatttaaaaagtaatgtaaaatatatataaacatatatgtgtaaaatatacatgtgtataaatgaatgtatatatatatatatatatatgaacgtgaatatgagtatagatatgaaaaataatcaatttgatgcatataaaatattaatataggctccaattaacaacaacatgaatcaaaggattaaatgaaagaaagtcacagccggacataaaattaaaattaaactgattgtatgaacatatataaaaactgaaaatataaatcacggtagagataaaaattgctctgataccaactgttagactataatctaatatgaaaataaagcatatataaatgatatgcaatgcagaataactacaaatattttgaaatagtatatgcgatgaaaggaccaaaatacctcaagctattgatgtttg

SEQ ID NO: 129097 - DNA, 876 bp, Cannabis sativa
  modified_base (42)..(52): a, c, t, g, unknown or other
  modified_base (820)..(831): a, c, t, g, unknown or other
attaatacaagtcaatactaaacattgtattgtattaaatannnnnnnnnnnatacaatacaatacaatacaacactatccaacagaatacaatacaattcattacaatacagcgtaccaaacgagcccataatgtatataataatcggaataaaaacatatggataacataactaataaagaatgtgactttctcaatcaatttactacttttgattggggaggtttcattaatcaattcactacattttataataaataatgtagatgaattaatgtattaaattgatttaatagaatcggatgtctaattataattggattagatcggatgtaaattttaaaaattcaatcggatcgaatcggttgttggataagacatccgattaaatggataaccgaccaaaccgatctaattatcatctaatgaccatccaattatatttatatttttaaaatatatattaattaatttaatatacatttaacacatgagattaatgaaaaaataccttaaaaaattaaatctaaaatattaattctcatcttcctaaacgtaataaaattgtcaatgcatattgaataaattttatttttagcgattttattatgagattatgagaattaggttggactaaactaatgtttattatatatgtttaattattaagttttaaattatatttttttatatatatttttataatgaaatcaatttaatattgggattattttaacaagatgtaaatttactaccatatatattgtttaacattttaaatatgaatttataaaataatagaatttaaacacatataannnnnnnnnnnncttacattgattgcagcgaaattaaatgactcattccactcaaat

SEQ ID NO: 129098 - DNA, 1792 bp, Cannabis sativa
gagagagagagagagattgttgtgagtgtagtgagcggctgctaataatatgtaacccttaaatatgagatctgagcgagatatattggtgtttagtattatcttcactttagttaacggttatataatgtgggcaattgtcaaccgtcgaccatacaattgctcacattgtataaccgtcagctattccctttaaaaaacaaaccccacaatgttatagttgttttaaattgaccattattctttactaaaggtgtcagttttaaatactcatttaattttattagcgactgtctccaaaaaaaaaagaaacgatctcaggactaatgggaatggtagtttttgtagtatgatattttttaaaaactaatataattataatttatatcgctatttaaaaaattaagattataatttctctatataccgacaaaatgtcctccgcgataagaacacattaattttgcaacattattcttggatacattgttttcttaataaattatattttagcaatgcatgcacagttggggtttaaattaattatcaccaatttaattaatacatccgagttatgataattaattgatttagagaaaaacaacactgtgatataagtttaatttatgtcatagatataggaatgaatattttgataattaataaagatataaaaaatgttttcttaagtacttgtataacttgtttatttaaatttggctatacctatatatagtgacattaatttgagttgatagataatttggaattaattaattaactatatgtactaataacacatcataattaatctattaaaaaaaacacgtcatagttccaataatatacatgttaaaactaattaactaataattaagtcattaatatgaaatgtctaaaatgatatgacatatataattttgtattttgagaagagttgtccaaaccaattagatgtaataaagttgtaaattagtttgaaaagatggtttgtaagagttttcagtgttgttcaaattagactttaagtggaaacgacatgattatattcacaacaataatacatatatgtgattgcaattaatttgaaaaaaaaaaaaaattattgatatttttcaaatacataaatccaactagaactattcttttcttatggaataatttatatataattaatatcattataccatggaataaattgcaagtaaagaaaattaaaccccacacctatattttatagagatgtcaaatgagttggtggtgtccacaaaaattatttagttgagagaaatagttattggctttcaaaacgaatatacagtacaatttttatgtaagaatatatttgagattaaataaattattttttaattaagagattataattaaatagtgttttactaaaaaaatttaaaagactaaaaatatcaatgtaacaacaataacaataaacaatcttttgttatattatttattaaataatataatgtttaagattaaaattgtgatatattatatatattattacatataatataattaaaaattatatacatgtaataattacaatattatgtgattgagagttacatatagttgtaaaacataagaggtggagttaatattttgtaacttccacatgatgtatcactaattaagtgtgtaaagagtggttgcacaacttaattttttaaattcacaaactgtaattcaaatatagttgttggggattgaattttatcatttataatgtgtataagtgatataaaataaagtgggaatggtttggaat

SEQ ID NO: 129099 - DNA, 833 bp, Cannabis sativa
ttttttttttttttaatttcacattaacaatcaaaatctatatagcaacttacataaaaactatacaaaaaaatatatatatatatatactaatttctctaataaaaaaaatatatgttattggtgtgatatgattaaaaaataatgttataaattctaaagttaccattaatgtagagttgtacaaagtacaaactacagaaattataaaaaaatgctatacaaactacataataattgcttgagcataaataagaaagctcatacacaagccatacaaaacaaacaaataaataatgagaaatactaatgaacgatactagtagtacttttattaatcttgttattagtataattaagtatcgagttcaataatataagaaaataacttttaaagaatatcgataagagcattgcttttgaatactagtgatgtctaacactttcataagtggtgtctcacgattaattagcgatatttcttaaaagttattttattaaattatatgagactcgattcttaattacactaataacaatataacaccgaaaagactgctaggcttttttagtaattcctctattatgaataatcaattgtaaagtaccacatataaaaagtaatgggcaccaatagcaatgctctcaaaatgtatggtatttactattgggtgattctagaatgcacccccttaaaaggaatgtactgatgcatcctctaattgttttggcatccacaaaaaaatttagtctaattttttttcatgttcatgtacgttatacctatttaagatattctacaaaattttaagaaattcggaataatttacaat

SEQ ID NO: 129100 - DNA, 906 bp, Cannabis sativa
agttcctggtaaaataacttccaacataaacaacatacttgtgagtagatctgagatcctggtaaaataaatttccaacagtaccattactgagctgattccgacagggtcgctaggaagatatcacactgcacatcaccaataatcttccagagatcgagttgcatgtaatatcctaaaaactatgactatgtttaattatacatattttattcaatctgtaattatataaatgttagagtaagattacaatcttatgtaagccaattatgagttaattagtgatttttgagtaaatgaataattgagcggaattcattaattacagagattttattggatcatgtgggtattatatataaaatttttaaaataaaatatttttggttttggtgaccgtggaaactcaatagattggccaaatatgtcacgacagtagtagaatgaattttattggaattgtaccaaattatcttagtattcttgtagtgtcggattaattgggatagatagtattgaccaaagtatccctagactataaacttgcttaagtttttattggagggtaatgttgacctcaaaatgtgatcaaccgacaatggagtcgtatgaatctaatgtttgccacatattacacaataagaacaataaagtaaataagacaaggacttttatagagatttggcttccttagtttagcgggtagttgacctactctccttttggttgtattgataatactataaagattactataggtgggatctgatatagctctctataatgttgcaaagcatggatcaagtaggcagatcactaatgagagagaggtatagccttagaggtgtgagagagagaggaggagagatgcccttgggtgtgtacaaaagagagagagagagagag

SEQ ID NO: 129101 - DNA, 757 bp, Cannabis sativa
  modified_base (722)..(732): a, c, t, g, unknown or other
aatgattatcattacattgaatattattaattttaatattataatattagaaaaaataaaattaacatacgtgacacgtaacatctatctagtatattacaagtatgcgtgctataatttctctatccattgtagattagcatttttcattttcactggtaaaataaatgcgatctacttttaatatcatgctttatacacctaacgaacaatgttaatactttttgataccacaaaacttcatttctatttttccaaaggtgatacaccactgccattagcaccatactgattatttgcttcttaaaactcgaccatctctccttcgtctgcaacctatctcttacagcaagctaaatgctgaatagatgtttgggcacattgaatggtccctaaatatgagtaattgcgacagcctcttgtgtcggggagccaagagtatcctttactgaatgaataagttgaagaaagaaattgttgatctatacatatgtttgatcttctctttcactttaatgatttagcgccaatattagccactttttattgagggagtacgtagagatccaccatgactgatgttgacctttgcttttggtcaacgacactgagtcctttaaataaatgacaagaattatataagattaaagagatatacaaacgacatgtagtaaaaattatggacacgatgtgttatagaggttttgttgggttttatgccnnnnnnnnnnntccatttcaatgtaatccattttat

SEQ ID NO: 129102 - DNA, 2174 bp, Cannabis sativa
  modified_base (1493)..(1497): a, c, t, g, unknown or other
tgagcaagaaaatatttcatacctcttcacaacattcaatatgatgtctcaagcctgcaagccttggttagaaatccaaacattaagaataaaggtagaaaaattagaagaagtatggaagggttcataggagataccatgaagaagaatgagactttgactaattagtttgcagagaaaaaataaaactatgatagtttcgggtttgataaaaaatcatgtactgaatagtatgagatatcgtattgtaataggtttaggttagataataataataataataataatgctaaaatattattaaatcagcaaatatctaatttttatattttaattgcaagccctctatctcgaaaccttagggctcagatctgacctagaaaacttctgatttttgatataactatttctataaaatttatagatctttgaattatcttttcaacgccactagaatcacctcaatcaaagctctagaactctagatatggttattttagtaaaattatttttaatcctgtgaatttatccaaacctacaaatttttttaacatttattccattatattgttatttaatgcactaaataatttataaaccctaatagactttggtattggactttaattaagtaattatcctaattcgtaataacaccataatttcaccttaacacttaatataatttcaactatgtttagaaatctatcaatactattctaagcaattatctctatccactactagtagaaataaataaaataattattctcacacaaattgtataacaaatgaaatttaaaatatatgtatattttaccgagttttacatataccctccttaaagaaattttgtcctctaaatttaactaccaaacacacgagggacttcatgtctctcactacatactacatgacctctttatctaccatatggataaaaaaaatatgtatttaacttttgtcttatttgtcaaacaacaacacatgtaacatatacaacttaatttaagtattgttattcctctatacattacttaaatacaaaaacatactccatcacaataacttacatatacacgctttaaatacataagttttgtaataacatgctcataattttataaaagttttccttctcttacgaacatccttacatgtcattaagaataaaactatttattctttcatgaacatccttacatgccactatgagtaaaactatttattctctcatgaatatccttacatgtcacttgagaacacattatacaatacaaaaataacaaacacaaagagtagggtagaagaccttatgcaaacttctctttaattattcccattctttcgttgaatgttattacatactaaaatcttactctctttttttccaccataaagctatggtgtcattcttgtagtttcatacttgttactcactcatcgatagatactttctccacgacagttggaaataaacatgaaatctcttnnnnngttcttctatgtataaatatttaatgatctattttgactacctttttgtctaacgttcacttcttaatttcctttatctatgcatttgttgcacttgtcatgccttcccattttctcagataattaatagtctttggttccttttgttgtctgattcttgtatcactctattgtattttctttgctaatctcttctattgtgcttggtcctccattactcttttcaatcaagttgacttgattatgagattaactagtttttcttactaacttttgtgtgctttggtgttatattgctatagtggtgaagtctaaagctgtaatgttgatatatatgttcaatgattacttcttttattatactaactctctaggtatcacatcagttcatatttataatacagtatatttttcttgacatatttatgtcttgcatattgtagacctttctaattcataaaatgaatcccaacttcttaattacactgttaagacctccaaaaatctaaaaccaacttacattccaatacagaccatttacttttagttaactaagattacaccatatgaaaaatcgagtttttgcatatgtcaataatatatacaaaaatatacaactgtatacgtctgcagaaactagttttgcaatgacaaaataaaataggcagaatataaaa

SEQ ID NO: 129103 - DNA, 1288 bp, Cannabis sativa
ggcataaaacccaacaaattctactgtattagagaatcatcgtatgtagaatttttctatgacaacttattttacagcttctgcaactaatagagaccaaccatgaatatgttgttgaatgttgaagtactcctccaagttattattattattagcctctaggtccactatggaaagatgcatgggtttatgaggcaagttaattttggatagagatatctattttttatagtttctgccttgtaagctattgctttaccattgtgatcgtagctgtaatagtattcaatcaactatatgatcgatttatcttgcagtgcattcattgtttctaatagagaatcagatatttgaacattctttaattcttgtgtgattatttttctcttgaaggatgcctttatcatcttctaacttatccaactttggagcatttctcttgtgcaggatgtattgggcaaagaagatccttgaagatgcccttgagctatctatctatttgaatggcaaggtagttcaactattattctacaatgttgtcatttttgtaacaagaaagttcaatgagcaggatgaaagttttgaaacaatcaaataaagaactacattcaagttaacatctattaatgtcaggtcttttgttgaattttaggttcaaataatttatatcctggagttattattccatttacacgtagacctcttctcttgattattgattttgacaatagccatgcattcaagggaggtttgtcgaaacttggacattgctttttccacgctgtattttctccacaacaaaaagaactttgtaaatcagattttccacaattttcactatactttttttttaaaacaaatatacattaatattatggtttacagttctcatgcgacttatgtctacttgagtaacttctgtgatatactcacatgagcaaggaaaagataaaatctgatatagctaactacattttccaaatgttttgtcatataagttgttggtacacatcttttatgtgtctataataatcatatgtagatttctgtgtggaacatttggttcgtctgaatgtgaattctctgtaaagttacttacattggaaaagtatgtatttcaggttatacatggtgcagaaagaggggagtcagttgcactacatacagtttaattttataaaacaaatcgttcaaataattgtcacactttagttaataaaatctaaaaaaaacaaaataaaactaacaatacgtggctcggcacgtaacattcacctagtatatatat

SEQ ID NO: 129104 - DNA, 591 bp, Cannabis sativa
tataatagtttttagggagtatcgctagccaatcgcaacgcgacatgtcgcgaaggtgctaggcatcactggtgtctaatagtaatgctatttttttagagggattgtttataaaacgccttttctttttaaaggattttaaaatatttcaatataatagaaaaaaaaacctattaatacactaaatataaaaattacaaaaaagttacattatcaaattgcatcactaaaataaaaattattgaaaacagtttctttaaattactaagtttggttccaattaaacaaaattctaacaaatatattaatctaataatttaataatgtttgactcgagtttcatggttactatacttattcaattactatgacactgagtttataaatattggtttaatggaattattattttttttaaaaaaaaataataaataaacaaataaattaatggtgtgtttattagaatggctaggaataatattaactaggaatttgaattcactcttaggaatggaattgttattcctaaagaaagatcattcaagtgtttggtttgtttattgtcattggaaaactcattccatgggaatt

SEQ ID NO: 129105 - DNA, 2895 bp, Cannabis sativa
  modified_base (71)..(72): a, c, t, g, unknown or other
tttaagaaagctagaagcacttttttaaaaagctatcatttaaaatgtgtttggtaaaattagaaaactannttttttaagaatttaagaaaaaatttccactttttgcaaaagttggccaacaccaactttgggaaattagcttgtacgggaagctattttgttagtttaatgaatattttacttgacaaaattaccctcattttaattataaaattccctttttatcattttattttaagattctcttctccccaattaatatatctttctctatcatctttatataataaatgatatttatgtaattctttttactattattattagtaaaaatctaactaattattttattatatatttattaaaaaaataaatattataagaaaaaaaattattgtaatttctaataaaataaaaaataattataaatatattaatatgtatgaatttaattatttaaataaattagataacaaatatcatacttattttggtaattgtatatttaacaactattcaatcatctaacttaccaaatacttatatataacttttacaactcagagttattttaaaattatatttaccaaacactcagcagctttttctcacagcacagctgtgccaaactagccctaagaatttagtgtcccgcactgataccaattgaaaaaattgagtttttgtaaatatcaataaaattaacagaaaaataataaatataaaattgtaaatttctgtagcagcagaatgtaattctattactgtagaaaacagttttgcaaaaacaaaccagaaccagcaaaatataaaaataattctagaaaattaaatcacttgatacaagatatttgtacatggtatcagtgttttttcgagcactcctagtccacgggaccacgcccagagaatgaaatcaattaataaagtatcaacaattacaaattcaattgacttaaacaagtttaggctccctctaaatcgttgccgcaatcctttgtaatgcacttcatgaatctgattttagaaccaccttcaaactttaaactcccttcgtctttgaagtgtgattgcttatttcctcccaaagtaaggtttgaacaagtcttctctcgaagacctctctcttgttcaatcaagttggtctaactaacactaagacagagtaagaaaaaaaatgaaaacactagaacttagatgaacaactaggttctcacaaaaaagaactctctcttcacaaatgagaaaactacgaaaaatgaaagctagaggagttgattcaaatggctgcgctcttagttttatttatatagcatagaaaccctagagatagccacaaagtcgaatctacagctgtacaaaactttcctaaagaaagtcctattttgtagcattagagacaggttctgctgccgcagactagatcagaaaaggaaacttgccaaaaacatgtctgatcatgtatttagactagatacctgccaaaacagtgtgtttaatttgatcttatcaagacacaattgcactcattaaggaaaataagaatactcaaacttcccataaaaagtaaactttctataagagaatttcttctcttacaagaagtttccaaataaggaaacggacagctgaaatagaatctttactatgacagaaagaacaataaaatcatttaaataaggtgagaaaatcagttttatataagccaacaaatcgcaccataaataaaaaatattttagcatttaaattgtcaaaaaagactttacaaaacttaatcccaaaaaatgcactttttgcattaaattaggaaaatttctaggattcatagtgagttagcacgggatagaggcaaactctgaaaaaaaaatgcaagccttattgagcatgccctccccgaagagacacaaggatgtacaaagcttaaccggaaaggttaccgccttgagttgcttcatctcctactcaaccgacaagtgcttctcattcttcaacatcttgaagaagtgtcaaaaatttgaatggactgaagaatgtgaagaggcatttagaaagttgaaagaacacatggctaacccaccagtactatcaaaactggttgacggagaagacttatatttatatttagctgtttctgggaacgcagtcagtgcatctgtggtttgggaggaggataaagttcaaaacatctggtatactatgtcagcaaacgcatgataggagcagaaattcggtatcccttgatcaaaaaattagctttttctctcttgattgcctcaagaaagctcaggccttacttccaggttcactccatcaaggtatttataaatcacccgcttcagcaagttttacaaaagttggaggcctcaggaaggctcctcaagtgggtcatggaattaagccagttcgacatacagtacatcccacacacctcgattaagggccaggcgttggcagacttcattgtagaatgcaacgagaagcaggccagcgccagtatgccaactcaggatgtgcgcgtgtggaaagtatatgttgacgaggcatcaaagaaatagtggccaccaacaaacaaaggtcagattgtacggaccccatcattaagtatataacaacaagagaactgcctcaagaaaggaccatgtccagaaggttacagtaccaagctcatcggtatttaatgatcggcaatgttctttatcaaagggggctcagcctgccatacataaggtgtgtgtcggattctgaagctagacggattatgtaagaggtcattaagggattttgtggagatcacaccggatgccctagcctctcaaagaaaatattaagacaagggtatttttagcccacaatgaagaaagatatagactacgtccttaagtgcgatccat

SEQ ID NO: 129106 - DNA, 2924 bp, Cannabis sativa
  modified_base (40)..(42): a, c, t, g, unknown or other
attgagtttcatgttgtacttcctgaggactttgaagcannngtccaggtcatctatatgcccccaaccttcctagatttgacgagcatgtcatccacatatacttccatatttcatccgatttggtctttgaacatttcatttaccaatctttggtatgtagcctttgcattcttaagaccaaatggcatgactttataatagtacagacccatatctattcagaaacttgtatgttcttggtctggtggatgcatcttgatttgattgtaccccgaataggcgtccatgaagcttagtatctcatgtcctgctattgcatccacaagttgatctattcttggaagtggaaagcagtccttggggcacgccttattgaggtcggtgaagtcaatacatacttgccattttttgttcggcttgggtactagtacaagattagcaacctaggccaggtagaaagcttcaattatgaaattgttgttgcacaacttttctacctcttcttttagtgctagggctcgttccttgtctaataatcttcttctttgttgaacaggttggaatttaggatcaatatttagggcgtgtcaaattatagaaggatcgattccgaccatgtcctcatgtgaccatgcaaaaatatctaggtttgctcttagaaattttatcaatgatcattttacttcgagcagcaaaccttttccaattttgagttttctggtcggaacatttgggtcgattccaatctcttctagttcttccactggcccaacatttgtatttggttccccaagtcagggatccacatcttcatccccgccttgggcggttccctatttggaaatgtcttttcccttgttcgaactctgactagaggatacttcctttttagccttggttaaggcgaggttgtaacattcccgtgcaacttgttgatttcctctcaggcacccgaccccattcttcgttggaaacttgcggcacgaatgaaatatagatgtaactgcttttagggcatataagactggtcgacccagcatgacattagaggctgatggaacatccaatatcaaaaattgtaccattacagttacgctcttcggagcttgcccaacagtgaggggtaggcaaattttccttagaggtacgacattctggccggagaaaccatatacgggctgaagacaggggttaaatcattgagttggagccccattttttcatatggtgttttgaacaagatatttgcagaggcaccattatctatcataattcaggccactattttgttggctatctgtacttccacgaccaacaaatcattgtgtggaaagttaaccttgatagcatcctcttcattgaacattatggtgggttcccctacccatggtacttttggcttcctttcttcaacggctaagactacttatttttgctcgtgctgtaaggttcaggcatacctttcccgggctttgcctgaatctccagctatgtgtgggcatccaataatgacttgtaaatgcccatctactagtggtggcagtaaatcttggttattgtcggcctgggcggccctttgattttgatcagtcttgacatatttttgcacgttcgggttattctttcttatcaaaaattcaatttctcgcttcaaatttttgaattcgttggtgtcatggtcataatctccatgaaaacgacaaaacttggacatgtctgtcttacttatgtcctttttcaagggagcgggttttttttacggagctactgactgagtagccatgtaaatagtctccaaatcgttggtcaggacatagaaagcagtgaatttggaacgattttctctaggggcatcttcggctttgccagtgaactttccctttttcccattgccttgcctgttattgatgttagaccttttacagcccgagcctgaattgcttgggtactgagggtgctgaatggatgttccagcagatggagcttgtgattggtttaatttaagcttgacttctgctcgctgaatggcctcttcgagcttgatgaaaccatccacgcgattgaggaaatcactcatagaatctactagttcgtctctcttgatgtttgtccaaagctctccaagaacttcgatgccccctagtattgcggttaattacccttcttcggttaaccgtgcaacttttgtcgcctccgtcatgaatctgctgatataagatcggagaggttctcctggcctttgcttcacttcgaccaggtcctctaaatgcaatgggagttgacgagaagaagagaattgtgcatggaattccgaggagaaagccttccaagagttgaaccttcctggtgtcaacttgaagtaccattattgggaggcttctaagaatgtggccagaaaaactctgcaacatacatctcctcgtactccttgtaggtccatttgcatttcaaaatatttaagatgcgataagggatcttccttcccagtatccatcttccaggtcggcatcttgaacttgtggggcaactctaaaacattgatctttagagtaaaacgggatccacgtgctctgtccaactcgagatcattgttcttctgaccggccagaccttggaacatgttttttagttcatccaactgtgcttgcacggttggatgaacttgtttggcctcttggccgaccagggtcacgtcaggatctctttgagctggattttcagcacgggtccccaggatgagtggctggtgaggcatactgttcctctaaccctctccttctgttcaggtcatccctaagatcatgagttgttcctgtggggttttaagccctaaataaaactctttacaatctaattagttatcaatataataaatttgaagtgatttatgtttgcatgaattttacatgataatggtttaa

SEQ ID NO: 129107 - DNA, 549 bp, Cannabis sativa
attttaattaaaagtgtaagaatacacgtgcatgtgtgagtctgtcttagtgttttatgctactaattgccgattttaatgttttttttttattttggagagactaagttaatttgggaagaaaattaggaagaagagatatatatagtacttatagcttattattatattacaatgcatgaaagttaaatcatttgaaccgtagttacgtacaatatgcatatataagattcctcttctaaattatgtgaggctgaattttatctacatgtcttcaaacaagcaaagggtatacaaggtcacaattagttcatcttattttacttcaatcttcaaaaatataaaatatagaatgtacaacgaaacgtacgtacaataaaggaaaaaaaaacagattatatatgagaggaaatcatacctaaatttataagttctacctatatatatatctatatattctcttgagggtacaccactagctgtaaaaaagaaagaaagaaaaaaaaaaaaagctaggtagcctaaaaataagggaaaaaaacaggaata

SEQ ID NO: 129108 - DNA, 3336 bp, Cannabis sativa
ccaaaaggctacgtacgcgagaggagcgagcgaatgaattcgattctcttccaccagattactttacttactttcattcatgaaaaaacagtacaggaaatgatttaacaaaaggggccgggaactacatagatctgagactttcttccctggtctggggggtagttcgaggcaggagggtccacgacagttcgctcctcagagaggtcaatgaccacttcagctggtgccttctctctagacggggtcatctcaccgcccttggacttcttggcctgaggagataagcccgagcttcctcccactctcttcttcaaggcctcaagcattttctgagacatgtctgcacggaataaaagtaacatagtcaaaaaaaaaaaagcataagagatatgaaggcatgataatcaagaaagttaaatacaagaaggagtaccctacactttggcaggggcatatccctgaacaagtactaatgctcctacaggacggccttcccctttccttctacaggggtggatggccgagcaggtaaaccaggctccctgatctggattgtatgttcgatgggtctttgcccagtcgggagggtcttcttcctcttgagcggcctttcctgctcaaaatattcttaagcatattgttcggctctggcccctccctttaacttagcctcacgcttaagttgaataagctccttctcctgctcagaatactcctgagcatgctgcttggctcctgcacctcccttcagcttagcctcacgcttcagttgaatgagctccttctcttgctcaactccctcagcccagccagcactggactttttcttcctccccttcatatgcggaggtataaagtttgttggataaagcccgtactccagaaagttggcctccaaggtcaacaaagtgatatttcgagcagcatccgacaggttgacaatcctctgagctctgtccctaagagccagtgtaaggggtggatggaaatatatcgagatctgctgaaactgagtataagtggttcccatgccttccataaaataatactcgtcaaaaaaacccccgagtttgcgcacaaccttatccacagtgcctgtcaaccacttgaaatctggctgagagatgtagaagtaccccgacctactttgcttgggggtagacttcaggtcaaaaaaccaactgacctcgtgcggagaaggcacaccccacttctggatggtgtagaggatgaacagggtagacagatacttaatgcccttgggagtgaactgggtcagaaaaaggcagaaataatatgccaccttcttgaagtacgggtgcaaaggcaacatgccccttgtttagtgtgggcacccgaccaagcacacatcccttttcgcatgttagtggctcggtgatttggagaagggacgtaacactcaagtgcactcagatagccatccttgtccaaggctctcatacgtgcctcagtgatcttggacggaggactcacccatctggcacctaaggcaccttgcctcctgtgaggacctgcttcagtgagctcctcggtgacgtagtctactccttaaaccaagacttcgccttccacagacaccggctccccgacctcgttataccctccaaattttagaggttcaacctcctcttcttcctcgacctcagaagggctgccaggacagacgtcgtcctgctcctcaatctcctggacctcaacgtccccctcgcgatctccctcctcctggacagacagatcttgttcggcactcggtaatgtggcaagctaggccacatgaggatcagatgtgttgacctttcgcatcatttgctttgttcaagccaccatcctactactagacagacactggtgcgaatgccgggcaaccgtaacaacaggaacaacaattggaatgccaaagttccccgaacttagacagccaacaggaagagtgtcagcaacacctcgtcagacaatgtatgtctagttggatggcaaataacgcctccaacctttcttcaattcccaaatgaagcggtcgtatccctctccagcgatctgcttggagtaatgatggtgttgcactatgggttctggagtaggagaacattcactactcacctcccaatcttcaaagcttgaattagaaagcccgtcacttgaagaggatggactggcacgaagacgagggtgatccttgtacaaaagttgaagcaagtcctggtcgattcggtgttcgcttccccaaaactcaccatggttcatctacaaaagacaacacataagatgagtgttaggtcggtatatcgaacagtaaacaggaaaatatgccgaccaggtgtactcaaaagattaaaagaatggaaaatgttcaaaaataagtcaaaacccaaaagtttgaaatttttggatttagggttaaagttcacgaagcttcgaatgagcaaggtgaaagacaaacaatgtgcgatcaaaggcaaacttcataaaccgagaagctatacagactattacagagaagatcacaaagtttatgcctagattttctatttatcttctacaacaagtcgagaatgcacatatgaaacccataaattaaacatgcaaagtaaaagagaagaagattggaaacttactcactgtttgacgtctaagctgagtacagatgaagctgttcggatgcttttggtagaaatcttttttttttgctctaagttttgtttagtgaagaaattggtaaaagtaaagttatgaggaaaactcagccctaggcagagaggtgaaatgcctttagatgcatcagttcccctcccaaaagtaaatattgggaaatcaaatgtaatcaagtgtaaccgtcaaacgtgatgagaaaaaaccgggtttcgaggcactaattaagttagagcattaattagctaaaaattgaagagacgcctggtcagcctcatgtcgaaccgtgaacagacgcgcctaacacgtgtcacccactcagatgcaagggcgactcgaatgaagtctacacgcaacttcgaaagtcccgtacagacttgggggcaatattatccaattttttcactctgaggtggcatcacacgatagtgacacgtggaatcaactttatatacctgcttgcaagagatatggtgaacagagcaccacatgtatttgcacggacgaagccttcttaaccaggcagtgagcagtccgaacagcataccaacacttagcagtttcaacactcgaatcatgaatcactgaagaaatccctataattttgggatcatatcaccgagatatggcaagctgtccaaatccctgttgggttttatgccc

SEQ ID NO: 129109 - DNA, 743 bp, Cannabis sativa
gtcttgtcccacaaagttccagtaatgtttgaagaagaggacagacataccgtcagggcccggcgccttcatgctacccatagaaaacaaagtctgccgaatttcctcccggctaggaataacctccatctcagcttgtttcgaaggagagaggtgatccaatatcaaatggtctaagctttccaaaggtcccagggccgggttgctaaagatatctttcatgaaatcagtgaactcattaccaatctcttctctattggttaaccaaaccccattcttatccatgatacaatccactgagttccttctgtttctgattgttgctgtaaggaagaagaacttggagcatttatccccctcttggatccaagaaatacgagatctctgctgccaataaatcgctttacgcctaagagtctcattgagttcctttctaatctccatttcccgattccatgatcttgaaccaacaggcatactttggatagcctgtaattgattttggagtttagaaatgcaggtatccaatttgccgaattgatcccgattccatctagcaatgaccatttcacactatttattatttatattgccttttgatacatataaaaaattataatttttttttattttttttttaaattagaagcaaattacttaaagatcatgttatatctatattagttttgttaattttttttttattttaaagttatatagatttttttaattttttatgggtt

SEQ ID NO: 129110 - DNA, 865 bp, Cannabis sativa
tttttttttttttttttttgtatttttacggaaatctgcatagtaattcatatttcaatcaatggagaaatctaaatcgtaaccaaaatttatataacaatccacattaaaattactagagcaacttaagttataaattaaatttgaacaaaaaattaaaaaataatatatgatcagataaatcttcttattatcatgtatacatagtgatttagttatagtatatactagcatagctagtatgtgtgttggctaatatccactttaaatggttaattaattgtacctacaaatccacagtataattgtattccatcaaaaccgcctaataattaatttaactgataattagggtatatatagtacttaatttcacctaaacaaatattttggcaaaacttttaatctttttctcaatcttttttaggaaaaatattaatcttgtatagtttttttttttctttataaaaaaaatttatatatatatactaatttgatgttatgtacactttatgtataattttttttttaattaggctcaattatataagcgatattaaatgcaatatatgtatgtttattttttattgattagataatgtatttttaatttttgaaatgggagtttgaaattttgatctttgagaatagtttgtcataatgttattgttatgtttttttttttttctatttttatccattcagttcatcaatttttcttaatttatctaattattatattctatttatatccgtttatatttttctcttactcttctcttctcttctttgtttttgtttttttttttttggcattttctaatttatttagtgtccgtatattgatttattttctttttacatt

SEQ ID NO: 129111 - DNA, 3115 bp, Cannabis sativa
ccagccataaaacataaaattatactctaaaagcaagcttacaacacaaaaattctcaaaataaagatggttagggttacctcaagctacaattcaatcttacaccttgaaagaggtccttgaatcttgctgaaatggagaatttagcagcaattacacttggttcatgttggcttcgaagagagagaaggaaaaagagagaaaatttctctaattttggttttcttctaatttcctatttttcaaaaaatgcaatacacacacaatactcagcacaaaaaggggcagctgtcatgctctaaaaagagccacctaatcccctcataaaagtactaaaataccattggtgcttaatctagagctaattcaagcctagggtaaaatggtcaaaaaccataaccccactcgaactcaatattctattttgctccaacattaaacccactagcataattcatatatgatacaaataatactcctagagtttaataaaatctttggaattgagaaattataactctaatgtccatttctaataatgggacccacaattaaacaaattcataaataactataaaaatatcaataatcaatgctaattgcctttactaatccataatctaaagtgcggtcattacaaacagaactaaggatgatgacctcgccttacccatttgcaatatgggggattgatttaattgaggaattcccctgagggcaaggaggagcaaagtacgcagtagtggctgtcgcttctttacaaaatggacagaggccaaaccttcggtttccataacctacaaaaaagttctagactttgtagttaaaaacataattttcaggtatggaatacccattaagatagtatcagataacgaaagtcggtttgatggtgaattattcactgagttttacgagaggaacaagattatcaaaagcttctcgtcagtatctaggccttaagcgaatgggcaagtagaagctgttaataagaccttgaaggatactatcaaaaagaaattagacgctgccaaaggtagatgggttgattaactacctcaagtactttgggctcataggacaactgagaagacagcaacgggacatactccattctcgctagcatttagctcggaggcaatgctgccggtggaagttgatactgtgacacacagacgagatttctataatcaagaagaaaaccaagaactattgaaattttccttggatctacttgaagaaaagcgttctgagtcgcaaattactaatgcaccataccaacaccaagctacgagatacttcaataagaaagtgaagaagaggatcttcaatgttggagacttggtgctaaggcgagtatatgaaaatacaaaagacgcttctgcaggagtatttaatccaatctgggagggtccttatgtaatctaggcaatagtaggaattggggtttacaaattagcttgggttaatggcttgctgataaagaactactagaacgtggaatttgcgaccctactaccagtaaactgatgttgtaactactatttttgatgtaatattttgaacttctgatattaataaagatgaattattttttttaagtaattacaaagtttcaatctttaaaattacttgaggggcatgtatatgtgtgtgtatgattaactagaattcatctggaaatacatgatatattgcaaacccactacactttaaaaattttaaattttgaagtttttttttattaaagaacccttctcgcgagaaaggaaattcaaaggtagcagttgtaaatgagatataactcataaaaaaaacattaagctacatgcgaagctgaatactaacggctcacattttgtaggaaagtattgaataagacaccaagatgccttgaaaaaatacttgaacctaatataagaatagaaggcctaactattcatatgagcaatcaaaaatataccaagtgatgaatcattaaaagtgtatttaagtttgcttaaaacaaattataactgtttatgcaaagcagaattgataactgctcgcaaatcaaaatcatagcagataataactgctcgcgcacatagtagattactaactacttaaataatatcaaaagaaaatacgagcaatggaaaggcttaaagtattttaaatttgatcaaaacattattgtttaagttgtgaatgaaaacgcaaacaagcaaatatattaagttcaaatataaaagtacgaagcttcaataaaagataaaataaaagcaaagttggtcatcacaccttgcaaatttgtctttacaaaagtcccacaaggggcaaaccattttcttgcccttagggccattttcctaaataaaaaaaatgatgatgaataaataaaaaccaagcctacatggtgggagacttggatagttcttcttcttcttcttctgttgttgcctcgacttcctcatctaccttcttagcttgctcgcagtaagcaaggacttcctccatggcctttcccagtaaactcaaatccatccctagattttccatcttggctcagtagatggaacgctgtccaatggcattgcatcactcaatggtttcagcttctttcccatcgagcgttactttggctgcattaagttcctcttagagtttttggtattcctcctagagtttctagcatgcctcaatcttatcctttgcctccttcttagtagtttcaagcttggccttgtgggtcctcttcacctcctcggcttctttggttaggctagtgacctccgcctagaagtcagtccattccttggtcacagccttgcgctgacctattaccttctggatctcgctctccatgtatttcattctttccataccccgccgttgggcgacaaaggagatgaaagtttgttgtaaactaataaacaaaaatccgtgaatatttttgaaggatgttaaaaagggagtaagaggagaaggataaaggaatttaccaagaggccatgggaaacactcctctcaagcatctcctgcaagttcccattgttgatcaagtcccattcattgggaaggaaggacttgaaatgacaccaacaagctgcaccaaactccccagtgtacttcg

SEQ ID NO: 129112 - DNA, 560 bp, Cannabis sativa
agtgtaaaaaatctgaaacattaggtatttatgccgcaatttacacaaaaagtataaggctttcggttttttttttttttttttttgaaaaacaagactttcacatattagtattagcattagtatatattaaattagggaactaaggcgaagcattttgattttttttttttttttttatgttgattaagtgatataattagatataaaatatttagaagtatatattatgaacaaagtaacaattttgaagttagaaacataaataatttatttttaaaagaaataaataaaagaattgtaattttatgacaaatattaaaaatagtagcatgaacagataaatattatgtgtttttataataaaataataatatttttttaagtttaataaaaaataagcttgtaaatgatagtatagttttttttttttattattatttaatagattatttactttttttcttcaatacaaaagaaataactacaaaaatagtttaatattattattctgaatcaatattattaaagtagagtgttcaaaaaatattattgaagta

SEQ ID NO: 129113 - DNA, 1397 bp, Cannabis sativa
ctttattgatgttgaataaaatggattacattgaattggagttttatttagagcataaaacccaacttgatggtattctagtttcggtttggactactttctaggggacaatagtgttcaagcaacatttctctttgatattctatcttcaaatgctgaggggagttacatattggtcgtgatgttctctttggtcatacttcatttcgagagggtgatgatattttgttgtgtcttctttgatcgttttgtttttgaatggctttaaaagtaaaattaaatgttgttaaaaagaatatttatctttgttcgtataggttataatgaaatatttaaactgtgttattgtcttgtcgtcttaacttattttttcttgtgtaccagaccactgatcactcactgagtttcctacaaaacataataaatgatgcaatgatagactataattttgacatgatatcaggaaacttagaaatgatctctttctgaatactctcgattactcatttttacattcagacgtatgtgtaatagagtacgtagtaggtctattattctaatttctacggtcatggactcattaagataggaaacactgtttaaatggtaaatttatgcatgatatgaataaaacaatatagaaataaaaaaataaaatgacactatcttaatattgactaattaccatcggtggacccagcataggattagtcattttattatgctttaattttgtagatatttttatactatttttgttttgtttttttaagggataactagttaaaaaaactagttaacatacaatgtatgttacccacatgactctatttttatcctcgttctcttttcttatgttttgaagtttcatatctgataattgtaactagctagtttatgtagctggtttttcaatgtcaaattgtttactagctgataattgtaactggtttcttaatgtaagattttagtatattaaattttaatttgttcactttacgaaactatttttttttattttgatgtaatggggttgctccattctttgtagtattttgtctgtttcttattttaaatttgtcttattatattttatatggtcgaaactggttttacaagttttgagggttttgtaatgggattgcttcattttatatatttttttttattttaagtttctttatattatttttttgtctaaatttgaaactggtttttacatttatattatgttcttaaattattgtcatgtgttgttttttattacgtttgttagtattgtttttttaaattattgttcaaaattagtttatatattttgagagttctgtaatgggttgttctattttatgatgttattacaaattttttattttaagttacatttttattatttt

SEQ ID NO: 129114 - DNA, 647 bp, Cannabis sativa
agtacataaccgacgtaaataatcagtggttagcgttggttattggctgacgcaggtttagcgttggttcttagagaattagcgttagttatgcaccgacgcaaaatactcactttttgcattggtgcacaaccgacgcaaacttcctaaattaaaaaaaaaaatcacacataataacaggctttgagcccatttaagaaaaccctaaataaagatttaatactcacatgaccccaaccgtctcccctatttctaaaattctttctttttctgtcaacccttgttctctctctttattttggtaagtcccaaatcgctcagcccaaatcggagccaagtcgtcgtcgctcgcaatggaaacccccaaccactcagactcgtcaccgccacaaccgttcggaggtaatttctttctttctctcactcttcaccttcgatgtctctttctttctcctatggtctctctctttctccttcgacctctctttctttttactatctatgctctctgatctctctttttttctctctcatttttttttgcaggcagtatatgttgggttttgtgccctaaataagactcatttcaatataatcagatttaattattaataaagatcagaaataacattttatgttacatagtt

SEQ ID NO: 129115 - DNA, 1420 bp, Cannabis sativa
aaacccaaactgtaaatttgaagaaaaaaaaaagttaaaaaaatagtatatgcggtaattcccctacttaaaaatggcatttcacaattgattagcgatattctataaaaattattacattaaattatatgagacttgatacttaattatattaataacgatattacatcttggagagcgctagatatcactggtgtcttcgaatatgttaccaaattaaattatataagactccatatttaattaaactaatagtaatattacaatctaagtagtgtggtgccttgtaacatttctctattacataagtggcaacacctaaacttaggttgcacgtaaacacgttaagagaaatgtaggggtaataatatctccaatcaaataacttgatttcttagtcaaaataaacttggctcgaatagctagctgcccttttccaaatttggctcggcttatttattagcaaatatgttatctctctctctctcgtgatatgttctaaggcccaacttcgtgcagatttatcaagttttgggtttgcgagattcgagttcacggattttggatttaaaaaaaaatgaaactgaacccagacttgaataggggtcgagttggcaggtcacgggttagcgggtttcggttagtcgagttgacccagtcaactcggtcaactctttaaaaataattaatcttttattcaaataattatttcttttattttttttatttattaaattaaacatatataatataacaacttgttcatcaaatcaactattgaagaaaagaagcattaatcattccaacaaacaaacaacttattcatcaaatcaaacttcatcttcatgttcatgaatcatgataaaagtaaaagtaaaatatttcaaaatacatctatatccatagtaaaaagtaaaggaaagtttagggttttttaggttttactttttattttttaattaatatataatatgtaataaaaaaattaaaaaaaaaatatatgaaatatgaactatacaggttgccagacaggtttgggttcaacccaaaatccggtggtcctaaaaacttaacccacgaaccggccgggttgaacccgactcgctcgaatacatatatatatttttttttaaatttgcgggttgggtccgagtcgaatccgctcaaaatatgttcctatgaatcaatatgtaacttatgggggtgtttggctttttatttatgagagctaaattaatattaataaaaaaacgttttgattggtctacaatgtattgatataataattataagtgaaaaagagattaatgtgataaatgttagaatttattagggtcacaattgtatatataaaatgtgtgttaggtcatcaaataaataagtcaaatttatgtggtctattttggaataaagtttatga

SEQ ID NO: 129116 - DNA, 898 bp, Cannabis sativa
cttaatctgttaatgcataaccatttcaggtggaatgaagatgatgaagatcattttctttagccatgaacatggccatggccatgtcattgttatgttacttctgcttgtgtgtatggaattgggagtggtaccaccaaccacatccacatctcaaactacaactcttccccactatgaaggtacatacatacatacatacatagccaagttttgctagtgcaaaaattggtattattatttattttttattgaaatgattgatgcagtacaagccattaaagagatagctaaagagctgaataaaaatgactggaacttcagtgatccatgcagtaatgaaaccaccattgataggccgcggatcagtgataagtacagcaataccatcatctgcaattgctcaatctctgccaatttctgccatattcaaagcatgtaatacactttgttaattttctttgcctttgtttttgcttaattagccttctagacttgtcacaacacacacacactcatactttgttgtctttaatgttaattttctttgatggtttcaactgatctcttttctcatatttcgattttgcagctctttcatcggtcagtaccttgatggcgtgttgccaccctcattggcaaagctgccttatcttaagaaagtgtaaggagttatatatatgtcctactctttcttacttactacctcaaatcaacatgaaaaataacgagaaaaccaacttcatgacaactataaataaaatgaaacaaccaaaatagaatatcgagcagtttattttttttgaaaataagcataatcattcaataaataaagcagcagttagacttctcggtcattacaaaatagctcctccggtaaggaggagatcaaaataga

SEQ ID NO: 129117 - DNA, 643 bp, Cannabis sativa
ggtttagtgtataaaaattaaaacataaggagatttcgccacaaattgctcttttaaaaaatattcttttgaaaaaaaaaaaaaaaagtagtgcatgtaaactaaggaatttttagttggacaactttactttggttagggactacttaaattaatgaaaattataaattttaatagattatttatcacaattttaatgtgtgtgtgtgtttttttttttttttttgaaagcttaatgtgtgttctttttaatagtaatacaaaataaacaactaataaaaaaagaaacattcttttacaaaataaataatagttttcaatctcctatctatgatcaacgccgttaaaggagttgatcactaccttagaatcgctttctgccaagataaacttgtggccgttgtccttcaccacttcaagagccaaacaagcagcaacagcttcacctcgaaaagcatcagaaaagttcaggtttgtgttatgttatttttagtattaattttagattaagtttcgtatatttttaatgagattttttctattttaggctaaaataacctaaaataaacatttatactattccaatcaaaaataaacatttatactttctactaatttcaaaaatactatttataaagttttt

SEQ ID NO: 129118 - DNA, 788 bp, Cannabis sativa
tgacttctgtttttggtttgattattaatgattataaaattttactgtcagctttacacaatgttagtcttcgttttgttagacgatcaactaatcgagtcgctcactttgtagctaggcggtctcggtttttctctgattgtagcattcatcggaatattgttcttgatgatcttcaaaccttcttgaatgatgaatgctaaatttcaataaagttgatatttcatgttcaaaaagaaaataaatattggatgcaatatattagtgtttaaaaaaacttgataataataataattcttaagttttgataatttaaagaaaacattgtacaaaatttgcaaaacataaagaaaacattgtaaatatagtttttaaaattaaaggggaagaattcttaaataaaattttaagaaaaaataactaaaagaaaatattatgaagttaattttaataatttataacccagtgaataaaattaaatattattgtaataaatatcaaataaaattaataattaccgatcttctaattgtacaataattatttagataaaataattaattacagtaaaactctcttaaatttagaaaattgtagagaaaataaataaataaatttatttctcttcatttttaattcatacgaataaaagagctataaacgattacaataataaaagatttgtcaccactcataagtgtaggagtattcaattcaatttaatctgcacatctaatccgcacgattcaatctaggggtgttcacaaagtatccgatccaatccaatc

SEQ ID NO: 129119 - DNA, 510 bp, Cannabis sativa
aaataaatatatatttgagagtcaccattatttgtacttttcaattttactatcgtaaaattcaaaaatacacctcaaaaaatagtatcatgtatgggaatatcttcctactagattaactaattatacattgattcttgtgtatgtaaatgaagcttatagattataatgcaagactaagtaaacaaagtaattttgaaacaccccctaatattattaacaaatcattaaagttacttaagtgtctaaagtcaacctaaaatcatgtacaattttaataattgtgagatgatgaggcaagtttgaagaaactagaaagattcgttattaggatttattgtatttttattgtacaaaatatataaaccatagcataatatacaaaagaaaacacattcaaatcttattatacaaatagagaaattgaaatactgtcaaagatcccaacagcctaattacctcaaaaacttgactaacactgaagtctcctatcttccccgtaccgtgacg

SEQ ID NO: 129120 - DNA, 3179 bp, Cannabis sativa
tcacttagcttaaatttatgtaggataatacatatactttatccgccataggttaacttacagagtaaagatgaattaaaatactgatctcctaactattggtagtattttcgaaggtggttagcactccaagctccatgtactatggatccatccattctccttaacttataagtcccaaagtctatttcatcttaaattttctatgggtcttaccaatttggtccaagtatcccactcctagctcttgagaagccgggaagacccttcttaggactaggtcaccaacgaaaaatatcctgcttttgactttggaattaaaacattttgccactttcttttggtatgctgccatgcgatatttgagattcctcccaaagctcatctagtaagtccagcacttcttgcaccaaagcctggttcattgttggatcgtaagtggttctcctgtgggagggaattatggcttctactgggaccatggctttgcactcgtactccattgagaatggggagtggccggttgtggttcttgtagtggttcggtaggcccataatacatgcggcagttcttcaggccaactattttttcaagccaagagttttttcttaagggtgaccttgagtatcttattgacagcttctgcctgtccattttttgtggcctcgcgactgcagaaaaacttttgataactccgtgttggttgcaaaaattcgtgaattcatcacagtcaaattgctttccattgtctgagactattttgtgaggcaacccatatcgacatacgatgttctttatgataaagtccatggctttcttggcaattatggtcttcataggttcagtctctgtccattttttgtaatagtacactgccactatggtatatttcaccccaccgtttcctgtgggtagggacccaatgggatctatttcccacaccgcgaagggccatgggctagtcattaaagtaatttcattcggcagggctcttgggatatttgcaaacctctggcagggatcacacctaaggacgtagtctatagagtctttattcattgtgggccaaaaatatctttgtcttaatattttctttgagaggcttgggcctctagtgtggtctccacagaatccctcatggacctcttgcatgatctgtctagcttcaggatccgacacacaccttaaatatggcatgctaaacccccttcgatagacaacgtcgttgatcattaaatatcagtgagcttggtactatatctttatggacacggtcctttcttgaggcagttctcctgtcgttatgtacttaatcataggatccatccagctcgacccttattcattagtaaccactacttctttggtcctaatgctaggttccgtgaggtgttcaaaaggtactacccccagcttctctatctcgctatttgaggctagcttagccaaacaatctgcatgggcatttctttctcgtggaattcgttccaatttgtattccttaaactcttgtagcagttctctgacaaccaacacgtaagcatccatcttttctccccgagtcagatattcccctaatacctagttgaccaccagttgcgagtcactgtatacctctaccttgttggcccctacagccttagccaattttaatcctattattagggcttcgtactcagcctcattgttagaagccagaaatgtgaaccgtagggcagcctggagtcttagtccatcaggaaaaatcattgctattccagcccccgatccgttctcatttgacgctctgtcaacatataccttccacgtaggcacatcctgagccggcacattggcgatggcttctgttttattgcattctacaataagatccgccggtgcctggtccttaatcgaaatgcgcaggatgtactgtatgtcagacggtcttaactccatggcccacttaagaagtctctctaaagcctcaggcttctgtaagacttgtcgaagcgggtggttcataaataccttgatggagtgagcctggaagtagggcctgagctttcttgatgcaatcaagagataaaaagcttttcaattataggatatcaaatttctacccctatcatgcgtttgccaatataatacaccaggtgttgaacttttccttcctcccggaccaaagctgcgctaactacgttttcaaaaacaaatagatataaatataagtcttctccgtgaacgggttttgacagcactggtggcttagtcatgtgctctttcaacttcttaaatgcttcctcacattcttccgtccattcaaacttctgacatttcttcaagatgttgaagaataggatgcacttatcgattgagcagagatgaagcgactcagggcagcaaccttcaatgttaatctttacacatccttgtgtctctttcgtgagggcatactcaacaaggcttgtattttttttgggtttgcctctatcccgcgttgacttactatgaatccaaaaattttcctgatttgatgccaaaagtatatttcttgggattaagtttcatcccgtacctttggactacttcaaagcacttcgtaaggtcgtccgcagggcccatacacactttggatttgaccagcatgtcgtccatgtacatttccatgttacgacccaagaggcccttgaacatttggttgccatgggctaataggtttctttggcattttttaattcgaatggcatgaccaaatagcaatacaccctcttgttagtccggaagttggtacactcttggtcggcgacgtgcatcttgatttggttgtaccctgaatatgcatccatgaaagataatagtttgaatctcgaggtggcatccaccatttggtcaattttaggtaacaggaaacaatccttaaggcaagctttgttaagatcggtgaagtctatgcatactcgccttgtcccgttgggtttgggcaccagaaccgggttggccaacaattctgggtaatacaggtcgcggataaaacgttggacaacattttgtccacttcctttggtagggcatccactttcaccgggtctagcgaacgtcttttctattgcactaggggcatattagggttaacatttaagacataagtgattacatgggggcttatctcagtcatgtcctcatggcaccatgcaaa

SEQ ID NO: 129121 - DNA, 2360 bp, Cannabis sativa
tgtcaaaagtaaaaaaaaaaaaaaagtatacactaaaaaaacaataaaaaagtaattttttctttacaacaataaatttttttaaaaaaaaaatagaaaaaaaccatatgtttggattcccaaaaaaaaatattgagtgctgtatgcttaattgcttattgattttaggctaattatgaagttcttcacctcaattttgtggtgtgtaactccagaattgagttttagttgttgggattgggatgagaaatgatgtactttttttttatcctacccatgaaattgtgagactaaatgtaatatcctttcctaaggtttaagaacaagattatcaaccttaactaagttaattatgtattaatataaaaattatattataatatgatttaataggtgaaactatattatgatttgatggaattattattcatattttcatagaatttgatctaatagatagagaaaattacgggattcacattcaaacccttctttatttatctcttatttttttgggttatttatgtattcattctcccctataaatagtgaaggccaattcactatttagggatttttatttggcgctaagaatagagagaacactatgaaatattagtaacatttttgagagatattgataaatttacttggccggaacttgtgatcttgatatactttcataaaagtaatacaacaaaaaggagagtaggctattgccactgaaaggggtcgaacctctataatttttgttaattctatttttagcatctttaatgtgacaaatatattttattatttattgtttaaattcggctggtgttaatattagttttcatattttatatgtgacttttatattaagcaatctatttttggaagaaaagttgtctagctttcctatttatggaaaataaggtaagaaatagtaagtttggttactcaattcttttctatctaactagttgtgatattctgatcttgtgtgagttttccattttgattgattagattttttgaggagaaaactggagcaaaactttccttttctataaaagaaaagtcgcacttactgctcacgattctgtaggtacagaaatagaaattcttgggctgattgaagatctattttagggaattttctagtgggatgtggtctgtcaataaggtgtatgttgattataaatacaccttatagcagctaggtcttgtatccctttgatacactttgaattgtattcatatcttaaggaaagagtgtttttgttttgtagaaaagagcttcttcgactcttactctatttatttatattttatattgtcttgagtctatattcaagtctacaaagaagaagaacaacagtgctaccttcgggagaaggttttacaagctttcgggagattgtctttcaagtcttgcatcgggaggaagcaaacactctttaaggagatcgaagggagttcgagctcttaaagtttcattaagaatcgattagaagatagaatacatcaagcttgcggcatataataagagggaatctatttatgcataagtcaattattttatatttttgagatctatctaatgaatcttatctatgggcatgaccccgtggactagtaacaatcttaatagattgtaaccacatacaaaaaccttgtgtgtttttacttttctgcactgtttgtttttctggttctaaagttatagagttgtcttctgtagctacagaaaaacagtttcagtactagttttattattctgtatttaattaagtatttaattaaataatcaaactgagaatattaaaatacgaaattttaattttcatgtatcatttacaatttttaataatctttattattgatcaaatacccacattatcgttttatttactctacgtcattaactagaaacgagatcaacatgtttgaataccatcaaatgcaaaatagcaatgttcaatgaaagtagattcaattaagtgaattttttagaaatattcaaattttttttttaaaaaaaaatatagtaaaagtaccatatattacaaaagtataaattttatttacaaaaatactaattacatggggatcaaacttcttccccctaactcatacacacccttcccatgccatctgagcttctcatatttggccaaattataaattggtaaataattatttaaactagtcatatttttttattaattaaaatatatttttagtaatttttttatattttaaaattaatataaatgattaaaaaataaaataaaatagaccaattatgttgtcatggagtcaggcgacccttaaaatttcttttagagtgagtacttttgccaaaaaaaaaaaaa

SEQ ID NO: 129122 - DNA, 1049 bp, Cannabis sativa
atatatttctaaaacatgcattccataattattaatacataaaccttaaataattaataatataaagtactattcataggcggtctttacaatgtgaggttgtaaccctccccaaattttttttcttttcttcatgttttcatataattaggtaaaaaagaaaattatatataattattactaattttctccttcccctcccccaatttttttcctttgcagtttgccctagtgtatgtattctacatctgtcattgaaagtggtgtctctattataatttaatttgtcataaattattaatagttgttttgtaaattatcaattaactaagagccaaaacaatgtgcagattttaagagccctccaccgccacctcgaggacctccagctccaggagtgaggcgttctccaactttacatttttagttgcttagagcatgtcttagagatattagtttggttatgtatagaggttgttatagtctgttattgttatatgtagttaattatagtagttatttttactgttttgtcctaactcagctgctaccagttggagtttgttgtattttcttactgtataaatactcctttgattattaataaagattcaattctctgcatcaaaactttctcctctatttttgttttctttctttcttctctgtttttctttttctgccattgataatcaccatggttagaactcgagctattagatctagaaattttggccaaactcctctgtcagatacttcttccacacttccagatgctccatcaatagatccatcgatcattcctctactttctgtaggattttttcttgtcttccaagaataccccctacaccaactcaatgtcaatcaaaacgacatggacaaaactgtccaagaaaaattaaacacaaaattaaactaaacgaccaagaaaccaagtcgtttcctcctgttctgccttgaacaaaatcatgccaaatgagctaaccctagctcagaattgccaaagaaccttcgagagtttgaaccaaactctctctctctctctc

SEQ ID NO: 129123 - DNA, 992 bp, Cannabis sativa
  modified_base (960)..(966): a, c, t, g, unknown or other
gttcagatcttgataatgctatgttacagaaaggaatcaaggggtagagatctgaacgaaaggagtcattgaagtaaatctagattttggtaaattatttccaacacttactgcactgaaactcactgacttggaactacaaaggaagagagggtttgctttctcctaaacgatcaatgacctccccattccagtaaaatttaaaatgcccacttgcaagtacacgggtagtgaagactctctaactcatgtttagaacttcaaaattcaaatggaccttcaagggatcagggatgacctcagatgtcgaattttttttacaaccctcatggacacggcacaacaatggtttaccaaattacccctagggaggataacttcctgggatgagttcgaagggttattctatactgagttttcttcaccctgccagatacctgtaaaatttggtgacttagttgccatcaagcaaaagcccaatgagccgctaaaagactacatccagtgctttatgcgtgaagccaccaaggtaaagaacctaagtgacaacaacaagcgagctgccataatgggggcatcatggtgggaggtcgactatggaaagatacgaggaggaagccaactcattttaagaaagacttcctcgatagagcttatgaatttattagaatagaaaaggctaagcaagttgccaaaggcatcaacccagctaaaggaaacaacaatggagcaagcactagtggccaaggctcccagggtcagggggacaacaataaaaatggctttaataatggaaagagggccaacgacgataatggtggatataactttattaacagcaaaatgccaaacaaagcatcttcattaattactatgtcctcctatgtgatacaatcttcaaccacacgtgacattccccttttcctttcctatgggtatgattgttgggttttatgcccnnnnnnnaactccatttcaatgtaatctatttt

SEQ ID NO: 129124 - DNA, 2737 bp, Cannabis sativa
taaattttttttctagatgccgaaataagttaagggtgtatcaatacatcccttttaagggggtgcattgtagaatcaccctataaaataaactgtacatccataaaaaaatatcaatttcttgccatttttgaacatttattaataatcccttcaaaattaggttatacaactacacaagtcagtaaaaaaaaaaattattgacagctaaaatccttttatgtttttatttatatatatactagtaaaatacgtgaattatacttacaaaataataaaaaatatatatgaaaaaaaatatttgcattatatatattataaataattatcttgtatattaaattatatataataaataactacaattattatgataattactacaaaaaaattaaattattttactaattttcttttattattgatcaagtttatacttaaattataatatatgcctggaaatagtttctatttctcaatacaaatacagttattaaaataatttgctgtgtgattattatctaatatataattattcataaaaagtgattaaaacaatatattattatacttatataagggattagaatattttaacaattttttgttgttaattataatgtttatagataaactataatgtatgtatagtgtttcataacataataatttatatttatttgttatatgattattagctaatatatgattaaaaattaaaaatatcactcacaaaatttctcacttgtaaaagtataatagttacaaaataatttaatttatattaaattataaaagattttaatggaagaaaaaagataagagttaactaatttaagatgtaaaagcctaaaaactatcaacactttttatatagttatagattatagattattcataaagagtaattaaaagaatattttattaaattttttattgttaatggcaatatttttatagattaattataatatatgcatattgtttcatcaacacaaatatgaattatttatattaatttattatgtaattattagctaatatataattatatatggtaatgtttatagatatatatatataaactataatatatacatatagacatattgtttatcaatacaaatatgattatttatattgatttgttgtatgattattaactaatatatagttatccacaaaaaataattaaaaataaaaaatatcacttacaaaatttctcacttataaaagtatagtggttatcaaagaaatgtaatttatattaaattataaaagattttaataaaataaaaaaagacataggttaaataaataatttaatatataatgcccaaaaattattcacactttttattagttctaatctatgttttttgtagtcttttttatataaacaaatcatatgaaaaattattagtaaaaagaaataaaaagatgtatttgtatgcattgtatataaaaagtggagctctctaaattatgaattttttttatgattaaatgatgttaggatttaatagtaattaacaaaaaaaaaaaaaaacaattttgtaatttattataggaagcctaaacccacattctcattttatactttttattagttctaatctatgtttttttgtagtcttttttatataaacaaatcatataaaaaattattagtaaaaagaaataaaaagatgtatttgtatgcattgtatataaaaagtggagctctctaaattatgattttttttttatgattaaatgatgttaggatttaatagtaattaacaaaaaaaaataggacaattttgtaatttattataggaagcctaaacccacattcttatttttatatagttatagatatatatattttgcaatatcccataatatttggttttgttttcaaatttagagtactgtctaaacattgtctattaaatgtcatgttagagcatcaatggagagttataaaattgcaattttataaaatattttagcaaaatttaactctaacggtaatgtaaaataagtgttaaatttggtctaaattaaaatattgctaaatttaacataaaagataacatttgataaatttaatttacaataaatacaacatttttaattatctctttgacacttatttatattatttattagtgaaaaaagaaattatatttataaaatataaaattaattattttaagtagaaatacaaaatttgagtcaataataattttatagtatattttgagttaaatttaatttaaaatatatattaccggagatggtgttagaggaaggtggtggtggtaatgggtatacagggtttgggattggaaggtattgtttaggtcttttgatgaaaatgtagagaagaaagaagaaaaaaaaatgtataaatatatatatttatatatataattttcattttataataaaatgtttaaataatttatattatcttatttttaattttaaaagatttggaccaataaagatataattatatatatagaggaaattagactctataccctttttatattgtcctctttcatttacctgttttacctttttttttaaacactttactaattttactcctgtcacctcaatatattctccatgtgaatcctttatgtcagggtattttaagtacaatccatataaaaagatgtatgtttcaattaagtataaaattagaggtaaatttagttaatcatcaatatcaatatatata

SEQ ID NO: 129125 - DNA, 571 bp, Cannabis sativa
ctcattgtaatcagaagacctgttaaatcctggaggattacttagtaaatccttaaagatagtgtcttgtttgcacgcatctggtgttatcattttattattgcaattgatatttttctaacaatcttaagtatttatggatcccaatgctactactgctgttgttgaaaatacctttggttctcttcccgttggtggtactctctctgtcaccgcggccattaagtgagatatatcttctgatattagagaaatcaatctttctgttccttcttcatttgctgctgctattccattctccaagccattctctgacatctgtaaaatagaaatgtttgatggtcagtttttcaaaagatgggaaaaaagagtattattactatgtgatatacatgtcgttgcttgggtgatttctaaagagaaaataaacaccaatgctaatgcttggactcaggccgataaggtatgtagacacacgattttgagtactctttctaatgatttgtttgatgtatactgctcttacaaggaagccaaggagatatgaaactctatgattgcaaagtacact

SEQ ID NO: 129126 - DNA, 1017 bp, Cannabis sativa
ttttttttttttgaaggaaatatatgtatacatatttatatatatagtggggtgtgtgaaattgacggccatatgatcactaatttctttatgattgatgattatacaaatatagatatatttgtttttcaatatggtgattatatgtatcgtatcattcatactatagagtatgtgtatacacttcttcaaaatgatcgtttcattaatagattttttttatcagttttctgtatatattatttaagattacgtttaaatttttaaaaaatttagaataatttataaagtcaaaaataaagtttaaatatcttgttgcactcgagattgttttttttatacgcgtggtcagtaactttttgagtcttcttttcagtattgtaataaactattcgaaattttctaaaaaatttacatatattcatatatggttacaacatacacgatcataaaataaaatcaaactaaaaaaatttagaatgccaaaatcaataaaaggtctactagaacacccctttatacgggtgtatgacataaatttctctaccatatactaggagtcaaggacagactcacagagatgcgaggcgcggggtagtcgctctcttgaaaaaaaaaattgaaaaaaaaaaaacatatgcattttagttaaggtttttttcagttttaatcaaaaaagttacaatattattaaaatactttcatccagccaaataaatatacaacccaaataaaaaaattatacaaataccactaacacacaccttcaactcacgatccacgcttcttaggattgaaaccttcgtctgatgcaacagttgggcaactacccagccagtaaaacacaactgaaaaaaaaatccaaccagaaagagaaccaccattaattccagcaaattcacctgagaaaacgaccgaaatcaatcaaaatagggactgtttagaattcataaaaaaaaaattacaaaaaaactattatgaaactaaaattcaacctgtagaaatctagtttaattc

SEQ ID NO: 129127 - DNA, 2554 bp, Cannabis sativa
  modified_base (2524)..(2529): a, c, t, g, unknown or other
acccatgagaccactatcggacctacatcgagcttatatcagacctacgtcttcaatccgaatcctttttaaccacagaataccatcggacatgcatcagacctagcttaaaaaccagtttcttgcccaaaacacaaattcaaccaaatccaactctaaatttaacccaaactcacagagaaacacatatattttaaccttaaatcaataaacttatcaataatctcatacattttaaccataaatcatgcaaaaatacaatagatataaatgaaaaagggagggaacaaaatctcttaccttcgacattgcaaactcgatcgtggccttaggtgcgagatgtcgtgatagttcgcgatgggcagtggtcgtgggttggagagacaaatccggtggttgtggccgtggtggtgggttgtcgttggtccgagaagttgttacaatgatggtgaaaaattgagtttgtttagaagagtgtaagagagagataggtgcgttgacaaatgggaggaatagttttgactttaatgaaaaaataacttattctacaaataatttttatatactaaaatttagtgtatcaatttgtccaataaacacataataaatcaattttcctttttacaataatccatccatatataacgtaatatacatgtgtgtacagtgtagtagtagtagtagtaagtaatggcgtgtttagttgagaaaaaggtttcacgtgggtggttagtgcagtgaattgcattggcgtagagattggcgatgaattgaattaataaagaggtacgtagggccgcacgtgggtaggacacaacataacacaacacaactgtcaaataaaattatgttatcccaacccccaaacaaacatacagatctaaattctaataatctaaacctgcattgcatgcatatacgccaaatcacacacctaatcaaaaccaaaccaattattatcacctcccctatttctctattcttttcttccttttacacatattatatcattacattcaaaaatatctctttgggtcctttctcctcattattccaaatccttaagataaggagagtcagaatatataattcatcattttcttattagttaagaattaacaacattctgatcttattttccaaagttatatattattgagtcttgtttttagcaataaaataaaaaattcgacctatataactcttttattttgtaacgaaaaaacaaaggttgaaattacaaaaagagtgatcataaaatgtacggatgtaaacttttcacagaagtatcaactattattaataaataaatattagcttaccttccggaaaccttatttgattgattactaattatttgcataatatgaattatattatataatagcataatcagacaatggttgggacccatgacccatgtagatggcatgtggatttggtttaatgacccaattaagtaaaacacagtgcaattaagcttcaatgattcaccaatattttatttataatgttccacattatcaaaacattgtttggtattataatatttttatatatttaattgctatcggctatatggggtcggctattaaaatataaaaacacatttatattaaagactaagaaagaaagaaaaggttaaatgtgctgagacagagcttaaccaagtagaattggagattgttatacagaccaacaaagtacaaaccatatgagggcttggaagaccataaaatcccttgaagatgcattttctcatatcatgatgtgaccaattttacttgccaaaattaagaagagaatgcaataataataatacaaaaaatctaaattcttgtaaggtgaattatatagtgatgttaatattagcattttaagtttttattgtaatcatattgagtgttatgtcttttgataattatattatatgacattttatatgttggtaattttaataattattttagtacgaatgataaaaatagtttaaatccttcttagtactcgcattatattgttaacttttaaaattttattactaaattcaccatggctcctgtggattatgttggatgtaagtaatacatggaagcatcattacacttttgaaagacttattgagctttttttaatcaagattggaaagatataattattctatagggcctctctctttcacttagaatattttccatatgattcagctgccgccacacaacccttcttgaaagagtcttaggtaagtctcttccctttgcgtcttattgtatacattggggacaatgtaatatttagtttggggggagagatttaaaatttttaattttctgctttaatttttatgttttagttaggaatggcaataagctagaagatagtcgcatactgctgtttagtgtaatgtactctgaaattgcaaaataactgtgtgcttaactcttttaattttttggattagtttggatgcttggagacctgtgtatgaatgcaatttgttaatctgtgaaaattgttataattnnnnnnctatggtttgtggtaagattgacag

SEQ ID NO: 129128 - DNA, 1102 bp, Cannabis sativa
ttatataataatataatttcctcaattatacataattatctagttaggactttgctaatccatttcttgattccgggtattacagtactgattccgaaggtctattgtcaatttttggagcttatgccatgcctgcgggacccaccccatgtaagcagtatcttaaatttgtaactcttttgagggtgaaatttagagtcgataactttagaataaacaatatagtgcaacacatgacttgatagaacattgaaatagcttcaaaatgcaagttgaatcgcatcaatcggatcaatattgagtgagttatgactattttactgaaggttgttctgattccaatgcccaagttgatatcccaacgcccaggttgacctgtgatgttaacctagaggcctggtgagtgggaaaatgtgtcgaggatgtaatttttgatgcctaagtgatattttgacatcacttagcatgaatctgtgttttagtgaagctggttaccagttctcgaagatgttgatgttttggaaaaacgagactcaaaactacttagttttcgagtaaatcaccttgttagaaaagtaagaatatgaagttatgaatttgatcttctgacttcatagctctcggttactatgaaaaactagatgagcggtcgagacagaattagaatcgagtaagcagaacccaacgcaccaagccacatgtcaacctgggcactgggtgcttattttggagcttttggggtgtcgttttgatacttacaaggttcttgaactagaggacaaggtctcataccctatttttgaccatttcgaagagaatgctcaaagcaaaattggcatttaagtgatcgaaaccagcgcaacaggttgattatcaacctgggtgctaggctcaattttcatgcccctaggattgttattttcttcccaagtttacttgtatctttcttatttatgatgacaaaaaacattccttgaatactttttcgagaaactgattggaaatagcctaggtttacaatatgtctacatgggcgctgggcccagtgccaagtgccaactgttgggttttatgccctaaataaaactctgtttcaatgtaa

SEQ ID NO: 129129 - DNA, 839 bp, Cannabis sativa
  modified_base (800)..(802): a, c, t, g, unknown or other
ggcctaaaaacattggatgtcatccaatgaacacccctaagtggattattcgatttggactgtttacaaaactttatgtacaaccctactaaataggtgtacataaaacttacaaaaaaacttaaaaaaaaaaaagtgagaagaatcgcaatcttatcatagacttgtaccgtgtgtggacccaagaattttatttaaaatgaagacacaatgaaaattaaattgaaaaaagaaaaaatattaatgtaggagaaaaatacaaaaaaatttcttatttttcttttttcattttccttttgaggaaccattatttatttatttttagctaattaaaatttttgtccctaaatttcaacaagtaccaaattatatctcctaaactttttttgtcgttaaaaatttcccctgaattattgagattgttagaattaaaaacatctgtctaatttcattcaattttactatttcagtgattgtttttgtactaaatcatgctctcaaactttgatatctagcaaatcatgcccctcaaactttgacatatactaaattatgcccctgaattttcattcatgttaaatttttttttactaaaattggacaaaagtctttaaattcaacaatctcaatagttcatggagcatttttaacgaccataaaagttcaggggcatgattttgtacatgtcaaagtttgggggaaaaaaaatcataattaacctttattttttaattaaagtattggctaattaggatttttccatccgaactttgacatttaccaaatcatgccccctgaannnttttggccgttaaaaattccccccgaactattgagat

SEQ ID NO: 129130 - DNA, 825 bp, Cannabis sativa
catatgcttctggaagattgataaaatggtcgattgaactgggatagttcgacataacataccaccctcaaacttccatcgagggccaagccttggcagacttcttaatagaaggtataactccagaagaaatttcgcctgttcactgagacgcaaaaacttggaagttatacgtggatggtgcatccaatgatagggttcgggtgcaggggtaatattaatatcaccagaaggctttaagtttcactatgctttaagatttcaattgacacatcaaataacgaggctgagtatgaagccttgattgctggcttaaagatagccgaggtattgaaggtcaaaaatcttattttccataatgattcacagctgattgtgagctaggttctaggagaataccaggccaaaggtttgagaaaggcaaagtatttagagaaggttcggaagaacttagaaagattcgattactttaaaatcgagcaaatttgagaccaaaactctaacgctgatgccatggcaaaactggccttgcagaacaactttgatgaattgaacttagttccagtagagatgctaagcgagccaagcatatgtgaaacggaagacgtagagatgatagacagctctccaacatggatgactcctattatcaactatctacttgacgggaaacttctaactgacaaaaccgaggcacaaaaactattgtaattggtgccttgctacacaataattgaaggcaaactatatagaagaggttatttgatgcctctacttcggtgtgttctccctacagaagcgaacgaaatcataagagaaattcat

SEQ ID NO: 129131 - DNA, 817 bp, Cannabis sativa
aataaaaaaaattaatttttcttttaaaattaaaaaattaaaaattaaaaaacaattttaaaaaaataaaaattaaaacaaaaaaaaaccctaactcccttcttcttcttcttcttcttctctgctaaagaaaaccctaatctaaacctaaaatacatttctttcaccctctctctcttaccggaccccaaccccaaaaccctaaccgctcctctctccatagcgaactcagccatcctagctcaacttcgagtagacattctctccgagtccctccccttcatccagaaatttaggggaaagactattgtcgtcaagtatggcggcgccaccaaattagagtcgctccaagccttggtcgtcaacgacctcgtcctactctcctgcatgggactccgtcccgtcctggtccacggaggtgggcccgagatcaacctctggctcaaacggctcaacatcgaggtcaatttctgggctctggccagagatcaacctatagctcaatcggagtcgctccagtgaacaaaaacatagtctctttgatcaaccaagctagggtcaaagccattgggctctgcggcaccgacggacaggttgctcaagctttggggtttgtaggggaagtggtgtgggtggacttgatcattctctggtctattgtgaatgacggtcacattcccgtgattgcttccgtggctgctagagaattgcttcatatatggggttggatgaatgtgaagtgttttcagatttggggttctcaaatttggtttgatttttttttttgtttttgtttgtgtatgtgtgatttaggtat

SEQ ID NO: 129132 - DNA, 1416 bp, Cannabis sativa
ccttgctgttttgatactatagaaataatgggttttgattaaattaatgagaaataagaattcgagcacttgattgctgctttatgccgtatgttaatattgcatcttctattcaatctcattgtctattatgcgcctcttaatctttcttctctaaagatacagctgattacttaactataatctatttttttattctgttctcattacgtggttttaacatgcattgtgttttatcacttcaagaacaaaatttctctaaaagtgttttgtagtattgtgaaattatgtgatttatcgttctcagctttgagtttatgattataaacaataaggcttaaagctctaatatgaacaggggacatggcaacatcgttgtgtggaatggaagccggaatcggacgtgagtctttatctacttcacttgcaagggcagtagctcccactggacatttctatacttttgatttccatgaacaaagggcagcctcggctaggtaatcaatgttattatgtgcttgccagattttttagtgtaaaattttgttcaatgaacttcttaaaaattaagatatatattgtgaacttgtgatatgactaaatgcctacttgcatttggttttaagatttgactaagatgtcaaataattgaattatgttggtaatgaatgatatgcttgatagattttgttctttgaactttgtgaaatatgtgtggttcagattttgagttgtgtctacttagtttaagttgtgaaaatatgcacagggaaaattttgagaagacaggattaagcagcttggttactgttgttggagtaagagacattctttattgtttttttttttctttgttacatttatgaaatttgcaattgagttttctaagtattgcgttttaaggattggttatttggttaggttaaagtaatagctttgataagtttatccttaggagtgagatgattcttttgggtgaatgaaacttattttaaggatttagggaattcgaacactttatttgtgttttttattggatgtaaagatgaaccccaatattctaatgtttgatacatagctcaattttaagaatgtagtctatttgagattaagattgacaatattactgtgttaaaagccagcagcaagcttggagagtgagcaataaattactttgtaatctcatcatatattgtttttttttctttaattttttttttattggtattatttttgtaccaattagtagtaactggttattgttctatgaattaatggttgattctctgcaatcataatttgataatttgataatgcatgtggggaaaattacatgaaaaattgcaatgtctttatctctacagtgataattttgttaagtttgcatgatactttagatactaattcctcaaatat

SEQ ID NO: 129133 - DNA, 892 bp, Cannabis sativa
tactccaatagtaggtgggcttttccagaaaactataggcgagtcatgggtatgcccatacctgcactttagcctatctaagcttatttattttattcacaaatgggggataaaaaaattacagctgaagctctgctaaaatactctctaagcttttatatttttttaagaaaaacgtagagaaacagagttagggtttcattgtaaataccactcataatatatttaaacgcctataaggccagtatactaaatcgtgaactagagataattaacgtctgaatcccataaaatcttctgtctcatttattaaacagttatgtaattcttacagctttaattaattaatttccaaaaatctcgataaacaaagatagagttgcaactattgcaacatcagtggttagcaaaattgatacaacacttgtactagctagccttagacttttaattttaggcaatatttattttgtgtttttattagtaagggcatagcatgttgtaaagtactttaactttgttataataaaattaaattgttttttctaaactttaattttattataatatatttaaaataatttctatttcaaattaattctttattatcgtaattaatttataattattattcactactaaaaattaagaattaaggaaatattacatagaaaatataaactaacactttatttacaaaaatacttccataaggtaaagataacatttatacattttatatgattttaattaccaaaataccacttacactatcacttaaactatcacttacacaatcaaccaatggttgcagggtggttgctgcgtggttgcgcggtggttgcatcagacgatggttgcagggtggttgctaggtggttggctgaaggtt

SEQ ID NO: 129134 - DNA, 932 bp, Cannabis sativa
agaggatatagaagatgagattcatttctggagttcctctattgtgtgttatgtccttggagccaatcctcctctcttggttcttgaagggttcattagaagagtttggaatgggaaagtggataaggttggctcattgtcttatggggtatttttagtacggtttgatacagttgaaaacagggatgaggtgctaaatggaggctatgtgttctttaataacagaccagtggtgatgaaggcttggcatccggataccaacttcaagaaagaagatataaggacagtaccgatatggattcaactccctgatcttgatttgaagtattggggggagaagtcattatacaagattttgggacaattgggaacgcctttgcaagttgatcctgtaaccaaggagaggaacaaactgaattatcctagagtgcttatagaggtgtcgataaaacaagagtttcctgttcaatgggtagcaaaagatgggacatgaaacagtggactgtcgtaagaaagatgggaaaaagcaacaatgggtagcaaaagaaagaaaacaagaagcaccagctaaggaaaaaatagctgatgaagatggatttcaagaagtcagaaaggggagcaaaggcaagagtattgcagaagcagaagggacaaaagtgaacaactcatttgttgttttatctaatagcttcacgggtttggatattgtagaatcctcccatgctcaagcgcagcaaacactagcaacagtatatgatgaaggcaatatagaaaaaataagaggagggggagggcctcctgcgggaaatggataagatagtgagttggaacgttcgagggatcaatagtgaagacaagcaaaatcaagttaagagtatgattcatactcataaagctggactagttggtcttctcgagacgagggttaaggc

SEQ ID NO: 129135 - DNA, 2080 bp, Cannabis sativa
  modified_base (578)..(581): a, c, t, g, unknown or other
aaaaaaaaaaaaaaatacctctggatgtcaagtatcaccagtgtctttcaaacaaggaatagtatggactattaggataaagtctaatatgttgttcttgagttctcaacacatgagtaagaacaattaagaaataaacaataatagagtaaaggaactcttctgatttctcaaatcatttatactagttaaaaccttttaattaaaatatatttaattgtttaaataaataaataaatatctataaccaaatttggttactgatatttatgacggaatctctcaactacttaaaagaatatctcaacaacatttaaatatctataacaacttttcaaattagatatttaattaattgaattgattaaataattaattaatttaaaaaggcaaatcccatagggacaacaacatatgctaggcgcctactcttgttgtttaggacaaggataatgtcttttattctgacaacttttgtctaacaaatcttgtgttgacaaaatttgtcttaataatttttgtctttccctatttaattaaattgaaaaattatttatttattacaaaataaataattnnnnttttgccaattcaaaatagattttgtcgaacgataatatacaactctttatcccaacccttgatagtatttcaaggtggcgattcgaggaccatgaaactataattctaagctctaataaactagattatttattgaatctcatcaatcaaataatatttgtttattaattccatgactatttcactaaaattatagaattatattattgaattttactccagtgtctattgatataataaattccagtgattagctctccttatgtcggttcgtaattacttttggtcaaattatcattttacatttctaattacttctttatcctttagtattgttaattcaccaataaaagtataatttggatttaatctaaatttgtgcacaatttgatctgttaggaaagttaggattccataattatagatcatgttcccagccatttacattattagattcccaaaacataagttgtaagaatcatcttttctaagaaactttaacgagtgaataaaaaaaactaataacataaacactagttcatgattactcaagatttaggccgatatattattgatcatctttatgatatgaattaggtctatagtaagtttgataaagacaaatttattcatatcggtccttgtcatatgcaatctctattatatacaataccttcacttagatgtcatgctacatctgtaatacgaatcgagattacttgaattaaattacaacatagaaagcaatgttcaaacaatttatttcagacacggataaataaaagagtaatgtgtacaacaaattatttgaatcctattttctgtgtgttaatttttttaaatttctcaaatttttcgagaatgtcttaaataattacaatatgcacgataaaaaagaattggactaatttttttttttcaagtgttgaaacaaaaagagagtgcaccgtagaattttgcaaacttatttacagactaaaaatttgaaaaaaaaattacaaaaatatattaacacgattttttttttatttttacactttaatcttctttatttacaaaaatacttcttcattaaaaataataaatcattttttagttatttgtttaacttatttatagttgtattatagttatcaggagattttttatctggttgtttttttttattattttatagtttatttatagttatcatgaagttgaattctcgttatattttagtttttttttaagtaaaatgtaattttataattttaaaactttacatatttttataaataaaaaattttgaaaagtaaaattataataaaacttatggggcagttttgtcccatgtggcttggaataagaattctgtagggcatggtttgggccgtttggcaaagcatgcccttcggttagacaatgagctatcttggttcgaggaggtgcgccgccgattgtagattgacactttgttaatcatgtgtgattttatcaccgcgtcaaaaaaaaaaaa

SEQ ID NO: 129136 - DNA, 651 bp, Cannabis sativa
atatatatatatttatattataaacttaccataattttgagtagtcataaactcctattcacatttatcaagtctttaattaactcatcaatatctcttatagtagtaaggataacaattttttaaattaaacatttaataagctaagaacataatttaataataataaaattcaagttttgttaacggatagaatattagattccttaaggattgattctaaagttgaatagttattgtatataatttacaatataattataaatcaaggtgtatttagttggaatgagtgaaaatatagaaaaatgaaaatggaaataaaaataaaaatagaatcaaatttaaaatgtataaaaaaattattaattttttttagttttgcattgaaatgatcatttttttcatttcaaaatacaattttcattctactaaaatgataaaaaaaatcattggaatgacactccaatactttaaaatacaaccaaacaaaagagttgaataaaaaaaaaattcttttctattttattacctccaactaaacatgacttaattgttgtaagtgaattaaatgtactcaaggaacaagagataaatagaagagtatactactttaattgattttatcaatggattgactatctatatctatat

SEQ ID NO: 129137 - DNA, 1262 bp, Cannabis sativa
  modified_base (1182)..(1214): a, c, t, g, unknown or other
aaaaaaaaaaaaaaaactagagtatactacatataatttgtaactaattagtaattaactttactctaaattactatacaataaccatcgctcctcgtgcatccctgatttacccataacgaaaattaacaaaaaaaaaattctaacaaccaaatttaagagaaacttaaatcaaataacttttcctaattctactaaaattttgacatcataacagctaaaattgaacattttaaaaaaaaaaattaaaactattaacaataacaacaaaaaaaacaattcaaattaaacaagataaaacaatcacaaaaatatttatcaatacaaaatactacaaaattaaatgtctattacctttagccataacataagaataatgatttataattagtcataactttttcactttcagttacaaattttattatgactaaaagtaaaaaaatttgtagtaaatactaaatttatactaactcaatctcaatttttttaatctctttatacttataaatctgaacttttccttttctttaatcactttatttttcttttttgtttaataaatctcacttttttttttaaaaaaaatatatatatatatatctctctcaattttttaatcttattatatatataacacttttacatttttttttgcaattttgtatttaatttgaactttttcctttttaattcactcttttttttatttcttttataaatctccattttctagtgtcaattatatataacatttttacaatttttttttttttaaaatctaaactttttctttttgcatttttagaatatataatataatatgctatgaagatatagatatgcttcaatttattcaatatttattaatttatccttttaatgtattcatcttcccgctgtaatcatagtgtagaattacaacttgtgtgaactaattaatatcagtgttagaataagatttatataactatatttcgaccttattaaatttatctgatcatcctctttttcttttatcattttattattttcaatattttttttagttgtgatttgtcttcctatagatacgacaattcctatgtactactgcaaccgctaaaaaatttattgggtgatattaatataagtaaaagggttaattgcggtataaatacttaatgtttcagattttatacnnnnnnnnnnnnnnnnnnnnnnnnnnnnnnnnnaaatacctaatgttacaattctcatacaccgtcactaccacttccgtt

SEQ ID NO: 129138 - DNA, 731 bp, Cannabis sativa
ataactaatcagattgtaatggattttatttagggcacaaaacccaacaattactattattgatatttagctacagttatttcttcagtcaatatatttatgtgtacttaaattataattctatcagttattttttaattatatttattagaacctaatctcagtatgtttttgtgtttttttgaaggtaatttaatttccggtggttcaagcagaatgtattgcgactgtgatgactttggattggattttttctctaggctatactgttgatattgttgaaactgattgccttacagttgtgtctgcttttaataagaggcaatattttttcaatgatctaggatctttgttggttgatttggcaagtttgttgtccaaatttctaagagtattcctaattcatgttcgtcgaacagtcaatgtgactgtgcatggattagccgtgcatgccattcagatagataaacaatttgtatggttagacaactttccttattggctttaggattcgtaagttcttttgtttttgtaatcaaatattctatttttgttcaatggtatgttcattgttttttttttaaaaaaagaaaaatgtaaactgtttgaaaaaaaaacatgtgatgcatgtgttagaggaataataacactcacacacatgatatatatatatatatatatatttataagaaaattctacaatgcacactcttaaaatggatatattgatg

SEQ ID NO: 129139 - DNA, 820 bp, Cannabis sativa
tagccagaggtacgattctagagagggggcctttaccgatgaatcccataaaagcaatatcttcatacccacctcgctatcagacgaagagattcttatggatagggctcaagaaggctcactaactaccggtgagatggatcacattgtacaatagttagcggaaccaatcaccttagaggtgcgggatggtgaatccatagtgtttgcctaaggtaatttttcttatccaggaattgccctagacgtggaagttgaagagatgggcgaggactttaaattacctgatccagaggttgaagatcattcagatggtgagggcagtgaaacaaattcagtggacaatgctcagttagacaagcctttttcatgcgaggacctagtcttgcgggttaaaaagtctgatctatcaaaatttgaaagactgaatttaattcatactgctacctcaaaacccatgtcaatgcaacgacctcgtcttttgttcactaaccctgtaattatcccagctcaaaatgttgtggtttcaattcccattctttattgtggggtgatgcttcctttccaccctttttgtaaaggctatcttaacgcactacgacttttcccctttctagcttacacccaacaattatcgcataatccttagattctacgcaatgtatatggaatacacgcgaggagaacccacagtcgagtattttatctattttttatgatataaaaagtgttggtcatgataatggcttctactgttttagcaaatgggccaattttgagataaatggggtagaaggcatggtttccaatatgggggatt

SEQ ID NO: 129140 - DNA, 1207 bp, Cannabis sativa
aatacaaaaaatgtgggaaaatatttactggttgattttgattgttgttgatgatttaatggttaaaatgattctagaagataattgtgtttatttggatcgttttctcagttggcactatttttctcagagtgcggtttgatattttaaatttaattcaatcagcataatagtttaaatttaatattgagttgtatcagttactttaaattagttttttttatattatttttttttatttctcaataataaattaaaataaataaaataataaattagaagaaaaaatttgtatgataaaagaaatgatttattttgtcttaaattatattttatctatagatatatataataataatagtatataaatttaatttattaaatttttaaatatatttatataatatgtattagatttttttttttgagaagtaatgtgtattagattcttaaattattattttttgtattaaaatattaattgtaaatataatttgttttaaaaaaatatataaatatgtgtaatttgaattgaattgattacttttatatattaattaacatctttataatataatgaatacaaataaataaaatacaataacaaaaaatataagataaacaaaccggttatatttatcatctaattaaaaatttgagataaagaaattgattatgtaaagcaaccaagataaaaacttacacacaaaaactagttaaattaaaaattagttccttaaattaaataaatgaaaaatcagttcctgaaataactaaattaataatgggttccttgaattaattaaatcaaaaactagtttctaaaataataattcaataatcgttttcttaaataactaaacccaaaaccaattgagaaacaacacagataaaatacaaacacgatctttgcaacgtagtatgaaacatatggtttgggccaatctttaaatatgttagcaagcaaaaaaaataatattaagaaaatattaaataatggttaaaattaataataaaaaaaaaagttatatacaaacaaaaaagaattagttcaaaaaatatcgagatataaattaaaatagaaccgtttccataacaaaataagtataaacaaataatacaataattctaattaaaaataagaaggaataagttctaaaaatactgagacataaattaaacagaatcagttccacaacaaaatgag

SEQ ID NO: 129141 - DNA, 1423 bp, Cannabis sativa
tttttttttctatatcattaaaattatattatttttattttctacacaattaaaataataatttgctaacacatatataatacaaataaataaatattatatatataattaaaataaatttagagtaacaactattgattctctatatttaaatcaagttgtattggttttagtagtgcatatgtattatatatgagatatgcaatctagagaagttgatcgacggtatttgttgggcttcattctttcactttgtcggctcgctacttcaccttgactcccacattagtatgatattattcactttgggcctaagcccttacaattttatttttggacaccttcccaaaaagcctcatacaaatgaagtaggtggaacacttatatccaagacaactcttgtattcttctaatatgggacttgggttgataccccaacatcctctcctcaaatcaaagaccacatactcgtggcctcccctccagcgaaaccacaccttatgctgctactatcaccaacagaacttgtcacctgattatcacctttataaggaggactttcgacacaagttctaacaccgatctccatcttataccgccgtaatcattaacggaacacgccacttgactaccttaatattaagtagactttcgatacaaggcaccatgagatcttcaatcgcaaggtcatcacattgagagcttgttctacacatcacaaatgcatctcactatcccagtgcttctaaacctttggctttgataccacttgttgagaaaaacgataaacttcaagcacggtgaaataacaaagaaacaaagtaaaacaatttactcagtttgctgaaactaccaaacctacaaagagcgataaatttcacttatcacttcaaaattacatatactctctatctcaatttgtacacccaaatcccaatacaccattttcttcttcctcactctcaccacacaataaactcacatactcttctctttttagctattttttttaaaagatctctaattttaaaggaccctattgtgagtgctctaatgtgaaaaataaaattgagagaatttagataaagaaataaatctgttatattattgattaatgagcttagctcaacatatatacactgaggagccaatcacattaggcactaataactaactatgtcctaacatcccctttcaaacttataggagagtgaagctgaactctaagttggctcatgattagaagaaactgagtactagacagagcctttgtgaatatatctgcaattctatatgcaaatcaatcgtgtgagtgaacatgcttgacaacagttggacatttgcacatcttttcccttacaaaatacaaattcaatataagataattttaatataatattttaaattaaaaagataatgatat

SEQ ID NO: 129142 - DNA, 540 bp, Cannabis sativa
tacttttgacctataggcactctattttttttttgaacattaatacagtttggccctacagatttttattatggatgtatgaccgactaggcggtctttaatcgtcgctatcttcttatttccttgacatgtaagcatccagatttactttttcttatggtaagctgatgtgtgcctacaccaaatttagaggcaggtttagtagcttataataagcattaaaatttttctacataagttctctatgctagttcaatgtattatacggtgtgggtgccccataagtgatcacgttgacttacggtctcttggtcacctgcaattcaccaagtttcataaaccttgcctgggaattttcttggggtgctacaatttaacggatgtggaactgaaaaaaaaaggacaactttaagaagttattcttcttaacaagtggtttagacataacatattttaacataaacatgattttttattcattaattagtctttgttattgtgcaactcacataaaaaaaaaattgaatctacaagcttaca

SEQ ID NO: 129143 - DNA, 2052 bp, Cannabis sativa
cgcccccacttgatcacctcatggacatcacctagctagtatcgtgccatcttggttgacacgctacgttctcccccactttaacatgtcgatgtcctcattgacggaccacaagcaaattttcctgattttgactccgtagaaccatccttttggtgacgatctcccacgcctgctcttggacttgatcaaagaacctgtgccactgtcgctattcagattcacccatggactagtgcctccgcactttcctccaacatgaattccttccaaaccatcacatcgtccctccagtctaccagctagcccttgcaacactaactctgaagcttacacatcctcagatagtagctcactcgctaactgtccaatgcatattctttttgacaaggactaagtatggtgcaacaattagggtgaggttcgcaaacccaccgtaccccattgcacgtacaaaacatgcttctactaaagccaagtctctctagaaacttcacacgataactccatggcacaccatcctccttatggcaatcgaccacgacactcttgtcacaggtcaaaatttgaggcggtgctcctggacgaggctcgcaagccaattgcacccaatgcaacacctaaagcactcttgcacccaaaaccttcgcgaagtactcgatactggccctccatccctaacgcacacccacgacttcatgcaaaaggtccctcttacccaatgcaaaactgctcctctgagcttctaaaaaagtggccaatgatctagcaaccattcaaaaccacaaattcgcccttttgtttttgctcctgtcaactctctaacattgtgtcacaagttcatcacccaaatccaccttgcatcctctgagaactcgctaaattttgacaaacttgctaacacgatttcttactgttaaggcttgaagtcatcccaattcgctatctcccatcgacatatgctctttgaaccatccggcttacaatgtcccatacaacattagtgttcctataaatacaaagcacacacataacatgttgcaaactagttcaatcttgatctcagcctatgcccatgcatattgtctatctgcagcttgcaacaatcatgcatgtcttcgcactgaacaacccatctgttgtagtattttcctctggattcacacaccaaaactgaacaagtacactggttcttcaaatatatgaatttgtaggctcctccacttaacttgggaaaaacttttctcttagaagcatatctcttaaggtatagattgcaagctaattgcacactcacatgcgatccctccattacacatgtcactttgatgaagatgttgaactagtgcctggtcatactgactctttgcccctcgacattaatatgtttccttagtacctgagtcctgctaactttcaccttaggcaaacattgccatggtgttatcttagtacttgaattctgctaactttcaccctagataactggcactgcctgtgtcctgagtcttcttgactttacattctgaacaacaatctatctccatgatactcatctcgattcttgtaacaaacaactggtttgctgattgaactgtgaaggtctctcccccacttcatttgttggcgtcctcgacaacatgcccacatgcgaatgcctgatagccctaactcttcatgcacttcgttgcaatctagaagggcttgactctcgagttaactatctcatgcagcatgcctatcgatttcaacatacgtgcgtagtccacccaaccatccatctaattcacactagcatcgcgcccctcagggcttccctaaagtactaagttccaatggtgcatccctctggccttcatgcaaactccagcacccctcttgaccttcgtaggctcacatgaccactaagtctcactggcacaaatctccggtctccattcgaactctagtgtcatctcaacacttacgctcagtcttcttagccctgctggcttctttgatgcattcattccacaactcagcatctctatcgatgcctttgtgtgacttatg

SEQ ID NO: 129144 - DNA, 1090 bp, Cannabis sativa
  modified_base (47)..(57): a, c, t, g, unknown or other
tagaggtatactttattaatacaggacttaaaaaatgtataactaannnnnnnnnnnaggttattcttatttataactgatccaaattaggacttaatttgttctataataaattagaagttattcttgaatagagtattcttaaatagaaattctactgtatatatatatattgatttgttcataaaaattaaataattcacattatcaaaaataaaatttaaatattttattgtgtttcttataggagtggtaaattatttgtactttatttttaagatcgtaaattattgagaatttttttaaaaatttacattctaaataattataacatacgctattatcatacgctattataaaaaaaaaaataaataaataaatagaaaaattctcttcaacatgtaaacacatgtgtcaatctactaaaaccccttactataaatttttcctatgagttttatttgcactacaaaaaaattataaaagtacttgattaacgctcaaatttatttactttaaaagctataatgtttttctttttttttttaggagaaaatctcagtcaccaaacactaaaaacaataagcactcaacaaatataaggatgcaggtttattcaaggataccatccgctatcaacatgttctgaatacaattgagattctctaaccactaaataataccactacttattgatttaaaagctataattgtatatataaattaattttattaaaatattttcataattttaattgtaaaattattttagctaaaaatgtttaatttgctttaattttgtatcaattttagatttgaagcaaaaagaatcaattaatatagtggaacatctatttaagaatattcttgggaccaataaaattatattctaattgaaagtttataactaaatagaagtatactagaaaaaataaaatcaaaacatcaaaaagtatcaaatgtaacaacaataacaataagaaaaacttaatactatttatatatatgggtgcactcttaatgggtattatccatgaatgagtaaaattagaaaattttgagtttttatgcttaatttttttatctaatt

SEQ ID NO: 129145 - DNA, 660 bp, Cannabis sativa
  modified_base (630)..(634): a, c, t, g, unknown or other
gctaattgcctttactaatccacattactagagcggtcattacaaattgtgtggcaaatatctttgagaggcgaagaccaactcgaggagattctcgagggttcgaatcaaaaacgacaataagtgggtcaaggagaactcaggggaaaagttagtcatctaagtctcgcacaagggaaaatccacgacaaagggaaatgagtcctcctcgaaattattaaggtaaataagaaagtattaataatttacaaagttacaagtctgatagcatctcacctacgagatcggtgagtaattatactataagataagaataatgtcatgatactcaagataaactagacattcgagaataactaaatcaaaggtgattggatttgcatgagcaaacatatcaaaatgctttggatctctaagaaaggctaaaccaaagcacacccaatttgtgagagcaagttaatcaaccagttgatgactcaattctattaagagtcatacaattagaagataagtatagaaggtaccaagacgggtaatacaaaaaattacctggatatgactcctacgaggagactgagccattccatccagatgtttcctaaggggattttgttaggttttatgccctannnnnaactccatttcaatgtaatctatttt

SEQ ID NO: 129146 - DNA, 617 bp, Cannabis sativa
  modified_base (26)..(40): a, c, t, g, unknown or other
aggatgttaataaaacatacttggtnnnnnnnnnnnnnnntggtaaaatatttccaacaggatctacaccagcctacagattatgcagtgtcgctttattgtgataattagtctactattcgtctagctaaaaatctaatctttcatgcatgaacaaagcatgtggagatacattaattatcactttattagagagaaagtactccgagaagagctagtgatgcaccaaataaagagcaaagaccaagtagaagacatattcactaaaggactcaacactgtaagatttcagtttctcagagaacaactcagtatgatgagccgatgttgaggaggaatgttaaaagttcaacacctctcctctacaataagtatccagaattttctatcattttagtaatattataaaatcatctagaatcatagaagttataagaagttttaagaaagttttaggctataaaataatgacaatttgctagaatattctagcataaataatgcaccatcactactacaaaaggccaaattcgcgacggtcccaaaaacgctttttttggggatccgtcgctaaaaaaattatctgagtgtttaaaaccgtcgcctatattgtacta
